United States Patent Application Publication US 2008/0104729 A1 - sequence listing, part 2

SEQ ID NO: 5289 - DNA, 494 bp, Arabidopsis thaliana
  unsure at all n locations
  Clone ID: LIB22-013-Q1-E1-F2
cggcccggtccaccaattaacgggtccacncacgcgtccggntatcagtatttcagctctgaccagggtagtaattctttcgattgttcggagtttggttggagcgatcaagctccgataactcccgacatctcttctgcggttatcaacannaacanctcagctctgttctttgaggaagccaatccagctaagaagctcaagtctatggatttcgagacaccttacaacaacactgaatgggacgcttcactggatttcctcaacgaagatgctgtaacgactcaggacaatggtgcaaaccctatggacctatgggagtattgatgaaattcattccatgattggaggagtcctctgaagaaattcaatttcaatgtnaataaagntgcatgtttgttaatttcccgcatcgttccgtttatcaacctccaaaactttctaaagtccgttactgcatcctcctctgctgtctctgtccgtccctcccaaga

SEQ ID NO: 5290 - DNA, 514 bp, Arabidopsis thaliana
  unsure at all n locations
  Clone ID: LIB22-013-Q1-E1-G5
acttctncgccgcccggtacaagtccanaaattcccgggtcgacccacgcgtccgcaccactctctctctaatctatctatccgagaatggccaagatgggcttgaaacccgacccggctactactaaccagacccacaataatgccaaggagattcgttacagaggcgttaggaagcgtccttggggccgttatgccgccgagatccgagatccgggcaagaaaacccgcgtctgccttggcactttcgatacggctgaagaggcggcgcgtgcttacgatacggcggcgcgtgattttcgtggtgctaaggctaagaccaatttcccaacttttctcgagctgagtgaccagaaggtcctaccggtttcgcgcgtagccctagccagagcagcacgctcgactggtgcttctcctccgacgttagtttgtgccttaagcgaacggctgggaatgtttcccccgcaactcgaacctaatcccggcggaaggaagcggcggctcctttttacaa

SEQ ID NO: 5291 - DNA, 478 bp, Arabidopsis thaliana
  unsure at all n locations
  Clone ID: LIB22-017-Q1-E1-D4
ccacggtcacaaatccggggncgaccacgcgtccnaaanaaacagagaaaatgtgtggcggtgctattatttccgattatgcccctctcgtcaccaangccaagggccgtaaactcacggctgaggaactctggtcagagctcgatgcttccgccgccgacgacttctggggtttctattccacctccaaactccatcccaccaaccaagttaacgtgaaagaggaggcagtgaagaaggagcaggcaacagagccggggaaacggaggaagaggaagaatgtttatagagggatacgtaagcgtccatggggaaaatgggcggctgagattcgagatccacgaaaaggtgttagagtttggcttggtacgttcaacacggcggaggaagctgccatggcttatgatgttgccgccaagcagattcgtggtgataaagccaaactcaacttcccagatttgcacaatcctcctcctcc

SEQ ID NO: 5292 - DNA, 481 bp, Arabidopsis thaliana
  unsure at all n locations
  Clone ID: LIB22-017-Q1-E1-H1
acggtcanaaatccgggtcgacccacgcgtccgaggacgcgtggggacaaagaagaaaaactaaaaaagagaaccccaaagaatcgaatatttattatttcgccccgaagattctatttctgatcatttacacccctaaaaagagtagagctttcgtgaagccaccatgtgtggaggagctataatctccgatttcatacctccgccgaggtccctccgcgtcactaacgagtttatctggccggatctgaaaaacaaagtgaaagcttcaaagaagagatcgaataagcgatccgatttcttcgatcttgacgatgatttcgaagctgatttccaagggtttaagggatgactcggctttttgactgcgaagaccaatgatgatgtcntcgtcaatgttaagcctttcgtcttcaccgcaactactaagcccgttancttccgctttcgtctccactgtaggttcancatatgccaagaa

SEQ ID NO: 5293 - DNA, 417 bp, Arabidopsis thaliana
  unsure at all n locations
  Clone ID: LIB22-024-Q1-E1-B6
tatccgagaatggccannatgggcttgaaacccgacccggctactantaaccanacccacaataatgccaaggagattcgttacagaggcgttangaagcgtccttggggccgttatgccgccnanatccganatccgggcaataaaacccgcgtctggcttggcactttcgatacggctgaagaggcggcgcgtgcttacganacggcngcgcntgattttcgtggtgctaaggctaagaccaatttcccaacttttctcgagctgagtgaccagaatgtccctaccggtttcgcgcgtanccctagccagagcagcacgctcgactgtgcttctcctccgacgttaagttgtccttcagcgactgctgggaatgttcccccgcanctcgagcttatctccggcggangaaggcct

SEQ ID NO: 5294 - DNA, 446 bp, Arabidopsis thaliana
  unsure at all n locations
  Clone ID: LIB22-024-Q1-E1-D7
acgcgtccgnagattcgagatccacgaaaaggtgttagagtttggcttggtacgttcaacacggcggaggaagctgccatggcttatgatgttgcggccaagcagatccgtggtgataaagccaagctcaacttcccagatnnnnnnnnnnnnnnnnnnnnnnnnnnnnnnnnnnnnnnnnnnnnnnnnnnnnnnnnnnnnnnnnnnnnggcgaagaaggtctgcgttgtctctcagagtgagagcgagttaagtcagccgagtttcccggtggagtgtatangatttggaaatggggacgagtttcagaacctgagttacggatttgagccggattatgatctgaaacagcagatatcgancttggaatcgttccttgagctggacggtaacacggcggagcaaaccgagtcaancttgatgantcccgtttttcccccgggggg

SEQ ID NO: 5295 - DNA, 482 bp, Arabidopsis thaliana
  unsure at all n locations
  Clone ID: LIB22-037-Q1-E1-D3
agcctgccgttcggtcgcnaattcccgggtaaacccacgcgtccgcacaactctctcnctaatctatctatccgagaatggccaagatgggcttgaaacccgacccggctactactaaccagacccacaataatgccaaggagattcgttacagaggcgttaggaagcgtccttggggccgttatgccgccgagatccgagatccgggcaagaaaacccgcgtctggcttggcactttcgatacggctgaagaggcggcgcgtgcttacgatacggcggcgcgtgattttcgtggtgctaaggctaagaccaatttcccaacttttctcgagctgagtgaccagaaggtccctaccggtttcgcgcgtagccctagccaagagcagcacgctcgactgtgcttctcctccgacgttagttgtgccttcagcgacggctggggaaatgttcccccggcagctccgagcttagtctccggcnga

SEQ ID NO: 5296 - DNA, 450 bp, Arabidopsis thaliana
  unsure at all n locations
  Clone ID: LIB22-039-Q1-E1-C8
acgcgtccgcaaaatctctccctccgttcataaacccagatcgaaatttatggttttgtaatttttttaccggcggttatggagacggaagcggcggtgacagcgacggttacggcggcgacgatggggattgggacgaggaagagagatctgaaaccgtataaaggaatacgaatgaggaaatgggggaaatgggtggcggagatacgggaaccgaataagagatcaaggatctggttaggttcttatgcgacgcctgaagcggcggcgagagcttacgacactgctgttttttacctccgtggtccttcagcgaggcttaattttccggagcttttggctggacttactgtttctaacggcggangaagangtggtgatttatcggcggcgtatattangagaaaagcggcngangttggtgctcangttgatgccgcntggaaccac

SEQ ID NO: 5297 - DNA, 504 bp, Arabidopsis thaliana
  unsure at all n locations
  Clone ID: LIB22-039-Q1-E1-D2
tgtttacgcctgnccgtacngctccanaaattcccaaggtccacccacgcgtccgggcagccacctcaagaagaagtgcctaaccacgtggctacaaggaagccgtacagagggatacggaggaggaagtggggcaagtgggtggctgagattcgtgagcctaacaaacgctcacggctttggcttggctcttacacaaccgatatcgccgccgctagagcctacgacgtggccgtcttctacctccgtggcccctccgcacgtctcaacttccctgatcttctcttgcaagaagaggaccatctctcagccgccaccaccgctgacatgcccgcagctcttataagggaaaaagcggcggaggtcggcgccagagtcgacgctcttctagcttctgccgctccttcgatggctcactccactccgccggtaataaaacccgacttgaatcaaatacccgaatccggagatatatatcaaattaatatacatgttagtttgttt

SEQ ID NO: 5298 - DNA, 487 bp, Arabidopsis thaliana
  unsure at all n locations
  Clone ID: LIB22-055-Q1-E1-A5
cccgccgtagcccccaaaantnaaangcccccggccntccgaaancgncngattancnnntncanctgaaactcgagttaagaaccggaaacagaatccaattcaaccaaaccgaatcgaaccgaaccggagtttttatccaatggtgaagcaagcgatgaaggaagaggagaagaagagaaacacggcgatgcagtcaaagtacaaaggagtgaggaagaggaaatggggaaaatgggtatcggagatcagacttccacacagcagagaacgaatttggttaggctcttacgacactcccgagaaggcggcgcgtgctttcgacgccgctcaattttgtctccgcggcgggcgatgctaatttcaatttccctaataatccaccgtcgatctccgtanaaaagtcgttgacgcctccggagattcaggaaagctgctgctaaattcgctaacacattccnaggacattgtcaagggaagaaagaaa

SEQ ID NO: 5299 - DNA, 401 bp, Arabidopsis thaliana
  unsure at all n locations
  Clone ID: LIB22-061-Q1-E2-F6
atttcacaattttcttgtgattttctctcagtttcttatttcgtttcataacatggatgccatgagtagcgtagacgagagctctacaactacagattccattccggcgagaaagtcatcgtctccggcgagtttactatatagaatgggaagcggaacaagcgtggtacttgattcagagaacggtgtcgaagtccgaagtcgaagccgaatcaaggaaagcttccttcttcaagattcaaaggtgttgttcctcaaccaaatggaagatggggagctcagatttacgaggaaacatcaacgcgtgtggcttggtactttcaacgaggaagacgaagcagctcgtgcttacgangtcgcgggntcacgtntccgtgggccgcgatgcccgntaccaaagt

SEQ ID NO: 5300 - DNA, 410 bp, Arabidopsis thaliana
  unsure at all n locations
  Clone ID: LIB22-068-Q1-E1-F12
tctctaatctatctatccgagaatggncaanatgggcttgaaacccgacccggctactactaaccagacccacantaatgccaaggagattcgttacagaggcgttaggaagcgtccttggggccgttatgccgccgagatccgagatccgggcaagaaaacccgcgtctggcttggcactttcgatacggctgaagaggcggcgcgtgcttacgatacggcggcgcgtgattttcgtggtgctaaggctaanaccantttcccaacttttctcgagctgagtgaccanaaggtccctaccggtttcgcgcgtagccctagccagagcagcacgctcgactgtgcttctcctccgacgttagttgtgccttcagcgacggctgggaatgttcncccgcaagctcgagctt

SEQ ID NO: 5301 - DNA, 465 bp, Arabidopsis thaliana
  unsure at all n locations
  Clone ID: LIB22-083-Q1-E1-F7
acgcgtccgagacccacaataatgccaaggagattcgttacagaggcgttaggaagcgtccttggggccgttatgccgccgagatccgagatccgggcaagaaaacccgcgtctggcttggcactttcgatacggctgaagaggcggcgcgtgcttacgatacggcggcgcgtgattttcgtggtgctaaggctaagaccaatttcccaacttttctcgagctgagtgaccagaaggtccctaccggtttcgcgcgtagccctagccagagcagcacgctcgactgtgcttctcctccgacgttagttgtgccttcagcgacggctgggaatgttcccccgcagctcgagcttagtctcngcggaggaggcggcggctcgtgttaatcagatcccgatgtcgcgttctgtctacttttggacctgatggggatcggtaacgtacgtcgtggtcagcctcctccct

SEQ ID NO: 5302 - DNA, 438 bp, Arabidopsis thaliana
  unsure at all n locations
  Clone ID: LIB22-008-Q1-E1-F1
aactactaaagccccgttancttcngctttcgtctccactgtaggttcagcatatgccaagaaaactgtagagtccgctgagcaagctgagaaatcttctaaagaggaagaggaagaatcaataccgagggattangcagcgtcnttggggaaaatgggctgcggagatccgtgatccgaagaaaaggctcccganaatggcttggaacattcgacactgctgaggaagcagcaagagcttatgatgctgcagcacgcagaatccgtggcacgaaagctaaggtgaattttcccgangagaagaaccctagcgtcgtatcccagaaacgtcctagtgctaagactaataatcttcagaaatcagtggctaaaccaaacaaaagcgtaactttggttcaacagccaacacatctgagtcancaagtactgcaacaactc

SEQ ID NO: 5303 - DNA, 446 bp, Arabidopsis thaliana
  unsure at all n locations
  Clone ID: LIB22-063-Q1-E1-A3
nnnggntcgnnccacgcgtccgttctcatgtcttcttctctcctcgacctttgagggtttttttgttcgttgtgatggcgagagaaaagattcacgatcaggaagatcgacaacgcaacggcgagacaagtgacgttttcgaaacgaagaagagggcttttcaagaaagctgaagaactctccgttctctgcgacgccgatgtcgctctcatcatcttctcttccaccggaaaactgttcgagttctgtagctccagcatgaaggaagtcctagagaggcataacttgcagtcaaagaacttggagaagcttgatcagccatctcttgaagttacagctggttgagaacagtgatcacgcccgaatgagtaaagaaattgcggacaagagccaccgactaaggcaaatgagaggagangaacttcaagggacttgacaattgaaga

SEQ ID NO: 5304 - DNA, 484 bp, Arabidopsis thaliana
  unsure at all n locations
  Clone ID: LIB22-016-Q1-E1-C1
catttacgccgcccgtaccggtccaaaaattcccgggncnacccacgcgtccggttcaagaaagtcaaagatggacgacctaggattgctgttagganatgattggattcggaaacacaatgtcaaagtgaaacaataccatatgaattatcagagaagctcatggcataagatgctggggttgctgaaggtggataatactgcancaggcatgaacggtttggggaagaccatgaaggagaacctgaagcagttcaatattcagtttgatgagatatgtaaagtgcattcgacgtgggtantgtttgacgagcagctgaaagaacagctaaanatctcactggccaaacttttggtaccggcatacggggagcttcatcngcangttccaaaaaaccttggngacatanggaaaaaacgcagacaagttacatccaagtatggannttgatgacatntangcncctnattaacgaagctgttc

SEQ ID NO: 5305 - DNA, 497 bp, Arabidopsis thaliana
  unsure at all n locations
  Clone ID: LIB22-021-Q1-E1-G2
ctgctngtaccggcccgaaaattcccgganccacccacgcgtccggagtaattctatggatggagagatgagttcggcgtcgtttaatatcgaatcgattttagcttctgtgagtggtaaagatagtgggaagaagaatatgggtatgggtggtgatagacttgctgagcttgctttgcttgatcctaaaagagctaaaaggattttagcgaatagacaatctgcggcgaggtcgaaagagaggaagattaggtatactggtgagttagagaggaaggttcagacacttcagaatgaagctactacattgtctgctcaagtcactatgttacagagaggaacatcagagctgaacactgaaaataaacacctcaaaatgcggcttcaagctttagagcaacaagctgaacttanggatgctttgaatgaagcgctgcgggatgaactgaaccgacttaaggtggtaactggagaaatccccaaggggaatggaaatt

SEQ ID NO: 5306 - DNA, 473 bp, Arabidopsis thaliana
  Clone ID: LIB22-027-Q1-E1-G7
ggtaccggtaacacaattcccgggccgacccacgcgtccacaaagatagataaattttaaaggcatatttttttcatttcgactcagatgggttttgatgatacatgcaacacaggtcttgttcttggattaggtccctcaccaattccaaataattacaatagtaccatcagacaatcctccgtttacaagctcgagccgtcgttgactctatgcctctcgggcgatccctcggttaccgtggtgaccggagctgaccagctatgccgtcagacgtcatctcacagcggagtctcttctttctcaagcgggagggtggtgaaaagagagagagacggtggcgaagagtcgccggaggaggaagagatgacggagagagttataagtgattaccatgaagatgaagaaggtattagtgctagaaaaaaacttaggcttacgaaacaacaatctgctcttcctgaagaaaacct

SEQ ID NO: 5307 - DNA, 477 bp, Arabidopsis thaliana
  unsure at all n locations
  Clone ID: LIB22-031-Q1-E1-E9
acgcgtccgctgagatctcgttaccttaaaccaacacaacaattgcttgatgaagttgttagtgtaaggaaagatttgaaattggggaataagaagatgaagaatgataaaggtcaagactttcacaatgggtctagtgataacattacagaagatgataaatctcaatcgcaggagttgtctccttcagaacgtcangagctacanancannaagagcaagcttttaacaatggtggatgaggtagataaaangtataaccaataccatcatcaaatggaagctttancatcgtctttcgagatggtaacaggtcttggagcagctaagccttacacatccgtagctctgaatagaatctctcgccatttccgctgtttacgcnacgcgataaaagaacagattcaagtgatnnaganggaancttggggagagagagacttctgatgaacaaggaganaaggtaccgcgtcctaa

SEQ ID NO: 5308 - DNA, 442 bp, Arabidopsis thaliana
  unsure at all n locations
  Clone ID: LIB22-001-Q1-E1-G4
angcctncgnaagaattttncccncncncgtcgaaagcaaaacagtctcctttctctatcttctgctcatatcagccattgacacagttgctttgggtttccctcaaacggcgccgattgtctggattttgaccactgatggccttagatcaatcttttgaagatgctgctttacttggagaactctatggagaaggtgcattttgtttcaagagcaagaaacctgaacccattacagtctcggttccttctgatgatactgatgattcgaattttgactgcaatatttgcttagactcggtgcaagaacctgttgtgactctctgtggtcacctcttttgctggccttgtattcacaaatggcttgatgtacagagcttctcaacaagtgatgaataccaaagacatagacagtgtcctgtttgtaaatctaaagtttctc

SEQ ID NO: 5309 - DNA, 416 bp, Arabidopsis thaliana
  unsure at all n locations
  Clone ID: LIB22-004-Q1-E1-D10
cgattctctggtttagacaaaacagcaatcgagtctcttcctctgtttagattctctgctttgaaaggatcaaaacaaggtcttgattgttctgtctgtttgtctaaattcgaaagtgttgagattcttagattgttgcctaagtgtagacacgctttccacatcggatgtatcgatcagtggcttgagcaacacgcaacttgtcctctttgcagagatagagtctcaatggaagaagattcctctgttctcactaacggaaacagtttcaggttcttgaatcagtctgagattagagaagattcgagcttggagctttacatcgnnnnnnnnnnnnnnnnnnnnnnnnnnnnnnnnnnnnnncttagtgggtcgtcgagattcaacatcggagagagtttccggaagattctgaa

SEQ ID NO: 5310 - DNA, 437 bp, Arabidopsis thaliana
  unsure at all n locations
  Clone ID: LIB22-033-Q1-E2-A9
gatgaatcattacttctgtaaatgaaaatgccagcttttgatcagatgtttcagacatttggtccatttgggaaagtacttctttctctcgaacctactaaatataaagataagacctcacatgtttttgattttctaaaatagggggaaaaagtacaagacttttcaagctatgtccttgattaagtctagtgatatcctcaataagaaatgttttgagaacaccattgggatctaaatttgatctctgatgatttactttaatgttccaattanatatgtttttgacagtatgcaagataccatagatcgttatcctgaggcatactaaggntcgagtcancaccaaaccggtttccgaaanaaaatatgcanggttaatccttaagatctccnngccnaaaatanaaattctggcaaattaaaacttttacaaa

SEQ ID NO: 5311 - DNA, 402 bp, Arabidopsis thaliana
  unsure at all n locations
  Clone ID: LIB22-016-Q1-E1-D12
aatttctcatcaaactccacttttcttctttttaagagaatctagggtttcttctactacttcttctttcttctttaggtggtcaaatttccaagttcttcttttagctctctcttttgtttccaagaaacctgagaagaatttttgtagatatgggaagaggaagggttcagctacggcggatcgagaataagataaggagacangtganattttcaaagcgaaggaccggtttggtaaagaaagctcaagagatctcagtgttatgtgatgctgaagttgctttgattgttttctcccccaaaggcaaactctttgagtactcngcngggttccagcatggagagaattcttgatcgatatgagaggtctgcctacncnggtcaagatantcctacacca

SEQ ID NO: 5312 - DNA, 330 bp, Arabidopsis thaliana
  Clone ID: LIB23-030-Q1-E1-C10
gcggccgcccttttttttttttttttttttttttttttttttttttttttttttttttttttttttttttttttttttttttttttttttttttttgacatgttaaccccttcgcaatttccctttgatcggatgatcctaaattacaagaagtgcacaaaaatcactagagaaaaagcaaaattacaaattcacccgaaatcattattcccgcccagacttaacccttccttaattgccctttcacccttcaattttaactttattcccattttgcccccctcggttttttccacagagaggaacagagcatctaagcaaagccaaaag

SEQ ID NO: 5313 - DNA, 415 bp, Arabidopsis thaliana
  Clone ID: LIB23-074-Q1-E1-E7
caaacgcgtccgcgctcatcaacctcaacaatctctctcctctctctctctgtatatagaagaatctccattgtctttaatttctctccatttctctttctctcttccttcaaagttttctcttttcttgatgggtttaagagagtaaagatcatcaagtactatgcattaaattgagaagttattaaaaatttcgaaagtaattaaagattgttgatgatgaagagattaagtagttcagattcagtgggtggtctcatctctttatgtcctacaacttccacagatgagcagagtccgaggagatacggtgggagagagtttcagtcgatgcttgaaggatacgaggaagaagaagaagctatagtagaagaaagaggacacgtgggcttgtcggagaagaagagaaggttaa

SEQ ID NO: 5314 - DNA, 386 bp, Arabidopsis thaliana
  Clone ID: LIB23-057-Q1-E1-D3
atcaacaatctctctcctctctctctctgtatatagaagaatctccattgtctttaatttctctccatttctctttctctcttccttcaaagttttctcttttcttgatgggtttaagagagtagagatcatcaagtactatgcattaaattgagaagttattaaaaatttcgaaagtaattaaagattgttgatgatgaagagattaagtagttcagattcagtgggtggtctcatctctttatgtcctacaacttccacagatgagcagagtccgaggagatacggtgggagagagtttcagtcgatgcttgaaggatacgaggaagaagaagaagctatagtagaagaaagaggacacgtgggcttgtccggagaagaagaga

SEQ ID NO: 5315 - DNA, 414 bp, Arabidopsis thaliana
  Clone ID: LIB23-010-Q1-E1-H5
ggactttctcaatccatatccctctctctgttttttctaatttgagcctctaaagtctcctcgttttgttcatgttgttgttcaagtgaagaagctcaattatgtttacaacattgttgtaatttcaaaacttcataagaatttctctgataataaagaaaaagctggagtagaactattttaaagtgtcatcatgaagagactaagcagctcagattcaatgtgtggtctaatctccacttctacagatgaacagagtccaagagggtacggaagtaattaccaatctatgcttgaaggttacgatgaagatgctacactaatcgaggaatattccggcaaccaccaccacatgggtctatcggagaagaagagaagattaaaagtgaccaagtcaaagctcttgagaagaat

SEQ ID NO: 5316 - DNA, 449 bp, Arabidopsis thaliana
  Clone ID: LIB23-023-Q1-E1-B6
cgctcatcaacctcaacaatctctctcctctctctctctgtatatagaagaatctccattgtctttaatttctctccatttctctttctctcttccttcaaagttttctcttttcttgatgggtttaagagagtaaagatcatcaagtactatgcattaaattgagaagttattaaaaatttcgaaagtaattaaagattgttgatgatgaagagattaagtagttcagattcagtgggtggtctcatctctttatgtcctacaacttccacagatgagcagagtccgaggagatacggtgggagagagtttcagtcgatgcttgaaggatacgaggaagaagaagaagctatagtagaagaaagaggacacgtgggcttgtcggagaagaaggaaagttaagcataaacaagttaaagctttggagaagaatttgagttagagaataa

SEQ ID NO: 5317 - DNA, 387 bp, Arabidopsis thaliana
  Clone ID: LIB23-061-Q1-E1-D11
actctccctctctatctctctcttaccaatttccatttctcgggggaaaataataatacgacttttgaaatctctcactaatatttcccaagaaaacctgatgaattaaaagttcatattttcttggtgttgattggtattagatgactatttcttagtattagtcaattctctgtttccatcttatatggatagtctagacacagagcaaagatccttctttggagaaaaagaagatgagagacgagagaggatcgtttcttcacgtattggtcgtagatagatcttaatcgataaccatctaggccttgatctaaccattcaatataaactttatttccttcttcttttcgatctcaattgttccgaccaaacaagatgaagaga

SEQ ID NO: 5318 - DNA, 234 bp, Arabidopsis thaliana
  Clone ID: LIB23-054-Q1-E1-D8
aacccacgcgtccgatagtctttatagataagactcttcaacgattccactttatttttcggtgggattgttggttgatgaagaaaaaaaaatagtttgtaattacaggtttaaatatgtagagaaaaaatgacgaatatgtattatcttgtttttttttccttcgaatatgtattacggtaatataaatttgcttgtaaaaataataaatatattatttgataaattttgtac

SEQ ID NO: 5319 - DNA, 457 bp, Arabidopsis thaliana
  Clone ID: LIB23-023-Q1-E1-E6
tttcactaaggaaaaggaatcagtttttggtggaagtaattgatccgatctaggaaaaatgggaggaggtgatcatggacatggagcagaaggaggcgatttcagagccaaagtctggagtatgactggtgggcctaactgtaggcccaaacattggcgtcggaacaccgccattgctatgttcggcgttttccttgtgtgcatccccatcgccaagctatctgctaagcttgagcaaaggccacacatgccagtacgcccaattccttcacagatctggtgcaagaactttggaaccaaggacgattacgaaaaagagcattaaaagtttttttcttggtttggagagaaccctttaattggtcttcttatttgcagacaatgtgagcataaaaaaagcgcttctagctttgtcaatggatttcagagtactgtgaacatactaatatgtcttttt

SEQ ID NO: 5320 - DNA, 458 bp, Arabidopsis thaliana
  Clone ID: LIB23-040-Q1-E1-E7
gcgaaagatcaactcaaaatcaatggattatctcggaatcgacatgagctgcgcgatcggatctctccggaacggtgacttcccggagaaagattgtcttcttcctctaatttcaaagcttctcggttattgcctcgttgctgcttcaatcaccgtcaagctccctcagataatgaaaatcgttcaacataagagtgtacgaggcttaagtgttgtggcatttgagcttgaagttgttggttacacaatttcacttgcctattggttgcataaaaggcttcccttttccgctttcgggcaaatggcttttcctttgattcaagctttaatcctggtggcttgtaactattaatattcacaaccaatacctgtcacaacttggattaaaccacttccatattgcgctgtggcgccaactgtgcttgctggacaaattaatccgacgcttttcgaagctc

SEQ ID NO: 5321 - DNA, 393 bp, Arabidopsis thaliana
  Clone ID: LIB23-069-Q1-E1-F11
accacgcgtccgcccacgcgtccgcccacgcgtccgatttgatctcaagctcataggaatttgatctccacattatatcttgatcatcaccacaagaaaaacatttcaacttcttttatcagcaatcacaaatcaaagagatgggaagagctccatgctgtgagaagatggggttgaagagaggaccatggacacctgaagaagatcaaatcttggtctcttttatcctcaaccatggacatagtaactggcgagccctccctaagcaagctggtcttttgagatgtggaaaaagctgtagacttaggtggatgaactatttaaagcctgatattaaacgtggcaatttcaccaaagaagaggaagatgctatcatcagcttacaccagatac

SEQ ID NO: 5322 - DNA, 410 bp, Arabidopsis thaliana
  Clone ID: LIB23-013-Q1-E1-F1
acaggaagaggtttcttctccatttattgcatttgtctctccaaaatgtctaattaatggttttgatcttccaaccagatcttcttctctatctcttcgacaaacccttttttctgggttcttcggagaggtgatttatcaccaaaaaaaagattttaaaagtctaaatccttttttctttctttccttcaacatgcctttaccttggaagaaatctaaatctagtcggatctctagattcgtatcagactttcaacaatctcctaaacatggtggatctctcgttgttgaaactggtttcccaacttctttaatcgatctctttgttaagaatcgcgatcgtctcaaaaaacaatcttcaaaacgtaacaacaagaacaacaaagcccagactgaaacgcgtgttttgt

SEQ ID NO: 5323 - DNA, 280 bp, Arabidopsis thaliana
  Clone ID: LIB23-065-Q1-E1-G1
ctttgacacatttctggtgggtggggatactgctgaggttaacgatataaaattcagcaacgatgggaaatccatgctcctaacgactacaaataacaatatctacgttcttgatgcatatcgtggagagaagaaatgtggttttagtttggagccttcacagggtacacccatagaggccaccttcacaccagatggcaagtatgttctgtcaggttcaggtgatggaaccttacatgcgtggaacatcgagaacccatctgaggtggcgaggtgggag

SEQ ID NO: 5324 - DNA, 419 bp, Arabidopsis thaliana
  Clone ID: LIB23-043-Q1-E1-F1
tgaagatcggcgaaaataaaaaccggccacatccaacgatccatatccctcaatgggatcaaatcaacgatccaacggccacaatctcttcaccattctcttccgtcaaccttaacagcgttaacgactacccacactctccgtcaccgtatctcgactccttcgcttctctcttccgttacctcccgtcaaacgagttaacaaacgattcagactcatcaagtggcgacgagtcatcaccactcaccgactcattctcctccgacgagtttcgcatctacgagttcaaaatccggcgatgcgctcgaggtcgatctcatgattggacggagtgtccgttcgcacatcccggagaaaaagctcgacgacgtgatccgagaaagtttcattactccggcaccgcttgtcctgagtttcgt

SEQ ID NO: 5325 - DNA, 389 bp, Arabidopsis thaliana
  Clone ID: LIB23-035-Q1-E112-G6
atcggcgaaaataaaaaccggccacatccaacgatccatatccctcaatgggatcaaatcaacgatccaacggccacaatctcttcaccattctcttccgtcaaccttaacagcgttaacgactacccacactctccgtcaccgtatctcgactccttcgcttctctcttccgttacctcccgtcaaacgagttaacaaacgattcagactcatcaagtggcgacgagtcatcaccactcaccgactcattctcctccgacgagtttcgcatctacgagttcaaaatccggcgatgcgctcgaggtcgatctcatgattggacggagtgtccgttcgcacatcccggagaaaaagctcgacgacgtgatccgagaaagtttcattactc

SEQ ID NO: 5326 - DNA, 389 bp, Arabidopsis thaliana
  Clone ID: LIB23-051-Q1-E1-E12
tacccacgcgttctgcggaaccgtggggttttgactttcatcgtttccactggaaaatctgatgtgaacagaccttgtggtgaagagagagttactccgcttcactgtgctgttgctggctgttctgtgaatatgattgaagtcatcaatgtcttgcttgatgcttctgctttggttaactctgttgatgctaatgggaatcaacctttggatgtgtttgttcgagtttcgaggtttgtggctagtccgaggaggaaagcggttgagttgttgctgagaggaggaggtgttggaggattgatcgatgaggcggttgaagaagagatcaagattgtctctaagtatccagctgatgcttctttaccggatataaacgaaggggtttatgg

SEQ ID NO: 5327 - DNA, 343 bp, Arabidopsis thaliana
  Clone ID: LIB23-057-Q1-E1-E6
cggacgcgtgggcggacgcgtgggcttaaaaaccaaatctttcatcatcttccttcaccagttgactctctttcaatctagctctgaatctctcactctcctacccgagaaccatgaactccaacgaccaggatccgattccgttcagacccgaagacaacaacttctccggttccaaaacctacgccatgagcggcagaatcatgctaagtgcaatagtaatcctcttcttcgtcgtcattttaatggtcttcctccatctttacgctcgttggtatctcctccgtgctcgtagacgtcatcgccgtcgtcgtagccgtaaccgtcgcgctacgatggtttt

SEQ ID NO: 5328 - DNA, 351 bp, Arabidopsis thaliana
  Clone ID: LIB23-039-Q1-E1-D4
ctcaaatccatcattctctctgatctcaagaaataatctcaaatctcttacactcatagtcttcaagcaacttctcagattcagctcttatggatcatttgttacaacaccacgatgtttttgggaattataacacagcaagagaagcaatgggactatcatattcatcaaacccaacaccgttagataacgaccagaacaaaccttctcctgcaacggctgtgacaatgccacaggctccggagctagctctcaggtgtccacgttgcgactcaacaaagacaaagttttgttactacaacaactacagtctcactcaacctcgctacttccgcaaatcatgcggagata

SEQ ID NO: 5329 - DNA, 381 bp, Arabidopsis thaliana
  Clone ID: LIB23-060-Q1-E1-A4
caatgacacaaatgatcaaggaggagactttgaatgtaacatttgtttcgaactagctcaagatccgattgtcactctctgtggccatctcttttgctggccttgcttataccgttggcttcaccaccattcacattctcaagaatgtccggtttgtaaagccgtggttcaagacgataagcttgttcctctttacggtagaggcaagaaccagactgacccgagatcaaaacgttatccgggtttacggattcctaaccgaccaacaggtcaaagacctgatactgctgctcctcctcctcagcctgaagctgcgagtaattttttcaactaccgtattggcttgatgggtggaattactccgaatgatggcgaactacc

SEQ ID NO: 5330 - DNA, 281 bp, Arabidopsis thaliana
  Clone ID: LIB23-045-Q1-E1-C6
gtctggtttcctcttttgtttcgtccaaatctctactttttagggatcttgtccttctcttttctgctgattaaaaccctcgaatttgctccaattcgacgcgaaaaagggcattgagatggtgaatggagaatcatcaactagtacgtcttactctgatagtaacaatgacacaaatgatcaaggaggagactttgaatgtaacatttgtttcgaactagctcaagatccgattgtcactctctgtggccatctcttttgctggccttgcttataccgtc

SEQ ID NO: 5331 - DNA, 282 bp, Arabidopsis thaliana
  Clone ID: LIB23-037-Q1-E1-H10
ggatagaatggttgtgagctatgagaagctgctggctataggagaaacagatgatgcttccttcatcaagaccctcaagaggattcctttggttacttctttagcctctgagatcttggctgcttatctcatgcctcctgttgagtctggctctgttgatttcgccgagtttgagcctaatcttgtctattagtagctgcaatgtcaagtcttgagtttacggctggttcttgatttcttgtaattgaatgatcgaaactgagaaacatcgtcttttttttt

SEQ ID NO: 5332 - DNA, 410 bp, Arabidopsis thaliana
  Clone ID: LIB23-014-Q1-E1-A6
cccacgcgtccgcggacgcgtgggctctctatctcactctttgcttctgcaactcacagtcaatggcggctgaaatggcgttagtgaaacccatctccaagttctcttccccaaagctctcaaacccgagcaaattcctctccggccgacgtttctccaccgtgatcagaatgtcagcctcttcctcaccgcctcctccaaccaccgccacctcgaagtccaagaagggaacgaagaaagagattcaagagtcgcttcttactccgaggttctacacgacggacttcgaggaaatggaacagcttttcaacacggagatcaacaagaaccttaacgaagcagagttcgaggctctgcttcaagagttcaaaaccgagtacaatcagacaacattcgtgaggaacaaggag

SEQ ID NO: 5333 - DNA, 380 bp, Arabidopsis thaliana
  Clone ID: LIB23-035-Q1-E112-F8
gaaactcacagtcaatggcggctgaaatggcgttagtgaaacccatctccaagttctcttccccaaagctctcaaacccgagcaaattcctctccggccgacgtttctccaccgtgatcagaatgtcagcctcttcctcaccgcctcctccaaccaccgccacctcgaagtccaagaagggaacgaagaaagagattcaagagtcgcttcttactccgaggttctacacgacggacttcgaggaaatggaacagcttttcaacacggagatcaacaagaaccttaacgaagcagagttcgaggctctgcttcaagagttcaagaccgattacaaccagacacatttcgtgaggaacaaggagtttaaagaagctgcagac

SEQ ID NO: 5334 - DNA, 425 bp, Arabidopsis thaliana
  unsure at all n locations
  Clone ID: LIB23-023-Q1-E1-A9
cttctcttccttatctccttaaaaatcttctgctgttttcttttttatatttagagctcctctgtttcttctccaataaccaaaaaaaaaaaaaaaactcttcctctgtttgttttcaagttctgacatcataaattcagaccgagaaaacataaaaatttgagtcttttgatgatcggaaactgatgactcccgttctctgcgaaatcctgctctctgggctcacggtcaaatctgctctctgccgtagaacccatctcgttcaatctttctccgtcgtcttcctctactggttttacaacgtttcatgaattgctacaaactctaattaattttttcagacagatcatanaaaaaaacaaacataaaacataaaactctgtcctttttttgtcctcttgtaacttttcttgttaaaaatcaat

SEQ ID NO: 5335 - DNA, 359 bp, Arabidopsis thaliana
  Clone ID: LIB23-017-Q1-E1-E6
agttgacgtggtttcgggttctagaagatatggatctgagaactggatgtcctcagccaggcatgaacctacttacacagatttgctctccggctttgggactaacatagatccatcccatggtcagcggatacctttttatgaccattcaccagcaccttctatgcctgcagagagaatcttgagtgattcacagtgcaagttcgattaccttgttaaccaatggcagatgatacactcaggtctctcgctgaagttacaggaaccccctaaggtacctgcatgaactgatgcttccctccaaaggcgatgcaatgttaaatacacctactatcctgttcgtaatggtctagcgactg

SEQ ID NO: 5336 - DNA, 364 bp, Arabidopsis thaliana
  Clone ID: LIB23-043-Q1-E1-H6
ctcactctctcattaaaaacgtgtttttttttaccggtcaccggtttatggaatgactgattaccggctacaaccaacgatgaatctttggaccaccgacgacaacgcttctatgatggaagctttcatgagctcttccgatatctcaactttatggcctccggcgtcgacgacaaccacgacggtgacgactgaaacaactccgacgccggcgatggagattccggcacatgcgggatttaatcaagagactcttcatcaacgtttacaagctttgattgaaggaacacacgaaggttggacctacgctatattctggcaaccgtcgtatgatttctccggcgcctccgtgctcggatgggga

SEQ ID NO: 5337 - DNA, 284 bp, Arabidopsis thaliana
  Clone ID: LIB23-045-Q1-E1-B9
tttaagaaaagtttctgtgtctttttttttttttttggtgataattgaaacatatgaaacaatcgtcgtcatagaagcagcagagattcaccttctttctttatctttccctctcagaaacaggaaacaaaattcaaaaagaacaaaaaaaaaaggtcaaaccaaaacgatggcgtttcatcacaatcatctctcacaagacctctccttcaatcatttcaccgaccaacaccaacctccacctccgcaaccgcctcctcctcctccgcaacagcaacaacatt

SEQ ID NO: 5338 - DNA, 383 bp, Arabidopsis thaliana
  Clone ID: LIB23-066-Q1-E1-D4
acatttctttagctcaaccttcattactaatctccttttaaggtttctttcgtgaatcagatcggaaaaatggaatcttttttgttcacatctgaatccgtcaacgagggacatcccgacaagctttgtgatcagatctccgacgctatcctcgatgcttgccttgaacaagaccctgagagcaaagttgcttgtgagacttgtagcaagactaacatggtcatggtttttggagaaatcaccaccaaggctaacgttgattacgagcagattgttcgtaaaacatgccgtgagattggattcgtctctgctgacgttggtctaaatgctgacaattgcaaggttctggttaacattgagcaacagagtcctgacattgcaca

SEQ ID NO: 5339 - DNA, 382 bp, Arabidopsis thaliana
  unsure at all n locations
  Clone ID: LIB23-028-Q1-E1-H8
aacatctcnttagctcaaccttcattactaatctccttttaaggtttctttcgtgaatcagatcggaaaaatggaatcttttttgttcacatctgaatccgtcaacgagggacatcccgacaagctttgtgatcagatctccgacgctatcctcgatgcttgccttgaacaagaccctgagagcaaagttgcttgtgagacttgtaccatgactaacatggtcatggtttttggagaaatcaccaccaaggctaacgttgattacgagcagattgttcgtaaaacatgccgtgagattggattcgtctctgctgacgttggtctagatgctgacaattgcaaggttctggttaacattgagcaacagagtcctgacattgca

SEQ ID NO: 5340 - DNA, 280 bp, Arabidopsis thaliana
  Clone ID: LIB23-065-Q1-E1-G2
catttctttagctcaaccttcattactaatctccttttaaggtttctttcgtgaatcagatcggaaaaatggaatcttttttgttcacatctgaatccgtcaacgagggacatcccgacaagctttgtgatcagatctccgacgctatcctcgatgcttgccttgaacaagaccctgagagcaaagttgcttgtgagacttgtaccaagactaacatggtcatggtttttggagaaatcaccaccaaggctaacgttgattacgagcagattgttcgtaa

SEQ ID NO: 5341 - DNA, 431 bp, Arabidopsis thaliana
  Clone ID: LIB23-004-Q1-E1-F5
acacatttctttagctcaaccttcattactaatctccttttaaggtttctttcgtgaatcagatcggaaaaatggaatcttttttgttcacatctgaatccgtcaacgagggacatcccgacaagctttgtgatcagatctccgacgctatcctcgatgcttgccttgaacaagaccctgagagcaaagttgcttgtgagacttgtaccaagactaacatggtcatggtttttggagaaatcaccaccaaggctaacgttgattacgagcagattgttcgtaaaacatgccgtgagattggattcgtctctgctgacgttggtctagatgctgacaattgcaacgttctggttaacattgagcaacagagtcctgacattgcacaaggtgttcatggtcatctcagcaagaagccagacgaggttggagct

SEQ ID NO: 5342 - DNA, 456 bp, Arabidopsis thaliana
  Clone ID: LIB23-068-Q1-E1-H9
ccaacgcgtccggttcgagttctgtagctccagcatgaaggaagtcctagagaggcataacttgcagtcaaagaacttggagaagcttgatcagccatctcttgagttacagctggttgagaacagtgatcacgcccgaatgagtaaagaaattgcggacaagagccaccgactaaggcaaatgagaggagaggaacttcaaggacttgacattgaagagcttcagcagctagagaaggcccttgaaactggtttgacgcgtgtgattgaaacaaagagtgacaagattatgagtgagatcagcgaacttcagaaaaagggaatgcaattgatggatgagaacaagcggttgaggcagcaaggaacgcaactaacggaagagaacgagcgacttggcatgcaaatatgtaacaatgtgcatgcacacggtggtgctgaatcggagaacgctgctgt

SEQ ID NO: 5343 - DNA, 460 bp, Arabidopsis thaliana
  Clone ID: LIB23-072-Q1-E1-G1
agcgaaaactaatctctctcctttttcttctcatctccttactaaagatctctgtcttcgataatttgtttcaatcactgagaaaatggaggccgtatgactagattctaggcgtcatgacacagcgatggaggaaacctgtaacgtgaaaggagcggcggagaaacaatgggaaaggcttaagcagtactatctccagcacatccatgagctccagcgccagcttcgacataagactaataacctcaatcgccttgaagctcaaaggaatgaactcaattctcgagtgagaatgctcagacaagacttacagctccttcaagaacctgagtcctatgtgggagaagtggtaaaagttatgggaaagaacaaggtcatggttaaggttcatccagaggggaagtatgttgttgatattgacaaaagtatagacattacgacaatcactccatcaacgaga

SEQ ID NO: 5344 - DNA, 456 bp, Arabidopsis thaliana
  unsure at all n locations
  Clone ID: LIB23-021-Q2-E1-C3
acgaaaaataatctctctcctttttcttctcatctccttactagagatctctgtcttcgataatttgtttcaatcactgagaaaatggcggccgtaggagtagattcgaggcgtcctgagacagcgatggaggaaacctgtaacgtgaaaggagcggcggcgaaacaaggggaagggcttaagcagtactatctccagcacatccatgagctccagcgccagcttcgacagaagactaataacctcaatcgccttgaagctcaaaggaatgaactcaattctcgagtgagaatgctcagagaagagttacagctccttcaagaacctgggtcctatgtgggagaagtggtaaaagttatgggaaagaacaaggtcttggttaaggttcatccagangggaagtatgttgttgatattgacaaaagtatagacattacgaaaatcactccatcaacg

SEQ ID NO: 5345 - DNA, 384 bp, Arabidopsis thaliana
  Clone ID: LIB23-036-Q1-E1-C12
aatcaaaaccaaaatcactaaagaggagaagattgctaaagtttgataaaacattccaaaatcaatggctgataggatcaaaggtccatggagtcctgaagaagacgagcagcttcgtaggcttgttgttaaatacggtccaagaaactggacagtgattagcaaatctattcccggtagatcggggaaatcgtgtcgtttacggtggtgcaaccagctttcgccgcaagttgagcatcggccgttttcggctgacgaagacgagacgatcgcacgtgctcacgctcagttcggtaataaatgggcgacgattgctcgtcttctcaacggtcgtacggacaacgccgtgaagaatcactggaactcgacgctcaagaggaaatg

SEQ ID NO: 5346 - DNA, 404 bp, Arabidopsis thaliana
  Clone ID: LIB23-066-Q1-E1-D2
gagaagagagaagaatcatgggacaaggaccatcgggaggattgaatcggcaaggagatcggaaacctgatggtggagataagaaagagaagaagtttgagccggcggcaccaccggctcgtgtagggaggaagcaaaggaagcagaaagggccagaggcggcggcgagacttccgacggtgactccgtctactaagtgtaagctccggttactgaaattggaacggatcaaggattatttgttgatggaggaagagtttgtggcgaatcaagagaggttgaaacctcaggaagagaaagctgaggaagatagatctaaggttgatgatcttcgtggtacacctatgagtgttgggaatttggaagagttgattgattgagaatcacgctaatggttcctcctc

SEQ ID NO: 5347 - DNA, 407 bp, Arabidopsis thaliana
  Clone ID: LIB23-001-Q1-E1-F11
cggacgcgtgggcggacgcgtgggagagagaagaatcatgggacaaggaccatcgggaggattgaatcggcaaggagatcggaaacctgatggtggagataagaaagagaagaagtttgagccggcggcaccaccggctcgtgtagggaggaagcaaaggaagcagaaagggccagaggcggcggcgagacttccgacggtgactccgtctactaagtgtaagctccggttactgaaattggaacggatcaaggattatttgttgatggaggaagagtttgtggcgaatcaagagaggttgaaacctcaggaagagaaagctgaggaagatagatctaaggttgatgatcttcgtggtacacctatgagtgttgggaatttgggagagttgattgatgagaatcacg

SEQ ID NO: 5348 - DNA, 430 bp, Arabidopsis thaliana
  Clone ID: LIB23-013-Q1-E1-E9
acggacgcgtgggatttttcttcatggattcgtatagccaataagttttttcaatattcaaaacaaaaaccccatcaaaataatctccggaccagtttctctttcgattcagtcggaccggaaaaacaatggcgtctgtgaaccctttcgatctcttggacgatgacgcagaggatcccagccagattgttgcgtctaagccattgaaggttgtggctccggttcagactgctaagtctggtaagatgccgactaagccgcctcctccttctcaagctgtgagggaggcaaggaacgctcctggtggaggtcgtggtgctggacgtggagggagttatggtcgtggtggacgtggtggaaacaatagggattcaaggaacaatgatggtcctgccaatgaaaacggatatggtggaggctacagacgctc

SEQ ID NO: 5349 - DNA, 421 bp, Arabidopsis thaliana
  Clone ID: LIB23-039-Q1-E1-F7
atcagtttcatattcagatgtatcagagttctcattaacagatctgtttctttttccttatctgattaaacaatttccttcagaattttacttttttgaacatatatagtttttctctgttcctatatcttgagttttgtgagaggttaattatatgaaattttacgcattattgttcatctatatcgaaaaacaatgtcaagaaagccatgttgcgtcggagaaggcttgaagaaaggagcatggaccaccgaggaggacaagaaactcatctcttacatccacgaccacggctagggatgctggcgcgacattccccagaaagctgggttgaaacggtgtggaaagagttgtagaacgcaatggaccaactaccttaaacctgagatcagaagaagcgattttagttcagaggaagagc

SEQ ID NO: 5350 - DNA, 417 bp, Arabidopsis thaliana
  Clone ID: LIB23-035-Q1-E1-H11
aatcatacgcgcttccatcaaccctttggtcttggaagccaaatcaaacctttccttcaatcctcaaattttcgaaaattttctcttttgctttacgttctctcaattcttatttgtaagaaagtttgttcctttaatcaatcaaatcaaagagacttttgaagattgtttcccaatttgcgtcaatcgggatcgagtcaaatctgaaatcttctccactcatcatctgactataagacttaatcaagggactttttgttcgggtttggttttaaacgtcttggattcgaagtggttaaggtatggatgaaaataatggaggttcaagctcacttccacctttccttactaaaacatatgaaatggttgatgattcttcttctgactcggtcgttgcttggagcgaaaacaacaaaa

SEQ ID NO: 5351 - DNA, 440 bp, Arabidopsis thaliana
  Clone ID: LIB23-022-Q2-E1-E4
ctcttggttcttttccataagcttataacatatattttttttaaaatctactctgcgttaaaaaaatgaaaacacgtagcagcagtgtgggtaagatcaaagggtgtttctcgatcagtttcatattcagatgtatcagagttctcattaacagatctgtttctttttccttatctgattaaacaatttccttcagaattttacttttttgaacatatatagtttttctctgttcctatatcttgagttttgtgagaggttaattatatgaaattttacgcattattgttcatctatatcgaaaaacaatgtcaagaaagccatgttgcgtcagagaaggcttgaagaaaggagcatggaccaccgaggaggacaagaaactcatctcgtacatccacgaccacggcgagggatgctggcgcgacattccccaaaaagct

SEQ ID NO: 5352 - DNA, 389 bp, Arabidopsis thaliana
  Clone ID: LIB23-048-Q1-E1-H10
tttcattttgtttcattttcttatctcctcacactcttcgaacaaggaagaaccctaatctcaagatgaatagggagaagttgatgaagatggctaataccgtccgcactggcggaaagggtactgtcagaagaaagaagaaggctgtgcacaagaccaatacaactgatgacaagaggcttcaaagcactcttaagagaattggagttaactccattcccgctattgaagaagttaacatctttaaggatgatgttgttattcagttcatcaaccctaaggttcaagcttcaattgctgcaaacacatgggttgttagcggttctcctcagaccaaaaaattgcaagatatccttcctcagatcatcagccaacttggaccaaacaac

SEQ ID NO: 5353 - DNA, 398 bp, Arabidopsis thaliana
  Clone ID: LIB23-058-Q1-E1-H5
aatttagctcaaccttcattactaatctccttttaaggtttctttcgtgaatcagatcggaaaaatggaatcttttttgttcacatctgaatccgtcaacgagggacatcccgacaagctttgtgatcagatctccgacgctatcctcgatgcttgccttgaacaagaccctgagagcaaagttgcttgtgagacttgtaccaagactaacatggtcatggtttttggagaaatcaccaccaaggctaacgttgattacgagcagattgttcgtaaaacatgccgtgagattggattcgtctctgctgacgttggtctagatgctgacaattgcaaggttctggttaacattgagcaacagagtcctgacattgcacaaaggggtcagggtcatctca

SEQ ID NO: 5354 - DNA, 458 bp, Arabidopsis thaliana
  unsure at all n locations
  Clone ID: LIB23-026-Q1-E1-G11
acgcgtccgcccangcgtccgcccacgcgtccggtaggatacaagaagacagttgtaaattgaatacaaattcatcagagactaaggtaaagagcaagttttgttatggtgaaaaggaaaaggaaaggttcagtagaatactaagttgttatgttggatcatataatttccataacttcactacaagaacaaaagcagatgatccgactgcgaatcgtcaaatcatctccttcactgctaatactgtgattaatcttgatgggattgactttatcaagtgtgaagtcttaggcaaaagctttatgcttcatcagattcggaagatgatgggtcttgctgttgcaatcatgcggaattgtgcttctgaatcacttatccaaaagtgcttcagcaaggatgttgaatataactggtaccaatggcgccagaagttgggccttaacctgggacgaatgcct

SEQ ID NO: 5355 - DNA, 482 bp, Arabidopsis thaliana
  unsure at all n locations
  Clone ID: LIB23-026-Q1-E1-G2
acgcgtccgnnnnnnnnnnnnnnnnnnnnnnnnnnnnnnnnnnnnnnnnnnnnnnnnnnnnnnnnnnnnnnnnnnnnnnnnnnnnnnnnnnnnnnnnnnnnnnnnnnnnnnnnnnnnnnnnnnnnnnnnnnnnnnnnnnnnnnctcaacggtgatgggatcttggcttccccagtattgcttcctcttcatcttctactgtcactcccacaataccaatcacttttcctgatatcgttagctgcattttctccgaaactcactctcttctcctactcaggatttgaacttcttacgttttgaacccggctgctcagagtaacttgcccgggttttcctttaatcaccaaaattgggttcgagataccatctcatcanctcaagcattgggcaatttgtgtccgggccggctngagcaaccaaagnaagggntcccactttgagtgccatttnccatgccntacactggggggtggtatcaaa

SEQ ID NO: 5356 - DNA, 497 bp, Arabidopsis thaliana
  unsure at all n locations
  Clone ID: LIB23-026-Q1-E1-G3
acgcgtccgcccacgcgtccggaaaacttctcttttgtccccttgtcaacaaaaatctcccattcaacaaaatttcttcagcttctctccttcaaaaggtttttattctccttggtttgaacaagttacactgtagagagtgatttggctaaaagaagattgattcaggagctgtgtagtgtattgctggggtttttccaatgcaaacgtctcagaaacatcacagtgcggctggactgcacatgctgtatcctcaagtctactgttcacctcagtttcaagcgaaagacaacaaaggcttctctgatatcccgtccaaagaaaacttttttaccctcgaatcctccactgcttctggtaatcctccttccgtaatgactctccttccngtgaagcaattacatctgggccggganccccgttttcctcctcaaggntctcaatccntgcatcctccnggatttccaacaantccccctggacaaacgttctaatng

SEQ ID NO: 5357 - DNA, 477 bp, Arabidopsis thaliana
  unsure at all n locations
  Clone ID: LIB23-026-Q1-E1-G4
acgcgtccggccaacgacagttatcaaagcttaagccgttttagggttttatccttttgctgagatccaatcatggcggatgttgaaccagaggttgctgctgctggagttcccaagaagaggacgtttaagaagtttgccttcaaaggagttgatctcgatgctcttctcgatatgtctactgatgatcttgtcaagctcttctcttctcgtattcgtagaaggttctctagaggtttgacaaggaagccaatggctctgattaagaagctgaggaaagcgaaaagggaggcaccacaaggtgagaagccagaaccagtgagaacccacttgaggaacatgatcatcgtcctgaaatgattggaagcacaattggagtgtacaacggaaagacttcaaccaaggttgagattaaacccgaaaataattggncacaactggctgaattcccaacccaatacaaaccggtcaaacacg

SEQ ID NO: 5358 - DNA, 480 bp, Arabidopsis thaliana
  unsure at all n locations
  Clone ID: LIB23-026-Q1-E1-G6
acgcgtccgcccacgcgtccgcttcactctcttcttccccatcgaagactcgtcttcttctgcttcaatggccgaatttccagaaccgggcactgtaaaccctgactcggatctatcgaatggtcgagctgagaagcctgagatagacacttcggctccgttcgagtcagtgagagaagcagccactcgtttcggcggttttggtttctggagaccttctctcaataaactcccagatgcttctcaggaaaatatccaagaacctgatatcatgggactcaaagcacaagctttcgagctacaaagagaactaattgttaaagaacgcgaaacgctagangtgttgaaggagcttgaggcgactaaagccacagtcttaaagctgcancagaaggaatgaaancttatgaggaggncaacgttgagagaaagaagttgacaatcatatcaaagncaaccggtgttggtccaaaaggatta

SEQ ID NO: 5359 - DNA, 516 bp, Arabidopsis thaliana
  unsure at all n locations
  Clone ID: LIB23-026-Q1-E1-G7
tgtggtcccctggacgtaccanatccggaattcgcnggtcgacccacgcgtccggatgatttcgcagttttctttctcagaggcggctcatggcgacactgtgctttctcccatcggcttgatttcattgtgattttctaaattgaggatatgattttctgagccatgggaagggagagaagaaagcttagcttgagcttgaattatgattcatctgagaaatgcaggcaaatgttgatgcacatctcctgttgttcaagtaaactttttctgattcgccactacagtatcttgtccgttcaatttctgtctgattgatggccttttttcgttcanaatcattgtttggtgttgatgagaacacgggagctgcaaatcataggtatcaaatgccaaagacgagtacntggcgtgaacatggtggacttgactttgtattcagcttgctggagaaaatttcatcgancattgggtgtgaaaagacagtttccttcanaataatcagactctcggttc

SEQ ID NO: 5360 - DNA, 463 bp, Arabidopsis thaliana
  unsure at all n locations
  Clone ID: LIB23-026-Q1-E1-G8
acgcgtccggacngactggtctcttacctttggagattagattcttgcatgatccatctaaagatacagggtttgttgggagtgccttgtcgagtaatatgataagatttttcaagaacagtgatgaaacatggagccatgaggttgttatatcggttaaaccgttgaaagtcgaaaactggatacttccagaaatgccggggctaatcaccgacttcttgatctccctcgatgaccgatttatttactttgtgaactggctccatggagacattcgtcagtacaacatagaggaccctaaaaaccctgtattaacagggcaaatttgggttggaggattactacaaaagggcagtcctgttaaggcggttggagaagacggnaacactttcaaattcgaggttcccaaattaanggggaaatcttacgaaggtggncctcaaatgatcaactgaacccnatg

SEQ ID NO: 5361 - DNA, 499 bp, Arabidopsis thaliana
  unsure at all n locations
  Clone ID: LIB23-026-Q1-E1-G9
taactggtncgcctggccctacaaagtccggaaattcccncggtcgacccacgcgnccgccancattgaagaaccagctcattatctcaactgttattatgactgttggtattgctattgtgtcatgggttggcttaccgacctcctttaccatcttcaactttggaacacaaaaagttgtcaagaactggcagctattcctttgtgtttgtgttggtctttgggctggactcattattggtttcgtcactgagtactacactagtaacgcctacagccctgtgcaagatgttgcagattcatgcagaactggtgcagctaccaatgttatcttcggccttgctcttggttacaaatccgtcattattccaatctttgctattgctatcagtatattcgttagcttcagctttgctgctatgtatggtgttgctgttgctgctcctggtatgctcagtaccaatgccactgggttgggaattgatgctatggcccatca

SEQ ID NO: 5362 - DNA, 538 bp, Arabidopsis thaliana
  unsure at all n locations
  Clone ID: LIB23-026-Q1-E1-H2
gggcccccgganaatcccgaagtcgacccacgcgtccggcttcttccaaaaacctcaaacgctcctcacacaacggagtgatggggtctctcgttcgtgaatgggttgggtttcagcaatttccagcagctacccaggaaaagctgattgaattcttcggaaaattgaagcaaaaggatatgaactcaatgacagttcttgttctgggtaaaggcggtgtcggaaaatcatccactgtcaattctcttatcggcgaacaagtcgtccgtgtcagtcctttccaagctgaaggattgagaccagtgatggtttcaagaacaatgggagggttcactatcaacattattgacacccctgggacttgtggaagctggatatgtcaatcancaagctctcgaagttaatcaaaaggggttccttggtgaacaagaaacaaatagaatgtccttgccccnaangtttgattcgttttgggatgtggtataaaaagtccgatgaacctaanattaagccaagntttgttaataancaaatcacc

SEQ ID NO: 5363 - DNA, 507 bp, Arabidopsis thaliana
  unsure at all n locations
  Clone ID: LIB23-026-Q1-E1-H3
acngctccggagatcccgaggtcgacccacgcgtccgcccacgcgtccgtctctctcgccgggaaaaaagaacaacgtcgtttatagctaaagattcgatcatgttggatcttaacctaaagatcttttcttcttataacgaagatcaagatcggaaagtaccattaatgatctcaaccaccggtgaagaagaatctaactcatcttcctcctccacaacagactctgcagcgagagatgctttcatcgcttttggaattctcaaacgcgacgatgaccttgtnnnnnnnnnnnnnnnnnnnnnnnnnaaagaaacaggagatctctttccggtggtggctgatgctcgtcggaatatagaattctccgtggaagacagtcactggttgaatctttcttctttacaaagaaatacacaagaaaatggtgaagaagagcagaagaggaccaaggtctcgtagctccaatatcgtggcgtcactttttaccgtcgcaccggtcgttggg

SEQ ID NO: 5364 - DNA, 475 bp, Arabidopsis thaliana
  unsure at all n locations
  Clone ID: LIB23-026-Q1-E1-H6
acgcgtccgcttatctctttcctctgtgggagattctggttttgnnnnnnnnnnnnnnnnnnnnnnnnnnnnnnnnnnnnnnnnnnnnnnnnnnnnnnnnnnnnnnnnnnnnnnnnnnnnnnnnnnnnnnnnnnnnnnnnatttgaagtttgaagtgaagaaacaatttcattttgcggcgacgaattcgaattttccgatcgatcatgccgtccggtgcnnnnnnnnnnnnnnnnnnnnnnnnnnnnnnnnnnnnnnnnnnnnnnnnnnnnnnnnnnnnnnnnnnnnnnnnncatggaagccaagatgggaggggaagtgatagcagtttgagttctcctggttctcaaggaaatcaagaatttgggactaaaagattcacctgctcctccaacctccgctgtggtgaaaagggcctcctaaagagatatcctaaagatgcaagngntactcaagggactaaganccaaaactg

SEQ ID NO: 5365 - DNA, 514 bp, Arabidopsis thaliana
  unsure at all n locations
  Clone ID: LIB23-026-Q1-E1-H7
atggtccctggcgtacaatccggaattcncgggtcgacccacgcgtccggccaaagttccgactttttgcttctcccagaggctaatcatggacgctgtggcggcgaatttgtttcaatctccttccttactgcgtcaaacttccgaaaggttgatattttcgacgcccaactgtcctggcttcatgcgaattagctccggacctcaatttcgtctcagacaaaactcttctcttaaattctcgagaccatttcaaagcggaacaacttgtgttaaatctcggagaagctttgtggttaaagcttcagcttctggtgatgcttcaacagaatcaatcgcgccgcttcagttgaagtctcctgtgggacagtttctgtcacagatattagtgagccatcctcatcttgttccagcagctgttgaacagcagcttgaacagctccaaattgatcgagacgctgaagaacaagagtaaagatgcatcctctgtccttggnacagacattgttctcta

SEQ ID NO: 5366 - DNA, 452 bp, Arabidopsis thaliana
  unsure at all n locations
  Clone ID: LIB23-026-Q1-E1-G1
acgcgtccgtatagtgaaaaacttcttgctcaagacacttcagcttcaaggttgggagaaacgggttgaccggttcaagcttggggaaggcgttatgccagcgagtttcaaggtgcttcatgatccagttcgtaaaaccgacacaattattgcggattttggagaaagcgctataggaagagtagcaccggtggattcaggattctggtggatcatacttctccgtgcttacacgaaatctacgggagatttgactttatctgagacaccagagtgtcagaggggaatgaggcttatactctctctttgcttatccgaaggttttgatactttccctacgcttctttgtgctgacggttgttctatggttgatangagaatgggtgtttatggatatccaatagagattcaagctctgtttttcatggcaattgagatgcgccntgtcgatg

SEQ ID NO: 5367 - DNA, 481 bp, Arabidopsis thaliana
  unsure at all n locations
  Clone ID: LIB23-026-Q1-E1-D3
acgcgtccgccgggagatgcagcgacgttttcagcagatctgatttccccgagggattcctcttcggagctggcacttctgcttatcagtgggaaggagctgctgcggaagatggaaggaaacctagcgtgtgggacactctttgttactctcgtaacattggtaacggagatgtaacatgtgatgggtatcacaagtataaggaagatgtgaagctgatggtagacactaacttagatgccttcagattctctatatcttggtctaggctaatacctaatggaagaggctctgttaaccaaaagggtctacagttctacaagaacctcatcagcgaattaataaccccatgggattgaaccacatgttacactgtatcactacgatnatcctcaagtatcttgaaggatgaatattggagggatgggtcaacaatatgatgatnaaaagacttcactgcntaaggtanatgtttgttcaa

SEQ ID NO: 5368 - DNA, 476 bp, Arabidopsis thaliana
  unsure at all n locations
  Clone ID: LIB23-026-Q1-E1-D5
cncgggtcgacccacgcgtccggtcaatgaagaaacgactccatatttacgaataaaaaactgtagtagatctgtactctccctttttctttgtagagaagaagagaactgtgaaagaagatgaagattgaggaggatctaggtttcatcaacatactcaaacgagcaacaaagcttctatgtggtaacatcaatcttgttctcttcctcttcctttgctctctccccctcttttgtttcttgatcttcttcgagctttcactccaaaccactgtctcactcgcttctcaatacctcgttcgacaactcactaattgggattactactacgttcctcaagatgcttccgtcttggagaatctgattccattgcttatccaagacatttctactctacttgttcccgtacggcctcatagacctcttcaacaacaacacaataagtcctccgcatcctggactggtcaacacgttcn

SEQ ID NO: 5369 - DNA, 484 bp, Arabidopsis thaliana
  unsure at all n locations
  Clone ID: LIB23-026-Q1-E1-D6
aaatcagaacaaaacgagtggagctccggcgtgtgggctcacttaaccgccgtacggcaacaatcgccgcttgttcagtgcatcaccaacttcgtctcgatggatctcgttgccaacacgcttttatccgccggtgcatctccagcgatggtccattccgtcgttgagattcctgatttcactcctcatattcacgcgctctgcgtcaacgtcggaacacttacacctgactggcttccgtcaatgaaagctgccgctgaactcgcttctcagctccgaaagccttgggttcttgatcccgccgccgtgagttgctccggattccgattaaaagcgtgtttggagctcatcgagctaaaacctactgtaatcaaaggaaacggttctganattaatgctctctcctctgcttcacgttggacaaaactaaaggtgctgataagctcacatgaatcaacangacgctataagaagctgcaaagtc

SEQ ID NO: 5370 - DNA, 473 bp, Arabidopsis thaliana
  Clone ID: LIB23-026-Q1-E1-D7
acgcgtccgaatggaactccccagaagcaggttgtggtcgttgttacctcaggttggtctgtgctctgctttgatcacaacctgaaaaagctgtgggaaacgaatctgcaggaggatttcccacataatgcacaccatagagagatagcaatttcgataagcaattacacattgaagcatggtgatacgggtttggttattgttggtggacggatggagatgcagccatataatcacatggacccatttgaggaacttggcatgacagcacaaaatgctgatcaacacagaagaagtgctactgagaatcaggcctctgaagattctggagccataaacttgcgtcacttttctgtctatgcatttgctggcaagactggccttcttcgatggagtaaaaagactgatgatgttgaagctcacacctcagatgcatcacaattaattccacaacacaaattacaaagcttgat

SEQ ID NO: 5371 - DNA, 505 bp, Arabidopsis thaliana
  unsure at all n locations
  Clone ID: LIB23-026-Q1-E1-D8
tntggttcccctggccgtacgaatccggaattcncgggtcgacccacgcgtccggagcggttttacgacccgaactcaggacaagttttactagatgggcaagacctgaagacgctgaaactgagatggttaaggcaacagatagggctagtgagtcaagaacctgcattattcgccacttctatcaaggagaatatactcttaggccgtcctgacgcagatcaagtcgagatagaggaggctgctcgagtcgcaaatgctcattcctttatcatcaaactacctgatggcttcgacacacaggttggggagagaggattgcagctgtctggtgggcagaagcaaagaatancgatagcaagagcgatgttgaanaaccgggcgatacttcnattanatganggcgaccaagtgcattggnttcnggatccanaaaacnttgtanaaaagggtttggtttgtttcaagattgggagggctaccccaacattggcccaangccttt

SEQ ID NO: 5372 - DNA, 467 bp, Arabidopsis thaliana
  unsure at all n locations
  Clone ID: LIB23-026-Q1-E1-E1
acgcgtccgaaaaaaacaaaaaaaaaactttgaatccgtttgttgcttcttcgcaacgttctctctcaaactcgcagagtaacagattcgataatgggaggaggatttagagttttgcatttggtgaggccattcttggcttttcttccagaagtgcaaagtgctgacaggaagattccatttagagagaaagtgatctacactgtcatctccctcttcattttccttgtttgtagtcagcttcctctctatgggatccattctaccaccggtgctgatccgttctattggatgcgtgtcattctcgcatcgaatcgtggaacggtgatggagcttggtattactcctattgtcacatctgggattagtgatgcaactcttancaaggtcaaagattantgaggntgacaacaatgttccgtgaaggattgtgcccccntgaatggtgctcaaaaagcttcntgggg

SEQ ID NO: 5373 - DNA, 517 bp, Arabidopsis thaliana
  unsure at all n locations
  Clone ID: LIB23-026-Q1-E1-E3
ntaccgctccggacatcccgangtcgacccacgcgtccgggtggatttcatctttcccccgcctccagtgttctcaataatggcgaaatctctacacttcacaagactaatgtcttcttcagcaagaatgtcaatgacttctcctctcttcttctcctcagtcaaaccatggagaaacatccataaaccctacttggcttctctcttcctctccacaacatctactcgatacccacttcaatacgacatgatcatcaatcgtcccacacaatcatctctctctcaaaaccgtcgtcgtccccctaaagccatcgaatccggtgcacctgactcagcagagccggaattcgattcatgggtcgacaatanactgggctatggagcgtgaacagggtcgacccggttctgggagattcgggaaaatgggataaaagccaaagaaggaaatactacagttnaggagaaaggangaagactatacggggtcctgaanttctgaaagaatgaagaaacaagt

SEQ ID NO: 5374 - DNA, 483 bp, Arabidopsis thaliana
  unsure at all n locations
  Clone ID: LIB23-026-Q1-E1-E8
acgcgtccgcggacgcgtgggcggacgcgtgggttacaattagaggaagaaaaccagtggaagaaatggttatgattagatggatggcatggaggaaagaagatatatcgtcctcggtcgattttcgcttctccaaagacccatttggtcctctggtgctttctcgagaaaccgattcgagattcatcatcatcattcatcttaaaggattcaaaaaggaaggtattgaaattgatataaacgaagagggaaataggattacaattagaggaagaaaaccagtggaagaaatggtatgattagatggatggcatggaggaaaagaagtggaatttaatgttttcaagaaagtttttaaggattcctgatactgtcgatttagacaaagattaaagcnaagnttgatgaccaatgatccgactccttacgatttacaatggccgaaaagattaaaanggaacccctgggatttaagaattgngg

SEQ ID NO: 5375 - DNA, 467 bp, Arabidopsis thaliana
  unsure at all n locations
  Clone ID: LIB23-026-Q1-E1-E9
acgcganccgcggacgcgtgggcggacgcgtgggcgccgacgccgcagcacaaaggaggagaagaaggatcaaaggcgcgacaacaatggcgacaggtaaaacagtgaaggatgtctctccacacgagttcgtcaaggcttacgctgcccatctcaagcgttccggcaagattgagctgcctctgtggacagacatcgtcaagactggtaaacttaaggagcttgctccatatgaccctgactggtactacatcagagctgcttccatggctaggaaggtttacctgaggggtggtcttgganttggtgccttccgtangatctatggaggaagcaagaggaacgggaagccgtcctcctcatttctgcaaagaagcantggtggtgttgctcgtcacattcctcaagcaactccaagaccatgaancatttgttgacctccacaacaaaggggtgggaaaggaaaa

SEQ ID NO: 5376 - DNA, 469 bp, Arabidopsis thaliana
  unsure at all n locations
  Clone ID: LIB23-026-Q1-E1-F1
acgcgtccgccaatgcnnnnnnnnnnnnnnnnnnnnnnnnnnnnnnnnnnnnnnnnnnnnncaccaccatctgtacaaagcaaagttatcatcaaaggaaaccaaaccattctgagtttcaaagctattttccggcttggtttcttcagcaccaccaatggttcctccaattggtacttgggtatctcttacgcttctatgccaactcccacccacgtttgggtcgccaatcgaatccgacccgtttcggatcctgactcttccactctcgagctcacctccaccggatacctaatcgtcagtaacctccgtgacggcgtcgtttggcagacggataacaaacaacccggaaccgatttcgggttctctgaaaccgggaatcctgatttgattaacgacgacggttcccgggtttgnaaaactttgacaatccgacngaaacgttggnttccgggatnatgtcacgggc

SEQ ID NO: 5377 - DNA, 467 bp, Arabidopsis thaliana
  unsure at all n locations
  Clone ID: LIB23-026-Q1-E1-F3
acgcgtccgcaaaacctttttcttctctctaaccaaacaagaagaggactccattttcgcaagaatggggaggcttaagcaatgttggtcaagtctgctagtattggcagtgttggtgatcggaactggagccgttcccatcacttatctccaaagcgccgtcgctaaaggagccgtgtgtttggatgggagtgcaccagcttaccattttgacaaagggtttggttcgggtgttaacaattggatcgtccacatggagggaggaggatggtgtaccgacgttgcttcatgtaatgaacgtaagggtacaatgaanggttcttccaaattcatgaacaaagactttggattttccggtatcttgggtggcaagcaaagcactaacccagattctacaattggacagaatccaagtacatattgtgacggntatccttaccggnatgtanaaccgttaaccggaaaca

SEQ ID NO: 5378 - DNA, 501 bp, Arabidopsis thaliana
  unsure at all n locations
  Clone ID: LIB23-026-Q1-E1-F4
acgcgtccgccagcctccaacaacaaaatttaccaacactctctctttctctttctctctgaaaacttaaaacgatggctataaccgccactcaaaacgacggcgtttcactaaacgccaataagatttcgtatgatcttgtggaaactgatgttgagatcatcacctccggtcgtcgtagtattccggcacactccggcatcctcgcttcggtctcaccggtactgacgaacatcatcgagaagccgaggaagattcacggcggatcatcgaagaaagttattaagattctcggtgttccatgcgacgccgtttcagtcttcgtcagattcctctattctccgagtgtcacggagaatgagaatggaaaaatacgggaatccaatcctactgggctttaacaaaacgttgttataatgggggactcaagttaaagcaaacgggggcaactaaaanggcgtccggttaanaagaattaacccgccgaaaaacgttgtcgat

SEQ ID NO: 5379 - DNA, 470 bp, Arabidopsis thaliana
  unsure at all n locations
  Clone ID: LIB23-026-Q1-E1-F5
acgcgtccgaaagctcataagactattacttagaagagaatcgatcagatatgattttagcgcatcttccaagattccatctctcaatcctcgcgaaaccttctttctctctctcttcttcgcatttcagtttcttaaaccctaagccttcggtaacagtatctcgaacccttttctcattcgcgtctaaatcgaatctcgccactgttgaacccataccattatcggtctcagattcaaccgatttggatgatgcacctgtcgagattgcgctcgacaagctttttattccgccggagaccgatatatccggtgaagactcggcgagtttaacgacgaggatacttaagggttcgaatattgtgctgagcaagtacgcgagggacgcacaggtggttcangctgattatgtgaagagtagtgtcaagacggaggattgtccggccgatgggttgccggagtttgcgcct

SEQ ID NO: 5380 - DNA, 484 bp, Arabidopsis thaliana
  unsure at all n locations
  Clone ID: LIB23-026-Q1-E1-D2
acgcgtccgaaatcaaacggacaaggttaaggaccttgaaaattctgtggctgagttattggatttgcatagtgattgtaatcaccgttcgacagcaattcaatccgttgcaaatcggtaccaacccgtggaacaattaacggactttaaaaagttgcttgatgatgaattcacaaagctcaaggctacaccttcctcagtgccacaaaatgatcatttgatgcgccagttcagggaagcagtttggaatgttcatcatgcaggtgaaccaatgcctggtgacgatgatgaggacattgttatgaccagtactcagtgccctcttctaaacatgacatgtcccttgagcgggaaacctgtcactgaattancagattcaattcgcagtatggattgcaaggcacgtctatgaaaaatcctgtnatcctgcattacatangtcaacaatccaaatgcgaaattgtcctggtancaaggtgccgag

SEQ ID NO: 5381 - DNA, 480 bp, Arabidopsis thaliana
  unsure at all n locations
  Clone ID: LIB23-026-Q1-E1-B2
acgcgtccgcccacgcgtccgggcaagaagcaggaggttcaagcaccaaccagattatggctttctgaagcaatatcttcagaaaacaaaataaagtttttatttgattttcttattaccatattatatactattaaataagaaattcaaagttttttttttccattctttctttcttccggaggagggagagtatgatatgggtctttcacgtgtgacattgatgagatgatgaattcaaattatatctcataccaaaaaaaaaacacaaccaagagaaagaggcgtaaccttctgatttctttcttttaagatatcaataaaatctttcacattttctaatttttaattcttttcaagattttgttgtcccttcaacaatccatcagaagtagcagtttggtttccaagttaagttcctacgacctgantcagaaaacaagggactatggnactcaagtgagccaaaaagaacactcc

SEQ ID NO: 5382 - DNA, 483 bp, Arabidopsis thaliana
  unsure at all n locations
  Clone ID: LIB23-026-Q1-E1-B4
acgcgtccgcccacgcgtacgcttgacgaaannnnnnnnnnnnnnnnnnnnnnnnnnnnnnnnnnnnnnnnnnnnnnnnnnnnnnnnnnnnnnnnnnnnattttctagtgtttcattttgatccttcgtccttcctcnggagatttctcaaatctcntcaantattttgatttgccgccatgtatcgacgcgccacttccggcgtgcgttcggcctccgcaaggctttcttcttccctctccaggatcgcctctancganacagcttcngtttcggctccatctgcgtcgtcgcttcgcaatcagacgaaccgatctaagagtttctcctcggctctccgctcctttngaagtttgctctggntccaagcggtggagccaatgggntggaagctgggggatngccctgctaaccnttcgggctcaaactaagggatttcantcccggtttatgggnggaaantttggaacgggaaaatactca

SEQ ID NO: 5383 - DNA, 519 bp, Arabidopsis thaliana
  unsure at all n locations
  Clone ID: LIB23-026-Q1-E1-B8
ctgggcnctaccgagtccgganattcccggggtcgacccacgcgtccgcccacgcgtccgggtcactgtgccaggtgctcttgcacgtgatttgattgagcaggctgaggtggaagttgataggcttgaccagctgaaagctagccgaatgaaagaaattgcgttcaagaagcaatctgagcttgaagagatatatgctcgtgcccatgtagaagttaacccggaatctgctcgtgagagaatcatgtcgctgattgattctggaaacgttgagcctactgaattattggcagacatggatagccagatatcaaaggctaaggaagaagcatttagtagaaaagatatattggaccgagtcgagaaatggatgtcagcttgtgaggaagagagctggctagaagactacaatcgggatcagaacaagtacaacgcaagcaagangtgcacacttgaatctcaaagaagaactgagaaaactccggattctgggttagcaagaatcctgccatgggttga

SEQ ID NO: 5384 - DNA, 452 bp, Arabidopsis thaliana
  unsure at all n locations
  Clone ID: LIB23-026-Q1-E1-B9
acgcgtccgtccaantttgacctagttcaggttctatgttcttccttctttgtcatcttcatctccactgtttacttcatgtccaagccacgcaccatctacctcgttgactattcttgttacaagccacctgtcacgtgtcgtgtccccttcgcaactttcatggaacactctcgtttgatcctcaaggacaagcctaagagcgtcgagttccaaatgagaatccttgaacgttctggcctcggtgaggagacttgtctccctccggctattcattatattcctcccacaccaaccatggacgcggctagaaacgaagntcagatgggtatcttcgaaggcatggacgatctttcaagaaaaccggtcntaaacctaaagacgtcgacatccctancgtcaactgntcccctttctctcccaaaacatcgctctcaactatgggcatcaaa

SEQ ID NO: 5385 - DNA, 465 bp, Arabidopsis thaliana
  unsure at all n locations
  Clone ID: LIB23-026-Q1-E1-C10
acgcgtccgcttgattggctgcctctgagaactgataaaaatgatccgcttgttctatgcattgccggggctgatagcaccttccggctcgttgaggttactgtaaatgaaaagaaagctggctttgtgccccagtctaaatcagtaaaggagaggtttcgtcctatgcctatgtattcccctatcttacttcctgtgccacatgcgctggcactgcggatgattttacagttaggagtgaaaccatcttggtttaatacgtctagcacaactttgganaagatgcctcatttaatccgtgggatggctttcatcctcctaaggatctacggagttacatgattcagttacccgccttaangggaaccctgttcgtgccccgaaatgccggttgaagatactaagaaaccttaacnggaaagnaaggttgcntgcctggacngatgaaaagancaaaaactttta

SEQ ID NO: 5386 - DNA, 466 bp, Arabidopsis thaliana
  unsure at all n locations
  Clone ID: LIB23-026-Q1-E1-C11
acgcgnccggganattcccttttttggtgatgaataaaataggaatcgaacacgtggacggcgcagatgctaaagtgaccaaatccactggtgatccgggtaaagtttcgggtccggctcagttcacaacaagtggtgacgtggcggaggtgatagaggagcttcgaacggagaacaagcagttaaagagagccgttgaagatctccgggaagtaatatcaaacgtccgtccatactcgccggcgacaattgattacggatcacactcgaagtatcgcgaatccgagaggnnnnnnnnnnnnnnnnnnnnnnnnnnnnnnnnnnnnnnngggagatcgagagctgatcggtggagcagcgaagaagaacgacaaacgtcctgattacggtggggaagaaaagcaanggaagaagggcaatgtacctgaaggaactgaaagaaaactttgaaagggagctgcctgaa

SEQ ID NO: 5387 - DNA, 485 bp, Arabidopsis thaliana
  unsure at all n locations
  Clone ID: LIB23-026-Q1-E1-C2
acgcgtccgcttctctctattttgccgggaatacatatgatcgagtgaaacggcggacaaagctgtcgtgttgagtactaattcgccgtcgtttttctcagcgaaggagtggtgagagatgtcgagtctcgaagatatcaagaacgagactgttgatctggaaaaaattccgattgaggaagttttccagcagctaaaatgttcaagggaaggattgacaacgcaggaaggggaggacaggattcagatctttggccccaacaagctcgaagagaaaaaggaaagcaaacttctgaagtttttggggttaatgtggaatcnactttcatgggtcatggaaatggctgcanncatggccattgctttggcaaacggtaatggaagngcccccgggattgncaggatttngttgggaaaaccggcccggttggttacaaanctctaccancatttttancgannaaacaaaggccngggaagcgcgg

SEQ ID NO: 5388 - DNA, 475 bp, Arabidopsis thaliana
  unsure at all n locations
  Clone ID: LIB23-026-Q1-E1-C6
acgcgtccgccaaaatcctcgnnnnnnnnnnnnnnnnnnnnnnnnnnnnnnnnnnnnnnnnataatggcgtcgatccctccgccggagcttgacaacgactcactggcgtcatcgccgagatcggagtacgatagtcagccacgcgtacggttcatgtgtacttttggaggaaggatcttgccacgtccgccggataatcagctctgttacgtcggcggcgataatcgcatggtcgctgttcatcgtcacactactttcgcctctctccttagtaaacttgctaaactctccggtaaaagcaacataagcgtgaagtaccagctaccaaacgaagatcttgacgcgttgatttccgtatcaacggacgaagatgtagagaacatgatggacgaatacgaacgcgtcgcacaagaatcaaaacccacgcgcctctcgtcctccgccttttctcntcaacaaaaacgtcgccggaga

SEQ ID NO: 5389 - DNA, 493 bp, Arabidopsis thaliana
  unsure at all n locations
  Clone ID: LIB23-026-Q1-E1-C7
acgcgtccgcccacgcgtccggttttaaaaagggcaaattagagagatttctccttcaataacaaaaaatcgccagctttatctctctctttttcacatcccatggctagatggtgacgacgattcacgcataaactagggttcccccacaaatcatcttacacgtatcctctattccttccttcctttctccgtcatcatcatttttcccaccgacaacaatctctcggagtttgggtattattacttctctcatcaaccaattgtaccactagatctcccagattccttcattatctctatcaataatggcgttgaagtctagttctgctgatggtaaaaccaagaagctctgttcaaatcttcaatggtgtttaanttaatggttgccttcctttacaattttggggaagcaatggcaaacgaaantggggttttgggtaaaaaggagaacaagtaattggctccttggagaatgaaccaaacaagtggg

SEQ ID NO: 5390 - DNA, 518 bp, Arabidopsis thaliana
  unsure at all n locations
  Clone ID: LIB23-026-Q1-E1-C8
tctgtcnccctggctctaccgaatccgcacattcgcgggtcgacccacgcgtccgcaaaaccaagcgtggtgctgctgctcttgcacgtttgaaggtgtttgagggagtaccacctccttatgacaaggtcaagagaatggtcattcctgatgctctcaaggtgttgaggcttcaggctggtcacaagtactgcttgttgggacgtttgtcttctgaagttggctggaaccattacgataccatcaaggagcttgaggtgaagagaaaggagaggtcacaagctttgtatgagcgtaagaagcaactcaccaagctcagggcaaaggccgagaaggttgcagaggagaaacttggatcccagctcgatgttcttgcatcgatcaagtactgaagaaaatcagcatctatcttttggtttaactcttgttttggttttaaccaatcagatttgttttcctcccttgtatcactgttgaagtttaacacctcaattcagtttaattatcagttgatactt

SEQ ID NO: 5391 - DNA, 469 bp, Arabidopsis thaliana
  unsure at all n locations
  Clone ID: LIB23-026-Q1-E1-C9
acgcgtccgcaanaacaatcactccaaattttgtctgctcaccatttttccacaaagccaannnnnnnnnnnnnnnnnnnnnnnnnnnnnnnnnnnnnnnnnnnnnnnnnnnnnnnnnnnnnnnnnnnnnnnnnnnnnnnnnnnnnnnnncaactcgacacatttgacccagctccggttccttccgaggcatacgcctcctctactacttcaatcccgccgcttatcagcgacaaatatctcaccggagctgagtttattggcgtcggtcttctcgataaacccgaagatatcgcctatcatcaagactctaatctcatatatactggctgcatagatggatggggtgaaacgaagtcagtgttcaacgactcaagctaatggactcaattcgtttgagggattgggtcaataacgggtggtaagaacggctcgggaatcngccttttcggagttcaacgggggaaan

SEQ ID NO: 5392 - DNA, 482 bp, Arabidopsis thaliana
  unsure at all n locations
  Clone ID: LIB23-026-Q1-E1-D1
acgcgtccggcacctgatagagttgtgtatactacgatgattcgaggattctgtgagaagggatggttagggagcgcgaggaagctttggtttgagatgataaagaaagggatgcgaccaaacgagttcgcttacaatgtgatgatacacgggcattttaaaagaggcgaaatttcgcttgttgaagcattctacaatgagatgttgagaaatggctatggaggaacaatgttaagctgcaatacgatgataaagggtttctgctcacatggaaaatcagacgaggccttcgagattttcaagaatatgtctgaaaccggggttacaccgaatgcaatcacgtataacgctttgataaaaaggattttgcaaagaaaacaaaggttaaaaaaggcttgaaactatacaaaggagccttaaggcctaagnttngaagccctccnggtatngcatatgctgcactaatgagaaaatcctgaana

SEQ ID NO: 5393 - DNA, 453 bp, Arabidopsis thaliana
  unsure at all n locations
  Clone ID: LIB23-026-Q1-E1-D11
acgcgtccgtttgtctatctccctcttccatctcacatacttatatatttcatgcatgtcatgtgtatatatttcatgagttttgtctagttcatagaactgatgaactgatttagagagagagagatatatagggaaatttannnnnnnnnnnnnnnnnnnnnnnnnnnnnnnnnnnnnnnnnnnnnattaattactattgagattgagatcagaatgaaaatctccaaatctctctggagtgttatgatttctattctcttctatcttacttctgctccaccatttgtgatttgctcatctcttgaagtcaccattgataaccattcaccaagcaatctcaagactaaaggatccctagaacaagataagttgagtcatcaaatgataaatagcataaagcttcatggcattctcctaaggggtttccatgggctttcttaagccaatggg

SEQ ID NO: 5394 - DNA, 437 bp, Arabidopsis thaliana
  unsure at all n locations
  Clone ID: LIB23-026-Q1-E1-B12
acgcntccgccggtggcggngagaagaaacaaaggaaacccagaaagcatttttctcaatggcgtcgactacacgagaaaagtttgtatctttcataaacaacagatggctcgtcttcgtggctgccatgtggatacagtcttgtgctggcatcggttatttgttcggaagcatttctccggttatcaaaagctccttaaactataatcagaaggagctttccagacttggagtcgccaaggatctcggtgatagtgtcggattcatcgccggtactctctctgagatcttgcctcnttgggccgntcttcntgttggcgncgttcanaaacccaaccgttacngntgggtttggcttaacgtcaacggtcnaagcccgattcttcctctaagggctacgtgtggtctccaaggccttgggaacaatggggagaccn

SEQ ID NO: 5395 - DNA, 452 bp, Arabidopsis thaliana
  unsure at all n locations
  Clone ID: LIB23-024-Q1-E1-G12
acgcgtccgcatcatcacacacnnnnnnnnnnnnnnnnnnnnnnnnnnnnnnnnnnnnnnnnnnnnnnnnnnnnnnnnnnnnnnncctcgctctctctcaagctctcctagctcgtgcaatctctcaccatggttctgaccaacgtggatctttaccagctttctctggactcaaatccaccggttcacgcgcctcagcttcgtctcgtcgacgtatcgctcaatccatgaccaaaaaccgatctctccgtcctcttgttcgcgctgcagctgttgagactgttgagccaaccactgattcgtcgattgtggacaaatcggtcaactcgattangtttttggctatcgatgcggtggagaaggcaaatcaggtcatctgggccttccnatgggttgtgctccatggtcacatttgtatgatgaggncatgaggtataaccccaagaaccctt

SEQ ID NO: 5396 - DNA, 462 bp, Arabidopsis thaliana
  unsure at all n locations
  Clone ID: LIB23-024-Q1-E1-G9
acgcgtccgtgaacatcgagaaaaaatgagttggtggtgggctggcgccatcggagctgccaagaagaaactcgacgaagatgaaccatcacaaagcttcgagagcgtcgctctcatcatcggcgttantggaatcgtcggaaacagcttggcngagattctccctctttcngananacccggtggtccatggaaagtctacggcgtcnctcgtcgtcctcgtcctacctggaacgccgatcatccgatcgattacatccagtgcgatgtctccgacgcccgaagacacaagattcaagctttcccctttaancgatgtcacacatgtcttctacgtnacctggaacaatcgtgaatcgggaaaattnaaaactgtaaancaaatgggcncaagggtccgtnaagttntccaaacngattatccaaaaaggggccaaaancncccaaaaantttgtttccca

SEQ ID NO: 5397 - DNA, 462 bp, Arabidopsis thaliana
  unsure at all n locations
  Clone ID: LIB23-024-Q1-E1-H10
acgcgtccgcgaccgcgcaantctccctttagcttcaaagatccgaggcagaccagttagagtcaatgtcaagattcgaatgggattagggctattcatatcattcttagcaatggcggtttccgcaactgttgaacattacagaaggaaaaccgcgataagccaaggactcgcaaacgatgccaactcaacagtgagcatctcagcaatgtggcttgtaccacagtatgtactacacggtttagcagaggccttgaccgggataggacagaccgagtttttctataccgagtttcctaaaagcatgtcgagtatcgcagcttcgttgttcggtctangaatggcagtggctaatatcttggctantgtgattctaaatgcggtaaaagaatttctcaaaagcanggcaatgtnnagccgggattgaagataacatcaacaanggtcactatgactattact

SEQ ID NO: 5398 - DNA, 527 bp, Arabidopsis thaliana
  unsure at all n locations
  Clone ID: LIB23-025-Q1-E1-A2
antggttgcctgttcctacggcccggaantcccggntcgacccacgcgtccggtgaaagtgacaagaaaaaagaaaaggaattaancaagggtgctgaaagaaaagatctgaatgctgacaagccaggttctgatttaactcctgggaatgcgagagaggaagatgaagttcccaatagagagaagaatgtgcacaaagttcagttatgggctgagatcaggccatctcttcaagcaattgaggacttgatgagtgtccgtgtcaaaatgaagggggattccacaaatggcgagcaagaagctcagaaattgaattccttagcctcaactgatgagaccgagtcttcaaagggagtatgtgagaatgattccgaagacgagttctatgatgcggagatatcagatccaattcaggatggntcttcaaatggcacaagttgtctccagcatgtctgctgccgctnannaactttcccnagnaccggnatgcccctggtaaagtcatnttcaagttcgtancccggggg

SEQ ID NO: 5399 - DNA, 530 bp, Arabidopsis thaliana
  unsure at all n locations
  Clone ID: LIB23-025-Q1-E1-A4
actggtttgcctgtnccacggcccgganatcccgaatcgacccacgcgnccgaagaaatacaaaataattgagttttttttttaattagaaacaaatggggttgagtggtgttcttcatgtggaggttgaggttaagtctccggctgaaaagttctgggtagcccttggcgacggcatcaatctcttccccaaagctttccctaacgactacaaaaccatccaagttctanccggcgatggcaacgctcctggctccattcgcctcattacttatggagaaggatctccactggtgaagatatcggcggagaggatcnaagcagtggatttggagaacaaaagcatgtcgtacagcatcattggcgganaaatgttggagtactacaaaaccttcaaaggaaccatcaccgttatccctaaggatggnngtancccttctgaaatggnctggtnantttgngaaaaccgcccatganantcaatgntcanaaggcctcangggcctttgctgtcaagaacttcaaagaga

SEQ ID NO: 5400 - DNA, 458 bp, Arabidopsis thaliana
  unsure at all n locations
  Clone ID: LIB23-025-Q1-E1-A5
acgcgtccgttctcttattataagaagacaggagtgccaaaacgtgtaatgttccatgagaatggtgaatggattgatttgcctgatcatattctatgcgacatcaggaatgatcttgaagcaaagagagctacaattgagttcaattggtgcggtcgccattttctcctggatttcttgcacatgtatcgactagacttggaaacaggtgtaaaaacccagcttgcttggattgatattgctggcaaatgctttttccctgaaacttttgacaccctcgaaagggacggctgccatcatatccgtggggaaaattcggaacaacatgatnaacgttagattaaacctcacaattgaaattgatggtaaatantgggaagttaccgaaggctgaaatttgatggtggccacngacgaatccnggtgacaataatnggatgaatttcaagnccggttca

SEQ ID NO: 5401 - DNA, 470 bp, Arabidopsis thaliana
  unsure at all n locations
  Clone ID: LIB23-025-Q1-E1-A6
acgcgtccgcaaaaccctagatcgaaatcttatctctctaatctgttgttacagttcgtagagtcatggcgttagcatcaaccacgttgccgacgaagtccggattatctctttggtgtccgtcttctccgtctctcgctcgccgatttcccgctcgtttttctccgatcggttctagaatcgcttccagaagcctcgtcactgcttcgttcgctaacgagaatcgcgagtttgtgattgttggtggaggaaatgctgctggttatgctgctagaacttttgtggaaaatggaatggctgatggtcggctatgcattgtgaccaaaagaggcttacgcaccttatgagagaccggctttgacaaaagcttacttgttccaacaagagaagaanccanctccgtttacnangaatttcanacttgcnttgggaggtgtggaaaaaaggaaaccacaanattgggaataagg

SEQ ID NO: 5402 - DNA, 455 bp, Arabidopsis thaliana
  unsure at all n locations
  Clone ID: LIB23-025-Q1-E1-A8
acgcgtccgcaaggtcggtggtgcttcaaatcgacggtttttcccggatcaaggaaagcatggtacttggatttgcattccacagattccgctgttgttcgcgtaaatgtttggattgttcaatctgtctagctgaggactttcagggattctacctttaagcttgttgttacgcaaatccaatgtattcagctcgcttagcttggataacgttttcgggatttcgccagtgaggttgttgtgtgaaaggtctaagctctctaccttctcaagatctccaaaactttgtgggatnaatccaagagaactcgttgttggnaaaatttaaaacctttangctttgagattgcctaaagaaattgggattctccgtgtacctgttcntgganaatctaanagagtgtaaangtagaagttccngccaaaanaacttgtttgaattctccantcacaca

SEQ ID NO: 5403 - DNA, 522 bp, Arabidopsis thaliana
  unsure at all n locations
  Clone ID: LIB23-025-Q1-E1-B1
antggttcgcctgttcctacgcccnggaatcccgaagtcgacccacgcgtccgggtttttgaaatttctatcttccatttccatctgatgaatctctgacgatgtctttgagaactcgagcatcgtcatggcctcgtcttctacttcgccggaaccctagatcttcattttctcgtcagatatctactctcgattcctcaacatcaacatttcccagaagaatctccggttactactcctcctccttctttcccgtaaatcaaacgccatggatctcatctcagaggtaccgtttcttctcctcaagcacaatgtcaccatcggaagctgatagagtagtgagagaacttatagcagaggttgagaaagagaagcagcgtgagagagaggagagacaaagacaaggacttgattacaaagacattgatgccgaagacgaagaagattacttagggattgagccgtttatcgaagaagcntaagaagcagaatttgaaagatgatgggtgaattaaataagcg

SEQ ID NO: 5404 - DNA, 443 bp, Arabidopsis thaliana
  unsure at all n locations
  Clone ID: LIB23-025-Q1-E1-B10
acgcgtccgcggacgcgtgggcggacgcgtgggcggacgcgtgggtccatatcgaggtcggagtggttttgctcgaggacgaacaaagtttgtaaacaaccccaaacgagattttcctggatttcgttcacgatctccagttagatcaagagaaagatcagatggttcatcctcgtctttcaggaatagatcacaggaagagttcagtgggcatacagacttttctcatcgaagatcaccctcaggttacaaagtggagaggatgagctcgcctgaccattctggttattcaagagaaatggttgtcagaagacacaattctccacctttctcgcatagaccatcgaatgctggaaggggccngggttatgcaanggggccaaggttatttaggggtccaaggtatggaaganatgggaactcaatttaggaaaccatcngtt

SEQ ID NO: 5405 - DNA, 460 bp, Arabidopsis thaliana
  unsure at all n locations
  Clone ID: LIB23-025-Q1-E1-B11
acgcgtccgcccangcgtccggaagaagactaactgtgttttttttttctttcctcgatgcctagatcaagcagatgggtcaatcagcgagctacctctaagattaaaaaatttatactctttttgggtgtagcctttgtcttctacctctacagatacccttcttcgccatcgacggtggaacaatcatccacttccatctacaacatttccgttaaggatattgaagggaaagatgtgagtttgagcaagtttaccgggaaagtgcttcttatagtcaatgtagcctctaagtgtggtctaacacatggaaactacaaagaaatgaacattctgtatgccaagtacaaaactcangggtttgagattttancatttcccttgcaaccaatttgggtaagtcaagagccaagcaagcaacatggggattaanggaaccgttttgcaataatctnaaagc

SEQ ID NO: 5406 - DNA, 516 bp, Arabidopsis thaliana
  unsure at all n locations
  Clone ID: LIB23-025-Q1-E1-B2
actgggttgcctgttcctacngcnccggaaatcccgaagtcgacccacgcgtccgcccanaacgtccgcgaaaacgaacgaatcagtgtcggctcttgggttccgaacaaaaacaacattgtacgtcggatccaaaaaacgcgcgttatataaacgcttaatttctccaggattcttcttctgcttccgccattgctcgaaaatcgcgtcttctgacaatgtgctgaaactgagtcatcgtccgagttagcaaagtgaaacttcgaagtttctcttacactaatctcaggtttgggattttgtaagaaaccgcgtttacaaaatgttcaagttgaagcaatggttgatttatttggtgtgttcgttagtaataatgaacacanaaggactgtttgtcaatattacatttgttcgaaacgcaatcgcnaaangggccgtttgtttagatngaaantcaccatcttancatttggntaaangttctgnaactggaatcaataaatggttaagaaactg

SEQ ID NO: 5407 - DNA, 466 bp, Arabidopsis thaliana
  unsure at all n locations
  Clone ID: LIB23-024-Q1-E1-G11
acgcgtccgcccacgcgtccgatttctagggacctgtttctctctatacgtttctcaggaaagtatattcntatgtattttaatcagacaacagagattgcaaaagaaatgtatttttcataaaactttttaattccgataaaaaaaaaaaaaaaagggcggccgctctagaggatccaagcttacgtacgcgtgcatgcgacgtcatagctcttctatagtgtcacctaaattcaattcactggccgtcgttttacaacgtcgtgactgggaaaaccctggcgttacccaacttaatcgccttgcagcacatccccctttcgccagctggcgtaatagcgaagaggcccgcaccgatcgcccttccaaacaagttgcgcaancctgaaatggcnaatggggacgccgccctgttaccggcgcattaaagccccggngggttgtggtgggtaaccccaancgtgaa

SEQ ID NO: 5408 - DNA, 467 bp, Arabidopsis thaliana
  unsure at all n locations
  Clone ID: LIB23-023-Q1-E1-H6
acgcgtccgccggcttctctcattctcatggtagctgttacgcctgcagttgtcgttgtttgcctcatgttcttcatcagacctgttggtggtcacaagcagatccgtcccactgatggagccagctttactttcatctacggtgtctgtcttctacttgctgcctatctcatgtccgttatgcttantcaagatctggtcgttgttagccacaacgtaatcactgtgttcaccattgtgttgtttgtcattcntgttgtcncaatcttgggtccaatcatgataagtttcttcacggagacaaacgancctgatgacacaatagaagaacctcttgtccaaaacgagatnaccatgaaccaggactgcaaacacctgatcnaatcttgagtgaantggaanatgagaagccaaaagatgtagatttgcttcctgcctcangagagacataagaagaattgccattt

SEQ ID NO: 5409 - DNA, 449 bp, Arabidopsis thaliana
  unsure at all n locations
  Clone ID: LIB23-023-Q1-E1-H9
acgcgtccgctccttataaataagagaagctcagtgcgttactcaaatggccgtcactttggtaacgtccttcgcttcttcgtcttctcgcttccatttccgctcattctcctcttctccgtcgtctctctcctcttgtttcgtccgattccagttcccctctcgccttagactcgcttttgccgtcacgcctctctactcttcttctagagccatggctcatacaatctcacacgctactctcggnctcactcaggctaactccgtcgatatcctaagatctcattttcggggaaggagatcgacgtgacggaatggaaaggtgatatactcgctgttggagtgacggagaaagacatgggtaaaggatgtgaactccaagttcgaaaaancccgantctgaagaagcttgatggccaacttggggggggcttttaaccgaagtcccc

SEQ ID NO: 5410 - DNA, 461 bp, Arabidopsis thaliana
  unsure at all n locations
  Clone ID: LIB23-024-Q1-E1-A11
cccacgcgtccgccnacgcgtccgcggacgcgtggggagacatcagaggacgacgatcgatggatcctcggatgtggcacaaagtcgccgctatttccggtatggctgctcttggtttgggaacttatggtgctcatgtctttaaaccagagaacccttcttacaaacaggtgtggcaaacggcttcactttaccatttggttcacactgctgctcttgtttctgctcctagcaccaaatatcccaacatttttggtggcttgttgactgctggaattgtagccttttccggcacgtgttatatggtagcgctgcgggaggacagaaagttttcgacattggcaccaatcggaggcttgcgttcaatgctgcatggggcaactttactttccaaacaatcccataaccaatctataatgtcaaatttgtnggtcaagcctaacccaacatatgaactcact

SEQ ID NO: 5411 - DNA, 459 bp, Arabidopsis thaliana
  unsure at all n locations
  Clone ID: LIB23-024-Q1-E1-B10
acgcgtccgagttcttccatgcatcaacctggtgcaatgttaatgtctgcagcactgacgagctctcacagaaactacgctgtgcgtagagatatagcagatgcaagagaattttgtgtttgcttcatctgtccagctgaaaacgttggaggtgtgattggaaaaggcggtggtttcattaatcagatcaggcaagaaactggtgctactattagagtcaatacctcagaaactgatgatgatgattgcatcattttcatatcatcaaaagagttctacgaagatcaatctccagcggtgaatgcagcaatacgcttacaacagcgatgcagtgagaaagttggtaaagatgcaaatgatttagcaatctcctacgcgtttacttgtatcgagttcccaaatcggggtgtctcantggnaaaagtggagcaattatatctgagatgangatgttacaag

SEQ ID NO: 5412 - DNA, 451 bp, Arabidopsis thaliana
  unsure at all n locations
  Clone ID: LIB23-024-Q1-E1-B11
acgcgtccgaaaaatggagggaaccttctcgccgctttgcttacgttcttcttcgaacctctgttacttctccagtaatgtttcaccagattctcaccgttctataggatttacattggttgattcgctccggccaacgaacttggtttccctgcgaacgggaaataaacgttcgtcatcgtcttcactacggctatttctctctccgactagaagcgctctccgtacgccgactatttccgcggaggaggtgaaagatgtcccgatgccgaagattgataagagcggccgattaagcagtcctcgagccgcacgcgagctcgctcttgtaatactttatgccgcatgcttanaangntctgaccaattcgtctcttgagaanagaataaacgcaagaaagaaaacctggatacaanttgacaanaattcttgntgggatacaaacacatg

SEQ ID NO: 5413 - DNA, 460 bp, Arabidopsis thaliana
  unsure at all n locations
  Clone ID: LIB23-024-Q1-E1-B9
acgcgtccgcccacgcgtccgcccacgcgtccgcccacgcgtccgcccacgcgtccgcccacgcgtccgctgcttttgaatttcaaaccttcacataaaaaaaatacttttgaatccgtgtttcattcatcgaatctttttccgataactatggctgaggaaatcaagaatgttcctgaacaggaggtgccaaaggtagcaacagaggaatcatcggcagaggttacagatcgtggattgttcgatttcttgggaaagaagaaagacgaaacaaaaccagaggagactccgatcgcttcagagtttgagcagaagggtcatatttcagagccggagccagangttaaacacgaaaagtcntcctgaaaaagcntcaccgaagcgacaanttcttctaactcctcaagttaaggaagaagggtcaaatggtgagaanaaggaagaataagaaggngaaaga

SEQ ID NO: 5414 - DNA, 464 bp, Arabidopsis thaliana
  unsure at all n locations
  Clone ID: LIB23-024-Q1-E1-C11
acgcgtccgcggacgcgtggggcaaaaaagtcttacgtcacactcccatgtagtagccgtcacttctcgtcttcctcctagagattacccaactctctcgcttcttctttttcctcttagggtttcttcatcctttagggtttccacaaaaattcaaaacctacttggaaatatttgggcttgaagaaggaagaattagatggaaggaagaaggattacggcaagccctagaccttgtagtggaagaagaattgtggctaagaaaaggtctcgacccgatggattcgtcaacagtgttaaaaagcttcaacgaagagaaatctcttctcgtaaagatcgagctttctctattagcaccgcccaagagagatttcgtaacatgcgtctcgtggagcaatatgatactcacgattcctaaaagggcactggtttaaatttgcaattaccgttttttgatgaaaaan

SEQ ID NO: 5415 - DNA, 509 bp, Arabidopsis thaliana
  unsure at all n locations
  Clone ID: LIB23-024-Q1-E1-C12
acgcgtccgcccacgcgtccgatttctattccaantcccaaaaatggcgattcgtcntcctctgatctgtcttcttggttcattcatggtagtggcgattgcggntgatttaacaccggagcgttattggagcactgctttaccaaacactcccattcccaactctctctataatcttttgactttcgattttaccgacgataanagtaccaacntcnaagtaggtaaaggcggagtaaacgttaacacccataaaggtaaaaccggtatcggaatcgccgtgaacgttggcaacggaagtgtactcgtggacacangcaaagggcaaancccggatggaacggaacaacaacgttaaccgtttggcaanccggaaaaaaggtcaaccggaaggtgggcnttcgcaanttcaaaaaccggggtnaaaancccnggttaaaaagaaancngacntttagggaattccggtttaaaagggccggttntttaccgggtggcaacaaagcccc

SEQ ID NO: 5416 - DNA, 456 bp, Arabidopsis thaliana
  unsure at all n locations
  Clone ID: LIB23-024-Q1-E1-D10
acgcgtccgttaaagccatatcttgcgaatggctataatcgcaggtaatcatctctaaaattctctctgcagtttgtctttcccgaattgataagtcagtcgcttctgcaactgtgttccttctgatacccaaaactttccatttgggatagtggcagaattagtggaagaagtaagcatgagcagggtcgagcatgtattgaactatctgaaacgtaggcagctcgagaatcctggtttcttatatgcaattgaggacgattgtgggaatgttttctgggcggatccaacttgcaggttgaattacacctactttggtgatacctagtctttgacaccacctataggaggggtaaagangtatcaagtgcaatttgctgccttcaccgggttcaaccatcatgggaagccggtcctttttgggtggtgcnccaaaatcaacgaatccgaancccc

SEQ ID NO: 5417 - DNA, 457 bp, Arabidopsis thaliana
  unsure at all n locations
  Clone ID: LIB23-024-Q1-E1-D11
acgcgtccgaatcgatgcagtttctggcttccgaagaagaaaagatcatgcgcgaatactcgaatcgagagttctatgttttgtggaaaccatagccagagattggaaggtcaatggattccatgccctattgatccttctcagagaatctcgaatggcatgtaaagagatgtcctttacttaaacaaactgtagaattgtctggtcaacgattttatcagaagggtattaatgctgggaacgacgaanaagaagaaaagatgggatcttgttctcttgttacttcagagatgaagagaaatctgctctatagtatgagtgtttctaagtttcatcagcttattaagaaaattgaggatgttcatggcggtattttgttaaagatatccaaaaatcctaatttgcaacctgaaacctgttacataagggttaataaggncatagttagaaattacca

SEQ ID NO: 5418 - DNA, 468 bp, Arabidopsis thaliana
  unsure at all n locations
  Clone ID: LIB23-024-Q1-E1-D9
acaatacagccctgctaccgtggagaaatcatggtatgcttggtgggagaaatctgacctttttaaggcggatgctaagagttccaagccaccttttgtaattgttcttcctcctccaaatgtgactggagccttgcatattggccatgcgcttacatctgcaattgaggatacaattattcgttggaagagaatgtctgggtataatgctttgtgggtacccggggttgaccatgctggtatagctacacaggtggtggtcgagaaaaagatcatgcgtgatagaggcatgactaggcatgatgttggccgtgaagaattcgtaaaggaagtgtggaagtggaagaaccagtacggcggtacaattctaacacagctacggcgactaagaaccttctctcgactggtccccgtgaantgttttacaattggacnaagcaaaagattaaaaagctgtcactgaaggcc

SEQ ID NO: 5419 - DNA, 443 bp, Arabidopsis thaliana
  unsure at all n locations
  Clone ID: LIB23-024-Q1-E1-E11
acgcgtccgcccacgcgtccgggggattcacaatgtggatggggagaagaattataaggcttacatgtctcatgactactttgatgctgagttgacccagcttggctggaaacaggtagatagtttgcgtaagcatgttcattccagtggacttcacaagaagatcgaactggtcatttcgtctccactgatgagaaccttgcaaactgctgttggtgtttttggtggagagggctacacggatatgagtgatgtactacctctaatggtagcaaatgcaggaaatagcagccgtgcagctatatcgagtttaaactgcccaccagttattacagaggagtcctgcagagagcatttgggaatgcatccatgtgatcagaggagaaatatcagcgactatcagtttcctttccctgcagtttgactttcactgatagaaancc

SEQ ID NO: 5420 - DNA, 455 bp, Arabidopsis thaliana
  unsure at all n locations
  Clone ID: LIB23-024-Q1-E1-F12
acgcgtccgcaaaaccttctcctctcctctgggagatctccatcttcttcgcttcttcgcttccccgcctgaaacaattactcgatctcgccggcggaacaagctctccgtttctcnttccggcagatcgattcttccaattccttattcctttctaggtcttccttaagaaacccttactttcttcaaaatctgcatttatggcgattagggttaccttcacctactccagctatgttgctaggagcattgcttcatccgccgggactcgtgtcggtaccggcgacgttagatcatgcttcgaaacatgggttcgtcccaggttctgcggccacaatcagataccagatattgttgataaatctnccggattcaacacatggggtccaaacncaaggcctcgtgctcgacaacttcatcaatgtatagcaccaatgcgaaggaaaacctcgaag

SEQ ID NO: 5421 - DNA, 468 bp, Arabidopsis thaliana
  unsure at all n locations
  Clone ID: LIB23-023-Q1-E1-H5
acgcgtccgagagaagaaanatatagaaaaaaaatgggaggcaanggtgtgatgatggtggcnatactttgcctttgggcactctctgcaacatctgaagcactaacagangctgacccaggtttgatgatgaacttctacaangacacgtgtcctcaggccgaagacatcgtccgtgaacaantcannctcctctacaaacgccacangaacaccgctttctcttggctccgtaacatcttccatgactgngccgttgagtcatgtgatgcgtcgcttttgctggattcgacaagangagagctatgataagaaagaacactacaaggagcttcggacttaagaaacttntacgtacatcgangaagatnaaagggaagctctcnaagaagggaagtgtcctgggtgttggccncaatgttctggacantccccgtccntgtccngcaaagaagaaaggnaatccaa

SEQ ID NO: 5422 - DNA, 451 bp, Arabidopsis thaliana
  unsure at all n locations
  Clone ID: LIB23-023-Q1-E1-F12
acgcgtccgcttcatttatctctctctctctctctatttcttttgcttccttttggtatttgctttgtatgtttgttttgagatcaaaatggcttcaagtgcttcaaagttcatcaagtgtgtgactgttggtgatggtgctgttggtaaaacctgtatgctcatctgctacaccagcaataaattccccactgactacataccaacagtttttgacaactttagtgcaaatgttgttgttgaaggcaccactgtcaatttggggctttgggacactgctgggcaagaagactataanagattaaggcctttaagttacaggggagcagatgttttcgtcttgtctttctcattagncaaccgagctanctacgagaatgtttttaanaagtggatccctgaactccaacactttgctccaaggagttccccttgtcccttgttggtacaa

SEQ ID NO: 5423 - DNA, 481 bp, Arabidopsis thaliana
  unsure at all n locations
  Clone ID: LIB23-023-Q1-E1-F3
acgcgtccgcccacgcgtccgcccacgcgtccgattgcattgcctgcaatgactatgtagctcttgcccacaccgatcttgataaggaaaccgaggaaataatagcggatgtacttggcgttgaagttttccgtcagacaattgcaggcaacattctcgtgggcagttactgtgccctatccaacaaaggtggaatggtccatcctcacacctcagtggaagacttggaagaactctcaacacttcttcaagtccctctcgttgcaggaaccgtgaaccgtggtagtgaagttatcgctgcgggtatgaccgttaatgattggacctctttctgcggttcagacacaactgcgactgagctctcctgtcatagacaagcatccttcaagctaanggaaacccaanccaactctaacctcaatgagatgaaggaaatcaattgattcgaaaactaangtttaaaatttgtntggtttggaat

SEQ ID NO: 5424 - DNA, 498 bp, Arabidopsis thaliana
  unsure at all n locations
  Clone ID: LIB23-023-Q1-E1-F5
acgcgtccgcaacaacaaatcttaaacgttttactttgtgctgcactactcaacctcaatggccgcctcaacaatggctctctcctcccctgccttcgccggtaaggccgtcaagctttcccccgcggcatctgaattccttggaagcggccgtgtgacaatgatgaagactgttgccaagccanagggcccatcangcagcncatggtacggatctgaccgtgtcaagtncttgggtcnattctctggngantcantgaanctacccttatcggagaatttccccggatactaacggatgggaacaccgccngactttaagctgnaccccnagaacattccaaagggaaccgtgaactataaatttatccacagcaanggtgngccaatggctccggaanccctaangctgcngtccntcccntaagccttttgggctaagaaaacngnntccaagnttcggaaantgcgggtttggttcaaaggccgggttcanaa

SEQ ID NO: 5425 - DNA, 471 bp, Arabidopsis thaliana
  unsure at all n locations
  Clone ID: LIB23-023-Q1-E1-F6
acgcgtccgcaaaaacactatggataagacaatgacactgttcttgctcttgtccactctcctcctcacgacttctttagctaaagatctctgtcataaagatgacaaaactaccctcctcaagatcaagaaatccctaaacaacccttaccacctcgcctcatgggatcccaaaaccgactgttgctcttggtactgcctcgagtgcggcgacgctactgtcaaccaccgtgtcacttccctaatcatacaagacggcgagatctccggtcagatcccccctgaagtcggtgacttaccgtatcttacatcccttatcttccgcaaactcactaacctcactgggtcacatccaacccactatcgccaaagctcangaacctcacttttctcagactaagctggacaaatctcaccgggtccggttcctgagtttctgagtcagctcaagaatcttgagtacattgacct

SEQ ID NO: 5426 - DNA, 477 bp, Arabidopsis thaliana
  Clone ID: LIB23-023-Q1-E1-F7
acgcgtccgatcaaaccctaaacctaaaaccccttattttcccgccaatgtatcaatccatgaatctatcagtttcttccaatttcactcaccgatcactcctcgaatcacgatttcctatattctccaccggattccgcaaatccgtcaatctcaaacctccccgtgtctcatctggtcctgaatccaacgattcaggtcacgaaaccttaaccgataagcttatccatctcctcagagctgttccagattgggcagacgagattaaagagcgtgggatgcagcaagaaacgctctctctacacacacgagaaatgggttgaacatagaagctctcttcgccatgtgcgtcatctactctcgagcttttcttcacgagttatactctccctggattccacctgtttcctcctcacaaagcgtcgcgggttgtgattggcaagctaacaactcccgccggtgggcttgggattgggc

SEQ ID NO: 5427 - DNA, 467 bp, Arabidopsis thaliana
  unsure at all n locations
  Clone ID: LIB23-023-Q1-E1-F8
acgcgtccgcaaaatatggcaccaagctcaaaaccaaatcacttctaaacacgtggcagtgatcggagccggaccagccggtctcataacgtctagggagctccgtcgtgaaggtcacagtgtagttgtgtttgaacgggagaaacaagtcggtggtctatgggtttacacacctaaatccgattccgatccacttagccttgaccccacccgatccaaagtccactcgagcatctacgagtctctccgaaccaatgtcccgagagaaagtatgggtgtcagggacttcccgtttttgccacgtttcgatgacgagtcaagagacgcgagacgttatccaaatcatagggaagttcttgcgtatattcaagactttgctaaaaaatttaaaatanaaggagatgattcggttcgagaacgaagtggtcnccnttgaaccggttgacacggaactggaggtcaattcn

SEQ ID NO: 5428 - DNA, 473 bp, Arabidopsis thaliana
  unsure at all n locations
  Clone ID: LIB23-023-Q1-E1-G1
ttctttctattcaagattcacaataattgccaagcgaacaagtctttgcctctttggtttactttcctctgttttcgatccatttagaaaatgttattcacgaggagtgttgctcggatttcttctaagtttctgagaaaccgtagcttctatggctcctctcaatctctcgcctctcatcggttcgcaatcattcccgatcagggtcactcttgttctgactctccacacaagggttacgtttgcagaacaacttattcattgaaatctccggtttttggtggatttagtcatcaactctatcaccagagtagctccttggttgaggaggagcttgaccattttcgcttgttgccgatgaactgtcacttctaagtaataagttgagaaaaatggtacttgccgaaggttcaaagcttgctccgcggcgagtacttctcaaaaaggggtgttcaaaggaaacaanttcgttc

SEQ ID NO: 5429 - DNA, 451 bp, Arabidopsis thaliana
  Clone ID: LIB23-023-Q1-E1-G10
acgcgtccggaagatgctaccttgtctgggtagaaaatggatgagattgtcaacgaggaatctaaaaccaacttggaacttgataaacgtcgttgacgcaagtaaaacaattgtgagaggaataagcggtggagctgaaacgatagctaaagagagagttgacaccgtagtgatcggtgccggagtcgtaggtttagcggtggcgcgtgagctcagtctccgcggcagagaagttctgatcctcgacgccgcatcatcgttcggcaccgtgacgagttcccgcaacagtgaagtcgtccacgccggaatctattatccaccaaactctctaaaggccaagttttgtgtaagagggagggaattgctgtataaatactgctctgaatatgaaatccctcataagaagattggtaagcttatcgttgctacgggattctctgaaataccgaaa

SEQ ID NO: 5430 - DNA, 450 bp, Arabidopsis thaliana
  unsure at all n locations
  Clone ID: LIB23-023-Q1-E1-G3
acgcgtccgggagactcatcgttgcaacaacaacaaatttcagaagatccgaagacgaaacgatgcctanaagtgcgacaatggtcggagctttgctgggtctcggtacccagatgtactccaacgccctccgcaagctcccttatatgcgtcatccgtgggagcatgtggtgggtangggacttggngctgtgtttgcgaaccagctcgtgaaatgggatgtgaagcttaaggangatcttgatgtgatgctcgctaaggctanagctgctaatgancgccgttactttgatnaatatcgggattaattttgcgtgatcttgaagtcttcacaaaaaganntatcctccctgaaccatctcnngtgctggnttgtctgatnttcctgtnaancgttcncncctcgcttggctcagtccggagtcttncancacgtttcaaatcactaag

SEQ ID NO: 5431 - DNA, 446 bp, Arabidopsis thaliana
  unsure at all n locations
  Clone ID: LIB23-023-Q1-E1-G9
acgcgtccgcgaagcttttgaaggtaagaagagagtacacgtcattgatttctcgatgaaccaaggtcttcaatggcctgcacttatgcaagctcttgcgcttcgagaaggaggtcctccaactttccggttaaccggaattggtccaccggcgccggataattctgatcatcttcatgaagttggttgtaaattagctcagcttgcggaggcgattcacgtagaattcgaataccgtggattcgttgctaacagcttagccgatctcgatgcttcgatgcttgagcttagaccgagcgatacggaagctgttgcggtgaactctgtttttgagctacataagctcttaggtcgtcccggtgggatagagaaagttctcggcgttgtgaaacagattaaaccggtgattttcacggtggttgancaagaatcgaacataacggacc

SEQ ID NO: 5432 - DNA, 451 bp, Arabidopsis thaliana
  unsure at all n locations
  Clone ID: LIB23-023-Q1-E1-H12
acgcgtccgcccacgcgtccgcaggttatagttgagaaatctgctgctcaaggtttacctgaaggatggatcaagaaacttgaaataacaaatagatcaggccgtaaaaccagaagagatccattcttcattgaccctaaaagtgagtatatctttcaatccttcaaagacgcatcacggtatgttgagactggcaatattggacattatgcacgtaaattgaaagaaagtgatatcgaagatgatgattccggaaatggaaagactgttcttcgtctggagtatgtggacaagagatctgcaaatgatgtattggaaaaagagaaaacgatagatgatgtcaagaagaagtaaacggngaaacttatcttcctccgatgaacattccaagaattgtnaaatgacttctgacttgagcattgtaacctcacaagttcttgaggattgggga

SEQ ID NO: 5433 - DNA, 481 bp, Arabidopsis thaliana
  unsure at all n locations
  Clone ID: LIB23-023-Q1-E1-H2
acgcgtccgcccacgcgtccgttaagagtcaatatggtggtcatgattttggttcgacatcttcatacggtccttggatagaatctgaggttgggattactgagtatgcaaaactaggaagcagcaacaaatctcaaggtcagcggagattgaatccattggcccgtcagttctctcttgcagatgctaaacaaaagccatatggctatggtaaaaaccaagctgcagatgatttatcgctagtggtgaatactagcggtttatacattccagctcgttatagggaggaccataatgtagtagatgcagacttagcacaatcctcagtaaatgtggagcgttttcttcccaacatgtcacatggcggttcctcacttataaactccaaaggnaagacagttacnttgggtccaactaaanttgantgccgtgganccaaaaccccaaaatttcagttaaaggggtataaaaganttttaac

SEQ ID NO: 5434 - DNA, 479 bp, Arabidopsis thaliana
  unsure at all n locations
  Clone ID: LIB23-023-Q1-E1-H4
acgcgtccgcttaagtttaagaggagaaactatcggnnnnnnnnnnnnnnnnnnnnnnnnnnnnnnnnnnnnnnnnnnnnnnnnnnnnnnnnnnnnnnnnnnnnnnnnnnnnnnnnnnnnnnnnnnnnnnnnnnnnnnnnnnnnnnnnnnnnnnnnnnnnnnnnnnnnnnnnnnnnnnnnnnnnnnnnnnnnnnnnnnnnnnnnnnnnnnnnnnnnnnnnnnnnnnnnnnnnnnnnnnnnnnnnnnnnnnnnnnnnnnnnnnnnnnnnnnnnnnnntgttgtctctctcggatctcccaagtacactatgggaaatgatctttggtatggacctgacagagtgaagtactangaccctttccgttcaaactccgtcttacctcancggngaaattcctggcgaattaagggttggaaaaccgcccggtttatccgcagaaccccggaanccttggcaaaaaacangaactccttggagg

SEQ ID NO: 5435 - DNA, 428 bp, Arabidopsis thaliana
  unsure at all n locations
  Clone ID: LIB23-023-Q1-E1-F10
acgcgtccgcccacgcgtccgggtgctcaagagtgcaaacaaatatttgcaagattctattgtgttaatgagaaagcttcttcaanaacaactctcaggttccaagaagggtgctaagaaaggtgctcaagtaacagctgtgccagaggggaagctaaaaggcctagtatatgtgaatgagcaatttgatggatggagagctcactgcctgcggattctgcaaagtagatttgaccagcaaacctgtantttccccccggatacagagatgcttgcanaactnagtgcaacattgttgcangagggaaaaaacttgaaagccattcaaaaggtttgcatgcctttccttaaattcaagaaggacgangcaatatctattggcactcaggctctgaacttgacggttaccttttgganatatcaaagtc

SEQ ID NO: 5436 - DNA, 481 bp, Arabidopsis thaliana
  unsure at all n locations
  Clone ID: LIB23-022-Q2-E1-F7
acgcgtccggctnnttcttcntgtttgaatctcttcttcttctcttttctctccgctctaatcatttctaaatctcagatctctgattccgttaacggggtcgttttccctgttgttaaagaccttcnaaccggtcaatacntcgcacagattcgactcggtgactcaccggatccagtcaagctcgtagtcnatctggccggctcaattctctggtttgattgttcctcaagacatgtttcctcgtcaaggaacctaatatccggtagctctagcggctgcttaaaggcaaaagttggaaatgaacgagtatcatcaacatcatcatccgcgtaaaagacaaaaacgccggattgccaaataacttgttaaaaaacgaancctttgggggaataacggcgaagaagganaanntttttaagtgaacgtcaatgtnnggttgggtcctggttaaantnctcccggggaaaacgtttgattc

SEQ ID NO: 5437 - DNA, 525 bp, Arabidopsis thaliana
  unsure at all n locations
  Clone ID: LIB23-022-Q2-E1-F8
gaantggtctgttttgccggctctaccggtaangganattcccggggtcgacccacgcgtccggatngaatccgttatgcttcctcctccttggcggttgatgccaataactgcagcggctgaagcgatttgggcgtgttcgattgaagaactagggctggagaatgaggccgagaaaccgagcaatgcgttgttaactagagcttggtctccaggatggagcaatgctgataagttactaaatgagttcatcgagaagcagttgatagattatgcaaagaacagcaagaaagttgttgggaattctacttcactactttctccgtatctccatttcggggaaataagcgtcagacacgttttccaagtgtgcccggatgaaacaaattatatggggcaaggagataaagaacagtgaagggagaagaaagtgcagatcttttcctaagggaaaccgtttaaagaagaataatccccggtaaataangttcaaccttcccgtttactcaacgaagaaaccgttgt

SEQ ID NO: 5438 - DNA, 482 bp, Arabidopsis thaliana
  unsure at all n locations
  Clone ID: LIB23-022-Q2-E1-G1
acgcgtccgatcaaatcaaaatctcaactctagagatttattgttgacccgtttaccgcgattctctcctcaattcgccggtaaacccctaactctgtcggaaaaccctaattcgccgcgacggaaattaccaatactcgtttcctcgtagcattggatttttaaagctgttgattccagctttgttgaggttaaagcaactatgaagcctgttcttcactcgggttcttcatccaatggattttcacacaggagatttgaaaaggaggcatggatgaataacgcacagccttctgttgacaatacagaaaacggttgggacgctgaaagtgtggataacccttctcaagaagctgttaagtgtattcaacaactttgtaataatgggncaatcanggtaagaaattcaacccaaaaatgggttctggtttaacancgggnaataatttcaatggctggctaaatgttggagaaagganttt

SEQ ID NO: 5439 - DNA, 524 bp, Arabidopsis thaliana
  unsure at all n locations
  Clone ID: LIB23-022-Q2-E1-G10
aagtggtttcctttggccagntctaccggnannggacaatcccgggtcgacccacgcgtccgaaaaagaagaacccaagatcgactcttacttcgaatctctctcaactttcttcctcagcttacgggaacttccacacatatacatccacaagaacccatatcgaagattcatcctacatatatttacatggatcagtactcatcctctttggtcgatacttcattagatctcactattggcgttactcgtatgcgagttgaagaagatccaccgacaagtgctttggtggaagaattaaaccgagttagtgctgagaacaagaagctctcggagatgctaactttgatgtgtgacaactacaacgtcttgaggaagcaacttatggaatatgttaacaagagcaacataaccgagagggatcaaatcagccctcccaagaaacgcaaatccccggcgaagagaggacgcattcagctgcgcggttattgggcggagtgtcggagagtagctcaacggattaa

SEQ ID NO: 5440 - DNA, 514 bp, Arabidopsis thaliana
  unsure at all n locations
  Clone ID: LIB23-022-Q2-E1-G12
aatggttccttgccngcctacggacggaattccgggtcgacccacgcgtccgcccacgcgtccgcaggaatcacaatcgctgaatattttagagatatgggctacaatgttagtatgatggcagactcaacttcccgttgggcagaagcattaagagaaatttcaggacggctggctgaaatgcctgctgacagtggatatccagcctatctagcagcacgtttagcatctttctatgaacgtgctggtaaagtaaaatgtcttggtggaccagaacgtaacggaagtgttacaattgttggtgcagtttcgcctcctgggaggagacttttcagatcctgtgacttcagcaacccttagtattgtgcaagtcttctggggtttggacaaaaagcttgcccaagagaaaacattttccctctgttaattgggttgatttcttactcaaagtattcaacggnactgggatccttccaatganaagttcgattcaaatttcatcaacatcangaca

SEQ ID NO: 5441 - DNA, 504 bp, Arabidopsis thaliana
  unsure at all n locations
  Clone ID: LIB23-022-Q2-E1-G3
tttgntctgccccgtccggaccatcaatcgcgggccgaccnagntcactaaacggaggncgccctttttttttttttttggagntacaatgcnatgaattccaaaccagataagattcaaataaancagagactaagaaggctgttcaaacagtaataattcttgcngatgancactaaaccagaacgataacangaaacaaagatacagtcagtactcactagtttgagggcacctacggnaagcaagtaatactacagatggtagacgttccagtgcttaatgatgaaacatcatcagtacaagcaaacgtgtttttcatcatacaccgtatcactttcacaagtggctgcagtcattccgcancataangagattgacttcgataatcaacatcaactttgcgcanangancagggctaccatgagatggggaactctcattgctacgcctttcaaggagacatctccttaanaanggnaaggcttttgcaaagcaaggct

SEQ ID NO: 5442 - DNA, 491 bp, Arabidopsis thaliana
  unsure at all n locations
  Clone ID: LIB23-022-Q2-E1-G4
cgtccggaaatcangggtcgacccacgcgtccgcccangcgtccggaaaccttccttgtggattcccacttctttcttctgttttcttcttcctcttctttaaattggatgttttgggcaagaaacagagagaaacacgttaatttgagagtttgtcattgaatatttggtttgcaatggaaagagattttctgggtttgagcgacaagcagtatctaagtaataacgttaagcatgaggttaacgatgatgctgtcgaagaacgagggttaagtacgaaggcagctagagaatgggggaagtcaaaggtttttgctacttcaagtttcatgccttcttcagatttccaaggaggctaaggcgtttccgggtgcataccaatggggatcagtttctgcgggcaatgttttcccgcaaatgccaatttggtggtgcgtttcaaaacgcgacgccgcntttactaaggnggttcaattnccttacaactcaac

SEQ ID NO: 5443 - DNA, 467 bp, Arabidopsis thaliana
  unsure at all n locations
  Clone ID: LIB23-022-Q2-E1-G5
acgcgtccgctcnaacttctcatccatattataatccaacttgccaataattttttcaactgttacagattactacatcaacgaaatattaaacatttaaccatatataaaagttggagatatatgatataagcttttcttagcagtcccacccttcctctctcgagagagctccattccaatcaaagctgtaaacacacttcagaagatggagatcactaacgttaccgagtatgatgcaatcgcaaaggcgaagttgcctaagatggtatatgactactatgcatctggtgcagaagatcaatggactcttcaagagaacagaaacgcttttgcaagaatcctcttccggcctcgggattttgattgatgtgaacaaaattgatatggcgaactaacggtcttgggggttcaaagatctccgatgccgattaagggtggctcccactggccttcaaaagaatggc

SEQ ID NO: 5444 - DNA, 466 bp, Arabidopsis thaliana
  unsure at all n locations
  Clone ID: LIB23-022-Q2-E1-G9
acgcgtccgatgcnaccttttatggcggaagtgatgcctctggtacaatgggtggagcttgtggttatggaaacctatacacagacggctacaagacaaacaccgcggcgttaagcacggccctgttcaacgacggcaagtcatgcggtggatgttaccaaatcttgtgtgatgcaaccaaagtaccacaatggtgtcttaaaggcaaatcaatcactatcacagctacaaacttctgtccaccgaactttgctcaggcaagcgacaatggaggttggtgcaacccaccgagacctcatttcgacatggctcagcctgcgtttctcaccatcgctaaagtacaaaagctggaatcgtccccattctttacaaaaaaagttggatgtagaaagaaacggagggatgagattacaataaacggtagaaactaatttcaacctggtcccatctcaaacgtacaagaggg

SEQ ID NO: 5445 - DNA, 466 bp, Arabidopsis thaliana
  unsure at all n locations
  Clone ID: LIB23-022-Q2-E1-H1
acgcgtccgaatttttttgtttcccatttctctcagaaagtgttctgttctttttttcttttgtaatcactaaatgcttcaaaagtttgtccacaattatatttgaaaaaaatgtctgtatctgtagcagcagagcatgattacataggtttgtcagagtttccaaccatggaagcaacaacaatgtctgacaaaaccaaaaccagagacaataacaacggtctcaatttcaaggctaccgagttaagactcggtttacccggttctgagtcgccggagcgagtcgactcaagattcttggctctcaacaagagtaactgtcccgtgtcaggtgccaaaaagggtgttctccgacgctattaaacgaactcctaacaaatgggtcctctctcctgggattcactactggctactggtgatgtcgggctccggggttcnggtccccgtacctccgtcgnttaaagaa

SEQ ID NO: 5446 - DNA, 476 bp, Arabidopsis thaliana
  Clone ID: LIB23-022-Q2-E1-H10
acgcgtccgtacacatgctgggttatcccacacactttgggcagatggagtgcttgaagctaattgcatctcctggatttccacgagaagaggattggatatctagggctaatgttgcttcttgatgagagacaagaagtgttgatgcttgtcacaaattcgttaaaacaagatcttaatcactcgaaccagtatgttgtaggacttgctctctgtgctttagggaatatttgttcagcagaaatggcccgtgatcttgcgccagaagtagaaagattaatccagtttcgtgaccctaatatccgaaagaaggcggcgctttgctctactaagaataataaggaaagttccaagatctaacaagaaaacttcgtaaatgctgctgcttccttgcttaaaagaaaagcatcatggggttcctataacaaggagttcaactttgttatgaattatgcacgaattaatggatgaagccc

SEQ ID NO: 5447 - DNA, 474 bp, Arabidopsis thaliana
  unsure at all n locations
  Clone ID: LIB23-022-Q2-E1-H11
acgcgtccgttgancttctccgatttgaaatcgccggcgaaaatggaatcctccggcgacaagcaaacttcttctctttaccctactgttgacacatccaatcccgaagctcctataaaccctagctcatcatcttctactaacaatctctatccttctctcgatatgaatgatctcgctcgtaatctcttccctgaacaaccagagacgagttctattccggtttcagctcctcccgctgcgacggaggaagtaattttgaaaatctccggcgcgattcttcatttaatcgacaaatcttacagcgtcgagctcgcttgcggtgatcttgagatcatccgtattgttcaaggagagaatgttgtcgctgttctccgctantgtctccgatganaatcaatgggccgtttgactaaaggatnaagaactctgtcaangtcgatgaagtctcaattaatttcttcangccttcgt

SEQ ID NO: 5448 - DNA, 472 bp, Arabidopsis thaliana
  unsure at all n locations
  Clone ID: LIB23-022-Q2-E1-H12
acgcgtccgcccangcgtccgatctcacattccctcttcacaacaacagcttcgtattcgctcatcttcttcgctttcngatcttgngaaatcgcaggcattgttcgtctactcgaggatttcaattttggtcatnnnnnnnnnnnnnnnnnnnnnnnnnnnnnnnnnnnnnnnnnnnnnnnnnnnnnnnnnnnnnnnnnnnnnnnnnnnnaccggcggttcgtatttccgacgggaatctaatcatcaaaaaccggncgattctaaccggtgtaccagataatgtcatcacgacgtcagcatcggaagctggaccggtagaaggagtcttcgtcggagctgtatttaacaangaagagagtaaacacatcgtaccgatcggtacgcttcgcaattcccggtttatgtcttgtttccggtttaagctctgggtggatgggccaaagaatgggaaaaatgggccgagatantc

SEQ ID NO: 5449 - DNA, 515 bp, Arabidopsis thaliana
  unsure at all n locations
  Clone ID: LIB23-022-Q2-E1-F6
aantggttgtttnggccggcnctaccggtanggaaattcccggggtcgacccacgcgtccgcggacgcgtgggcggacgcgtgggcggacgcgtgggaactaaaagcctttgtgtgtgccagattagctccctactaatccgccgccgcacctcctcgatctccgcccagctcccttcttttctatctatctattcagttgtttctccggtnnnnnnnnnnnnnnnnnnnnnnnnnnnnnnnnnnnnnnnnnnnnnnnnnnnnnnnnnnnnnnnnnnnnnnnnnnnnnnnnnnnnnnnnnnnnnnnnnnnnnnnnnngagatttgtgacgtatccgccgcctctatctgtgcctccgtcggctcctcagtcacctaacttctctggtggtctccgatnacaaccttccttcctcgttgagcaagagaagtatccttctgagttacttgaagaacgtcacaaagcttactccaattttggctgtgcnttcaaatgttttgccggntcaatgaaaca

SEQ ID NO: 5450 - DNA, 465 bp, Arabidopsis thaliana
  unsure at all n locations
  Clone ID: LIB23-022-Q2-E1-D9
acgcgtccgctcanttctccgccttcagttttctcacaatcaaggagattatcttcttcttcgttaattccgataaggtcaaaatccacattcaccggatttcgatcgagaaccggtgtttatttaagcaaaacgacggcgcttcagtcgtctacaaaactgagtgtggcggcggagagtcctgcggcgacaattgcgacggatgattgggggaaagtatcggcggttctgtttgatatggacggtgtgctttgtaacagtgaagatctttctagacgcgccgccgtggatgtttttacggagatgggagttgaagtcactgtggacgatttcgttccttttaagggaacaggtgaagccaagtttttaagaggtgttgcttcagtcaaagaagttaaaggatttgattcaaatgcaagctaaagagaanatccttgaaatatatccccgataagtatgcgaagc

SEQ ID NO: 5451 - DNA, 461 bp, Arabidopsis thaliana
  unsure at all n locations
  Clone ID: LIB23-022-Q2-E1-E1
acgcgtccggaaaaaggacaacattttcggaaacaaagttgagagttttgagagttgaaaaagggcaaatctttcttctccttcgtcactctaattgagttgactaaacacagttcgagttcgagagacaatggatcttgctaagtttctgtgttggattgttttgctactgggaatctcactcgtagaatcaaggtacatggtctacaatacttcacataccattgttcctggaaaacttaatgtccatgtggttcctcattctcacgatgatgttggttggctcaagaccgttgaccagtactatgttggctccaacaactctatccangttgcttgtgttcaaaatgtactggattcaattgttcctgcgctgttggctgataagaatcgcaaattcatttaagttgaacaagcgttttttcaaccggtggtggnatgaacaaagtgaggagattaaa

SEQ ID NO: 5452 - DNA, 467 bp, Arabidopsis thaliana
  unsure at all n locations
  Clone ID: LIB23-022-Q2-E1-E10
acgcgtccnaannnnnnnnnnnnnnnnnnnnnnnnnnnnnnnnnnnnnnnnnnnnnnnnnnnnnnnnnnnnnnnnnnnnnnnnnnnnnnnnnnngagaatgtcttctacaacaatcggcgagcacatcagactccgacgagctagaaaccaaacaatccgtcatctccacgccgccgacgatgatccgccgctaagccacgtcgttcttccgatttcacaacctaatcgcttctgtaactccgcaatgtcttccttctttcccctcccgacttcctcctccaacgaaagcacgaggaagaaaccgtaccaaacgtcgtcgtttcgagggatgggttgctatgccgcagcagcagcagcagctcaagaggtttctgttccctccgtcattcgctactccgcgggatttgggatgccagaattagaaaagataagaagaagaagagcataagcataagaaaaagnagaa

SEQ ID NO: 5453 - DNA, 465 bp, Arabidopsis thaliana
  unsure at all n locations
  Clone ID: LIB23-022-Q2-E1-E11
acgcgtccnctgaaatattcatcgcaattcgtancggtttaaagtannnaagcaatgggaggtggtaaagacaagcatcntgatgagcancgagaaaggatttcatggttttccagnaggtggacattacccacctgctcaaggangttaccctcctcaaggttacccaccacaacaagggtatcctccagctggaggcnacccacctgccggatatcctcctgntgcttaccctgctgcgcccggtggttatccncctgcacctggaggttaccctcctgctggctatcctgcacctggagctcaccattnaggacattctggtggtggactcggaggcatgatagcaggtgcaagctgggtgcagccncaacagcttatggagctcacatgttgngtcacncntctcacaaccttactggcatgctgtatgacatgganggtatgggcatgccctgncattgg

SEQ ID NO: 5454 - DNA, 467 bp, Arabidopsis thaliana
  unsure at all n locations
  Clone ID: LIB23-022-Q2-E1-E5
acgcgtccgaacagagtcatcctcttcgtcttctttctctgaccaaaacagagcgaaaagcaaaaatgaaaagtggagggaacacaaacactaaactcatacttgttcatccatacattcaaaagcaannaagcacaaatcgtctatggcttctcgctttcgtttctttcttcacaatcgcttttctcctaactcttctctacaccaccgactccatcatctcttctaaaaacaactccgccaccgtctcctccgccgtcaattctgccgtcaccaccgctaccatctctcagttaccaacaacagccatcaatgcaatgcttcactacgcttcaagatnaaacgacaagctancacatgtcatacggagagatgaaatcaatctccgacgtcctccggcgctgctctccgccgttgtaatcctcctaagtccttcggtccttacacacgaaaacccttctcctggg

SEQ ID NO: 5455 - DNA, 465 bp, Arabidopsis thaliana
  unsure at all n locations
  Clone ID: LIB23-022-Q2-E1-E6
acgcgtccgcccaagcgtccgcccacgcgtccgaaaatctcaagataaacctatagttgtcttgtcaaacaatcaaaccctttttagatatagaaaatgggaatcaaattcagccaaggtccttcgaatacaaccattcacaacagaagtcatcaagatggtgaggatcaaaggaacgagacggcgacgaagatcaatcatgacaagcctcaaaatcaatcaagtagctttcagattccacttcattatccaaagtatacaaagagtgattatgagaaaatgccagagtggcaattggatcggcttctgagagagtacggcttgccggttatcggagattcttacgaagaagaggaaatttgccatcggagcatttctctggtcgtcggagaacgaacactanatnatatgttatccgtaatagacgtcatccgtttcatatggtactgtttgaataaagataag

SEQ ID NO: 5456 - DNA, 498 bp, Arabidopsis thaliana
  unsure at all n locations
  Clone ID: LIB23-022-Q2-E1-E7
acgcgtccgcggacgcgtgggtgcaatttcaatcccttgtctcgtcatggattccgtcttctctaacgttgctcgtgctcccgaagatcctattctcggtgtaactgttgcttacaacaatgatcctagtcctgttaagatcaatttgggtgtcggtgcctaccgaactgaggaagggaagcctcttgttcttgatgtggtgcgtaaggcagagcaacagctagtgaacgatccgtctcgggtcaaggaatacattcccattgttggtatttccgattttaacaagttaagcgccaagctcatcttaagtgctgacagtcctgcgattacagaaaagttagaagttactaacaagtccaagttgcttgtctgggtaactgggttccgtttgaagaatttgggggcctgaagtttcctcaaaanacacaactaaccaacnaaaaggtggtcaanttaacaattcccaaaaanccaanccttngggggggaaaaccaatc

SEQ ID NO: 5457 - DNA, 507 bp, Arabidopsis thaliana
  unsure at all n locations
  Clone ID: LIB23-022-Q2-E1-F1
aatggttgttggcctgccgtccggaatcaagggtcgacccacgcgtccgcttcactcnaattgcgattgattctcctgtcttctccaatttatcagagatgacacctgaatcaaacgctccctcagtagatccacaatttgtaggcaatgggtttgttcaagaatactataancacctttatgattcaacctcggaagtacacaaattctatctcgaggatagtatgatttcacggcctggtctcgatggtgagatagttactatcaaatccttgaaagggattaatgatcagataatgtccattgactacaaaagctcaaggatcgagattctaactgctgattctcaatcaactttaaagaatggtgttgtaactctaagtcacgggtttaagtgatcgggaacgatggangaaaggaggaaattttcccaaaatttccttccctgtgtcccgggatgggaacctacttgtggctgaatgataaccttangtaagtgtcctgaag

SEQ ID NO: 5458 - DNA, 466 bp, Arabidopsis thaliana
  unsure at all n locations
  Clone ID: LIB23-022-Q2-E1-F10
acgcgtccgcaaanaccatgcgtttgcatttttgctcgctactcttactctactgtatcgtcttcgtttcaagcttcttgacgaccgacgctcttgcttgtcttcctgaccagatccaagctctaatcnaattcaagaatgagtttgaatctgacggctgcaaccgcagtgactacttaaacggagtccagtgtgataacacgactggtgcggtcacgaagcttcagctcccaagtggttgcttcactggaactctcaaaccaaacagtagtctctttgagttgcatcagcttcgttaccttaatctctctcacaacaacttcacttcctcttcactcccttctgaattcagcaatctcaccagattagaggttttgtctcttgcctctagtanctttactggtcaagttccttcctcaattagtaaccttatcctgctanccaattaaacctttcccataatgag

SEQ ID NO: 5459 - DNA, 514 bp, Arabidopsis thaliana
  unsure at all n locations
  Clone ID: LIB23-022-Q2-E1-F12
nttgtttgccggctctaccggtancgganatccgggtcgacccacgcgtccnaaaaagagtgctacctggcttgctattattaaccaagaagagtccttggctagagagctttatcccgagtcatgtccacctctttctctgtctggtggaagttgctcgcttctgatgaatgattgcagtcaatacgatgttgaaggtttcgagaaggagtctcactatgaagtggaagagctcaagccagaaaaagttatgaattcttcaaactttgggatggttgctaaaatgcatgactttcctgtcaaagaagaagtcccagcaggaaactcggaattcatgagaaagagaaagccaaacagagatctgaacactattatggacagaaccgttttcacctgcgagaatcttgggtgtgcgcacagcgaaatcagccggggatttctggatangaattcgagagacaaccatcaactgggcatgtccacatcngagacagtcgcttaccgtatgggagca

SEQ ID NO: 5460 - DNA, 525 bp, Arabidopsis thaliana
  unsure at all n locations
  Clone ID: LIB23-022-Q2-E1-F3
antggtttgcttgggcctgncggtccggaaatcangggtcgacccacgcgtccgcaacntgttcctcattctccgcaaatcaagcatagaaagagactcttggagatcatccaagtatccgattctcagaccctaaaaatataatgtccatgaaagggatctcatcagcagagtcagataagctctctaggagaatatctttgacccacaagcgcaattccgaagagcttgacgtgtttgaagctgccgtgtacttcggctacaatgaagcctcctccggtgaccatggacatacacaaaagtatggctataacgcagcgagagaggagaatccgaggagatggggaatattaggaggtgggaagaagaatcagcttggattttgcctattaagatgctcagaacaaagtgtaccatccttcaacaaagattatcatgaagaagcacgaaagttncaacaatcaaaggagaagactttggtaacgttagacacaaagcaaaccgagttnaaccaaggtggggaaa

SEQ ID NO: 5461 - DNA, 516 bp, Arabidopsis thaliana
  unsure at all n locations
  Clone ID: LIB23-022-Q2-E1-F4
tttgggnctgccggtccgganatcangggtcgacccacgcgtccgcaancttctcttctctcttctcttcttctctttagtcatctcaaccaccatgagtcaccagcagccgccgagctatgccaccgagccaaacaccatgttcgttcaagcagacccctctaatttccgtaacatcgtccaaaagctcactggagcaccacccgatatctcctcctcatccttctccgccgtctcagccgcacaccagaagcttccattaactcccaaaaagccagcgttcaaactccacgaacggcgtcaatcatcaaagaaaatggagcttaaggtcaacaacatcacanaccctaacgacgctttcagccatttcaccgaggattcctcgtctctcccgtctctcaactagacccaatttggggcgcgcgttaagttcanattcaagcgcgttgagggaacaaccaacgccgcaaaccgggncaaaggangagcaaaaaagncaatagcgggaaaaaaggg

SEQ ID NO: 5462 - DNA, 450 bp, Arabidopsis thaliana
  unsure at all n locations
  Clone ID: LIB23-022-Q2-E1-F5
acgcgtccgcggacgcgtgggtgaatttatattatgaatttatattatggttttcactagtgttagaaatacatgtttgccattccattcccaacnnnnnnnnnnnnnnnnnnnnnnnnnnnnnnnnnnnnnnnnnnnnnnnnnnnnnnnnnnnnnnnnnnnnnnnnnnnnnnnnnnnnnnnnnnnnnnnnnnnnnnnnnnnnnnnnnnnnnnnnnnnnnnnnnnnnnnnnnnnnnnnnnnnnnnnnnnnntgtattcttttttagttgttaataaaatanatgtttccttaccaaacttttttttttttgcagattttaccgncgagaanagtaccaacgtccaagtangtaaaggcgggagtaaacgttaacaaccataaagggtaaaccgggtagcnggaaccgcccgttgaaacgttgggaaagggaaggtttcgccgtgggnaca

SEQ ID NO: 5463 - DNA, 456 bp, Arabidopsis thaliana
  unsure at all n locations
  Clone ID: LIB23-022-Q2-E1-D8
acgcgtccgcgatcttctcgattctccaattccaaaccctaacattttgattagtccttctgggttcccacagccttgagagattcggaaccaatgatgatgcgtgctgttataaggagagctgccagtaatggctcttctccttcgttattcgcaaaatcactgcagtcttctcgtgttgctgcatcttcccctagcttgctatcaggttcagaaacaggggcatatctgcatcgtggaaatcatgctcatagctttcataaccttgctttgccagggaactcgggcatctcgaggtcggcgagtttagtttcttcaaccctgcaaaagatgggtcangcctttttcagctgaaactgggagataccgtggaaagcanttgtgcctcatatggggaatcaattactgatgggaacttgggcaccttctgagaaactggtgagagatcaagntgat

SEQ ID NO: 5464 - DNA, 463 bp, Arabidopsis thaliana
  unsure at all n locations
  Clone ID: LIB23-022-Q2-E1-B5
acgcgtccgcggacgcgtggggaagagaaacaacaanaagtantaatggcttcctctatgctctcctccgccgctgtggttacatccccggctcattgccaccatggtcgctccattcaccggcttgaagtcatccgctgcattcccggtcacccgcaanaccaacanggacatcacttccatcgcaagcaacgggggaanagttagctgcatgaangtgtggccaccaattggnaagaataagtttgngactctatcttacctccctgaccttagtgacgtcganttggctaangaanttgactancttctccgcaacaagtggattccttgtgttgaattcganttanagcacggatttgtgtaccgtgaagcacngaaacactcccggatactacgatggacngtantgggcaatgtnggaagcttccaatgtttcggatgcaacgactccgctcaaagt

SEQ ID NO: 5465 - DNA, 457 bp, Arabidopsis thaliana
  unsure at all n locations
  Clone ID: LIB23-022-Q2-E1-B7
acgcgtccggcaaaaaagagagaaggagaggtcgtgttagataattagagcgcacttgcgagcaacaacgaacgacgacccactgattcaatctcctcctctctgcatattccttggcatcttttctggtaccgaagctgagtctctggagagtttctagatcttcttcaattctgcaattcagagcgaagatttattagtgattgattattcactctggagctcgagttctggatccgtgtggctggagggaatgttctgttaagctgattgtttatgcttgttggatcagtatagaaattgtcagattgagaaagacaacaaatgaagaacggtataactgagtgccctgcatgtcattcaaaattggtctctcctggtaacaaaactatttctaagggctatgacgaacacaaagantaaggtatcctcaaaacaacgttgtcctcaatgtcct

SEQ ID NO: 5466 - DNA, 433 bp, Arabidopsis thaliana
  unsure at all n locations
  Clone ID: LIB23-022-Q2-E1-B8
acgcgtccgcccangcgtccnnnnnnnnnnnnnnnnnnnnnnnnnnnnnnnnnnnnnnnnnnnnnnnnnnnnnnnnnnnnnnnnnnnnnnnnnnnnnnnnnnnnnnnnnnnnnnnnnnnnnnnnnnnngtttccctcacatcatcctcctcctccgcctgatgagttgtttgacatttcgactacagttgatcctagctatcttatttcactgataaggaaactccttccaattgattcgggaagtgacgaacgacataatgatcatatgaatacggntaatgtggttcanggtgtagtagctatatctggaaatggggttgttggagacttccaatggtgatcaaaggagcatggacattggggataatcatgatgaatccacttntgangtgggggggngacggttanttcatgtccaagcgccgggnaat

SEQ ID NO: 5467 - DNA, 462 bp, Arabidopsis thaliana
  unsure at all n locations
  Clone ID: LIB23-022-Q2-E1-C11
acgcgtccgcccangcgtccgggcgtttgatttgagataacgttcttctccaaaattgcttgaggaagtggttttgttgtgtctctctgggtttgaaatatgagcggagatagacttgaatttgaaaaccctatagaggatgcggtttcgaggctcagattctcccctcaatcaaacaatctcctcgttgcttcttgggattcttatctgagattgtatgatgtggagagctcttcgctaagtcttgaattaaactctcaagctgctcttcttgattgttgtttcgagaatgaatcaacttcatttacctctggttctgatggattcatccgaaggtatgatttaaacgctggaacagttgatacaattggaaggcatgatgacatttcaacatccattgtctactcttatgaaaaaggtgaagttatctcgactgggtttgatgagaagatnaaattctgg

SEQ ID NO: 5468 - DNA, 469 bp, Arabidopsis thaliana
  unsure at all n locations
  Clone ID: LIB23-022-Q2-E1-C12
acgcgtccgcacaaactcgcaagttactctctcattcctcatcgtaccctctttactcaggtattttctgaagttaaaagatagaaataatgtctgaaaaggtgggagcgatgggtggtaacaagggtggagcattcgacgatggtgtttttgatggtgtgaagaaagtaattgttggaaaagacttcaacaatgtaacttatatcaaggttgaatacgaaaaggacggaaaattcgaaattcgtgaacacgggactaatcgcgggcagctaaaagagttttcagtggattatcccgaatgaatatatcacagccgttggtggaagctacgacactgttttcggttacggatcagcgttgatcaagtcattactcttcaaaacctcttatgggaagaacctctccaatccttggtcacacgacattactanggaatccaactgggaaagaattcatgctcgagtccaaa

SEQ ID NO: 5469 - DNA, 498 bp, Arabidopsis thaliana
  unsure at all n locations
  Clone ID: LIB23-022-Q2-E1-C5
gntttggccgggccctaccggtccggaaattcccgggtcgacccacgcgtccgcccangcgtccgtggagatctcttctgggaatcgagcttcactgttaaagattttccttcaatcggctaaaaatgatacatttcgtgttactagtcagtcgacaagggaaagtaaggctcaccaagtggtattcgccgtatacgcagaaggaaagatctaaggtcatacgtgaactcagtggagtgattctgaaccgaggtcccaagctctgcaattttattgaatggagaggatacaaggttgtctacaaaagatatgcaagcttgtacttctgcatgtgcattgatgaggcggataacgagttagaggtactggagataattcatcactacgtcgagattcttgaccgctactttggcagtgtgtgtgaactccatttgatttttaacttccacaaggcgtatatatactccatgagcgttgatcccggagaacttcaagagt

SEQ ID NO: 5470 - DNA, 463 bp, Arabidopsis thaliana
  unsure at all n locations
  Clone ID: LIB23-022-Q2-E1-C6
acgcgtccgccaacatgcacaaagaaatatgaatggtatatttcctgaggaccctggtcagcttgtnnnnnnnnnnnnnnnnnnnnnnnnnnnnnnnnnnnnnnnnnnnnnnnnnnnnnnnnnnnnnnnnnnnnnnnnnnnnnnnnnnnnnnnnnnnnnnnnnnnnnnnnnnnnnnnnnnnnnnnnnnnnnnnnnnnnnnnnnnnnnnnnnnnnnnnnnnnnnnnnnnnnnnnnnnnnnnnnnnnnnnnnnnnnnnnnnnnnnnnnnnnnnnnnnnnnnnnnnnnnnnnnnnnnnnnnnnnnnnnnnnnnnnnnnnntaacatcatgagcaaccaatcaattgagaaaacatcaaaatgagtttccaaatttgatgctcatgatgctatactaaaaaccgatgggtttgggcgtttgggcctttgacaatttcantttgacgaataatgaaaatggcttgttg

SEQ ID NO: 5471 - DNA, 461 bp, Arabidopsis thaliana
  Clone ID: LIB23-022-Q2-E1-C9
acgcgtccgattttctccgattgaaatcggatttcatcttagtttgcttttctttgttttcttttgattccggtattttgccggtttaaatttccgacttgttcggaatttcttccggttttattgccggttttttgataagatcttttgcaagttgcaaatcaccacttccaatcttggaagatgtttaattccgggagagttttagatggatctttgttcattggatgcttgatttttcttccatgtgaaggtaaattcctcgctttgctaataagagcgtaagggcgtcggttcttcatgggtgatagatcaagatgtttgcggttgattggagaggagtatgaagagttggggttcacgtcgtgttttgatggtcctccaaggattattccaatcctcatcaactgaaagtttaaatctccggtgggcaaactaaatccaaaaaatctctcccgacg

SEQ ID NO: 5472 - DNA, 463 bp, Arabidopsis thaliana
  unsure at all n locations
  Clone ID: LIB23-022-Q2-E1-D1
acgcgtccggatngaggttgcttttccatcttcgccgccggtgaaatgcatcgccgatgaaagattaacagagatctccatggatttcaccaaattaggattcccagaanaagatgaagaaattaaaaaattggagagatcgtggagtaagctcnnnnnnnnnnnnnnnnnnnnnnnnnnnnnnnnnnnnnnnnnnnnnnngttttcgtttgcttgtgtaaacggagaangatctccaattaccgctgatgaagcttttgaagatggtcagatccgtcctgtgtttcctctgtttaaccgtgatcttctcttcgagtacgaaaacgaacatgacaaaaacgacaacgtttcggtcaccgacgagaacagaccgcgtcntaaaaaattatttgttgaggatcgtaacggtaacggtgaccgngaagagacggaagggtcctgagaaagaaccgtttgggancgt

SEQ ID NO: 5473 - DNA, 494 bp, Arabidopsis thaliana
  unsure at all n locations
  Clone ID: LIB23-022-Q2-E1-D10
taccggtanggaaatccgggcagtccgagagagagaaaaaaataaaaaataatctgtcggtgatttataacctcctctctaataaaccaccacatcctctgaaaccctagcctgaacaactcgccgtcttctcgagaaacatctttcttacttcgcttcattacaagatctgatgaaaccagatcggatcttgctctagatccagatgctccttaacttatttactcgaattcatcatcatcgttatcatcaccatgtcactgtttctaaaagacgattcgattcaaatccgtgaagtatggaacgacaatctcgaatcagagatggctctgattcgagaagtcgtagacgatttcccattcgtagcgatggacacagagttcccaggaatcgtgtgtagaccagtgggaacattcaaaaccaacacagagtaccactacgaaactctcaaaacaaacgtcaacatactcaagatgattcagcttggnctcact

SEQ ID NO: 5474 - DNA, 466 bp, Arabidopsis thaliana
  Clone ID: LIB23-022-Q2-E1-D2
acgcgtccggaaacactattaagatcatcacttctcagatttcgatattcccaataaataataaatactctcagttcttctcttctccaagaacaaaaaaaaaaaatgaattcagaatcgctagaaaatcttcaccgtccattaatcgaatcatcgaagtcgttcgtcgattatcgtctcgagactgtgttaacagatcgagagttaccgtattttcgccggatttatctagcgatgatgattgagatgaagtttctctttcatctggcggctccggcgatctttgtttacgtcatcaacaacggcatgtcaattcttacacgtatcttcgctggacacgtaggaagcttcgaactcgccgccgcttcacttggaaacagtggtttcaacatgttcacctatggacttctgcttgggaatgggaagtgcagtggaaacattatgtggtcaagcacatggagctcat

SEQ ID NO: 5475 - DNA, 466 bp, Arabidopsis thaliana
  unsure at all n locations
  Clone ID: LIB23-022-Q2-E1-D4
acgcgtccgggcacaaaggggaagcctttttcactgggtatgtgttgagaatttggggtttttaggtttttggctcagaagagagaatctgggatcttaaaaatcgaaactttctagatgtggttttagttcaacttagttgtagaagatgggatcaaatcaaggttcttccaggttagatacgttagagattaaagctctcatttaccgggaaattgggaatcaaagagctgagagttacttcaatcagctcggaagattctttgccttgaagatcaccaaatctgaattcgacaagttgtgcatcaagaccattggtagacaaaacatccatcttcataaccgtcttatacgttccatcatcaagaatgcttgtattgccaaatctccaccatttataaaagaaangtgggaactttgttaaaatttggaaaggggaatcnaagaagaacagtcaaattccagc

SEQ ID NO: 5476 - DNA, 455 bp, Arabidopsis thaliana
  unsure at all n locations
  Clone ID: LIB23-022-Q2-E1-D5
acgcgtccgattncctttaagcaaacgagcttgagaagctttccgatttcaattccttttaattgacgatgccttcttcgttctccaagccggatttagatccttcttcttcgcctccaccgatttctcctttatctcaagacagctcggaggctgagcgccggcttcgagaagcggaggagaggctacgcgatgccatggcggagcttcagcgtagacaacgctctgcggcgcgtggatctcacgcggaattgtgtgatcacgctgacgtttcttgcgtcgccaatgccattgggaatttatgtcagagctttcttctctcttatggtgttagagttgggatcgggattcntcttcgcgcttttaagctcgctaggggacaatcctantccgctcntctcgatnttaagcaacttgtttcaaagaaaganttgatagttanggaagaaacatgt

SEQ ID NO: 5477 - DNA, 506 bp, Arabidopsis thaliana
  unsure at all n locations
  Clone ID: LIB23-022-Q2-E1-B3
aantggattgctttggcctgnccgtccggaaatcaagggtcgacccacgcgtccgcagattcaagacctaccgatgaagagctcgtcaatcactanctccgtctcaagatcaacggacgtcactccgatgtccgtgtcatccctgatatcgatgtctgcaaatgggaaccttgggatcttcctggttcgtctctttattctctcaaaatttgattccttttattctcagattctgttttccctctcaaagattccaccttttttttctttactcanttgggaacaaatctgattgtcggcagctctctcggtgattaagacggatgatccanagtggttctttttctgcnctcgtgatcggaaatancctaatggncatcgctctancagagcaantgactctggntattggnaagctactggtaaagatcgtancatcaagtctaagaagactttaatcggtatgaagaagactcntggcatccatcgttggcnaactcctaaaa

SEQ ID NO: 5478 - DNA, 468 bp, Arabidopsis thaliana
  unsure at all n locations
  Clone ID: LIB23-020-Q1-E1-E1
tgggnggtagagaacgtccnccgtantacggccntcattccggaacccccacgcgtccggnaaattggcgaagaacaaagtttgaaccttttcttcatccatctctctccgtcgcttcttcctaacgattccttcactcgaatcaggtttgtgaaggttttttctagggtttcgaaaagatgccggcgacagcaggaagagtgcgtatgcccgcaaacaatcgggtgcatagtagtgcagcgcttcagactcatggaatatggcagagtgcgattggttatgatccttatgcaccaactaatanagaagagcctaagacgacacaacananaaccgaagattccgagaactcgtacgcgagttttcagggacttttggctcttgctaaggatacgggttcnaaatnacgatnaaggctccgttggntccttgttaagaaanttgttggccgttgttggggcatttnga

SEQ ID NO: 5479 - DNA, 466 bp, Arabidopsis thaliana
  unsure at all n locations
  Clone ID: LIB23-020-Q1-E1-E10
acgcgtccgcacgattttaatggcagtttaacgggaacacttctctctctctctctagatcccaaaactcaaaatcgttcctttttgcaaaaattgttcatctttctgttttcccagaaatanggaaagctctcttgatttgcctttcctggtattgaggaaatatgtttagatcatcaccgagaagaggacagagatcaaagggtttcaaggtgaagcattgtattcaattgactttgttgcttantgttgggatatggttgctttancaaagttaagcantctcatgaagaaagaaagctcaatttggaggaaangtgcaaaagaattggtggttgggtgggggttgaanaaaagnttgtcnaagccttgggnanggaaaagatnttaaccccnccggggttggtttaaggnttaaatgaaaccctnaagggnntnaagggaattaaaaaaggttggttanaaa

SEQ ID NO: 5480 - DNA, 407 bp, Arabidopsis thaliana
  unsure at all n locations
  Clone ID: LIB23-020-Q1-E1-E11
acncgtccgcccacgcgtccgctctgttttccttgttctccaagccagatctctctccataaatctctcttcatctctctctttccaccaaacatccgcgatcctcgattctcanttccgtgngntgtttngtttcttcacttagcgatggcgatgatagagcaaaggncgaatacgaagatcgtttgtactctaggtcnagcttccagatctgttccgatggtcgagaanttcttanggctggtatgaacgttgctcgtttcaatttctctcatggatccatgaataccatcaagagactctcgatatctcatcaagctatgcttaacactgggattcnctgtgngtcatgctcnaaacangggtcaagaaatccggaacggggttcttgaaagntgggaaaacaa

SEQ ID NO: 5481 - DNA, 433 bp, Arabidopsis thaliana
  unsure at all n locations
  Clone ID: LIB23-020-Q1-E1-E3
acgcgtccggaaacaagaaaacgaaaggaaaaaatacagaaatgggtggtttgaagtttcatgtacttatgtatccatggttcgcaacaggccatatgaccccgttcctttttcttgccaacaaattggctgagaaaggtcatacggtcacttttttgattcccaagaaagctctgaaacagttggaaaatctcaatctgtttccacacaacattgtctttcgctctgtcaccgtccctcatgtggatggtctccccgttggcacagagacagtctctgagattcccgtgacatcagctgatctcttgatgtctgctatggatccacacgtgatcaagttgaaggtgtgtccgagcnttgaaccggactgatctccttgacttcgccaatggattcaaaagtaccananacttggccttaaactgtaantact

SEQ ID NO: 5482 - DNA, 483 bp, Arabidopsis thaliana
  unsure at all n locations
  Clone ID: LIB23-020-Q1-E1-E4
cncgtacgggccgaaattcccgggacgacccacgcgtccgaaaaagagtttgaaattcagaattgtcatcttttgtttcgatcggattccttattcgtgtatcttctccgattcgatgggaattggctctcatggcaatggtaatcaagaggtttcgcgttaatcaaaaggagtgaaacgatggcgttttgtatttggtgtttaagcaacttcagttcttaccgttttgagtgttgatcatttgtttggcagagaacttaaaaggttagatctttcttctgaaatgatttcattattaattgtctgcttgtacttgaatcatgttaattatgactgagcttttcttcttgaggatgaggaaatcgtaatggctaatgcatacaatttgtcnactaaagataattgaagttgataatgctaaacacgccacaagtatangtcaatancataatgaatgttttgtcacaagaaaganaatgactt

SEQ ID NO: 5483 - DNA, 452 bp, Arabidopsis thaliana
  unsure at all n locations
  Clone ID: LIB23-020-Q1-E1-E7
acttcatctatggcttcttcttctctgcagtctctcttctctctgttttgccttgctctgttctctcttcctctcatcgtctcctccatcggcatcaactatggccaggtcgctaacaaccttcctccccctaaaaacgtcatccctctcctcaagtctgtgggagctacaaaagtcaagctctatgacgccgatccacaagccctacgtgccttcgccggctccggcttcgagctcaccgtggccctcggtaacgagtacctggctcagatgagcnaccctattaaagcccaaggctgggtgaaggagaacgtccaagcttacctcccaaacaccaagatcgtggccatcgtagtgggaaacgaagtctcanctcanaccagtcagccctcacgggaagccctcttcccggctatgcaaaagcatccaanggtgctctngtggaattgtgg

SEQ ID NO: 5484 - DNA, 449 bp, Arabidopsis thaliana
  unsure at all n locations
  Clone ID: LIB23-020-Q1-E1-E9
acgcgtccgcccacgcgtccgcgagattctacaaatggttcaccgaggggaatgacagaggagaatggcttaagaacttgaagtatggagtgtttggattaggaaacagacaatatgagcattttaatanggttgccaaagttgtagatgacattcttgtcgaacaaggtgcacagcgtcttgtacaagttggtcttggagatgatgaccagtgtattgaagatgactttaccgcttggcgagaagcattgtggcccgagcttgatacaatactgagggaagaaggggatacagctgttgccacaccatacactgcagctgtgttagaatacagagtttctattcacgactctgaagaatccaaattcaatgatataaacatggcaaatgggaatgggtacactgtgttgatcccaacatccttacaancaaatgtcctgtttaaaagg

SEQ ID NO: 5485 - DNA, 468 bp, Arabidopsis thaliana
  unsure at all n locations
  Clone ID: LIB23-020-Q1-E1-F10
tncccgggtccacccaaacgtccgcacacgcgtccgaaaataagcacacaccattatccannnnnnnnnnnnnnnnnnnnnnnnnnnnnnnnnnnnnnnnnnnnnnnnnnnnnnnnnnnnnnnnnnnnnnggttacgggtcaatcgaactcggaagtcatggctatggccacaagggtgttggctcaatcgactccaccgtctttagcttgttacnagaggantgttccttcacgtggatctggaagatcgagaagatcggtganaatgatgtgtagtcagttacaagtgtctggtttaagaatgcaagggtttatgggattacgtggtancaatgctttagacactcttggnaaaagncgtcaagattttcattcganggtgcgacaggcantgaatgtgcccanggggaaagctagccggtttacggtgaaagcantgtttgngagattacgggggaaaagctatc

SEQ ID NO: 5486 - DNA, 516 bp, Arabidopsis thaliana
  unsure at all n locations
  Clone ID: LIB23-020-Q1-E1-F2
gtggggaangtcccccgcaattacggnccangttcccgggnccncccacgcgtccgaaaaggaaaaaagacaaatcaaagagagacgattcgatcgcatcaatggcagaagaaaagagcttcaagtatgtgatcgtcggaggtggtgtcgccgccggatacgcggcgagagagttcttcaaccaaggtgtcaagcctggtgaacttgctatcatttccagggaacaagttcctccatatgagcgtcctgcacttagcaagggatatatccacctcgaaaataaagctacacttccgaatttctatgttgctgctggaattgggggagagagacagttccctcaatggtacaaagagaaaggtattgaagctgattttgggcacaganattgtcnaagcagatntttgctgcnaagacactntcngttgggaactgggaccaagtcctcaagttnncaaaactttggctagcnncnaactggttccttcngtccntaanggttgttcagaatttttg

SEQ ID NO: 5487 - DNA, 488 bp, Arabidopsis thaliana
  unsure at all n locations
  Clone ID: LIB23-020-Q1-E1-F4
acgttccagccttagcgggccgaaatcccgggncnacccacgcgtccgcaatttttgagttagccaagtgctcaagggagatacataatacctgaagatgtccaaggcaagtgatgccgtcagagaaccattggtggacaagaatatggctggatcaaaaccagaccagccgtggatggtttatctcagcacattcgttgcggtctgtggttcttttgcgttcggttcttgtgcgggatactcttcacctgctcaggctgcaattaggaatgacctttcattgactatagctgagttttcactctttggttctttactaacttttggcgcaatgatcggtgctataacaagcgggcctatagctgatttagttggaagaaagggggcgatgagagtttcctctgcattttgtgtatccggtggctaacaatcatccttgccaaaggagtantggctccggancntggaagactggcaacnggatatgg

SEQ ID NO: 5488 - DNA, 458 bp, Arabidopsis thaliana
  unsure at all n locations
  Clone ID: LIB23-020-Q1-E1-F9
acncgtccgaaggattcgaagctggttgtttcccaatctgcataagaaatatcgaaacacttccacacaaaatccacgcgctctctcacgctcactcactcgcataacacttgttccttcttcnctcaatttcaaaaaacgacgatcnnnnnnnnnnnnnnnnnnnnnnnnnnnnnnnnnnnnnnnnnnnnnnnnnnnnnnnnnnnnnnnnnnnnnnnngaatttgtctttgtgatttgagtgttatagaataaagatctgtttggagtggatccattcaagtaattgaagaactcaacgcanaanatggcttcaatatcgcattcatcactagctttaggagggagcttcttcngcttctgctcaagattaactngcgttattccgagcaatgggtggtaatggggtancaatngaaaacttaanggagaacaagtggttactaacaatcaaggagg

SEQ ID NO: 5489 - DNA, 451 bp, Arabidopsis thaliana
  unsure at all n locations
  Clone ID: LIB23-020-Q1-E1-G1
acgcgtccgctaaaaactcctcctttcatttccaaacaaaaacttctttttattctcacatcttaaagatctctctcatggcgatgtctttctcaggagctgttctcactggtatggcttcttctttccacagcggagccaagcagagcagcttcggcgctgtcagagtcggccagaaaactcagttcgtcgtcgtttctcaacgcaagaagtcgttgatctacgccgctaaaggtgacggnaacatcctcgatgacctcaacgagggcacaaagaaagcttcagatttcgtgacgggataaaacaaaagangcattagcaaatgggtgaagaaagcgaaagactacgttgntgaaaaaaacagtgaaaccgcagatacattgggtaaaagaactganaaagtgcngngtatgttggaggagaaaggaaaagaagcccaaacaaggnggaa

SEQ ID NO: 5490 - DNA, 487 bp, Arabidopsis thaliana
  unsure at all n locations
  Clone ID: LIB23-020-Q1-E1-G6
aatgttcgcntggcctttagcntgccgaaccggtccgnaattcccgggtcgacccacgcgtccgcgatttcgccgggaacggagaagaaaaccctagatatggcggagaagcttgcgccagagaagagacacgatttcattcacaatggtcaaaaggtatttgagtgggatcaaaccctggaagaagtgaacatgtacataactttgccgccaaatgttcatccaaagtcattccactgcaaaatccagtcgaaacatatcgaagttggcatcaaaggcaaccctccctatctcaatcacgatcttagtgctcctgtgaagactgattgctcgttctggactctanaggatgatataatgcacattaccctgcagaagangganaaagggcaaacatgggcatcaacgattctgggacaaggtcagttanattcctacgccactgatctttancaaaanccggtcaagcccaaaaggttcaaagaan

SEQ ID NO: 5491 - DNA, 447 bp, Arabidopsis thaliana
  Clone ID: LIB23-020-Q1-E1-D6
acgcgtccgcgtcgccgcaacaatatcttttgctttctctctcattcttcaccagtaacaagcccatctctcgattcttcactctcaaggaaggagacgttttgaaaatcagaaatggtgaagatatgctgcataggagctggttatgtgggtggtccaaccatggcggtgatggctcttaagtgtcctgagattgaagtagtcgttgtggatatctctgaaccaaggatcaatgcttggaacagtgataggcttcctatttacgagccgggattggaagatgtggtgaaacaatgcagagggaaaaacctcttctttagcacagacgtggagaaacatgtatttgagagtgatattgtatttgtctcagttaacactccaaccaaaacacaaggtcctggtgctggcaaaagctgctgatcttacttactgggagagtgctgctcc

SEQ ID NO: 5492 - DNA, 447 bp, Arabidopsis thaliana
  unsure at all n locations
  Clone ID: LIB23-020-Q1-E1-B9
acgcgtccgcattattccatctctcttatcgccgctacaaacgtttcttcttcaacctcgttcagagattatcctcccttcttttctcatcttacaaggaagttgggcagttaaagctgctgggatcaccagttttgtcaaaagtggagtgtgaagaatcttttatgtctgaacaggcttctctctttcaatcatctatccggcttttaggagagtactgtcctatatctaggaaaaagtccactcataaagttggtggtttgcgttttgaggaggacatcacgagctgtattggatttcagtttatgcaactgagtgattatcactgcctcttctgacatcccttgtttgtttacgtttgttgaatcaagatggctttgcaaaacattggtgcctccaaccgcgatgatgccttttaaaggtaaaagatccangggatgatgacca

SEQ ID NO: 5493 - DNA, 493 bp, Arabidopsis thaliana
  unsure at all n locations
  Clone ID: LIB23-020-Q1-E1-C1
gnccgacattcccggaaccacccacgcgtccggcgttcgttgtgaaaccatagatccaggtgaattctggaaaacatcttgaagcgaaatcgagacatcgttggaggatcaaaacgttaattcgattgatcgatgaatcctagaagggagcctcgtggtggtagaagttctctctttgatggcatcgaagagggaggaattagagctgcttcttcttactctcatgagatcaatgaacatgagaatgagcgtgccttggagggattgcnagatagagtcattctcttaaaacgactatctggcgatataaatgaagagtcgatactcataaccgcatgcttgacanaatgggcaatgatatggattcatcaagggggaattctcctccaggaaaccatggaaccgcctttaaaccggtgttttgagaacaaantccaagnccnaaagaaatgctgaacgccccgttggccaccntttgtttggggttaattcc

SEQ ID NO: 5494 - DNA, 453 bp, Arabidopsis thaliana
  unsure at all n locations
  Clone ID: LIB23-020-Q1-E1-C10
acgcgtccgcnnacgcgtccgcgggtgagctcgctgttggaacagttgtttcgttcattggatacacattcactctaacatttgctgtccaagggcttgtaaacacgtttggagatctacgtgggacttttgctgctattgacaggatcaattccattttaaacgcggtggacatagatgaggctcttgcctacgggttagaaagagatatacatacaaagaaagtccaagatgaaaaccttaaattgttcttgtctgctggcccaaatgtgaatatccgtcacctcgataagtactacatgtcaaatctgaaatcaactaacaatctacgtaccctaaacatgggctgggagatgtctgtcntgatgatgtgcattttgcttaacctctaagaacccgacgtgaaagttcntgatgggctgantttgacttnaattctggtactgtaactgc

SEQ ID NO: 5495 - DNA, 454 bp, Arabidopsis thaliana
  unsure at all n locations
  Clone ID: LIB23-020-Q1-E1-C3
acgcgtccgcccacgcgtccgcgataagcaaagtagaaaacacaagtttctctcacacacattatctctttctctattaccaccactcattcataacagaaacccaccaaaaaataaaaagagagacttttcactctggggagagagctcaagttctaatggcgaacttggtcttatcagaatgtggtatacgacctctccccagaatctacacaacacccagatccaatttccnnnnnnnnnnnnnnnnnnnnnnnnnnnnnnnnnnnnnnnnnnnnnnnnnnnnnnnnnnnnnnnnnnnnnnnnnnnnnnnnnnnnnncgaaatgggttcacgaaggaantgggcgttgaatgtgaagcacaacaattacgacacaatattgagggagtcnccaatggngggagattattaacagngatcnattcaagtgcgcctcctccgttcaanttagc

SEQ ID NO: 5496 - DNA, 453 bp, Arabidopsis thaliana
  unsure at all n locations
  Clone ID: LIB23-020-Q1-E1-C4
acgcgtccggaaattacgccatagatcggagcgattttggagcatcgccgaagctaaagaggaattggaggtttctgtagatcggaaaacacttgttgttctctctctcgattcatcccaaagcaagattcttggatctgcctcttaagatcgatcggtgcttttgtatcctcaggtatgtgttgatacttgatcgtatctatctacagagattaatcgtatcgtagtctgatttggtagatttggaattgggaatcgagaagtttaaaaatggaggaggatagagagaatgcaaaagagagtagtgtttgtaactgtangaacaacgaagtttcgatgctcttgtgaaagcagtggttagtcaaaatgttaaagacgaactgcagaagagaggattactcatcctcctaatcaaatgggtccaagaatccttttcccaactaaatgtgatgg

SEQ ID NO: 5497 - DNA, 446 bp, Arabidopsis thaliana
  unsure at all n locations
  Clone ID: LIB23-020-Q1-E1-C6
acgcgtccgcanagctcatggaacatagatccatggaactctactctgttccttctctcaatatttcaaattgtgtcaccgtcactcttactgccaagaactatattctctggaaatctcagttcgaatcttttcttgatggtcaagggcttctgggttttgtcacaggctcgattcctgcaccaagccaaaccagcgttgtttcagacattgatgggtcaacatcggcttcacccaatcctgagtactacacctggttcaagacagatcgagttgtcaaatcctggctccttggttctttcttagaagatattctcagtgttgtggtcaactgcaacacttctcatgaggtatggatctctgtagcaaaccactttaatanggtttcctcctctangttatttgagctgcaaagacgcctccaaaatgttagcaaacgtgataaa

SEQ ID NO: 5498 - DNA, 447 bp, Arabidopsis thaliana
  unsure at all n locations
  Clone ID: LIB23-020-Q1-E1-C8
acgcgtccggccaaatttccgattttctcctcactgaatctctagaatccatcgttgattcaaactcattttccgatcaaacggcatatttttccctctcgagagagcgataatgtggaaactgaagatcgcggaaggaggtagtccatggcttagaaccaccaataatcacgtcggaagacagttttgggagttcgatccgaatctcggtactcctgaggatctcgccgccgtcgaagaagctaggaagtctttttcggataatcgattcgtgcagaaacatagcgccgatctgcttatgcgccttcagttttcaagagaaaatttgattagcccagttttacctcaagtcaaaatcgaagacactgatgatgttacagangagatggtggaaaccacgttaaagaagggtcnaaatttccaatcaactatacangcacacgacgg

SEQ ID NO: 5499 - DNA, 457 bp, Arabidopsis thaliana
  unsure at all n locations
  Clone ID: LIB23-020-Q1-E1-C9
acgcgtccgccaggtcgcacacactaaaatggcgttccgcgttttgctcctcttctcactcaccgcacttctcatcttctccgccgtttctccttctttcgccgcttcttcctccgacgacgtngacgangaggatctcagcttcctcgaagatctcaaagaagacgacgttcccggcgctgactcactctcttcctcaactggatttnnnnnnnnnnnnnnnnnnnnnnnnnnnnnnnnnnnnnnnnnnnnnnnnnnnnnnnnnnnnnnnnnnnntttttccgatctaggtaatccggattccgatccgttaccgacgccgganattgatganaaagacgtttgtggttatcaaagggagcgttacttcactgatgtgattgagaataatcaatacgttttgggttaattttaanccccctngtgtggtcaattgcaatccccttgntcctgaata

SEQ ID NO: 5500 - DNA, 456 bp, Arabidopsis thaliana
  unsure at all n locations
  Clone ID: LIB23-020-Q1-E1-D10
acgcgtccgcccacgcgtccgcacaagtgaagaaaacagagagagaaagacagagagatctctctctccttcacacacacagatacacatggccatcgcgagcgggtcatgggtagccactgtgaaccaccatgctaatccccacagcttcacttctccgaccaaacccattttctttctttctcaaaagcctcacaatttccatgtctgctcgtctcgatgctctatggttcttgaggaagatgaaaagaagtcaccgagtcctaaaagaaagacaagtgggcattttttgacctgggcccgaatgaacttaaacgggtcctaaccaagtttctccgaanaccgggaaactcgggaacttcctccgaattctacgaaaaagctaangngaactccgagttnaagaacgaacaagcatccgataagttacttngtgagtttcaagaattgggactt

SEQ ID NO: 5501 - DNA, 475 bp, Arabidopsis thaliana
  unsure at all n locations
  Clone ID: LIB23-020-Q1-E1-D2
gctntagcgggccgaaatcccggnacgacccacgcgtccgcttcgaatgttgaagaaaacctaaacccagaaacaaaatccgcagaagaacaaaacccacttgccattttccattcttctctaccaatcgcatctctttctctgaccttgttcccatcctcgactcaatttctcaaattgtttgctcatcatccaaacaaggttaagatccctacgcaggcttcttctctcactcatctctctctttcttctgtctctccttttccttcttccagaatctctttcaaatccaccatcgctgctaaccctcttcaatcccctctctccatcgtccctcgtcgtcccgttgatccttcctccgccgccgctctccgccgtgctgctgtcgtctggtttcgcaatgacctccgtgtccacgacaacgagtgtctcaactccggcaacgaagaatgcgtctccgttttgcccgtttant

SEQ ID NO: 5502 - DNA, 459 bp, Arabidopsis thaliana
  unsure at all n locations
  Clone ID: LIB23-020-Q1-E1-D3
cccgganccacccacgcgtccggttctcaaaacgatgaaagtagcggagaagattgttttcctctggaatgattccgatggatttgctgcaaccatttctgatactttaaaccctagccctagttcccctcttcgcaaactagaagaacagatccagcttccgttggataagtatggcgttgaaggtgtggaaaccggcgggagtatcgttcatttcgtagatgaaaatgaagtttatcaggtctcgatttttcttcttcgaagttatgagcctccagtactagtgtgtgctatgaatgaactgctggacctaattacaaggggatcgtcaactctacccacaatcatagctcccttccttgtgggcggcatctaanctcaagttcaataacagattcctgggaagcaaattacaagaaagccaagtcctcaatacgttcaagttgcacagaaacanag

SEQ ID NO: 5503 - DNA, 471 bp, Arabidopsis thaliana
  unsure at all n locations
  Clone ID: LIB23-020-Q1-E1-D4
ttcccgggacgacccacgcgtccggttgttctctcttcctcttaatttcgagttgtgttcttaaaaaactccagagctgattcgattctcgagaagaaactaagccgacaataaagttcagatctgaaaaaaagcgagctccagattacaaaaagaaacagctcgtttttttcactttcaaaaaaatggaagctttgaggatttatctatggagtctctgtctctctctgtgtttgattatctatggagcaaactcagatccattagaagacaaacgcgcattgcttgagtttcttaccattatgcaaccaactcgttcactcaactgggaacgagactctcaagtctgcaacatctgggaccggagttacttgtaatcaagacggatttcgaatcataaccgttagattaacaagcgttggactcaatgggcaaantcctccaaacactatnagcaagactcccaagctc

SEQ ID NO: 5504 - DNA, 494 bp, Arabidopsis thaliana
  unsure at all n locations
  Clone ID: LIB23-020-Q1-E1-D5
tcttcanggcctacgcctgcccgannacggtccgnagttcccgggtcnacccangcgtccgctctcgcctctcggtgtccttgtatacagtacttcagttttccgatctctttcagattctgttgccaaacttcatataaacttagtgagcggaactggatttggggagaatggcttcttctttagctcaatctagaatctcgaatctccagaatcatctttcacctcttgaagcaaacaacaagctcaggagtctggtcaagatttctccccaagtatctgaagccttgtctaatggacgtgctgttgtcgctcttgagtcaaccattatctcccatgggatgccttaccctcaaaatctgcaaacagcaaaagangtggagtcaattgtganagaaaatggaagcaatccctgcaacaanttgctatccttaaatggaatnncntgcaaaagtctgaaccaagaaagnactaagaacgtcntgcatctctcg

SEQ ID NO: 5505 - DNA, 476 bp, Arabidopsis thaliana
  unsure at all n locations
  Clone ID: LIB23-020-Q1-E1-B7
cgccggcncggaaaccggtccgaaaaattcccgggnccacccacgcgtccggttgaacagctggttcagaattttagatccaagagagatttttacaatggtgctattggtggttttgtcgctggagcttctgtgcttggctatagagcaaggagcatcccgacagcgatagctgcaggtgcaacactagctgttacctctgctttgattgattctggaggtcagaccacaagagtagacaatggcagagaatactatccttacaccgtcgagaaaagagctgaagctgattcctgatttctcttttggtcactgagattaataagatgtgcattcgctgatccggggatcttgagataatctcttttgtttattttatctggatatgtgatatcatgatactctttgctctgttcttcttgtttcntganagcgacttctcacatctttgtcgaatgttcctgcaataaaaatca

SEQ ID NO: 5506 - DNA, 456 bp, Arabidopsis thaliana
  unsure at all n locations
  Clone ID: LIB23-019-Q1-E1-G7
cacgcgtccggtaacccgaaagcaaagactgagagaaccaaggctccgatctaacaatgaggaagaggacgctcgtgtccgttttgttccttttctcgcttctgtttcttcttccagatcaaggaagaaagttacacgcgaatgcagaagagagttccgatgatgttacagatccaccaaaagttgaggagaaaattggtggtcacggtggtttatcgacggattccgatgtagttcatagagagtctgagtcgatgtcaaagaagacgcttcgcagtaacgcggagaagtttgagttccaagctgaggtttctcggcttatggacattattatcaactctctatacagtaacaaggacattttcttaagagagttgatctccaatgcttctgatgccttggacaaaattangttccttgcactcactgacaaagacttttgggttaaagtgacac

SEQ ID NO: 5507 - DNA, 392 bp, Arabidopsis thaliana
  Clone ID: LIB23-019-Q1-E1-G9
acgcgtccgcggacgcgtgggatttccgtcttttccgctaggtttccgtctctgttttttcttgcattttccccagaattccttcacattctctccttttcctctttttaattcctcaccacctcaaattcttcataaacaaatccacttctgcatggttgggagaatctgttagagaatttttgttgttgttgggttcagatttggaaaatttcctttttttcgagtttcttctgaattattcatcgtggagattctcggatcgggaagggctgcgagaggtggttttcacggcggggatagattcatcttctgtcttctcctgaagggggtagccgaggcccgggcctcggcgggttttaaaaccccaaccttaaaaaatccgggaaaat

SEQ ID NO: 5508 - DNA, 458 bp, Arabidopsis thaliana
  unsure at all n locations
  Clone ID: LIB23-019-Q1-E1-H1
aagcgtccggtaaaccgaaagcanagactgagagaaccaaggctccgatctaacaatgaggaagaggacgctcgtgtccgttttgttccttttctcgcttctgtttcttcttccagatgaaggaagaangttacacgcgaatgcagaagagagttccgatgatgttacagatccaccaaaagttgaggagaaaattggtggtcacggtggtttatcgacggattccgatgtagttcatagagagtctgagtcgatgtcaaagaagacgcttcgcagtaacgcggagaagtttgagttccaagctgaggtttctcggcttatggacattattatcaactctctatacagtaacaaggacattttcttaagagagttgatctccantgcttctgatgccttggacaaaattangttccttgcactcactgacanagacgttttgggtgaaggtgacactg

SEQ ID NO: 5509 - DNA, 521 bp, Arabidopsis thaliana
  unsure at all n locations
  Clone ID: LIB23-019-Q1-E1-H2
aatggtttgcctgggccggtntcgccggcactnccggggtcganaacacgcgtccggngaagagactataaaagtatacgatctcctcctctcgctctcttcagatcacaaagttttcgtttttagggttctctcatcgatctcggtttgtgatcttcttcttcatcaatggcgtctagtgataancaaacaagcccaaagcctcctccttcaccgtctcctctccgtaattccaagttttgtcagtcaaatatgaggattttgatctcaggaggagctggattcattggttctcaccttgttgataagctgatggaaaacgaaaagaatgaggtgattgttgctgataactatttcactggttcaaaggacaaccttaagaagtggattggtcatccaagatttgagcttatccgtcacgatgtcacgggagccacttttgattgaagttgatnaagatttaccatccttgcatgtcctgcttcctccctaacctctacaagtacaanccctgtgaaaaa

SEQ ID NO: 5510 - DNA, 455 bp, Arabidopsis thaliana
  unsure at all n locations
  Clone ID: LIB23-019-Q1-E1-H5
acgcgtccgccaaaacgaaaccttccttgtggattcccacttctttcttctgttttcttcttcctcttctttaaattggatgttttgggcaagaaacagagagaaacacgttaatttgagagtttgtcattgaatatttggtttgcaatggaaagagattttctgggtttgagcgacaagcagtatctaagtaataacgttaagcatgaggttaacgatgatgctgtcgaagaacgagggttaagtacgaaggcagctagagaatgggggaagtcaaaggtttttgctacttcaagtttcatgccttcttcagatttccaggaggctaangcgtttccgggtgcataccagtggggatcagtttctgcggccaatgttttccgcagatgccaatttgggtggtgcgtttcaaaacgcaacccgcctttactnagcggtcaatttcctttacaacc

SEQ ID NO: 5511 - DNA, 455 bp, Arabidopsis thaliana
  unsure at all n locations
  Clone ID: LIB23-019-Q1-E1-H6
acgcgtccgagangaaccacctcgttcgtaaaagctccgtcggttactccgccttgaggtccgtttcgtacctccgtcaatctgccgttacctctccacctccgattttctccgccgccgcttcaaccgttcgccagttcacttccgccggctatccttccaacagttttcaattgacgccgccgacgaattggggaatccggatagttccggagaggaaggcgtttgtgattgagcgattcggtaaatacgctacgacgttgccgtcggggattcatttcctcattccgttcgtggatcgtattgcttatgttcattctctcaaggaagaagctatcccgattccgaatcagactgcgattactaaagacaacgttagtatccacatcgatggtgttctctacgttaagattgtggatcctaagttagcttcttatggcgttgagagtcctatc

SEQ ID NO: 5512 - DNA, 461 bp, Arabidopsis thaliana
  unsure at all n locations
  Clone ID: LIB23-020-Q1-E1-A1
acgcgtccgtgataacaccgatccatctctttctttctctctccgtcgactctcgttcttaaagatgaaagctttctacgtattcgttgttgctcttcttctcaccttgaattataggggagaagcaagtggttctgttttcttcattgatggatccaacaatcaatatcttcgtccacgatcatccagtgaggcacttcccatgtcgcctgttgaaatatctgcagcagtgtctgccttgttgggttttgcaccttcagcaactttgacaagctgatggctcatccaagttgaacaaagatctaaaacctaatccatttganaagcctcgccgctgctttgtgctaaaaatccccgganctggatgataatgcctttgggaaactcccctaatcaatccttcctggggcaatggcataaaggagcaantattaagttctgaatcgtacaaaagctgatac

SEQ ID NO: 5513 - DNA, 476 bp, Arabidopsis thaliana
  unsure at all n locations
  Clone ID: LIB23-020-Q1-E1-A10
acgcgtccgtgagagagagacactcttgtttcatcttcaacttccactacctttgcaagattctacctgagatagatggcgaagttccgacaaatgggttcatcaatcttcttcctctttcttancataatctcattatgttccgcccacaaagaagcgttttcttcaactgatcttgttcaaatggagtgcttgagagtcccaccgttagagtttgctgaagcggccaaaaccgtcgtcgacgctataacaaaagcnggtagcaatagttttcaaagttccacnaagaaaagcngggaattcncaagtctcaatnccaatggttgaattggtgtttgattctccttgattcctggcggccgaaagaaccttccttgggattaatcctctgcctctcaatcccccaaacgggttaagacaattaccncaaggaanacgttgggttcgggttcaaagggacattggaataanccccc

SEQ ID NO: 5514 - DNA, 443 bp, Arabidopsis thaliana
  unsure at all n locations
  Clone ID: LIB23-020-Q1-E1-A11
acgcgtccgaacaaccaggtcgcacacactaaaatggcgttccgcgttttgctcctcttctcactcaccgcacttctcatcttctccgccgtttctccttctttcgccgcttcnncctccgaggacgttgacgatnaggatctcagcttcctcgaagatntcanagaagacgannttcccggcgctgactcactctcttcctcaactggatttnnnnnnnnnnnnnnnnnnnnnnnnnnnnnnnnnnnnnnnnnnnnnnnnnnnnnnnnnnnnnnnnnnnntttttccgatctaggtantccggattccgatccgttnccgacgccggagattgatgagaaagacgttgtggttatcaaggagcgtnacttcactgatgtgattgaggaataatcgtaacttttgggtnagttttatgctncnttgtgtgggtcagttgnagt

SEQ ID NO: 5515 - DNA, 463 bp, Arabidopsis thaliana
  unsure at all n locations
  Clone ID: LIB23-020-Q1-E1-B1
ncgatccacgcgtccgcccacgcgtccgcccacgcgtccgccgattctcagcgttgtctccagctcaggctcattggatccgaaaattagtggatcacttggatctcgaatccttccggctactcaaagatcatccccatcggagaatcttctcctccataggaaaatgtcgtctaattccctgaggcatgtcgagtccatgtcccagctaccctcaggtgccggaaagatctctcaattaaacgccgtcgtgttaggagaatcccttgcatcggaggagaatgatctcgtctttcccagcaaggaattctccggccaggctcttgtttcctcccctcaacagtacatggaaaatgcataanaagtccaatggatgaacctgctgccttttgggtctgaaaatgcctctgaattttactggaaacanaaatggggtgaccaagtgttttccgagaatctccaa

SEQ ID NO: 5516 - DNA, 450 bp, Arabidopsis thaliana
  unsure at all n locations
  Clone ID: LIB23-020-Q1-E1-B2
ncccacgcgtccggcagaaaccatttggagttggagctttggacgacgacaatggccccgaagaaaggagtgaaggtagctgctaagaagaagaccgcggagaaagtttcaaaccctctattcgagaggaggcctaagcaattcggtattggtggagctttacctcctaagaaggatctctctcgctacatcaaatggcccaaatccatccgtcttcaaaggcaaaagaggatcctgaagcagaggttgaaggtccctccagctcttaaccaattcaccaagactcttgacaagaatcttgctaccagcctcttcaaggtccttctgaagtacaggccanaagacaaagctgccaagaangagcgtcttgtaaagaaaggccaagctgaaactganggaaagcttctgagtctaagaagcccantgtagtcaaatacgggctcaancatg

SEQ ID NO: 5517 - DNA, 445 bp, Arabidopsis thaliana
  unsure at all n locations
  Clone ID: LIB23-020-Q1-E1-B3
cccgganccacccacgcgtccgcaaacttcagaaacttctagggccatttttattccggtgcatcctaatcatgatatctgttgtaatcatcactgagttacttttggagtacacgacggctcttgctaaactcaccgccggggttcttccgagacggnaaggcgacagaaatgttatacgtattggcggtttctctctgccttgtcctcctagatnctcacctgttccagatttttcttctcatcttgtcgatttctgaactctgcgctacgccttaatctcaattttgggttttcaccggagattatgactgccaagacttttttcccggcgtctgatctctccgtctgtagaatancttttttggatttccctaaaattttttggtttggtncccgnaattttgaannggctcanaagttgttaaaagaatgtttccgaant

SEQ ID NO: 5518 - DNA, 483 bp, Arabidopsis thaliana
  unsure at all n locations
  Clone ID: LIB23-020-Q1-E1-B6
gcctggcacgnaacggtccgccaattcccgggncgnncccacgcgtccgatntgtatgtatcaccttgccttttctccaaagccctaattgatttttcttnnnnnnnnnnnnnnnnnnnnnnnnnnnnnnnnnnnnnnnnnnnnnnnnnnnnnnnnnnnnnnnnnnnnnnnnnnnnnnnnnnnngcctctctttgtggagtttttgaaatcatccctcatttcattcctattttcgttgtctctttgagtttgagtcagctttgtgttgtgtctaaattctaaacaagtttcagatctttaccttcctttgacttgtctcctgtcttaaaactagggtttaattttctttctctgttcaagtctcagatttgaccagcttggtccagaatttcgcttctcctcgatcataaatcaaagttgattcaaagaggtttgattgagtcagagatctctcttttagaaacatgttgaagcaaatgaag

SEQ ID NO: 5519 - DNA, 458 bp, Arabidopsis thaliana
  unsure at all n locations
  Clone ID: LIB23-019-Q1-E1-G6
acgcgtccgcggacgcgtgggcaatgacgaaaatagagcttcgagctttggggaacacagggcttaaggttagcgccgttggttttggtgcctctccgctcggaagtgtcttcggtccagtcgccnaagatgatgccgtcgccaccgtncgcgaggctttccgtctcggtatcaacttcttcgacacctccccgtattatggaggaacactgtctgagaaaatgcttggtaanggacnaaangctttgcaagtccctagaagtgactacattgtggctactaaatgtggtagatataaagaaggttttgatttcagtgctgagagagtaagaaagagtattgacgagagcttggagangcttcagcttgattatgttgacatacttcattgccatgacattganttcgggtctcttgatnaagattgtnagttaaacattcctgctcttcagaaactg

SEQ ID NO: 5520 - DNA, 495 bp, Arabidopsis thaliana
  unsure at all n locations
  Clone ID: LIB23-018-Q1-E1-B4
acgcgtcnncttatccccatttctctgaaaaccctaacaaatcctcctcttgttccgccactgccgccgccgctactcaacggtggtgaattttctatacggtcagttcgatcctctttttatcgacaatcctacacaaatccataatcatggccgccactgcttcctccgaagcttctgaaggaccagtgatgggtctcatcaacaagcgtctccgtgctctccgtaagaaatacaaccgaatcactcaaatggaagaatcgatttctcaaggcaaaaccctaaacaaggagcaaagaaagaagtcctccggctctaaaactgccgtcgtcatcctaaatcgacgaagcttgaaaagattcgtggcccctctctcngccgncnttannnnaaggaaatnaagcctcgctaatcaagcttaaaccgtggcttcatccggatttaaaccaacggcatctgaancaaaaagggaaagtcactgaatatccccgcaag

SEQ ID NO: 5521 - DNA, 454 bp, Arabidopsis thaliana
  unsure at all n locations
  Clone ID: LIB23-018-Q1-E1-B9
caaagaattcncgggtcgacccacgcntccgcccacgcgtccgtgatttcaaagggatcgtctttaatggaggtgatacacgcatggtctgctccaagatcactcagcaccactctcatgtactcctttgcccagagagatgacattgaagtgcttgatgagccattatacgctgcgttcctcaagtctacgggtgttgataggccttacaaagatgagcttctctctaagatggagtgtgatggagaaaaggtggtgaaggatatcatttatggtccaggaaagaagaaatataggttttgtaagcatatatcgaaacagcgacttcttggtttgccaagtgaactaatgagtgaagggaagcactttatattgatacgcaatcccctcaacatattgccttcttttgagaagatacacccttcatcgtttcacgaattgggactggganagt

SEQ ID NO: 5522 - DNA, 474 bp, Arabidopsis thaliana
  unsure at all n locations
  Clone ID: LIB23-018-Q1-E1-C2
acgcgtccgcttctttcctttatatttaaaaaccttcttcttctctctctgtacatcgtcnnnnnnnnnnnnnnnnnnnnnnnnnnnnnnnnnnnnnnnnnnnnnnnnnnnnnnnnnnnnnnnnnnnnnnnnnnnnnnnnnnnnnnnnnnnnnnnnntgtcttgctccgtcgccgtatgtaattctccggtgttttcaccgtcgtcttctctattctgcaacaaatcttcgattctctcgtcaccgcaagaatctctttctctaacgctttctcatcgcaaacctcagacctcttctccttcctctccatccaccaacgtttcttctcctaaatctccaattcgtctccgttccaaaaaactccgtcggggattggccccnggnccaataacctttggntttgaatccggttctgnatcctctcctccggggaggtgttttaaagaggaaacgacctacaaggcttgatatacc

SEQ ID NO: 5523 - DNA, 520 bp, Arabidopsis thaliana
  unsure at all n locations
  Clone ID: LIB23-018-Q1-E1-D1
ngcaactcttttcgggcgggcacggtcanagaaatcccgggncgacccacgcgtcngctcaaaaccctctcaaaaattccaaaacataatctcatttctcaagtttaacattttcgagcccctttagaacagtggagaaagatccacacagataaaaaaacgggtgagttttatatcaaatagacgaaaatgcccctgtcggcgacggcggatacaagcaagacggtgaagctggagaggtacaatagctacctccggaagattcacagcaccaaagttctcaacgcttcttctaaagttcttttccgagcaacgcttctcgtagctcttgtcctcgtcctcatcttcggccatcaactancctccactctccgatagccgcgccgccgcaancaaaccnaccttccacngtcgtancntccttacccaacgggannnnnnnnnnnnnnnnnnnnnnnnnnnnnancggtgganccgcgtgggaaaagcgcgttaggacnatcctcaacagncaaacgac

SEQ ID NO: 5524 - DNA, 437 bp, Arabidopsis thaliana
  unsure at all n locations
  Clone ID: LIB23-018-Q1-E1-D12
acgcatccgcggacgcgtgggccgccacttaaggccgtctcctccgcaatctccgtaaccaaaaccaccggcatcgcctgatggggagaactaaggagcaggcaacattaactcggtatccaccctgtcctaggaatcctgctaaattcaatgatataaacaaagcactccaggaaaaaggatatggtaaggctctgaaaagaaaaccttggacgggtgtgacatgccctgtctgtcttgaggttcctcacaactcggtcgtcctcctttgttcatcttaccacaaaggatgccgtccgtacatgtgtgccacgggaaaccgtttctcaaattgtctagagcagtacaaaaaggcatatgccaaaggatgaagaaaagtgacaaaccgccaganctattgtgcccgcttttgtaaggggtcanggtaaaaggctgga

SEQ ID NO: 5525 - DNA, 483 bp, Arabidopsis thaliana
  unsure at all n locations
  Clone ID: LIB23-018-Q1-E1-D2
acgcgtccgcccacgcgtccgctttcgtcttcttcccggctttactctctttctctctccaccgtcggctcagatctagacggaaatgtgccggtgaaatcgaatcatgaaaagatctcacatttcgtctcctcgttcttattcacgaccagcgatttcaatcttcggtgtcttcctcttgtttcttctggttttaacactaagctctcgaaaaccatcagattcatcctccggtttagctccaaatcgaaacttanccacaaaatcgacgattccgaggtttgcgtaattgggaaacgggaaccaaaggagatgggaaacgaatgaancgggctgcntaaancaatacatcaatcggagaaaattncnancngnctcaatttggatttcnaaacctccnaanaaaaacaaaantganctngcgaaantatgtgagattgggagaaaaaagaagtttgangaatgttaanggtaatggggttt

SEQ ID NO: 5526 - DNA, 476 bp, Arabidopsis thaliana
  unsure at all n locations
  Clone ID: LIB23-018-Q1-E1-D3
acgcgtccgttcgaagaaaacgaagaaccacgcttttgcttttttcccaagacttaatctaaaaagcgagatttccttctttcgattcttttttctcaatctggttttcagtcttcggattcaatggcgtctggatcttcgggtcgggtcaactcaggatccaaaggtttcgattttggctccgatgatatcctttgctcttatgatgactacaccaaccaagactcctctaatggtcctcactccgatcctgcgatcgctgcttccaactccaacaaggaattccataaaacaaggatggcaaggtcttcggttttccctacaangctcttacangtccancagaggattcnttganccangacattagnngacactggtcnaaaggnccannaaagaatgtttgccgganaaanatgangcgcctttcctgaagggctcaagttcangcntgtctcancttgaactctaatgct

SEQ ID NO: 5527 - DNA, 503 bp, Arabidopsis thaliana
  unsure at all n locations
  Clone ID: LIB23-018-Q1-E1-E1
ttcggnccgccgacggtcaaagaatcccgggncgacccacgcgtccgcgcatccactccctttcaatctaactaccaaatatatattccatgtgttattgctatcgttatcttatgtgcggctaagattacttctaagatgatcaactacaaattaaagtcgcgaatatctaaggtaattcagttatttgctagctatatgaatatttctgaaattttatatatacggttagatttagtgtgtgcatggatctaatccgtctagtccatgatctagtgtgtacaaatcaaccaaaagaatgaaaccaccactactatagtattttaatctattgtgtcctgatattagtaagaataatagctgatattttgattgatttatgagactaaaacaatcttggngcgtcatttaggtgcaaattnaccnaanttaaaatatgccaattctctcctcaagaaccaattcnatatttttagtgggaaatgataaaaattgcatatata

SEQ ID NO: 5528 - DNA, 433 bp, Arabidopsis thaliana
  Clone ID: LIB23-018-Q1-E1-E10
acgcgtccgcccacgcgtccggagatggtcaacccggagtctcaagacaggatgtgtcttgaaggggccgacgtcgtgccagctcaagagatcgccgagtgcgatcgaagtcagtccgttcaggtcgtcgagcctgaagttcaaaatattaccgacgaccgctccgtcgtcgtttatgccgcccctccagcaggcgaagaggtcaacacgggcctaactatccttgatcaagacaaggacgaaaccgttgctgagcccgggatttccaggaggtcccgtgaggagaaagggaaaggaggggctaaccaatccaagaagaggtcggcttctgaagccggtttagatgaggccgctgctccaaagacgtttcgcctgtcgcgaggcgagactcttaattctgaccagtttacgttcaagtattctggtgagaaat

SEQ ID NO: 5529 - DNA, 451 bp, Arabidopsis thaliana
  unsure at all n locations
  Clone ID: LIB23-018-Q1-E1-E3
acgcgtcngttctccgattcgctttacactacttcttccctcgtctctctctctcgcgcttcactgtgaattaatcgagagatctaaatatccgccatggacagagcacaattgatcttgttaggtctacctatattcttgttttgttcggatctcttcaacctcttcactcctccgcctcctaaacctcagcctcaccgtcctcatcagccaccgcatattcctcaccagcatcgtcctaatgcgatcatccccgaaaccctagactttccttcacagaagacaaggtggcttangaggagcaattgggatatggaaatacagtanagatnaacttctgntcccngtncttacaaaggggaantgcattccccatgangaaaagntnngaanaanggnttttcccgggttaaaatgtgaatcctcgcnaaattacccaccaacagcanca

SEQ ID NO: 5530 - DNA, 511 bp, Arabidopsis thaliana
  unsure at all n locations
  Clone ID: LIB23-018-Q1-E1-E5
angtaccgaacaaagaattcccgcggncgacccacgcgtcnnaatgtattgaatggtcagttgttgttgggtaattgctatgcccgcctcctaagcagtatggcgcaagatctgcttggagctgaggattttaaaacacccataaaaaaagtccgtgatagtgtcagagtatgtgaaaaccaaagatagttgccaagagagatttgatgaactgaagaaacaacttcaaaccccttcgacaaaagatcttctcattgacanacaatcgaaatgggacactanttacgacatgttattggctgcctgtgaacacaaagaggtcctctcntgtttgggaaactgcgatcntgattannaaatattaacatcnccctgaagaatgggagaaagatngagattcctttgccccgcccttgaanantncttttgnaccccggcaaatgtttttgacngggncccaactcgaattacagcaaacganttggttccatggaaatgacaaaagcttcag

SEQ ID NO: 5531 - DNA, 517 bp, Arabidopsis thaliana
  unsure at all n locations
  Clone ID: LIB23-018-Q1-E1-F2
aactttttccgcccgccaccggtcaaagaaattcccgggccgacccacgcgtcnngctcttcattggtgggatttcgtgggatacagacgaagaaaggttaagagactactttagcaactatggtgatgttgttgaagctgtgatcatgagagatcgtgccacaggtcgtgcacgtggcttcggcttcattgtctttgcagacccctgtgtctcagagagagtgatcatggataaacacatcatcgatggccgcacggttgaggcgaagaangctgtgcctcgagatgatcagcaggtgctaaagcgacacgctagtcctatccaccttatgtcacctgtccatggtggtggtggaaggacaaagaagatcttcnttgggangtttaacgtctancantaccgagganggattcaagaactactttgattaattttggacaatgccgaagtttgttgtaatgtatgatcataacacgcagaaggcaagaggtttggcttcatcacatttgattcana

SEQ ID NO: 5532 - DNA, 525 bp, Arabidopsis thaliana
  unsure at all n locations
  Clone ID: LIB23-018-Q1-E1-F3
caacgtttttcggcccgcctaccggtcaaagaaatcccgggtcgacccacgcgtccgcgcagtctcccactgattcagcagctctttgaactactcttcgacaatggccgaacgtggtggagaacgtggtgttgagcgtggtggagaacgtggtgatttcggacgaggattcggaggccgtggaggtcgtggagatcgtggagggcgtggacgtggaggccgtggtggtcgtcgtggagggcgtgccagtgaanaatagaaatgggttccaagtgaccaagcttggtcgtctcgtggcggctggtcatatcaagcagatagagcagatctatcttcattcactcccggttaaggagtaccagatcattgataagctcatcngtccancattganggatgaggtaatnaaaancaatnccggttaaaaaacnaancanggcctggtcnaaaggactanaatcaanggctttgttgtcgttggagatggtaatgggtcaangtttgggttggggaattaaatgctcc

SEQ ID NO: 5533 - DNA, 455 bp, Arabidopsis thaliana
  unsure at all n locations
  Clone ID: LIB23-018-Q1-E1-B11
cngaattcgcgggtcgacccacgcntccggaaaatcaaagcagcagttatggccgacgtagcaacaaagcaccccatggaagatgaggtgaagaagacggaggcgtctagtttggtggggaagctagagacagacgtggagatcaaggcttcggctgataagtttcaccacatgttcgctgggaaaccacaccatgtctccaaagcaagtccaggcaacattcanggatgtgatctgcacgaangcgactggggcacagtcggctctatcgtcttctggaattacgtacatgatggggaagcaaaggtggcganngagaagatngangcggtggagccagataagaacttgatnacgtttaaggttatanaaggtgatctgatgaaaagaatncnaagaacntcntgctcaccatncaagtgacccctaancctggaaggcctggaaantattgt

SEQ ID NO: 5534 - DNA, 440 bp, Arabidopsis thaliana
  unsure at all n locations
  Clone ID: LIB23-017-Q1-E1-G8
acgcgtccgnaagaagccaatcatcatcgccagttgttcttctcttcgagatattcaaatcctccgtctctagagaatttcatatcaagagaatcagtggtttctgtagtttgtggtggtggtggttggaaggtaagataggatatggcgcaggagcaggaaggagcggtcgttgagaaaggtgagccgaatgattcctccgccgctgccgtggccgcaaccgcaaccgcaaccgccgatagcgtgaaagaagaagcaaaatggattcttttcgcgtttgtggaatgggatattnagggttagaaggtgacnattcngagaangagacttcatnacatcctcaanggaaagaaaccaactggtttaancaaggataaanccgtnnatngaattcnaggagggaaactcnacanaaatcccaaccgttcctccgtantaat

SEQ ID NO: 5535 - DNA, 443 bp, Arabidopsis thaliana
  unsure at all n locations
  Clone ID: LIB23-017-Q1-E1-H10
ccgggncgacccacgcgtccnggcttcttctactagattaactattatacaatcaagcttcgtctccgcaagaacaagactcaattacgtctccaagacaaatcattctgggttcgcttgtcgttctctttcaaaacccagaaacttgagtctctctgtttattctatgggttcttctagttcttctccgaaaccagacaacgtccaaggttctttttaaaaatttaacctttttgaattgattctgtttctctctgattatccgatgattcccataaatcccatttcatgttgtgtactgtaatttgcgtaaaaatggtttctttctttgtgggtttaggttaatgagttttgtctttttccaaatgttatgtttgatgttttggaagagagatttaagtcagcaagtttactcaattggntctcaaaagttagtgaaagag

SEQ ID NO: 5536 - DNA, 436 bp, Arabidopsis thaliana
  unsure at all n locations
  Clone ID: LIB23-017-Q1-E1-H11
acgcgtccgatcgcctctctctttcttcatcttcactcccaaaaccctaatcttcaccagaaccaggatctctggtttcccttatcttgcttcccggcgatcccgcgatttcatcaacgggagggatgatttcgctgacgatacgaggagctggaaccggaagatcaaaccggagtatgggttcnnnnnnnnnnnnnnnnnnnnnnnnnnnnnnnnnnnnnnnnnnnnnnnnnnnnnnnnnntggatctgttacttagatttgtagaaaatgttttcagaaagatttctaagagagcaaggaaagctgtccgatcaattttgcctgtttcgatctctacgaagctcgtggggttttcagtgaatggagtacttattcttgcttttttgtggattttgaaggctttcctcgaagtagctttgcacacttgggaacta

SEQ ID NO: 5537 - DNA, 429 bp, Arabidopsis thaliana
  unsure at all n locations
  Clone ID: LIB23-017-Q1-E1-H12
acgcgtccnataatatgggtgtgtttctttatgatgatcttttagcgattttgtcgttgcgttatcagaggattcatcttcttcagantagagattctggtcatcttgttgatgctcgtgctattggttacttttgtcgtgaagatgatgagcttttcctcaattctagctctcaggcaatgatgagtcaagataagagtaaacagcagagtttatctgggagtaaggaagatgatactggagagaatgggttgcgtcatagtctaagtcagccaagtggttcgaattcgtttcttagtggtgttaagcaacggttactttcttttatcttcagggagatttggaatgaanaatcagataacgtaatgagagttcaaagtcctaagaagaaagttttaattccaatttcaaggattatgtcnacttgat

SEQ ID NO: 5538 - DNA, 502 bp, Arabidopsis thaliana
  unsure at all n locations
  Clone ID: LIB23-017-Q1-E1-H2
ggaaggtttctctgccnggcccggtccaaactnaacgggtcganccacgcgtccgcagaaattcctttggatctatcgtcaatggacctaatacctcagcagctcaaggccgtaactcttacacacgtccggtaccgtcccggagatcagctcggacatttcctcgcctggatctctctcgtcccagtcttcattagcctcggtggattcgtctctcatttccttttccggcgtgagcttcaagggatcttcttcggtataggtctcgtgatctcacaattcatcaacgagtttatcaaaacatctgtagagcaagcgcgtcccgaagacatgtacgttgctcgaagcttgcgatcacatggattggcaatcaagncaatccgcaattcaggtcctccttcgcaagttattccantttganggaagttaaaggaattggatccgggttgggtttagnagcaggtggnttaatgaatcctcctcaatgggccttaacctggtt

SEQ ID NO: 5539 - DNA, 466 bp, Arabidopsis thaliana
  unsure at all n locations
  Clone ID: LIB23-017-Q1-E1-H4
ccacgcgtccgcacacaacgtccggtttctggttgtagaagtccatacactcttcggcagtgggaaagaacttcagatacaacagaagactgcatatcataagccctgtccttgccatgccagccttacagtgaacaaccacaaacgatgtgtggatggaaaaggacttgtgctacccagccaaattagatatgtgaaatactttgaaagaattttgacctacttcaacggggaaaaacaaacaaggccgtaaggtgtaatgcctaagggaatcccggctccaataaggtgtcccctaatnggttaanggcaaccaatcaataattcaagatnaccatgggggttccccttaacancaaaaagnatcctcngnacaaggntnncncngtacgccantgntaataccttaatggtaacnagtatttgttgaanccttgggaaatttcaagaattttcancctgaaga

SEQ ID NO: 5540 - DNA, 458 bp, Arabidopsis thaliana
  unsure at all n locations
  Clone ID: LIB23-017-Q1-E1-H5
acgcgtccgnccacgcgtccggaaaaaacctctccgagaatggttttatcggtgaagcaaacactctctccgaaaatcggacttttccgacgaaacccttcatcctcactaggaagatctcctgtttctctctcgtttccatcgacggagcttccaaaacgcaccgttttagccgtgtcaaagccgcttcatctctcttcttctctgagagctaagtctccggtagtgagatgtgaagcttatgaagctgaccgatcagagcctcatccgatcggtgatgatgctgcggcggcggaaacgaaatcagaggcggctaagaaattgaagatcgggatttactttgctacttggtgggctttgaacgttgtgttcaatatctacaacaaagaaagtccttgaacgcctatccctaaccatgggcttaacctcgaacgcctttctccttgccggctgggttc

SEQ ID NO: 5541 - DNA, 491 bp, Arabidopsis thaliana
  unsure at all n locations
  Clone ID: LIB23-018-Q1-E1-A1
acgcgtccancaagnnnnnnnnnnnnnnnnnnnnnnnnnnnnnnnnnnnnnnnnnnnnnnnnnnnnnnnnnnnnnnnnnnnnnnnnnnnnnnnnnnnnnnnnnnnnnnnnnnnnnnnnnnnnnnnnnnnnnnnnnnnnnnnnnnnnnnnnnnnnnnnnnnnnnnnnnnnnnnnnnnnnnnnnnnnnnnnnnnnnnnnnnnnnnnnnnnnnnnnnnnnnnnnnnnnnnnnnnnnnnnnnnnnnnnnnnnnnnnnngcttacgaaggtcttcgctgttcccgataccctagatccaactccagaaattctcgatgaacccgcctctgangttccgagctcttcatccatcagttgttagaacccgganaaanatgggggccaaaancaaaangattagggttttaannctaaattnaaaccnggggtggcctccctaaatggaggnctcaaggcaagcaagataccttgaatgctgcngaagaaaacaccaat

SEQ ID NO: 5542 - DNA, 478 bp, Arabidopsis thaliana
  unsure at all n locations
  Clone ID: LIB23-018-Q1-E1-A3
ccgggncgacccacgcgtccgcccacgcgtccggcgatcggagagctctgacggcatcagccacctctgcggcttcgcaaatccaaataagctgtggatgaaacgaagaatcctagatttctgaatggcgacaccatttatagcgggggttgcagtagctgcaacagcacttgctggtagatatggaatccaagcatggcaagcattcaaggcaaggccaccaaggcccaaaattaagaaattttatgagggcggtttccagcctacgatgacgaaaagggaagctgctctcattcttggcgtcagggagagtgtagcggcggaaaaggtgaaggaagcacacaggaaggtaatggtagcaaaccatccagatgcaggtggtacccatttccnacccncnaaatttattaancnaaanacgtnatgctaagcaaaactaaaaacagcggattcgctttttgatgcaaatttcaatcaa

SEQ ID NO: 5543 - DNA, 511 bp, Arabidopsis thaliana
  unsure at all n locations
  Clone ID: LIB23-018-Q1-E1-A4
aacttctattccgnccgcctaccggtcanagaantcccgggncgacccacgcgtccncggacgcgtgggtggcggagaagagctttaagtacatcatcctcggcggcggcgtctctgccggatacgcagctaaggagtttgccaatcaaggggttcaaccaggagaattggctgttatctcgaaagaggcggtggctccatatgaacgccctgcacttagcaaggggtatttgtttcctgaaggggctgctagacttccaggtttccattgctgtgttggtantggtggagaaaaactgcttcctgaatcctacaagcagaaaggaattgagttgataccaagcacanaaatagtgaaaantgatntctctgccaaaatcctgtcaatgcaactggggaantctcaantnnnaaagcncaaaaatncaacgggtctantggtcccaaantgactgatttggntaaaaagtgcagactctnagaatatcctctatctgagagagatgatgat

SEQ ID NO: 5544 - DNA, 464 bp, Arabidopsis thaliana
  unsure at all n locations
  Clone ID: LIB23-018-Q1-E1-A6
acgcgtcnngggatatggtctcggatcaggaatctcccttttcattgccaccaacatttgtgaaagcattatctggaaggcatttagcccaactaccatcaacaccgggcgtggagctgagtttgaaggtgctgttattgcactgttccatatgctgataaccaagtccaacaaggttgcggctctccgccaagctttctaccggcaaaaccttccaaatgttaccaacttgcttgccacagtcttgatcttcctgattgtgatctacttccaaggtttccgtgtggttttgcctgtgagatcaaagaatgcccgtggacaacanggttcttanccaatcaagctgttctacacctctaacaangccaatcaacctncaaaccggcctcntcncaaatccttacttcanttctcaacttctctaccggaagttcancgggaaatttccttgtnaaccttttggg

SEQ ID NO: 5545 - DNA, 491 bp, Arabidopsis thaliana
  unsure at all n locations
  Clone ID: LIB23-018-Q1-E1-A7
ttngccggccgacccacgcatcaacttatatactactgagaatcttcaatttctgcaacttttgtatctcttcctgatcaccaaataagaaaactcttgtggttctattgaattgggtttccactatctttattgtagagatggagtcttcaagtccccaccatagtcacattgttgaggttaatgttggaaaatctgatgaagagagaataattgtggcgagtaaagtctgtggagaagcaccatgtgggttttcagattctaagaatgcttccggggatgctcacgaacgctctgcttctatgcggaagctttgtatcgccgtccgtgctgtgtctantgttcatgagtgttgaagttgttggtgggattaaagccnantagtttgnnnaaatnaccnnnnncaacnnaaatttncccccnggaagntgccgggccttggntaanctcccctccttctcaatgtgggggctgctggggtggggaaagcc

SEQ ID NO: 5546 - DNA, 485 bp, Arabidopsis thaliana
  unsure at all n locations
  Clone ID: LIB23-018-Q1-E1-B1
accggtcanagaaatcccggggncgacccacgcgtccgcctcaagaaaatcaaagcagcagttatggccgacgtagcaacaaagcaccccatggaagatgaggtgaagaagacggaggcgtctagtttggtggggaagctagagacagacgtggagatcaaggcttcggctgataagtttcaccacatgttcgctgggaaaccacaccatgtctccaaagcaagtccaggcaacattcagggatgtgatctgcacgaaggcgactggggcacagtcggctctatcgtcttctggaattacgtacatgatggggaggcaaaggtggcgaangagaggatcgaggcggtggagccagataagaacttgatcacgtttaagggttatagaaaggtgatcttgatgaaagagttcnagaannctccntggncaacaatcaanggttgacccctnaanccttggaaggcccttggaaagttanttgttgc

SEQ ID NO: 5547 - DNA, 450 bp, Arabidopsis thaliana
  unsure at all n locations
  Clone ID: LIB23-017-Q1-E1-G5
acgcgtccgcccgctttggctgatgaaagaggcaatgagataaagacatcgaaggttgatctagaaactgaggttgcagtagttagtgaaggaacatccccaaatccatttctggctctcctgaatggtcttggaatttttagtgctggcgttcttggtgcactttatgcactggctcggcaagatacaaaagctgctgaggaaaccatcgaatctctaaagaaccagttgaaagacagagaaagagcattggttttgaaggagaaagatttcgaggcaaaactgcagcatgagcaggaagagcggaaaaaggaagtagaaaaggcaaaagangaacagttgtcattgatcaaccagttgaattctgcaaaggacttggtgacagaattaggccgggagctaagtaccgagaagaaattatgtgagaagcttaaagattaaatcnaaaag

SEQ ID NO: 5548 - DNA, 454 bp, Arabidopsis thaliana
  unsure at all n locations
  Clone ID: LIB23-017-Q1-E1-E1
acgcgtccgcccangcgtccgcccacgcgtccgcggacgcgtggggcaaattcttgatatgggtggaggtagttgggaccgtgacactgttgttcgtgctctgagagctgcgttcaacaatcctgaaagagctgttgaatacctgtactcgggtatccctgctcaagctgaaatcccaccagttgctcaagccccagctactggggaacaggcagccaatcctctagcacagccccaacaagcagcagctccagcagctgcaactggtggtccaaacgcaaatccattaaacctgttcccccanggcatgcccgctgcagatgctgggtgctggagctggtaatcttgatttcctgcgtaacagtcaacaattccaagccttgcganctatggtacaagcaaanccacaaaattctacagcctatgcttcangagctcggtaaacaaaacccca

SEQ ID NO: 5549 - DNA, 450 bp, Arabidopsis thaliana
  unsure at all n locations
  Clone ID: LIB23-017-Q1-E1-E10
cattcccgggccgacccacgcgtccanttaaaggaaacctcctctacgcgaaattcgtattctctcatttcttctacggagatttgcatcgaagaaactgactcgcttgtggaatcaacaacaagacgatgtggcgctgcgtctctcgtggctttcgagctcctgcttcaaagacctcttcactctttgatggcgtctctggatctcgcttttccagattcttctccactggttctaccgatacgagatcctcttatacgatagtggatcacacttatgatgcggttgtggtgggagctggtggtgctggtcttagggcggcgattgggttatcggagcatggctttaacaccgcttgcattactaagcttttccccacaaggtcacatactgttgctgctcaaggtggtaataatgctgcactgggaaatatgtccgaaaatgactggg

SEQ ID NO: 5550 - DNA, 453 bp, Arabidopsis thaliana
  unsure at all n locations
  Clone ID: LIB23-017-Q1-E1-E3
acgcgtccgnccacgcgtccggagagagatcggttaaatagccggagtaaacggcggagaggagaacgcttaatgatggttcacggtaatctagacgacggtggcgacgatagctcggaagagagtgtcaacgacgatgaagaatatgacgacggaggtgtaggaccaccttcttcgttgaagatgcttcctccgacgagcaataatatctcagctgcatcgttttcatcgtctctatcaaatcatcacaacggaggtagcggtaatctccatcaccaccatcacangccacaacaataaccatcagaggaagaataattttccgccgacgaaagttttcagatcgtctccttctccggcgccggtatcacctcttgtctcgacgtggaaagccgccgacganatgatcgtgtttcggttcctaaaaaagctcggtcaacgtgtacgaagaga

SEQ ID NO: 5551 - DNA, 467 bp, Arabidopsis thaliana
  unsure at all n locations
  Clone ID: LIB23-017-Q1-E1-E5
attcncgggtcgacccacgcgtccgnccacgcgtccgccaaaagctctctcatctctctcgtccgtctcctctttctccatagtttaaagcttcgtcgttccgtcaccagaatttcaactactttgagttgattctcgttggatttctcacgatgggagacagcgggaagcttgaggcaacgatagatcggcttctgaatgaagagaagcagatgagactcgccgaaaacgtagccggtacaaggaaagccgccactgagattcttcagctttgtttcgatgctaaggattggaaacttctgaatgagcagattctcaatctctctaagaaacgtggtcagctcaaacaggctgtgcaatccatggtgcagcaagcaatgcagtatatcgatcagacaccagacattgaaactcggatagagcttatcaagacgctgaacaatgtatctgctggaaagatatatgtt

SEQ ID NO: 5552 - DNA, 475 bp, Arabidopsis thaliana
  unsure at all n locations
  Clone ID: LIB23-017-Q1-E1-E7
gaacanacattcgcgggtcnacccacgcgtccgancacgcgtccgctctaatcgaaaccgtttctctctttttgatcagatntcagatctttccctctttgantcntcttccttagatcgattctcnctanaaacaanaatggngtctgggcgtgaagagttcgtatacatggcgaagctcgcggagcaagcggagaggtacgaagagatggtagagtttatggagaaagtctccgccgccgttgacnggcgatgaactcaccgtataagagcgaaancttctctccgtcgcttataagaatgtgattggtgctcgccgtgcctcgtggngtatcatttcatcgatcgagcagantgaanagatccgtggtancnatgaccacgtcacggcgatntgtgaatataggtctaacatcgaganggaactctccggnatcngctacggaatccttangttgcttgactctanactcat

SEQ ID NO: 5553 - DNA, 452 bp, Arabidopsis thaliana
  unsure at all n locations
  Clone ID: LIB23-017-Q1-E1-F10
cantccgggccgacccacgcgtcnagcaacggtgacggtacacatgatccagtcctcagaatctctaggaatggtcatgaagcgagagtatataaaagacgacgagcaccacaaatctctcggcaccgccctgggtgagatattgaaacacaatgagccctccacatctctaagcacagttctgggcgagatgtttaaaaacaacgaggagaaggaacatattttttcggatctagaacgaggaacaatgctaacaagaccaatgggcgaaggatatattcaatatctacggctttctaaagagacgactcaaccggcggattctaagattcccggtctttggtcttcttccgttagaccagagttttgttgcatctatagagtaccaagaccggttacgcaaagtgaaccccgaggcttacactcctcaaatgctgctaatccggactcct

SEQ ID NO: 5554 - DNA, 490 bp, Arabidopsis thaliana
  unsure at all n locations
  Clone ID: LIB23-017-Q1-E1-F2
ggnaactgttatttcgccgnccncggtccanccnnacccgggtcgncccacgcgtccgctttntctgaagctttatctaataaatctcttcgttgatccttcctttccattaacgagatttcgaatcgagaccagatctgcgtgaagatgatngagaagtgtatangagcgcatcggtttcggagattacagagattcatgcgtcaagggaaagtgacgattctttgtctcgntctcaccgtcatcgtcntangtggnacaatcggagccggtaagtttggtacgccgganaaagatatcgaggagatccgtgagcatttcttctacacgcgtaaacgnggcgagcctcaccgtgtcctcgtcgangtctcttccaaaacgacgtcntccnaagacggaggaaatggtggtaacanctaccaagaccttcgatatcaagaagctattcgttgatgaangagacgaaagagaaatctcnaagaacgggact

SEQ ID NO: 5555 - DNA, 446 bp, Arabidopsis thaliana
  unsure at all n locations
  Clone ID: LIB23-017-Q1-E1-F3
acgcgtccgtattgctaaagtctcttgcgcggttgtgtcgtgtgctaccgcgttgatgttggttcatattattcctgatcttctcagtgttaagaacagggaattgtttctcaagaagaaagctgatgagttagatagagaaatgggtcttattttaacacaagaggagactggtaggcatgttaggatgcttactcatggaattagaagaactcttgataggcatactattttaagaaccactcttgttgagcttggtaaaactctttgtcttgaggaatgtgcgttgtggatgccttctcaaagtgggtttatatttgcagctttctcatactttgagtcataaaatacaagttggaagcagtgtgccgataaatctcccgattattaatgaactcctcaatagcgctcaaagctatgcacatacctcaatccntgtcctttgg

SEQ ID NO: 5556 - DNA, 450 bp, Arabidopsis thaliana
  unsure at all n locations
  Clone ID: LIB23-017-Q1-E1-F4
acgcgtccgcattnacaccttttctcgctcctgggaatctgaagcagttcttctccgacgcctggatcgtgatttgattcgaactttcacataagatggctatggtagatgaaccgttgtatcccattgctgtgcttatagatgagcttaagaatgatgatattcagcttcgtttgaactcgatccgtcgcttatctactatagctcgtgctcttggagaggagcgtacaaggaaggagttaatcccttttttgagtgagaatagtgacgatgacgatgaggtgcttcttgcaatggctgaggagttaggagtttttattccgtttgttggaggaattgagtttgcgcatgttcttcttcctcctttggaatctctatgtactgttgaagagacttgtgtgaagagaaaaagctgtggaatcgctttgtaagattggatctcagatgaaa

SEQ ID NO: 5557 - DNA, 261 bp, Arabidopsis thaliana
  unsure at all n locations
  Clone ID: LIB23-017-Q1-E1-F9
ggttggagnaattctattcgttcggcacggtctgacatcncgggcccgacccacgcgtcaaagcgagcggccgcccnnnnnnnnnnnnnnnnnnnnnnnnnnnnnnnnnnnnnnnnnnnnnnnnnnnnnnnnnnnnnnnnnnnnnnnnnnnnnnnnntgacaaactctcngggtttttacttacgtctgcgtttcaaaaaaaaaaaccgctttcgttttgcgttttagtcccattgttttgtagctaaaaaaaaaaaaaaa

SEQ ID NO: 5558 - DNA, 467 bp, Arabidopsis thaliana
  unsure at all n locations
  Clone ID: LIB23-017-Q1-E1-G1
acgcgtccgatctcttctctggctatcttagagggatttttgattgagattttaaaattttctgagttggattagttggttggtaaagagatggatccggatacggtgaagtcgaccctctcgaatctggcattcgggaatgtattggcggcagctgctagagattataaaaaggaagttcttgcaaatgaaaaggcacaaggatcaagacctgtcaacgaggaagttgatcttgacgaattgatggatgatccagagctagaaaagttgcacgcagataggattgcagcactcaggagagaagtggaaaagagagaaagcattcaaanagacaaaggacatgggtgaataccganaaattaaccaaaggcgacttccttggggaaaaatcacaaaggaatnaaaaaanttatatgtcacntcctaccacaaaggagttccaaccgctgcaaagataatgggacaag

SEQ ID NO: 5559 - DNA, 457 bp, Arabidopsis thaliana
  unsure at all n locations
  Clone ID: LIB23-017-Q1-E1-G2
acgcgtccgnaaanggctcacaagtctcaaatacaaaacaatgaagaacatactagcttgcatagttaccatcataaccctctcaaacctcataaccatttctcaaggaagaagggtatcacagtcatttgaaacatttgagtacacagcaattatttgcagatcccacagtgcctccataacagagtacggtggtgtacgagacggcaagacgctaagncacaaagggnttctangagcgccgtngatcatctcagccaatactcatctgaaaggcggaacacaactctttgtnccgccgggaaatggctcaacggaagtttcaacctcacaagccatttcactctgtttcttcacaaaagacgcaattcttctcgctgctcaagacttaaaccaatacccaattctaaaggctttgccttcgtacggacgaagacgtgacccgnccggtggaaga

SEQ ID NO: 5560 - DNA, 488 bp, Arabidopsis thaliana
  unsure at all n locations
  Clone ID: LIB23-017-Q1-E1-G3
aattcttcggccgcacggtccanacaaccgggtcgacccacgcgtccgnaaaacctctctcttctctctctcactaagctcgaacacccaaaacagttagaagattcaaatgccgtcgngagtcatcgttacaaagtcnaccgtccggcgaaatccggaggatctcgacgagactcaagccccgactcaataatcttcacacctgaatctaatctcagtctcttctcctccgcttccgtcagcgtcgatcgttgctcttcnacctccgacgctcacnaccgggacgactctctcatctccggtccctctctgatgaacaggagcgaagatnagagggtaagttcgagctgtaaagatctagatntanacaagcgtggtacaaggtggaagaatanttgtaactctagaaaatcaaatanagttanagcntggaaanangatttgaggttaaaaagatgatgaaaggccanatccttgaatcaacctag

SEQ ID NO: 5561 - DNA, 460 bp, Arabidopsis thaliana
  unsure at all n locations
  Clone ID: LIB23-017-Q1-E1-G4
acgcgtccggtcaatttcaactcttcagtgaagagatttctttcaccgaattttctactccgatcgatcaattgaagattgaaatggaagctaattcnnnnnnnnnnnnnnnnnnnnnnnnnnnnnnnnnnnnnnnnnnnnnnnnnnnnnnnnnnnnnnnnnnnnnnnnnnnnattggtgagcaaagacgttgcaaagtggagcataaaccaatccaattttgttcttangganatccccctnggaagggatccaaagaataccgggaaanaactccgggaanaagtnnaccaacaattgntncctnctccgggatcccctggntcccttgatnccctcaactactaagtcaattccgangaacacgancttttagcaaagaattgnaacctgaatccaangngttttactccatatccgtgagaacnagaagaagaccctccttgaaggtgtcaaaaac

SEQ ID NO: 5562 - DNA, 470 bp, Arabidopsis thaliana
  unsure at all n locations
  Clone ID: LIB23-017-Q1-E1-D9
ctattcggttcggnaccggtctctacaatcncgggcccgacccacgcgtcnaatctctaactactactatccccaacacacactgttactcttcttcttcttctctgtcactgtctattctctcttttggacctttcatggctatgtttctctgcaatggnagtccaagctcgtgatcaccaacaccgacacgctaatggctattggagatagagctatgtttactgttttgcttctattcattgcttcgatctctggattctctgttgttcgttgtgttactgatccatctgatgttcaaagcccttcaaagttttgtatacttcactaaatagtccttcacagctaaccaattgggaaaaatggtggtggtgatcaagtggagagtcatggaaagggattacttgtgagggctctgcaanttgtcactatngatatatccgggttttaggagtctctggnactccttg

SEQ ID NO: 5563 - DNA, 485 bp, Arabidopsis thaliana
  unsure at all n locations
  Clone ID: LIB23-016-Q1-E1-A6
ccggcaangtacaagtctgcaattcncgggcccnacccacgcntccaaacagattcattaaccctttcttttgcttaggcatctcattagttagagtcttagagtcaaaggatctctctttgagtttctggtcttttatcaggttttctaacaagggaaactttgtttttcgttgcagtgatcttgataaccaaggtctgaaaggtttcctaccaaacgatatatcaaagctaaaacatcttcagagcataaacttgagtgaaaacaacattcgtggaggaatacctgcatcgcttggaagcgttacgagcttggaagtattggacctctcctacaattccttcaatggatctatccctgaaaccttaggagagttaacatccctgcggattctgaatctcaacggaaactctttgtctggaaaagtaccancggctgtaggtggaacgctgttgcacangagcaagcttcaacgtcncaagata

SEQ ID NO: 5564 - DNA, 484 bp, Arabidopsis thaliana
  unsure at all n locations
  Clone ID: LIB23-016-Q1-E1-A9
acgngtccncatggctgctgctataagtgctgcagtctctttaccttcctccaagtcatcctctctcctcaccaaaatctcctctgtatcccctcaaaggattttcctcaagaagagcacagtgtgttacagaagagttgtgtcagtgaaggctcaggtgacaacagatactaccgaggcaccaccagttaaagtagtcaaggagtctaagaaacaggaagaagggattgttgtcaacaaattcaaacctaagaacccttacactggtcgctgccttttgaacaccaagatcaccggtgatgacgctcccggtgagacttggcacattgtcctcaccaacgaangtgaaggttccgtatagagaaaggacaatccaataaggaattgantccaagaagggaataagacaaagaacggggaaancccgcaacaaagctcaaggctttactccnatccgccgaattagttgccattggtgacnttg

SEQ ID NO: 5565 - DNA, 471 bp, Arabidopsis thaliana
  unsure at all n locations
  Clone ID: LIB23-016-Q1-E1-B1
ggtccaagaatanacgggtcgagccacgcgtccgcccaaaatccccgatggcgaaggaaactccggcgtcgtcgtcgatgccttctggtctcaaagcctacacggttcctatcttcctcttcgtcctcgctatgttcttccagcttttccttcttcctcgttcctttcctccttctcattacgacgttttgggtgtaaagatgtacagctcagtggatgacgtgaaagatgcgtatcagactgttgcttctaagtgggattcgggttcaggagtttctcttccagctgattttgttaagatacaatacgcctatgagctgttaacaaatctaagtatggaaaagggactatgacttatacgccattgatgaatcagtacatattatagaggaacttgaaaaacaatatgctgtggaagattttgcaaaaataaaacttcccctactggaagttgtttcctaagaaccngaa

SEQ ID NO: 5566 - DNA, 466 bp, Arabidopsis thaliana
  unsure at all n locations
  Clone ID: LIB23-016-Q1-E1-B10
acgcgtccggttaacttgcagannnnnnnnnnnnnnnnnnnnnnnnnnnnnnnnnnnnnnnnnnnnnnnnnnnnnnnnnnnnnnnnnngaactatacaaaaacctacttttangttctcttccaagaagtcaagaacccagaagaagacatgacaagtgaagttcttcaaacaatctcaagtggatcaggttttgctcagccacagagctcatcaaccctggatcatgatgaatctctcatcaatcctcctcttgttaagaaaaagagaaatctccctggaaatcctgatccggaagctgaagtgatagctttatcccccacgaccttgatggctacgaaccgggttcctaatggtgagggatgttggcaaangttnccaagaggagaccaaaacttacagcttcagccggggaaggacataatcnttccatggaaattgaagcagaggacgangcaagagaagtg

SEQ ID NO: 5567 - DNA, 471 bp, Arabidopsis thaliana
  unsure at all n locations
  Clone ID: LIB23-016-Q1-E1-B11
acgcgtccacccacgcgtccgaatctctctcactctcacaaatggcaacgcttttaggtttctctcagactaagtttcaccattgcggcgtctggatttctacgccgccgtgctcatcttcttccacggtagtctcaatggtgggcttgaatcggactgattcgaaaaagctccgttcagatttcctcggccagattggttacgaagatcggagacaagtaagacacagttactgtagaagctcattagctgtgaaaatgtcgtgggacggtcctcttgcttccgtcaagttgatcatccaaggaaaaaacctcgagttatcagagccaattaagcaacatgttgaagaagaaaagtaggaaaatctgttcaagaaacacagtcatcntggtgagaaaaatttatgttaagactcctctgttcntgggtggaaaatttgggtaaaaggccctaaggattcnaaagaatgtg

SEQ ID NO: 5568 - DNA, 491 bp, Arabidopsis thaliana
  unsure at all n locations
  Clone ID: LIB23-016-Q1-E1-B2
tttacttgccnggcccggtccaaaataaacgggtcganccacgcgtccgaccaaaaccggtttccgacgattaaataggtacatagaaggagataacaagagcaacgtgaagatgaacatgacagctccggtgatcgcacaagcaacgcctggaagatcagtctacacggtctcactctacctcccgaagaagaaccaacagaacccacctcaggccgatgatctccacgttcggtctacgaaaccaacttacgtagccgtgagacagatcggtggctacgtgtcgaacaatgtagccaaggacgaagctgcggctctgatggaaagcctccgggattctaactggattttgcccatcgagaagagcaaaggaaagttgccggcgtattttctcgctgtttataacccgccatctcataccacggctagggtgattaatgagatcatggttccgtttaacatgtanatnatgttaatgacgcctcacgaat

SEQ ID NO: 5569 - DNA, 445 bp, Arabidopsis thaliana
  unsure at all n locations
  Clone ID: LIB23-016-Q1-E1-B3
ataaacgggccgagccacgcgtccanggacacgtgggcttttttaccgcgcttgctacacattgtggcagacatcaactcctacctaaatctggtagcagcccattttcagatcgaattgaccccaaggagatcacatcagtttttgggggttttgaggaatgaatttcttgcttcgatctgcttcttccgctactcatcggcctccggtgatcgaaccaccagctacgccgcctcaacctccccctgaaacagcgaagcccggagttactttggaagggctgattgctgaagagcatttcccacaatatccatcagtagatgaagatctcgatcgtgtgggtgatggatctggagaccttgatggtaatggagagtcaaatgctaagtctggtggctctggtatggagagattctctgatgtgtctgaagaacaaggatggatn

SEQ ID NO: 5570 - DNA, 457 bp, Arabidopsis thaliana
  unsure at all n locations
  Clone ID: LIB23-016-Q1-E1-B4
ggcccggtccanaaattaacgggtcgacccacgcgtccgaaactggggaagatgaagatggagtggtgaagaacaaaaccgtataaccgttcggttcagaggtgccgaaccgaaccgacccgtaaaccgaaatcctcaaaagaaattgccgatcggtttgctactgttcaaaacctcggtgccgagaaccgaaactgtcggttttttcggttcgggtttctcggtttcttccgaactcccaggcctagtttggttttatttttcacgagttttgcttctcttttcatcggcgacgacgacgtcgagtttctgtcaaaacgttaacgatccgactcgagcgtcgacagtaagagaagaagacagcgattgtgtgtagatcgacggcgaacgtgtgtcgattcgtctcgatcgacggagaatacgtttcgattcggtttcgattcaaatcggaganttg

SEQ ID NO: 5571 - DNA, 395 bp, Arabidopsis thaliana
  unsure at all n locations
  Clone ID: LIB23-016-Q1-E1-B7
attcccgggcccgacccacgngtccaacaaaatctctctctttctctgttagtttttttttatttcttctgcttctgggtttttttctccgttaactgtagttgggctagggtcttgagctccgttcctcgataatggcggtttctttgagaagaaagctcgtgtcttccttctattaaaaaagctaactttccccttttttatactaactttcaaaatgggaaatttctgaaaaatgtgttgcaagttaagcttgtgaaagtttcgatttttcgttttggggttcttaaattttaggacaattatttaactttttaaangattataggataattantatccgttgggaagtaaattgngaaggctaagtnanttgtatctctttgatntgttgt

SEQ ID NO: 5572 - DNA, 468 bp, Arabidopsis thaliana
  unsure at all n locations
  Clone ID: LIB23-016-Q1-E1-B9
acgcgtccnagcacacaaagcaaaaacgctggtttgtctttttaaaaaaaaagaacttcgtttctcttcaattccgttaccgtcactgtcaccgttcacctccgtttatctcatcctcaccgttcatcttcttcgatctaactcgccgtcgttcaccttataatggacaccgtcaacgattccttttcgccgggatcttcccgaccttcgccggcgacgctttctcgtgaagattgctggagcgaggaagcgaccttcacgctcatccaagcctgggggtaatcgctacgtcgacctcagcgangtaatctccgtcagaaacactgggaaagangtgggctaacgncgtttaagaacggtcaatacaacaaccggtccaaaagttttcggcggcaaatcnganccgttacgnaacgaagttcaantgttaaaancggattgatactccgaagaagaagtcaaagtcga

SEQ ID NO: 5573 - DNA, 468 bp, Arabidopsis thaliana
  unsure at all n locations
  Clone ID: LIB23-016-Q1-E1-C1
cccggtcaaaaataancgggtcganccacgcgtccgcggacncgtgggaccataccataaaaaacatgaaaatcctctcactttcacttctcttgctcttggccgctacggtctcggcatccgttccagggctcatcgaactcgtcgattcgaaaaccatctttgggaacgtagccgaactcttagagaaagagaaactttccatcaactacgccaactgcagaagctggcaccttggtgttgagacctctaacatcatagacttcgacacggtgcccgcaaattgcaaagactatgttgaagactacttgatcacttccaaacagtaccaatacgactccaaaaccgtgtgcaaagaggcttatttctatgccaaaggacttgccctaaagaacgacaccgtcaatgtttggatctttgacctagatgatacctcctctctagtattcctactacgcnaaatatggg

SEQ ID NO: 5574 - DNA, 483 bp, Arabidopsis thaliana
  unsure at all n locations
  Clone ID: LIB23-016-Q1-E1-C10
atcncgggccgacccacgcntccaaaatcatctccttcctccgctcccatctgcgtctcaatggnnnnnnnnnnnnnnnnnnnnnnnnnnnnnnnnnnnnnnnnnnnnnnnnnnnnnnnnnnnnnnnnnnnnncncggccacgtattttagtgcgatcgagtttaacatcgtctatgacctctaccaatagtatgctggtctttgtacatcctcatcctttgattaaacattggctctcgttattgagatctgaccaaacttctttccccattttcgttagaattccaatgacttctgtggttgcaacgaggtggtcgtttctatcntcagtcaaangaggaanagcaagaatttatcagaacgattnctctaaaaagcatgtgggctgcgcatctggtatctcccttacactgcacaaaaataanggtttatgtttgagctcanaggacccaaggggaaanatattgggcgtgggttctgca

SEQ ID NO: 5575 - DNA, 476 bp, Arabidopsis thaliana
  unsure at all n locations
  Clone ID: LIB23-016-Q1-E1-C6
acaagtctnaaattcccgggncgacccacgcgtccaaccacgcgtccgcccacgcgtccgcgcagnnnnnnnnnnnnnnnnnnnnnnnnnnnnnnnnnnnnnnnnnnnnnnngggcttcggtggtgatcacttgggtcgaatactgatgaagaaactggctgatcggctccttcatcgttttactaatcatgaaaccgctttaaacgccggccaccactgtgatttctcgtctacccttctcttctcatggctcagaggggacagatcaaggtacaagtggtcttagtcataggaaggatcacaggatgtcctctcatggtgtccacctgcatgtccatgatcgatatgttgtgatgggacaatgggatcctccaagttacactgtcaaagccaaggtggaattatcactgggatagagtataacggtattgacaatgtgctcgaaagttcgtnanaaaggagaatancaagaggg

SEQ ID NO: 5576 - DNA, 474 bp, Arabidopsis thaliana
  unsure at all n locations
  Clone ID: LIB23-016-Q1-E1-A11
acacgtccacccaaaatccccgatggcgaaggaaactccggcgtcgtcgtcgatgccttctggtctcaaagcctacacggttcctatcttcctcttcgtcctcgctatgttcttccagcttttccttcttcctcgttcctttcctccttctcattacgacgttttgggtgtaaagatgtacagctcagtggatgacgtgaaagatgcgtatcagactgttgcttctaagtgggattcgggttcaggagtttctcttccagctgattttgttaagatacaatacgcctatganctgttaacaaatctaatatggaaaaagggactatgacttatacgccanttgatgaatcangtccatattatagaaggaacttgagaaancaataatgnngtnggaanaattttgcaaaanataaancntcccctaatggaangntgnttcntaangancctgaaacgtgaaagggtttatgt

SEQ ID NO: 5577 - DNA, 472 bp, Arabidopsis thaliana
  unsure at all n locations
  Clone ID: LIB23-015-Q1-E1-E2
ctgtttattcgccggccacggtccaaanaacccggganttcgccggcgaagatgcancagaggaagccgacggcgggtagacccagtggtaccgatggatccgatttctcataccgcatggtcgttgactctcgttacacgaaggtcactaaagaaaaagctcgtctccgtcctttgatctttgttcaggctgcgatttatgtaatcggattatcgtgtgcgtttctaacaacaactaaaaaggatgagaagaacacccttgctattgcagctgctgttgctggcttagtgtgttcattgataggagaattaggttgcagacgtagcagagtaaaccttttgaggctctacacggctgcatcaaccattgttatggttctttctgtgttttgtgctgttaggagcagattaaccatggangaacgcaatagctctggaacaaccgcgaagcttgagctcgcangtttcattt

SEQ ID NO: 5578 - DNA, 443 bp, Arabidopsis thaliana
  unsure at all n locations
  Clone ID: LIB23-015-Q1-E1-E3
ttaangggtcgacccacgcgtccgactttctctctctctctctctctgattgattcttgaaaagaaaatcaaagtctcaatagctttgttttgattctagttccattccacaattgcatctaattctcctaccgtagccttttcttctttatttgtcatcaacaactcctaaaattcatatgaaattagagaaatcgaaacgaaaagataatatttttcaagaaagagctacatatacaccttttgaccttgtaaagttggaaccctagaggcctttcaagcaaatcatcagggtaacaatttcttgatctttctttttagcgaatttccagtttttggtcaatcatggcaaacccttggtggacgaaccagagtggtttaacgggcatggtggaacattcggtctcctcaaggcatcancaaaaccatcaacaacaaagtcc

SEQ ID NO: 5579 - DNA, 400 bp, Arabidopsis thaliana
  unsure at all n locations
  Clone ID: LIB23-015-Q1-E1-E5
acgcgtccgagatttcagcaaatgggatcgattttaagcttcgtctgggttaaaagcttggatcctatctgaagacagaacaaaggttcttgcttttgattcattgcccattttgagaagatgttcgaaggtcgtcctcgtgattcttgtctagtttcaacacttttcaccatgccaagccataaagaaacgaaatggagctttttggtttctgggaaacgatcttttctcaacaacgatgagtctgatcttcacttcaagaagatgtacaagcttactactgattcaagtgaaggagaagacaatggatctcttcagantcaggaacacttatcccagggatgaacagagatgattcgttaagctgtttgattcgttgctctagagctgantactgctc

SEQ ID NO: 5580 - DNA, 463 bp, Arabidopsis thaliana
  unsure at all n locations
  Clone ID: LIB23-015-Q1-E1-F1
gccngtgccggtccaaaattcacgggtcgacccacgcgtccggagacttacttgaagatagacgggagtaaagccgagaagtttgtgtcaaaagggatgtacaaggatccgagtggtctctctgttcttactggaaacaacaagaagaaactgatggaccatgcaagctttaaaggcttgaaggatccaaaacgtaactctcaagagaaaaccctgagaaccagcctgagccggttgatgccaacagtcagttttaatgacaagactctaaactcacccacatctcagaaacgaaaatccgctgtttatcggctttctttcaaaaggaggtcgtgtgatggtgaggaagttactgagcaacgtaagttgttgtaccgtccaaaagcgggattcacaattccttcctcgggcagagaaaagcagtctagcggaagttggtctgagataccgccttcaactttta

SEQ ID NO: 5581 - DNA, 436 bp, Arabidopsis thaliana
  Clone ID: LIB23-015-Q1-E1-F2
acgcgtccgaagagactgaagaagagctacaaaaaatgagagagctcctgtgaagtgacgaagagacgaagaagaaagagaacattaatggcggctactccgtggtactttgtcgcagtacttctcaccattcttaccagctctcaggggattctaacaactctttctcaaagtgatggaggttataagtatgattatgctactgttccctttcttgctgaagtttttaagctgatcatttcctggtttatttctctggagaaagatgcggacatcttcctcaacaacttcaagggattactacgggattggaaagagtgtgcgattatttgttattccgtctcctatttatctgatacataacaatgtgcagtttgctacattgacttatgtgggatacgtccacttatcagataatgggtaatttgaagattgt

SEQ ID NO: 5582 - DNA, 428 bp, Arabidopsis thaliana
  unsure at all n locations
  Clone ID: LIB23-015-Q1-E1-F6
acgcgtccgggagattcccttttttggtgatgaataaaataggaatcgaacacgtggacggcgcagatgctaaagtgaccaaatccactggtgatccgggtaaagtttcgggtccggctcagttcacaacaagtggtgacgtggcggaggtgatanaggagcttcgaacggagaacaagcagttaannagagccgttgaagatctccgggaantantancaaacgtccgtccatactcgccggcgacaattgattacggatcacactcnaagtatcgcgaatccganaggaacaacagcancancaacnncaacaccancaacaacaacgggagatcgagagctgatcggtggagcagcgagagaacnacaacgtctgattactgtgggaagacagcncggaagatggcaatctacctgaggagctga

SEQ ID NO: 5583 - DNA, 457 bp, Arabidopsis thaliana
  unsure at all n locations
  Clone ID: LIB23-015-Q1-E1-G11
tanacgggtcgacccacgcgtccgatcaaaagccttaactttttctttagctctttccattacaagagacctctagcttcatactttttataaaaattctctctttttctcagtttaatctcaagaaatggtttcaagatcgtattcaaatctgttggagttagcttcaggagactcaccaacgtttggacgcatgaaccgacaaatcccacgaatcatggccgttgctggaatcatgtcaaacatcgataatgactctaaagacactgatctgtctcctaaagatcgtatcatcattgtagccaatgaattacctatacgagctcagagaanggttgatggtaatggtagtggtagtagtaataagtantacttgttgtancaaaaggttggaacttttccttgggaagaagaaatcactcntctccaantgaaagatgggttaggagatgaanct

SEQ ID NO: 5584 - DNA, 431 bp, Arabidopsis thaliana
  unsure at all n locations
  Clone ID: LIB23-015-Q1-E1-G2
acgcgtccgcccangcgtccgcccacgcgtccgcggacgcgtgggcgagaagcaaaggatagtataaaaccaataagagagccaagcagggtggtacaagcaaaaccagccagaggtcaaaccgggaagaaaacagctccatcagttaaggtggttgagccaacaatgctggtcatgaaattcccacctggcacatctctcccttcagccgcattgctaaaggcgaggtttggtcgcttcgggctgttagatcaatccgccattagggttttctggaaatcatcgacctgccgtgttgtctttctgtacaaagccgatgcccagactgcttttcgatatgcaacaggaaacaacactctatttggaaacgtgaatgtaaagtactttctccgtgatgtggatgctcctaaagccgaacctcgtgagccana

SEQ ID NO: 5585 - DNA, 467 bp, Arabidopsis thaliana
  unsure at all n locations
  Clone ID: LIB23-015-Q1-E1-H1
tgttattcgccgccacggtccaaaaaacccgggtcgacccacgcgtccgtttcncgttaatttccattttcgttatctctctctctcgccgatcaaaccctaggtgtatcaattcgttcagattcccggcggttggtctcactgtcatgtaagtttgattcatcttctcttctggatcttgagtgacgaagagagaagagatctgagtttttctgagagagagatttttctccctcgttgacccgatcagtttttttcgtcgctggggattttcaaattttttttgagggatcggttttgatttgttacgtagatggcggattcttcacccgattcgtgtttcaaaggaggcaaatttagtgctccagggtttcgatttcatccaactgatgaagagcttgtgatgtattatttgaagangaagatttgtaggaagangcttagagttaatgttatcggtgttgttg

SEQ ID NO: 5586 - DNA, 497 bp, Arabidopsis thaliana
  unsure at all n locations
  Clone ID: LIB23-015-Q1-E1-H10
aacgttacgttgccaggcccggtcnanaatnaacgggtcgacccacgcgtccggcttgataaagcttccgtcaggggacaccaagtggatcaatgccaaatgtcgtgctacgattggcacagtgtcgaacccgtctcatggaacgaagaagctatataaagcaggacagagtaggtggttagggataaggcccaaagttagaggagtggcgatgaatccgtgtgatcatccacacggtggaggtgaaggaaaaagcaaaagtagtggaagcagaggaaggacatcggttagtccgtggggaaaaccgtgtaaaggcggttacaaatcagctagtgtcaagaagaagaagaagcgtttggcagaagcagcagccaaaatgtgatatgggtgaacaagtttcgattttcctcaaacgtttccttcctttaaaaagcctccaatgttaattggttacgttaaaaaaaaaaaaaaaaaggcggncgctctaaaagattcaa

SEQ ID NO: 5587 - DNA, 471 bp, Arabidopsis thaliana
  unsure at all n locations
  Clone ID: LIB23-015-Q1-E1-H3
ttactttgccngtcccggtccnaaattcacgggtcgacccacgcgtccgcccacgcgtccgaaatggacgaacagcttcttgatgcgctctgtgaccgtttgcaacctgtgttatacacagaggaaagctacatagtaagagaaggagatccggtagacgaaatgctcttcataatgcgcgggaagcttctaacaatcacaacaaacggtggaagaaccggttttttaaattccgagtatcttggagccggtgatttctgtggtgaggagcttttaacctgggctttagacccacactcatcctcaaacctcccaatctcaacaagaactgttcgagctctcatggaagttgaagctttcgcacttaaagctgatgacctcaaattcgtggcttcccagttcagacgtcttcacagcaaacagctaagacatactttcaggtactactcacaacaatggaagacttgggcc

SEQ ID NO: 5588 - DNA, 456 bp, Arabidopsis thaliana
  unsure at all n locations
  Clone ID: LIB23-015-Q1-E1-H4
ccggtccanaaaaccgggcccanacttgttgccgatttntggatccggtcatcaactttgttgtttatttgtcatcaatgcaaaaattgagagcgtctgtgttttcacttgcatgttatcaattcctaatgttgtttgccgtttcattaaccggattcgagactcttcccgctggatttctttttttcacgtcttcttttctattttttatggatttggtattttgacatgttaagcaaccttcgttaatcagtttaaaatcggtgctttccgaaatttttagaagaaacatggaagcttaaaattttgaaattgctatttggaaaagctatcatttcataggcttagtctttgtaattcttctttacttgttgttcattggcatgaatatatgaaggattttatatttgattgtgtgtttgtttatgttgttagaaattgatcaaaatgggaaaa

SEQ ID NO: 5589 - DNA, 495 bp, Arabidopsis thaliana
  unsure at all n locations
  Clone ID: LIB23-015-Q1-E1-H9
ngtnccggtcaaaaattaacgggtcgacccacgcgtccgagatttcttggtgatgctttgcgcgttctttggtgtcattttcctatccgttcaaaacggtctagccattgcggtggggctatcgttgttcaagatattgatgcaagtaacaaggccgaaaatggttataatgggtaatattcctggaacggatatataccgagatcttcatcattacaaagaagcacaaaggatcccgggatttcttgttttaagcatcgaatctcctgtcaatttcgccaattctaactacctcactgaaagaacatctcgttggattgaagaatgcgaagaagangaagctcaagagaagcattctagcctacagttcttgattcttgaaatgtcagccntgagcggtgtagacacaaacgggagtgtccttttttaaggaacttaaagaaaacaancgccaagaaggacatccagcntgtgtttgtgaaacctctaagcgaa

SEQ ID NO: 5590 - DNA, 453 bp, Arabidopsis thaliana
  unsure at all n locations
  Clone ID: LIB23-016-Q1-E1-A10
acgcntccactcttctcaccttgatatttttcagagagggagagatgatttccgatcattgctatgtcgtccggatttcttcgtcaaggccgtccggtttgtcaaccggcttcagcccgacatccatatgcctcttgtgatgtggtttgtcggttactttcccggaatcttctggctcctttagcagaattgtccggtgtcgccgtcctccatcggttggttcctctaccaacggtggttggctcttgtctagcttctccgtcgtccctctccggcggtttaggctagcttttggccggatttcttttccggttttgttttatgttctcgttttctatagatccaagtttgattttgctccnttgtgttcnaacncgtaaagggctcaattccttgaaactccnttgtttaangggccaanttgtttttcaagcgtatcgatttcaattaagt

SEQ ID NO: 5591 - DNA, 471 bp, Arabidopsis thaliana
  unsure at all n locations
  Clone ID: LIB23-015-Q1-E1-E10
atanccgggtcgacccacgcgtccgcccacgcgtccggaactagccactgcgatcggagaagaaaaagctcgagagacgccatggaaatttcccaagctcgttcaagcttcgtttgtcttcttcttctgttactctccatgtgtttcgttccctgcgtcttttccaaatctcctcgtcctatctccgatgtggagatcaggcagaagaagagcgaatgctacggtgatatagagagtgggttatggggttggcaatgcaaatcttctgcaatagcgaaagagaattgtgcgctgcgatgcctttctccggtttgctatcaactcatttatgagagtgatccgcttgaagaaggtgaaaaagatttgattangagccaagaatacaagtatgtatgtacaagtcatcactcggggaaaagcttanaaggtgttcgaagcatcttttgatggtatcaaataagactttctcan

SEQ ID NO: 5592 - DNA, 431 bp, Arabidopsis thaliana
  unsure at all n locations
  Clone ID: LIB23-015-Q1-E1-B2
acgcgtccgaagaaaatggaatctcatgttgttcataacgcacaaaagccacacgtagtttgcgtgccttacccggctcaaggccacatcaatccgatgctgaaagtggctaaactcctctacgctaaaggctttcacgtcaccttcgttaacactctctacaaccacaaccgtctcctccggtcccgtggtcccaacgcgctcgacgggtttccttcattccggttcgagtccatccctgacggtctaccggagactgatggcgataggacgcagcatactcctaccgtttgcatgtccattgagaaaaactgtctcgctccattcaaagagattctgcgccggatnaacgataaagatgatgttcctccagtgagttgtattgtatcggacggtgtgatgaattttactcctgacgcagccgangaact

SEQ ID NO: 5593 - DNA, 433 bp, Arabidopsis thaliana
  Clone ID: LIB23-015-Q1-E1-B4
acgcgtccggtctctgtgttaacaactgtggcttcctcggcagctccgccaccatgaatctctgttctaattgttacggcgatctttgtctcaaacaacaacaacaatcctcctccatcaaatccaccgttgaatcttccctctctgtatctcctccgtcgtcatcatcatcggagatctcttctccgatcatccctcctctccttaaaaatccatcagtcaagctagaggtaccggagaaaaaggcggtgatttcgctgccgacgacggagcagaatcagcaacagaggccgaatcggtgcacgacgtgtaggaaacgggtcgggttaaccggattcaagtgccggtgcggtacgatgttttgcggggttcaaaggtacccggagatccatggatgcagctacgatttcaaatcggccggacttaaagagat

SEQ ID NO: 5594 - DNA, 445 bp, Arabidopsis thaliana
  unsure at all n locations
  Clone ID: LIB23-015-Q1-E1-B7
acgcgtccgcccacgcgtccgcccacgcgtccgggctgagaaaggtcatacggtcacttttttgattcccaagaaagctctgaaacagttggaaaatctcaatctgtttccacacaacattgtctttcgctctgtcaccgtccctcatgtggatggtctccccgttggcacagagacagtctctgagatccccgtgacatcagctgatctcttgatgtctgctatggatctcacacgtgatcaagttgaaggtgtggtccgagccgtggaaccggacctgatcttctttgacttcgctcattggattccagaggtagctaaagactttgggcttaagactgtaaaagttacgtcgtggtatctgcatccgactatanctagtaagccttggttccaanggtggttaatttangttgtttcctccgcccggggataaccctttcaa

SEQ ID NO: 5595 - DNA, 472 bp, Arabidopsis thaliana
  unsure at all n locations
  Clone ID: LIB23-015-Q1-E1-C1
cgggtcgagccacgcgtccganagaaacaaacgatggttttgacaaaaaccgcaacgaatgatgaatctgtctgcaccatgttcggatctcgctatgttcgcactacacttcccaagtatgagattggtgagaattcgataccgaaagacgctgcgtatcagatcataaaagatgagctgatgcttgatggtaacccaaggcttnacctancttcttttgtgactacatggatggaaccagagtgtgacaaactcatcatggactctntcaanaacgaactacnttgatatggatgagtaccctgtcacaactgaactccanaacccgatgtgtnaacattatagntcgactggttcaaatgcccccactcccaaggaatcctgagaacngccnggtgnggaantangggacaatttggggtccntcaagaaaanccatcaatgttaanccccggaattgggccttcaaaaa

SEQ ID NO: 5596 - DNA, 476 bp, Arabidopsis thaliana
  unsure at all n locations
  Clone ID: LIB23-015-Q1-E1-C10
aaaacgggtcgacccacgcgtccgctganttggatgttatacagaaacatctatttgaagacttgatgatccctgatggtttcattgaagattttgtctttgatgatactgcttttgtctccggactctggtctctagaaccctttaacccagttccgaaactggaacctagttcacctgttcttgatccagattcctatgtccaagagattctgcaaatggannnnnnnnnnnnnnnnnnnnnnnnnnnnnnnnnnnnnnntgaggttgagactgtctcaaaccggaaaaaaacaaagaggtttgaagaaacgagacattacagangcgtgaagaaggaagccatggggggaaatttgcagcagagattcgagattcggcaaaagaaaggatncaagatttggttangcacttttgagagtgatattgatgctgcaagggcttacgactatgcagcttttaagctcangggaaga

SEQ ID NO: 5597 - DNA, 466 bp, Arabidopsis thaliana
  unsure at all n locations
  Clone ID: LIB23-015-Q1-E1-C11
cgggtcgacccacgcgtccgcccacgcgtccggcagcttattctgttgcttttgctcagattgggatgaaatgggcgaagtacttggttggtatatgcgctttaaagggaatgaccacaagcctgcttgttggctctctaggccaagctcggtacaccactcagattgctcggtctcatatgattcctccatggtttgctttggttcatccaaaaacaggaacccctatttatgctactctccttgtaaccatactcagttcaataatatccttcttcaccagcttagaggttttatcaagcgttttctcctttgctaacctcttcattttcaagcncctggcaattagcattgcttgtganactttnctaacgttgaaanggatnncactcctgaaaggccggtttgttnaaantttcccggggttttcccggttttttgaaaaatggcttccctccattgggan

SEQ ID NO: 5598 - DNA, 415 bp, Arabidopsis thaliana
  unsure at all n locations
  Clone ID: LIB23-015-Q1-E1-C5
acgcgtccggtccacgggccttgtaccgtggttggcttccatcagtgattggagttgttccatatgtgggcttgaacttttcggtgtatgagtctctaaaggactggctagttaaagagaacccatacggtctantagaaaacaatgagctgacggttgtaacgaggctcacttgtggtgcaatagctggaacagttggtcaaacaattgcttatccactggatgtgattcgtaggagaatgcaaatggtcgggtggaaagatgcttccgctattgtaacangcnaagggagaagcacagcttcacttgaatacactggtatggtcgatgcatttagaanaacagttcngtcatgaaagccttggagcattgtacnnngggtttggtccccaantcagttaaangttgtaccaac

SEQ ID NO: 5599 - DNA, 426 bp, Arabidopsis thaliana
  Clone ID: LIB23-015-Q1-E1-C8
acgcgtccgaattttgcaaaacagcgaaaatagttctttgtgattttcgagtgagagagacgacagcttccattatcccctgtctctctccctctcgaactacaaatcaaattcgagtgttttcatattgttaatctttttcttcaaggaaagaagagattttgttttccgtttctgggggtttttcttgattctgatctctgatctgatctcatcatcattgtccgtggattctccgatgggtttctgattgtgggttctttcaaatttcttcacttttggagcttttcttctctctgtcttttgttttccctcagctatggcttggaatgagaccaaactcaagaggctctatcaagtttggagaggaagcaataaatttctatgtggcgggaggctaatatttggtcctgatgcatcatctct

SEQ ID NO: 5600 - DNA, 473 bp, Arabidopsis thaliana
  unsure at all n locations
  Clone ID: LIB23-015-Q1-E1-D1
ctgttactttgccggtcccggtccanaatncacgggcntcaccccaactgtantagtactgttcgtctttcnnnnnnnnnnnnnnnnnnnnnnnnnnnnnnnnnnnnnnnnnnnnnnnnnnnnnnnncccttaaaactcaaacactaaaaaattttcagtgtcgattcaaaaagttttgttatttgatctgtttctgtgtaaaaaaaatggtgaaagatctggttgggtatagattttatccaacgggagaggaattgataaaccattatctaaagaacanaattttgggtaagacttggctcgtcgacgaagccattagcgangatcaacatctgtagttacgacccaatttacttgccttctttatcgangataaaatcggatgatcctgtgtggtacttcttctgtccaaaggagtatacttctgcgaagaanaaggtaacgaagaggactacaagttcanggtattgga

SEQ ID NO: 5601 - DNA, 459 bp, Arabidopsis thaliana
  unsure at all n locations
  Clone ID: LIB23-015-Q1-E1-D12
acgcgtccgagaagcacttacgggtatggatttagtgatcatacctgctggtgttccgaggaaaccagggatgacgagggatgatctgtttaacattaatgctgggattgtgaggacactctctgaagctatagctaaatgttgtcctaaagcaattgtgaatataatcagtaatccggtgaactccacggtgccaatcgcagctgaggttttcaagaaagctggaacctttgatccaaagaaactcatgggtgtcactatgcttgatgttgttagagctaatacctttgtggcggaagtaatgagtcttgattcccgtgaagttgaagttccggttgttggaagacacgcangaattacgattttaccactgctttcccangtgaaacctccttgctccgttcactcaaaaagagattgaatatctcacanaccgcatccaaaaacggtggcactgaa

SEQ ID NO: 5602 - DNA, 430 bp, Arabidopsis thaliana
  unsure at all n locations
  Clone ID: LIB23-015-Q1-E1-D2
acgcgtccgcaggaattgttgcacttctcaaagctctgcatcctgattggtctcctgctgccattagatcagctattgtcactacagcttggagaacagatccatttggagagcagatatttgcagaagggtcacctaggaagccagctgatccattcgactatggtggaggccttgtgaatccagagaaagctacaaaaccaggtcttgtatatgacttgggactcgaagactatgttctctacatgtgttctgttggttacaacgagacttcaatctctcagcttgtcggtaaaggaactgtctgttcgtatcccaaaccatctgttcttgatttcaacttgccttctatcacaattccaaatctcaaagaagaagtcactcttcccagaaccctcactaacgttggaccacttgagtcngtcataaa

SEQ ID NO: 5603 - DNA, 476 bp, Arabidopsis thaliana
  unsure at all n locations
  Clone ID: LIB23-015-Q1-E1-D7
agnccgggactgtaccgaaacntgaaattcgcgggtccgacccacgcgtccgatcaaacatcacatttcttcctcttttctctcttttttctcagtcttcaaagagtttcttagtaacccaaatcaatggcaggtatcaaagttttcggacacccagcttcgnntgccancaggagagtcctcatcgccctccacgagaaaaacctcgactttgagctcgttcatgtcgaactcaaagacggtgagcacaagaaggagccnttcctctcccgcaacccttttggtcaggttccaagcctttgaagatggagacctcaagctcttcgaatcangagcgatnactcagtacatagctcaccggntatgaaaancaaggaaccanncttctccaagaccgactccaaggaacatatctcangtacgcaatcatggccattggaatgcaagtnagaagattagcaagttcganccagttg

SEQ ID NO: 5604 - DNA, 535 bp, Arabidopsis thaliana
  unsure at all n locations
  Clone ID: LIB23-015-Q1-E1-D9
caacttctacgttgtacgtcccggtcatnaattaacgggtcgacccacgcgtccgccttattccattaggatacttcttgaatcggccatacgtaactgtgatgagttccaagttaagagcaaagatgttgagaagattcttgattgggagaatacttctcccangcaggttgagattccgttcaagcctgctcgggttcttcttcaggactttactggtgttcctgctgttgttgatcttgcttgcatgagagatgccatgaataatctcggtggtgattctaanaaaattaatccgctggtccctgtagatcttgtcattgatcactccgttcaggtggatgtggcgaagatcagagaacgcagttgcaaggcaananatggagncttggagttccaagccgttaacnatggaaaagaatttggttttcctnangtgggggattcgaaggcccttttcanaagcatgccttggtngntacctcntngggaatnngggaatagtttcannccaagttcagccctangaaatagc

SEQ ID NO: 5605 - DNA, 474 bp, Arabidopsis thaliana
  unsure at all n locations
  Clone ID: LIB23-015-Q1-E1-B12
acgcgtccgattccttgctatcactatccacaaactcgcaagttactctctcattcctcatcgtaccctctttactcaggtattttctgaagttaaaagatagaaataatgtctgaaaaggtgggagcgatgggtggtaacaagggtggagcattcgacgatggtgtttttgatggtgtgaagaaagtaattgttggaaaagacttcaacaatgtaacttatatcaaggttgaatacgaaaaggacggaaaattcgaaattcgtgaacacgggactaatcgcgggcagctaaaagagttttcaagtggattatccgaaangaatatatcacagccgttggtggaaactacgaacacgngttttcgggttangggttaancgtttgaatcaanttcattaactcttcaaaaaccncttaatggaannaacctctccaaatccttgggtcanacgaacattactnagggaatccaa

SEQ ID NO: 5606 - DNA, 466 bp, Arabidopsis thaliana
  unsure at all n locations
  Clone ID: LIB23-013-Q1-E1-B2
gggcccggtcacnaattaacgggtcganccacgcgtccgagaatgtcttctccttctgattctcgtctctctgtgtctccgggataagtaatcgaagatgaatatgattcagcgattcatgcaatctatggcaaagacgcgtggcctctgtcatccagattgcgtaaaagcaagtagtgagcaagaagattacgatgcgtctcagctcagtatttggtggataatgctgggaaggaagacgaccagggagaaatggatgaaccaagctctcagttcactatcgaaaacttgcatcagtatatggtggaaaatgtctggaataagaggtaagatgtgcagggagagggagcaaccactcactgtcaaagactgccttgaatgtgctttcaagaaagggctaccgagaagagaacattgggcacatgtgggatgtacattcaagggtcccccatttgccttgtcacaa

SEQ ID NO: 5607 - DNA, 477 bp, Arabidopsis thaliana
  unsure at all n locations
  Clone ID: LIB23-013-Q1-E1-B4
aacttcnacgttctcgggccggtcacnaattaacgggncganccacgcgtccgntttccgttgactgattatcttcttgtaccgtacacgagacagaatctgacgtggacgcagcacgcgtttaacgagagtatcggagagattcaggggattgcgacggctgcgtttgagaggctcaaaggacggtgggcttgtttgcagaaacggacggaggtgaagcttcaggatctgccgtacgtgcttggagcttgttgtgtgttgcataacatttgtgagatgaggaaggaggagatgttgccggagttgaagtttgaggtttttgatgatgtggcggtgccggagaataatatccgatctgctagtgcggttaatacgagggatcatatctctcacaatctcttgcatcgtggacttgccgggacaagaactctataggctctgtttttcaccttttcctaatttgaaactgatttttta

SEQ ID NO: 5608 - DNA, 469 bp, Arabidopsis thaliana
  unsure at all n locations
  Clone ID: LIB23-013-Q1-E1-B5
tccgcggnccagtaaaggtcanaaattcccgggncgacccacgcgtccnnccacgcgtcnnnnnnnnnnnnnnnnnnnnnnnnnnnnnnnnnnnnnnnnnnnnnnnnnnnnnagatccagttttagggttttcttctctgtgagcgaagatgcgtgagattcttcatattcaaggaggtcaatgcggaaaccaaatcggttccaagttttgggaagtggttaatctcgagcacgggattgatcagacgggacggtatgtaggagattccgagttacagcttgagagggttaatgtatactacaacgaggcgagttgtggaaggtacgttcctcgcgctgttctcatggatttggagcctggaaccatggacaagtgtcaagatctggtccgtacggtcagatctttcgaccggataacttcgtcctcggtcagtccggtgctgggaataactgggctaaaagtcactac

SEQ ID NO: 5609 - DNA, 458 bp, Arabidopsis thaliana
  unsure at all n locations
  Clone ID: LIB23-013-Q1-E1-C10
attcccgggncgacccacgcgtccnatctactcttaataacgatcaacagtggagacatgtactacaactaccactgtctcacaagaaaggtgtaacttgtatcaccgcttatatggtttctgaaaccgatgcaatgtttgcttcagcttcttctgatggagttgtgaatgtctgggatgtttcttttccgtctcagcctagtgaggaatgtaaagtggtgtgtctggactctatctgtgttgacactaaagcaattgtaacgctttcattagcggaattgcctcaaaatcctggtcgatttgcccttgctttgggcggattggacaacaaaatcaaactttactctggagaaagaacaggaaagtttacttctgtttgtgagcttaaaggccacacggactgggattcngagtttggacttctcattaccgttacacacaacagaagaaatacccaa

SEQ ID NO: 5610 - DNA, 446 bp, Arabidopsis thaliana
  unsure at all n locations
  Clone ID: LIB23-013-Q1-E1-C9
acgcgtccgctcagagaaaaagaaagaaagaaaaaaagcttcgtgctccttcaccttcccaaatcggaaaacaatgcacgccaaaaccgattccgaggtaacaagcctcgcagcatcatcaccagccagatctccacgtagaccaagtctactacgtccaatcaccatcacgcgactctcacgacggagaaaaaacagcaacatcgtttcactcaactccagtactaagtccgatgggatctccaccgcattctcactcatctatgggtcgtcactcacgtgaatcatcttctagtcgattctctggctctttaaagcctggatctagaaaagtcaaccctaacgatggttctaaacggaaaggtcacggcggtgagaaacagtggaaagaatgtgcggttattgaagaaaaaggtttgttagatgatggtgatngaaaccggggg

SEQ ID NO: 5611 - DNA, 464 bp, Arabidopsis thaliana
  unsure at all n locations
  Clone ID: LIB23-013-Q1-E1-D4
gtttgccaggnccggtctagaatanacgggtcgagncacgcgtccgaaaaaaccttcggcttcgtctcgtcaatggcggccatttctgtaagttcttcaccatctattcgctgcttgagatcggcatgttccgattcttctcctgctcttgtatcctcgacgcgtgtatcgttcccggcgaagatttcatatctctccggtatatcttcgcaccgtggcgatgaaatgggtaagagaatggaaggattcgttagaagcgtcgatgggaagatctctgatgcgtctttctccgaagcttcatctgcgactccaaaatcgaaggtgaggaagcacacaatttcagtatttgttggagacgaaagcggaatgattaatangattgcangagtgtttgcaaggagaggatacaatattgagagtcctgccngtgggctgnaaananacaaaggtctaaatcaccaana

SEQ ID NO: 5612 - DNA, 466 bp, Arabidopsis thaliana
  unsure at all n locations
  Clone ID: LIB23-013-Q1-E1-D5
ncccgggcggtacaagtcanaaattcccgggccgacccacgcgtccngttctctctcttctgaacccagaaaccctgaagtggaggcgttgataaacataaagaacgagttacatgatccacatggtgttttcaaaaactgggatgagttttctgttgatccttgtagctggactatgatctcttgttcttcagacaacctcgtaattggcttaggagctccaagtcagtctctttcaggaactttatctgggtctattggaaatctcactaatcttcgacaagtgtcattacagaacaataacatctccggtaaaatcccaccggagatttgttctcttcccaaattacagactctggatttatccaataaccggttctccggtgaaatccccggttctgttaaccagctgagtaatctccaatatctgaggttgaacaacanctcattatctgggccctttcct

SEQ ID NO: 5613 - DNA, 485 bp, Arabidopsis thaliana
  unsure at all n locations
  Clone ID: LIB23-013-Q1-E1-E10
ctctagccgggacggtaccgntcatnaattcccgggccgacccacgcgtccanaaaagtctgaagcagagagacatacttacatatgtgtgattcttccctaagaggaattctcaaaaatcaaagcatctctcctcttcttcctaaacgtcgacgagtggagtccttggcgcgatcaagattcaaaagaaattcggggactactactactcaagactaaataagataggaaatgggttgatacaaagaagttgtccttttaagaattccatcactaggagttggaaagtctgaaccagagactttggtgtgcttctccaaaaacgacgagagtccagcgtctagcagtatcangcaactctcttcntactagattcnttcacaccatcannaaggagccattatgggagggggaacttgtgtcgtttgcaggtanacangctttgggacctactgagccangaatacacgcnacttcacgggagt

SEQ ID NO: 5614 - DNA, 418 bp, Arabidopsis thaliana
  unsure at all n locations
  Clone ID: LIB23-013-Q1-E1-E12
acgcgtccncccacgcgtccgcggacgcgtgggcagccacactggctcctttaaagatctgggcatgagtgttctcgtttctcaggtgaatcgtctccggaaaatgaacaaaccagtcatcggagttggttgcgcttctactggagatacctccgctgctctctctgcttactgtgcttccgctggaatcccctcgattgtcttcttacctgcggataaaatctccatggctcagcttgtgcagccgattgcaaacggagcgtttgtgcttagtattganactgattttgacggatgtatgcatttgatcagagaagttacgggcgngagcttcctatttactttggcgaaactctcctcaaacangnctccgtctccnaaagggtcaanangacgggaggcgattgaanattcctgc

SEQ ID NO: 5615 - DNA, 465 bp, Arabidopsis thaliana
  unsure at all n locations
  Clone ID: LIB23-013-Q1-E1-E3
ggcccggtcanagnattaacgggtcganccncgcgtccgagaacattctgcaaagaggcaaagtttgttggaagagatcgaacgtgagtttgaagctgctacaaaagaacttgaacaactaaaggttaatgacttcaccggggacaaagatgacgaagaacactctgcaaagagaaaaagtatgcttgaagctattgaacgcgagtttgaagctgctatggaaggcattgaagcacttaaggtttctgattccacaggaagcggagatgatgaagaacaatctgcaaagagactaagtatgcttgaagagatcgaacgggaatttgaagctgcttcaaaaggtcttgaacaactaagggctagcgattcaaccgcggacaataacgaagaagaacacgctgcaaagggacaaagtttgttagaagagatngaacganagttcgaagctgctacagagaaccctta

SEQ ID NO: 5616 - DNA, 445 bp, Arabidopsis thaliana
  unsure at all n locations
  Clone ID: LIB23-013-Q1-E1-E7
attcccgggncgacccacgcgtccncccacgcgtccgcccacgcgtccgaaattatctccgagcattctcaagttgggtgattcggtacggattactgatttgggagagaaaaaccctagattggaattagattctgggttcttgggctaaaggtttcttcatctccttcgaatcatccttttagggagcaagacgatgagtagaaaccctttcctggatcctactcttcaagaaattcttcaagtgattaaacccacacgagcagatagggatacgaggatcacagtcattgatcaagttgcgtgacgtcttacaatccgtanaatgtttaagaggtgctactgttcaaccatttgggatcctttgtgtcaaatctcttcacacgatgggggagacttagatatctctgttgactaatcagcggttctccatccttggtcactg

SEQ ID NO: 5617 - DNA, 443 bp, Arabidopsis thaliana
  Clone ID: LIB23-013-Q1-E1-F12
acgcgtccgaataagagcttttttcgcgttttccaccgcaaccaccgtcaccttcaaccgccggagccgccgcaaggaaggctcatcatccgccgtggcaattttttgaggtgtacaaagcattgcctatttgacgaaccaggaaatggttaaaaggcatggagagttttgatttacaagatatatcatgtcgcagtgcatagacggtttcaagcatgtatgctcctcttttttccggtgttttgatatcgatatttacaaacaatctggaggccttggtgaccctgaacttcttgcgagagagacattagcgtgagtgaaatagaggctctctatgagctgtttaagaaaatcagcagtgctgtgattgatgatgggctaataaacaaggaagaattcagttagccttgttcaagacaaataaaaaagagaacttgtttgca

SEQ ID NO: 5618 - DNA, 441 bp, Arabidopsis thaliana
  unsure at all n locations
  Clone ID: LIB23-013-Q1-E1-B11
acgcgtccgnattttcgtgagtaagaagaagaaacccgaaaacctcaaaccatggccgagggactcgtattgaagggcattatgcgcgcccacaccgacattgtcacggccatcgctacgccgatcgacaattccgacatcatcgtcacagcgtcgcgtgacaaatccatcatcctctggaaactcacaaaggacgataagtcttacggtgttgctcagcgtaggctcacaggtcactctcacttcgtggaagatgttgttctctcatcggacggtcagtttgcactctccggaagctgggacggtgagctccgtctctgggatcttgccacgggagaaacaactcgtcgattcgttggtcatacgaaagatgtgctctctgttgcattctctactgataaccggcagatcgtgtctgcntctcgtgatcgtacnataaac

SEQ ID NO: 5619 - DNA, 448 bp, Arabidopsis thaliana
  unsure at all n locations
  Clone ID: LIB23-012-Q1-E1-F9
caaaccgggtccggccacgcgtccgaccaancgtccggttcgatctagctaggcatcatgcaccttcgacaatatttcttgatgagatcgacgcgatcataagccaacgtggtggtgaaggccgcagtgaacatgaagctagcaggcgtctcaaaaccganctgctcattcanatggatgggttacagaaaacgaatgagctcgtatttgttttagcagcaacaaatctcccctgggaactatatgcagctatgctccggcgtctanagaaacgaattcntgtacctttaccggatccagaagcaagaagaggaatgttcgagatgcttataccgtcacaaccaggtgatgagccattgcctcatgatgtgttggttgagaaatctgaggggctactctggttcaagacattcgaatactttgtaaggaactgcgatgcaancactga

SEQ ID NO: 5620 - DNA, 487 bp, Arabidopsis thaliana
  unsure at all n locations
  Clone ID: LIB23-012-Q1-E1-G1
gnggggcgcaactcttcagggccaccggtcataaatcccgggtccacccacgcgtccgaaaatgttttttttgaagggagagaagatttgatttgctaacaaagtggcgaaagaagggtggagtctttttgatgggatatacaaattttagaaacctgtctcttgggaggggggtgaangacttaantgcggccatagggatctgtaatgccttgagggatggacctgatatacttgtttgcgacnaggctcacatcattaagaacaccaaggctgacacaacgcaancattgaagcaagttaaatgccagagaanaattgcccttaactggctcaccccttcaaagacaatctcatggagtattnnatgtatgggttgattttgtgagaagaaggattctttgnngaaanttccccccngaanttttagnaaaccgcttccaanantcccaatagaaacacggncatcaatatganttcaactggc

SEQ ID NO: 5621 - DNA, 477 bp, Arabidopsis thaliana
  unsure at all n locations
  Clone ID: LIB23-012-Q1-E1-G4
acggtccanaaatccggggtcgacccacgcgtccgncaacgcaaacttcacgacttactttactccgacgttttggtcaaacccttctctctccatcacactatccctcaaccgccgtgctacaccgtgttacttcaacaccggagtgatggtcatcgagttaaagaaatggcgagaaggagattacacgaggaagatcatagagtggatggagttacanaaacggataagaatctacgagttaggctctttaccancgtttttacttgtcttcgccggaaacatagctccggtagatcaccggtggaaccaacacggtttaggaggagataattttaagaggactgtgtccaagatttgcatccaaggtccagtgaagtttgttgcnttggantgggaaagggaacccatgggtaanggtagatgannggccaacttgcccgcttganncnccttggggttcaaanggattgtacg

SEQ ID NO: 5622 - DNA, 465 bp, Arabidopsis thaliana
  unsure at all n locations
  Clone ID: LIB23-012-Q1-E1-G8
ttccngggtcgacccacgcgtccgnagatgatgagattacacatgatgaacaagtggcaacttggtctgctataagtaaagaaaccaagtcactaatccatttgaatggtgttgcttcagtcgcatcatcccatctatctggcttcagagccaagaaaagtagtaatggtctcaaagatcatgggaggccaaaattttcatttaactcacatactcatggagaaacgtcatccaagataagtgacatggctgaaatctttgagcctgatgtggaggatcaggctatagaagaggatccaattattgaatgccccaacagttttgatgaaagatcagaaaacaggcagggtgtttctgttgctgagtcgagagaagttttgcacgagtgcactaaagatgcggtacccaagcttcaagaaattcctctagataaaattagacctganaaaaagaagctctgaactg

SEQ ID NO: 5623 - DNA, 473 bp, Arabidopsis thaliana
  unsure at all n locations
  Clone ID: LIB23-012-Q1-E1-H1
accggtcagaantcccgggtccacccacgcgtccgaacacgcgtccggacgaatccgtcggaaaccggaatcaccatggattttcctccgacgaagcttgattatcatgtagacatgttcaatcttcagtctcattccagatttcnctccttatttaaggcgcaagatggacgcatagctctaatactagaatcaacggtgtttcatccacaaggtggtggccagccgtcagacaccggtttaattgttttctccggttcggatttgaaattttccgttcaagatgttcgatcgaaagacggaattgttctccattacggagttttcgaaggttcgaatcctgaaagtggattgatagtgagaaagggaaagaatttacttaactgttgatgaatcaaaggcgtaaactcaattcaagtttgcactcaagctggacacttgctagataatgtgttatgcaanaaagttgggtt

SEQ ID NO: 5624 - DNA, 448 bp, Arabidopsis thaliana
  unsure at all n locations
  Clone ID: LIB23-012-Q1-E1-H2
acgcgtccgancgtttcgtcctcttcgtttccttcttccattaatacaaagcaaatcctactctgaaagcttctttattcaacctctctacttcagtttctctgtccccatttttcatctgagagttaaaactgtaacctcaaaatctgagataaagtcaaaaaaaaaaccccagtttatgattctcattttctctttataatcgaaagcttcgatttttaacaaaacccagaannnnnnnnnnnnnnnnnnnnnnnnnnnnnnnnnnnnnnnnnnnnnnnnnnnnnggaatattgggtgagaatctgagtaatgggatttacataaaaagattctatgtaaatactaaaataatctggaaattattaaatttccaaactttgtgttccattttgtggactcaaatttgtttaaaaagatntcaaatcaagagagattgagaanacca

SEQ ID NO: 5625 - DNA, 451 bp, Arabidopsis thaliana
  unsure at all n locations
  Clone ID: LIB23-012-Q1-E1-H3
acgcgtccgnnngacgcgtgggtcagtagatcggaaaatggagccatggattgacgaattaaccgacgacttacagagtgtaangctttacatcagccggaaccaccgtgaatcgaagcacaagctccggttctcgctcttcctcctccgccgcagctttaacaccagcaccatcagctcacggttcattctcatcttcgaaactccctccttcactccgatcatctctctcactctccgatctcagattccgtctccgtctcggttccggcgacatcggctctgttttcttagccgaattcaaatccctaaccgccgtaananaanccaccgccgtnaaattacctctgttagcagngaaagttatggataanataggagctcgcgagcagaagcanatanngtananctaagacggagnagagagaatctccgaatcccctgatcatnc

SEQ ID NO: 5626 - DNA, 427 bp, Arabidopsis thaliana
  unsure at all n locations
  Clone ID: LIB23-012-Q1-E1-H6
cttcttcttcgttgccactgccccaattaactctgtctatctctctcttcatcccctagattgaaactaattgcaattggagtgtatattgcagtatctagtttttgantctctgggtattcctttatggatccagtagatatggttgtgtcacagccaattacgcctgntcaggtttcgtttctgcttggagtcattcctcttatgatagcatggctatactcggaatttctggagtataggaggtcttcttttcacgctaaagttcattcangataacaatttggttgaactggaaatggtgacgancaaagangatganngaacagttttaatggaaggaggtcttccaagatctgnctcttcanggtttatacgctcagcgantccacaatanatttgattnngtttctgacnttggaagact

SEQ ID NO: 5627 - DNA, 445 bp, Arabidopsis thaliana
  unsure at all n locations
  Clone ID: LIB23-012-Q1-E1-H9
gcatgccaagtctccaaatcatggaaccgcgccgtcttttactccctccgccgccttaaaaccatgccgtggttgttcgtctacaaccagagaaattctccgccgtacaccatggcgacgatggcgatggcttatgatcccaagtccgaggcctggatcgagctcaacaccgcatcatctcccgtcgaacacgtctccgttgctcgatcctctcactccacgttgctctacgctttatctccggcgagattctctttctcaaccgacgcgtttcatctgacttggcaacacgtggcaccgcccganaagtttggaggatcgatccaatcgtgggctgtaatcggacgggagnctgantataacccggangtgtgtgccaatttccaagggaggatagantcnccctggngctgttcgnnatctcaatccgggagaacggncctgg

SEQ ID NO: 5628 - DNA, 477 bp, Arabidopsis thaliana
  unsure at all n locations
  Clone ID: LIB23-013-Q1-E1-A12
gtaccanactcgacattcgcnggccgacccacgcgtccaanagagaagagagaaacatttcgagacaaatggccgccgccgctgctcgtcctctcgtcaccatccaaaccttggatggtgacatgtccaccgatcaatcctccaccgtcgtacttcccgacgtcatgacggcgccagttcgaccagacatcgttaacttcgttcacgcccaaatctccaacaacagccgtcagccatacgccgtatcgaagaaggccggtcaccagacctccgccgagtcctggggaaccggacgtgccgtgtctcgtatccctcgtgttcccggtggtggtactcaccgtgctggtcaagctgcgttcggtaacatgtgtcgtggtggtcgtatgttcgctccanccacgatctggcgccgctggcaccgtcgtgtcaatgtcaacatgaagcgtcacgcaatccgtctcaactatcgntggaact

SEQ ID NO: 5629 - DNA, 427 bp, Arabidopsis thaliana
  unsure at all n locations
  Clone ID: LIB23-013-Q1-E1-A5
acgcgtccgctctgtttgcnnnnnnnnnnnnnnnnnnnnnnnnnnnnnnnnnnnnnnnnnnnnnnnnnnnnnnnnnnnnnnnnnnnnnnctatggacgctataaggaagcagcttgatgtgctcatgggagctaaccgaaacggcgacgttcaggaggtgaatcgcaaatactacgaccgtgatgtgtgtcgtctttacttgtctggtctctgccctcacgatctcttccaattgacgaaaatggatatgggaccatgcccaaaggtgcactctttgcagcttcggaaagaataccgagaagcaagggcaaaaggtgttgataactacgacagggaattggaagatgccatagacaggcttatcgttgagtgtgatangaagattggtanggcccttaagcgtcttcaagaagangacgccaaagct

SEQ ID NO: 5630 - DNA, 444 bp, Arabidopsis thaliana
  unsure at all n locations
  Clone ID: LIB23-013-Q1-E1-A6
attcccgggncgacccacgngtccngagagaagagagaaacatttcgagacaaatggccgccgccgctgctcgtcctctcgtcaccatccaaaccttggatggtgacatgtccaccgatcaatcctccaccgtcgtacttcccgacgtcatgacggcgccagttcgaccagacatcgttaacttcgttcacgcccaaatctccaacaacagccgtcagccatacgccgtatcgaagaaggccggtcaccagacctccgccgagtcctggggaaccggacgtgccgtgtctcgtatccctcgtgttcccggtggtggtactcaccgtgctggtcaagctgcgttcggtaacatgtgtcgtggtggtcgtatgttcgctccaaccaagatctggcgccgctggcaccgtcgtgtcaatgtcaacatgaagcgtcaccaatcgtctc

SEQ ID NO: 5631 - DNA, 446 bp, Arabidopsis thaliana
  unsure at all n locations
  Clone ID: LIB23-013-Q1-E1-A8
tcccgggccgacccacgngtccanttctctcntccgtcaatatggaaggcgtcaccgtcgtgtctttcttccttcttttcancgccaccgccatggtcgccaagtccaccgtctccttccgtgacggcgatgttaccaaacggagacttcgagctangaccaagtccatcagacatgaaaggaacagaaatactaaacanactaccaataccaaactgggaagtcacaggnttcgtcgaatacattaaatcangacatanacaaggtgacatgcttctcgttgttcccgccggtaaattcgtgtaagacttgggaacgaagcatcgatcaaacagnagacttanagtggttaanggaatgtattactcactcacttttagngctgctagaacttgtgcacaanacgaggagacttaacatatctgtagcacctgacnccggtgtga

SEQ ID NO: 5632 - DNA, 446 bp, Arabidopsis thaliana
  Clone ID: LIB23-013-Q1-E1-B10
acgcgtccgcggacgcgtgggttggaggacacagagaagcgcaaattatcagacagagtgagaacgaagaagaagaaagcacaggatgctaagcttgagatattcattaccttatcttcttcttcaaacaagggaatcatcaactaagctcttcaccaaaaagcctaacaatgttgtggtttgtgcggcgagaggtccaagacctcggtctcctcgtgtatggaaaacaaggaagaggattggaactatctctaaagctgccaaaatgattgcttgtataaaaggattgtcgaatgttaaagaagaagtttatggagcgcttgattccttcattgcttgggaattagagttccctcttgttatagttaagaaggcattagttatacttgaagatgaaaaagaatggaagaagattattcaggtgacaaaatggatgctgagtaaaa

SEQ ID NO: 5633 - DNA, 432 bp, Arabidopsis thaliana
  unsure at all n locations
  Clone ID: LIB23-012-Q1-E1-F7
gtcnacccacgcgtccgaaaagatggttttgacaaaaaccgcaacgaatgatgaatctgtctgcaccatgttcggatctcgctatgttcgcactacacttcccaagtatgagattggtgagaatncgataccgaaagacgctgcgtatcagatcataaaagatgagctgatgcttgacggtaacccaangcttancctagcttcttttgtgactacatgcgatgganccagagtgtgacaaactcatcatggactctatcaatagccaactacgttgatatggatnagtaccctgtcacaactgagctccatanncgatgtgtagacatnatagctccgactgttcaatgcgccatncgaggaatctgagaccgcggtgggactanggacagttggttctcanangccatcntgttatcccgaatggccntc

SEQ ID NO: 5634 - DNA, 484 bp, Arabidopsis thaliana
  unsure at all n locations
  Clone ID: LIB23-012-Q1-E1-B4
caacttctttccgnccccancggtccanaaatcccgggtcnacccacgcgtccgnnnnnnnnnnnnnnnnnnnnnnnnnnnnnnnatatttgcagttgacaattcgttctctttgggaaattagagatgcaggcatcaagagcgcgactgtttaaagaatacaaagaggtacagcgagagaaagtagcagatcctgatattcaattgatctgtgacgataccaacatattcaaatggaccgctcttatcaaaggaccttcggagactccttacgaaggcggtgtttttcagcttgctttttctgttcctgaaccttatcctttgcaacctcctcaagttcgattcttgaccaagatattccatcctaatgttcatttcaagacagggagaaatatgtctcgacattttgaagaatgcttggagtcctgcttggacgctcaatctgtgtgtagagctatcatagcattgatngctcatcctgagc

SEQ ID NO: 5635 - DNA, 450 bp, Arabidopsis thaliana
  unsure at all n locations
  Clone ID: LIB23-012-Q1-E1-B8
acgcgtccgnccacgcgtccgcccacgcgtccgctcagtttttggtcgaagttggtgaagtcgccgccgggacaactcaggttgttacagatgataaacatgcgagataatccaacaatgcatgtcttacaagcttcaaagtttctatttttagctcttattttgatccagttgctgtctactcaactctttgctcaaagatctaaaagtccatggcaaacactcactggagatgctccccttgtcattgctcgtggtgggttttctgggttgttgccagattcaagtctcgatgcttacagttttgtatcgcagactagtgttcctggtgctgttctttggtgtgatgtgcaactaacgaaagatgcaattggactttgcttccctgatgtgaagatgatgaatgcttccaaatattcaagatgtttaccctaaaacggaaaacttctt

SEQ ID NO: 5636 - DNA, 492 bp, Arabidopsis thaliana
  unsure at all n locations
  Clone ID: LIB23-012-Q1-E1-C3
aacttcttgcggncccctancggtccanaaaatcccgggtcgacccacgcgtccgntctctctctttttatctcaccgtctgatcgcttagaagcaaccatgcctcagggagattacatagatttgcacaggaagaggaatggatatcgcctcgaccacttcgagagaaagcgcaagaaggaggcgcgtgaagttcacaagcactccaccatggctcaaaagtctctaggtatcaagggtaagatgattgctaagaaaaactatgctgagaaagctctcatgaagaaaacattgaaaatgcatgaagagtcatcatcaaggcgtaaggctgatgagaatgttcaggaaggagctgttcctgcttatcttcttgatcgtgaagacaccactcgtgccaangttcttancancaccattnaacaaaannngaaangagaaagctggcnaatgggaagttcctcttcnaaagtccgttcaanttgctgaaaatga

SEQ ID NO: 5637 - DNA, 432 bp, Arabidopsis thaliana
  unsure at all n locations
  Clone ID: LIB23-012-Q1-E1-C6
acgcgtccggaaacagtcaagtactgctcagagacttgcaccgattcaagaacataacaatgaagagagacaagaacagaaaccgatacaatcgctcatggacatgccgatacaatacanagagaagaagcaagagattgaagaggagcctaggaattcaggggaaggaccatttgtgttagattcttctgctaaatgggaaacattcgatcatcatcccgtgacgccattgagctcgactactgcgaaaaataacgcgatcccgcccaggtttaattgggaattctttgattgagaaagttcacattttgtgaaactttttctttcttttatcttgtatgcttatataattcttgtgtggaagtgttggttttttttcaggcttcttcntcttcttcgtcaccatcattatgattcttttgatgtacntat

SEQ ID NO: 5638 - DNA, 449 bp, Arabidopsis thaliana
  unsure at all n locations
  Clone ID: LIB23-012-Q1-E1-D3
acgcgtccgaatttctagaaatctcagatccataaaattttccgaggagagattctctaatcagagaacctcacaatggccgcatatagagccgacgacgagtacgattacctcttcaaagttgtgttaattggagactccggcgttggaaaatccaacctcctttctcgattcacgcgcaacgagttcagtctcgaatctaaatccacgatcggtgtagaattcgccactcgtagcatccatgtcgatgataagatcgtcaaagctcagatttgggataccgctggccaagaaagatatcgagcaatcacaagtgcatattacagaggagctgtaggagcgttgcttgtgtacgatgtcacaagacatgtgacgtttgagaacgttgaaagatggttaaaggagcttcgagatnatacagatgccaatatcgtcatcatgttcgttgg

SEQ ID NO: 5639 - DNA, 506 bp, Arabidopsis thaliana
  unsure at all n locations
  Clone ID: LIB23-012-Q1-E1-D4
ctttttttcaggcggccnagcggtccanaaatcccgggtcnacccacgcgtccgaaantcttagagaaggcaacttcggctctcagcgaagccaaagaatccgttacaagcaccgctgaatccgtcacggcttctctcactgatgctgagaaaaccgttaaccaaaccgccaggagcactctaactgacgccgagacaaccgttgcagcatctgttgaaacggtcaagaccgaggctgcagccgcaccagacaaagcgtctggtgtgtctacacaggctaaggatgcagtggacaaagctttttctagaggtatagaaggagccaaatctttgcttcaaactttcgaagcgaagagcagcgatatttccctcaaagcttgttggangtgttaacaatcctgtgaagtggagcatcgagcancaaccgtggcaaaaccgagaactttccagtatctacangacaaacaagcctctgctaancgtctggtgaaaaagaaccccgttgt

SEQ ID NO: 5640 - DNA, 452 bp, Arabidopsis thaliana
  unsure at all n locations
  Clone ID: LIB23-012-Q1-E1-D7
attcgggngtcgacccacgcgtnacgattctctcgaacccatcgacctgcgctaattcatcatcgaccttgctcaaattcatcaaccatgtcttacgattatctcttcaagtacataatcatcggagacacaggtgtgggaaaatcgtgtctgcttctgcaatttactgataagaggttccaaccagtccacgatctcaccattggtgttgagttcggtgctcggatggtcaccgtcgatggacgcnncatcaaactccanatttgggacaccgctggataananncttttanatncatcaccanatcatactacagaggagcagccggagctttactggtttatgacntcncnaggagagagacgtttaatcatntggcaagcnggttggaggatgctcggcaacatgcanatccnaacatgaatattatgctnattgggaacaaatgtga

SEQ ID NO: 5641 - DNA, 446 bp, Arabidopsis thaliana
  unsure at all n locations
  Clone ID: LIB23-012-Q1-E1-D9
ccacgcgtccgagaaaaagaggcaagccatagccaaagggttcgtgtcggcttcaaccaaacactgacggtgtgtgtanacacctttanatacacacnnnnnnnnnnnnnnnnnnnnnnnnnnnnnnnnnnnnnnnnnnnnnnnnnnnnnnnnnnnnnnnnnnntacattattttttgacagcaattcttagtttctcttctatcccctttctgggttttgtttgaaccctacctcgctttggatccagtggttttaagttaaaggtaaanttatcgacagtaagtatattcctaatggcnggttccaatcnttcatctgntaaacctgnangagttntaagtgatnctttatgtactggagctctggcatgccngtgctggaccncntgtcnccctaactccntgaaggggaacncagtttaatncttcccggggaangggcaca

SEQ ID NO: 5642 - DNA, 452 bp, Arabidopsis thaliana
  unsure at all n locations
  Clone ID: LIB23-012-Q1-E1-E4
acgcgtccgntcagatcgaagaagaagaagaagagcttagcaacaatggcggcgaaaccgattgcgagtccgattccggtggcgctgtatccgactttatcggtgttcactcttgcgattggtctcgtcattaccgctatcttcttcatctatgaagctacatcatccaggaaaaaccgaagcgtcggaaaggagctcgctacttcagcagttgcatctgtcttcttgggttttggatcgttgtttttgctacttgctagtggtgtttatgtctgatccttcttcctcaatactattcccaactagttcaaagacaangaaaacagatttatcnttgttcaagttacaatcaggagttatgaatgttaaagacttgaggaagtagcctttaaacnccaagttacaattaaattatcttcntcttttaacgctaaaccgaattttgggttcaa

SEQ ID NO: 5643 - DNA, 433 bp, Arabidopsis thaliana
  unsure at all n locations
  Clone ID: LIB23-012-Q1-E1-E6
acgcgtccgnccacgcgtccggttacagggtgagagagagttcgtaagagataacaagtctattggtagcttccgtcttgatggtattccacctgcaccacgtggagttccacaaatcgaggtcaaattcgacattgatgccaatggaattctatctgtcagtgcttcggacaaaggtacaggaaagaagcaggacatcaccattactggtgctagtaccttaccaaaggatgaggtacacacaatggtgcaagaagcagagaggtttgcaaaggaagacaaananaagagagatgcgattgacacannagaaccanggctgactccgtcgtttaccagacaganaagcagcttanagancttggagaagacaattccaggtccangtgaaanacnangttnangctaagctcccaggactgaagggaganga

SEQ ID NO: 5644 - DNA, 412 bp, Arabidopsis thaliana
  unsure at all n locations
  Clone ID: LIB23-012-Q1-E1-E8
acgcgtccgnccacgcgtccggaagaactcaaacgcaagacagaaagatcaatggcgagcaacggagttaccaactgtaacgcaaacgccaatgtttggcggttcaaaggaaacggtgcaacgagtgatgcggcggcggtgacgttgagaaagcttgcttttgggatgtttaaaaactgcaccatgaacagtggaaagaccattttgttcccaactcccggcgagccctccgcccattccaacttcaggacttgcccggaagccgaggaagccgttgccgcagctgcacgctccggcatggctaactcttacgcacccagccctggagttttcaaggctaagaagggcggtggctgaanatttaaacggagaattccgaccaagcctganngccgangatgtgtatatcacc

SEQ ID NO: 5645 - DNA, 493 bp, Arabidopsis thaliana
  unsure at all n locations
  Clone ID: LIB23-012-Q1-E1-F10
tatctggccggcccggtcanaccatacccgggtccgnnccacgcgtccanccaancgtccgcccacgcgtccgaaaagagaatctctcagaaggtgagcctccaacaatagcgtgaatctctctttctctctctatctctctatctccgagatcgcatcaccggaaatcnccttctacggtggtggtggtgacagttgaccagagatggcggcggagaatgagagaaaatctccttcagcagtctccgatatgggagcttgggcaatgaatgtgataagctccgttggaatcatcatgngcgaataaacaacttatgtcctcttctgggattcgcatttagtttcgctacaactctcaacggtttccacttcgctttaaccgcattggtcggtatggtatcaaacgctaccggattctctgcttcnaagcatgtacctatgtngggagcttanttgggtctccattgtcngcnaatgtccgctaagtgctggc

SEQ ID NO: 5646 - DNA, 473 bp, Arabidopsis thaliana
  unsure at all n locations
  Clone ID: LIB23-012-Q1-E1-F2
acggtcaaaatccgggtcgaccacgcgtccgttcacctccccttcttcgaatttctctccttcccttttcatccttttgaaatttctcgtctttcttcttcgaaattggaaactcacagcagcacctgaaaaataacatcanaagcttcaagatccaatttgggtcgttctgtgttttcttctgatgggtctcgtcgaaatgtagaacaagtttggagatgttgacaatggacaaggaatttgattcaaagcttactcttcaagggaattcatcttcaaatggtgaaactatttccagaagcaaaagcttcgcctttaaggctcctcangagaatttcacttaccatgatttcgagctcggcaagatctaagggcgttggctcttaatccaaaggttgttanggcgaagaagaaggataatgggaactgtgtangccttgaagatnaatggacaaaaagtttatcaccaaggn

SEQ ID NO: 5647 - DNA, 484 bp, Arabidopsis thaliana
  unsure at all n locations
  Clone ID: LIB23-012-Q1-E1-B3
cttctatccgnccgtaccggtccanaaatcccgggtcnacccacgcgtccgancacgcgtccgttctttgcggtggttactttcgcggttctggtgcaaggaatgtttatgaggaagctttcaacgggaactcactgggtctggtctggtgatgaagcattggagctcttggaatactttgctattgctgtgacaatcgttgtggttgcggttcctgaaggattgcctttagctgtgactctaagtcttgcgtttgccatgaagaaaatgatgaacgataaagctcttgtgaggcatttagcagcatgtgagactatgggatctgcaacgacgatttgcagtgacaagactggtacactcacaaccaatcacatgaccgttgtgaagtcctgcatttgcatgaatgtgcaagatgttaccaataaaaggtccanccttgcaatccagaaatcccggaatcctcngtgaaatttttttgatcaan

SEQ ID NO: 5648 - DNA, 465 bp, Arabidopsis thaliana
  unsure at all n locations
  Clone ID: LIB23-010-Q1-E2-C3
tngccgtccgcaagattcaanggtngacccacgcgtccgggttcttgtgactcagtactttgacacattgaaggaaattggtgcttcttcgaagtcaaactcggtgttcataccgcacggtccaggcgctgttagggacattgcttcacagatcagggatggtcttcttcagggtaactctgctgctgagtagagaaatgtctcaaagtacaaaaaggctttttcagagttttagagttgtgttactacttgctactcagtttatcttttagcggttggctctatatgggttcttaaatttcttatcgtttctctcttctaggcttgtggacttgatccattttcttgttttatgggtttgtggatagagtttgggcttgaaaaatattgtgttatttgggttttaatgtcgttaactcgttattaatgttaaacagtggttaaagaattgttaacgagaaaaaa

SEQ ID NO: 5649 - DNA, 455 bp, Arabidopsis thaliana
  unsure at all n locations
  Clone ID: LIB23-010-Q1-E2-C5
cacgcgtccgcgnacgcgtgggcggacgcgtgggtttcgagaaattcgaacccatatttggagaagtcgtacccgaacgttcggatccgggttcgggtctactccggcgatgtctcttccacgtctacgcttccgattcgtataacttaacagttcatgtcactgacttcatctccggtgtctggacgacgatcctctccgtctcgcagctagacgatatgagggatactgttgggattggtggttcgtggtctgagttcgtcgattatactgttgcttccttgaaatccgacaatgtgaagcttctcttgggagaaacttcagtttcaaatggtgtcaaaactgcgcgattagtttctcagaaagccaaaggaatgcctcgcataaatgttcccttaacaaaagatggtggaatcatctgctagtgaagcaatggcaaatctgtctctcgagtt

SEQ ID NO: 5650 - DNA, 495 bp, Arabidopsis thaliana
  unsure at all n locations
  Clone ID: LIB23-010-Q1-E2-C6
accgaaccganattcccgggtngacccacgcgtccgaaacacaaagcaatgggctcttcttctccattaacaaggagaaacagagcaccaccatcctctgtttcctctgtttatctaatctttctctgtttcttcctctactttttaaatttctcaaacgctcaatcatcgccggttttcgcctgcgacgtagctgcaaacccttctctcgccgcctatggtttctgcaacaccgttttgaagatcgaataccgagtcgctgatctggtcgcgaggctcacgttgcaagaaaagatcgggtttttagtgagtaaagctaacggcgtgactcgtcttgggattccaacgtatgaatggtggtctgaagcacttcacggggtttcttacatcggacccgggaacgcatnttttctagccaaagtttcccgggagctaacgaagttttcccgcaagggtnataactccaacggccggcttcgtttnaaacgtatcctc

SEQ ID NO: 5651 - DNA, 455 bp, Arabidopsis thaliana
  Clone ID: LIB23-010-Q1-E2-C7
acgcgtccggcccaatgttgacgaaaaagcaattctctgacatgattcaacccattgaagaaaggatgcgtaatgtggagacctatgtcaagtctatcaagcccgagctggttgtacaagccgaacccattacagatccatatggcccttctatcgtagatgaaaatttggaagctattgttgtcagcaaagagacattacctggtggcttgtcagttaacagaaaaagagcagaaagaggtctttcacagcttaagattgaagttgtggaaatagtttctgatggatcgagtggaaataagataagttcaagtactctgagaaaaatggaggctgagaaagcgtctaaacaaaaacaaccagcagaagaaaaagcatcatgaactcatcatatataaactctcaactttgcatgtaatttaatactcttttgtatactcaaaatgctgtaaatt

SEQ ID NO: 5652 - DNA, 458 bp, Arabidopsis thaliana
  unsure at all n locations
  Clone ID: LIB23-010-Q1-E2-C9
acgcgtccgtacannnnnnnnnnnnnnnnnnnnnnnnnnnnnnnnnnnnnnnnnnnnnnncataattaaagatctctatcaagagagagatcttttattgtcttcttctgttaaaatcttttgatagatcttcactctctgaaagtcaagatcttagtctaggcaagtaaatatgtggtaaagcaaagcccttcttgaaattggtcatatatggctggtggtatcggaaaatggcaggatttttctcgttaggacacggcggaggaggaaacactccagacaaccacagaacaaacactaataatccttcttcatcgggaacagaatcttggctttggtgcagaaaccctaactctaacgctgacggtggagaagctggtccttcttacaaaggaacccttgagctatggcaacanccaaacaatcaagaaatcantttccagcagcagcaagcaaca

SEQ ID NO: 5653 - DNA, 468 bp, Arabidopsis thaliana
  unsure at all n locations
  Clone ID: LIB23-010-Q1-E2-D1
acgcgtccggtcttaaactcattcattctttctctctctataaccagagttctgtctgtgaaaacacacaaatctaagagaagttatgaataaacaagatgttatgaaacttcagacttgtgttctgaaagtgaacgtacactgtgaagggtgtaagcataaagtgaagaaacaattgcagaaaatcgaaggtgtttactctgtaaaagcagatgtagaacaggggagagttactgttacagggaacattgacccagctcttctggttaagaaacttagcaaatcaggcaaacatgccgagatcttnnnnnnnnnnnnnnnnnnnnnnnnnnnnnnnnnnnnnnnntttcctaatctgaatgggcaattttgcaaatcccaacatgggtggnaacaataagcctaaaagggtgggaaaagagaattaaccaagtcaangggtaaagctggttggttggccgttggaag

SEQ ID NO: 5654 - DNA, 504 bp, Arabidopsis thaliana
  unsure at all n locations
  Clone ID: LIB23-010-Q1-E2-D10
aacttctcccggcntcgtaccggtcaaacattcccgggtcgacccacgcgtccggantttcgcatttgccctgagcgaaagagagagaatgtatttgacgagttccaggagaaatcagagctagagaaatctggtaatggggagagaacttgtagacaaacacatggataagaaagcgaatagtttgacagctagctcgacgggatcttcagatgataataaagtcccaagtccgtctactaatgaagctgcagaggtgaaagaatgcaccgagcagaatttggttgcggatgatgctcgtttgaggcaacaagggataactgagacacctggatcccataaatcttctgttaaacctcgtgttactgcgaaaacaactgttccaaagccgttttccctgtcggctgaaaagcctagaagaacagcggttgataataantcattaggaaattggtgctaaccataactcctcctcagcatcaagagttcacagctaaaccccct

SEQ ID NO: 5655 - DNA, 458 bp, Arabidopsis thaliana
  unsure at all n locations
  Clone ID: LIB23-010-Q1-E2-D12
acgcgtccgtttttttctctgtcaaagttgaattgctttttctcttgtttttcgtcgaagtggaaaatttgattttattttttccggaattttgaaaatctgtgagctcataaatcttcgctaatcgcagagacgaatctgcgaaaattccaacaccagattccggcgccggagcgccgatgaacaatcaggtcgtttagtaaaattcgatgaatctcccgcggaaataattagattcgatttcgatttccgtggggaagttttgtgccatttgatttgttttcgttcgtccccgttggagattttttgtaatttctggggacagaaacaatgtctaaggtagtgtacgaaggatggatggttangtatggaaggaggaagatcggacgatcgtatattcatatgaagtaatttgtgttggagcctctcntttggcgtaatacaagaagaaacctcag

SEQ ID NO: 5656 - DNA, 453 bp, Arabidopsis thaliana
  unsure at all n locations
  Clone ID: LIB23-010-Q1-E2-D5
acgcgtccgctttgagtttttcattcatctatcggttgtttccattctcaggtttcagtcgaaaattccctctctttcttttcgatttgatctgggtttcattgtacatagctcgatcttcaagtttcgtcatctgggtcttgtaaagttttagacttttagggttgttttacttgtgaagtttctctcttttctaatggattctctgggtaattgatcgattagggtttaagattttagcggtggggaaagctgtttggttctagaattctatcttgattaacgtcacttgcagctttctcacaggttttggaattgtactaggttttgattgataatcatagattggtagtgatttgggagtnnccttgattgtgtaatcatggcggaggctaantggtgcctgtancnttggtgggtcatcgaccttcaattgtgaaggattacagtgaa

SEQ ID NO: 5657 - DNA, 499 bp, Arabidopsis thaliana
  unsure at all n locations
  Clone ID: LIB23-010-Q1-E2-E1
tntcccttgcctagccgtccggaaattccanggtcgacccacgcgtccgcccacgcgtccgcggacgcgtgggttcagtgggagttgttgggtgatcggtccgaggcgacatacaagatgaccggaaactcttttaactcgatgaaagatttcctgaagcagacaggcggctatgcggtaatagacggagggcttgcaacggagttcgagagacatggagcagatctcaacgatcctctctggagcgccaaatgccttgtcacctctcctcacctcattcacaccgtgcatctcgattaccttgaagctggtgctgatatcatctccagcgcttcttatcaggccacgattcaggggtttgaagcaaagggattttctagagaagagagcgaatctttgcttaaaaagagcgtaaaatagcgactgaagctcggaactcgtattatgacaaatgcggnactaactccttccaatggatgataagantctcaaaaagcgc

SEQ ID NO: 5658 - DNA, 451 bp, Arabidopsis thaliana
  unsure at all n locations
  Clone ID: LIB23-010-Q1-E2-E2
acgcgtccgcggacgcgtgggcggagaagctcggtgacgctggtattaagcttttggaggatgtcgcgaatgtcgactgttcgtataacatgactcctgaggagctcaacattaagatctcgctctgtgacgccttgatcgtgaggagtgggactaaggttggccgtgaggtgttcgaatcgtctcacggacggctcaaggttgttggtcgcgctggtgttgggatcgacaacgtggatctgagtgcagcgacggagtttgggtgtttggttgtcaacgctccgacggcgaacacgatcgctgccgctgagcacggaatcgctcttatggccgccatggctangaacgtaactcaagctgatgcgtccgttaaagctgganaatggaanaagaacaatatgtangtgtttcacttgtgggaaagaccctgcattgttgggaatcgggaaag

SEQ ID NO: 5659 - DNA, 496 bp, Arabidopsis thaliana
  unsure at all n locations
  Clone ID: LIB23-010-Q1-E2-E3
gtgtctgctgtctgcngtccgacattcaagggtcgacccacgcgtccgcccacgcgtccgggcttctacttcttccctcgctctctctcaagctctcctagctcgtgcaatctctcaccatggttctgaccaacgtggatctttaccagctttctctggactcaaatccaccggttcacgcgcctcagcttcgtctcgtcgacgtatcgctcaatccatgaccaaaaaccgatctctccgtcctcttgttcgcgctgcagctgttgagactgttgagccaaccactgattcgtcgattgtggacaaatcggtcaactcgattaggtttttggctatcgatgcggtggagaaggccaaatcaggtcatcctggtcttcctatgggttgtgctccgatggctcacattttgtatgatgaggtcatgaggtataaccccaagaaaccttaatggttcaaccgtgaacgattcgttccaatctgctggacatgggatgta

SEQ ID NO: 5660 - DNA, 466 bp, Arabidopsis thaliana
  unsure at all n locations
  Clone ID: LIB23-010-Q1-E2-E4
tngccgtccgacgatcaagggtcgacccacgcgtccgggtatatgcaagtgtagtgctattaaactatcccttttattttcccacccaactcaannnnnnnnnnnnnnnnnnnnnnnnnnnnnnnnnnnnnnnnnnnnnnnnnnnnnnnnnnnnnnnnnnnnnggggatgctttctactctctgtttggtttccttcattgtgactttctattttctgggtttgtttcaagtcatgatttttccgatacccttttgatttttcttgctatttctcacctctgtataagcaagctctctgctgtttctcctcatccaagttgggtttatcagttcagctgtgtagaaattcaatcgtctgagaagtccgaggtttgatgtctgatggttttaagatcgaaangatttgactttaacanattagtaatngagaataagaattggtttttgagggttaatggtatcana

SEQ ID NO: 5661 - DNA, 458 bp, Arabidopsis thaliana
  unsure at all n locations
  Clone ID: LIB23-010-Q1-E2-C12
acgcgtccgcaancccatttccccattgagacttttgttgacctaattcctccaaaatctcaccttcacattgctcgatttcagtcctctgaaaaaatctccctgctttgctatggctctgaggtgttttcccatttgggtttgtccccaaacgactcatcatcgttctcctctcatgggtctcgctgaattcgacgctgataaacgccgtcgtttctgtctctgggagtgctcttcttcagcttctcagagagctgtcactgccattgaaggcgagattccttttagccgcgagctcaaaaagtcctctgatgaattgggtttgactcaggagactcaatctctttcttttcacagagacttaagtatgcttcctaaaccgctaactgcaaacagtctttactcttctgatggcgatgattcaaaagtgcgaatttcgtttcaggggatacaagntg

SEQ ID NO: 5662 - DNA, 457 bp, Arabidopsis thaliana
  unsure at all n locations
  Clone ID: LIB23-010-Q1-E2-A11
acgcgtccgcccacgcgtccgtgtcactagaggaagctcgacaacttgggcataactacattggttcagagcaccttttgcttggtctacttcgtgaaggggagggtgtggcagctcgtgtcttggagaatttgggtgcagatcctagtaatatacggacacaggttatacgtatggtcggggaaaacaatgaagtcacagcaagcgttggtgggggaagcagcggaaacagcaaaatgccaacacttgaagagtatgggactaacttaactaaactagcagaggagggtaaactggatccggttgttggaaggcagccacagatcgaacgagtggtccagatcttggctcgaagaaccaagaacaacccatgtcttattggagaacctggagttggtaagacggcaatagcagaaggacttgcacancgaatanctantggtgatgttcctgaaac

SEQ ID NO: 5663 - DNA, 437 bp, Arabidopsis thaliana
  unsure at all n locations
  Clone ID: LIB23-010-Q1-E2-A12
tggggttatgtggaagttgaagataggaaagggaaatggagaagatccgcatttattcagcagcaataacttcgtcggacgtcaaacatggaagtttgatcacaaagccggctcaccggaggaacgagctgccgtcgaagaagctcgccggggtttcttggataaccgttttcgtgttaaaggttgcagtgatctattgtggcgaatgcaatttctaagagagaagaaattcgaacaaggcataccacaactaaaagctactaacatagaagaaataacgtatgaaacaacgacaaatgcattacgaagaggcgttcgttacttcacggctttgcaagcctccgacggncattggccgggaaaaaatcaccggtccgcctttcctcctcctcctctcatatttgttgtcattaccggacatctggaggaantatcca

SEQ ID NO: 5664 - DNA, 488 bp, Arabidopsis thaliana
  unsure at all n locations
  Clone ID: LIB23-010-Q1-E2-A3
tggncgtccggagattccaaaggtcgacccacgcgtccgcaaaatgctcacgacacctccacgaacnnnnnnnnnnnnnnnnnnnnnnnnnnnnnnnnnnnnnnnnnnnnnnnnnnnnnnnnnnnnnnnnnnncaatcgaactctgtatacaactctttcctcaagtgtttctccgacaagacgaaatctccacaatcccaaatcactgacaatgtcttctctcagacaaaccctgctttctcctccgttcttcgtgcttacatccgcaatgcgaggttcaacacttcctctactcttaaacccaccatcataatcactcctcgctccgagagccacgtcagcgccgccgtcacttgctcaaaaaccctaaatttcctcctcaaaatccgaagcggcgggcatgactacgatggtctctcttacatttccgacaaaccatttttcatcctcgacatgtcgaatatccgtgacgtctccgtagatatcg

SEQ ID NO: 5665 - DNA, 448 bp, Arabidopsis thaliana
  unsure at all n locations
  Clone ID: LIB23-010-Q1-E2-A6
acgcgtccgctcntccttcaataatttctgcaaaccctaactttctcattcggcgctcaagtttctctccaccccttcgagatttggtgcgatgatgttgcgtgctgtttttaggagagcttccattagaggctcttcttctgcttcgggattgggaaaatcattgcaatcctctcgtgttgcagtgtctgctcaatttcattctgtttcagcaacagagacgttggtgcctcgtggaaaccatgctcatagcttccatcaccgttcttgtccagggtgtccagactgttcaaggactattatcaacggttaccaaggcacagccctgcaaagatgggtcaggccttttcatctgatagtgggggatgtcgtggaagctgttgtgccacacatgggtgaatcaatcactgatggcaccctagccgccttctgaagaaacctggcgata

SEQ ID NO: 5666 - DNA, 491 bp, Arabidopsis thaliana
  unsure at all n locations
  Clone ID: LIB23-010-Q1-E2-A7
ccgtancgaatccggaaattcgcgggtcgacccacgcgtccgcggacgcgtgggaaatcactcgagaattcgctattttatcaccaatcttcttgaatcctctcatccaatcgtctgattctcatctttctccgttacttgtggatcttacgcaatgtatagagtttttgcgagccgagcactgagagctaagtctctctgtgacaaatcatccacctcgcttgcttctttgactctctccagattgaatcattccataccttttgctaccgtagatgccgaggagctctctggtgctcatcctgctgaagtacagagctttgtgcagggaaagtggataggatcgtcaaatcataacacgcttctagatcctctaaatggagaaccgtttatcaaagttgcgggaagtggatgaatcaggaactcagccatttgtgggacaagcttatcccaagtgcccgaaaacatggtctccataaaccctttcaaat

SEQ ID NO: 5667 - DNA, 461 bp, Arabidopsis thaliana
  unsure at all n locations
  Clone ID: LIB23-010-Q1-E2-A8
acgcgtccggttcaattcactaaaccaatgaaaatgcaagcagttcttgttatcttggttttctccggtttactttcggttaagacagcgttagcagcacgacatgtgatcggcgggagccaaggctgggaacaatccgttgattttgattcttggtcttctgatcaatctttcaaagtcggcgaccaaatcgtttttaagtattcagaactacacagcgttgtggagctaggaagtgaaacagcatacaagagttgtgacctgggaacatcagttaattccttaagctctggaaacgacgtcgttaagctttctaaaaccgggtactcgttacttcgcttgtggaaccgttgggcatttgcgaacaaggcatgaagaattaaagtccaacgttgtccncttctgactccaaaatcggcttctctcccttaaggttcaaggttcngggttccggattcaag

SEQ ID NO: 5668 - DNA, 458 bp, Arabidopsis thaliana
  unsure at all n locations
  Clone ID: LIB23-010-Q1-E2-B12
acgcgtccgcggacgcgtgggcggacgcgtgggccaaccactaattctgagagagctaagcagagaaaacacaccattgatccttcttctcctgattttcaaccaattccatcttttgaagaatgctttcctaagagcactaaagaacacaaggaagttgtccatgaagaatctggtcatgttcttaaagttccctttcgtcgtgttcatttgtctggtggtgagccagcttttgataattatgacactagtggtcctcaaaatgttaatgcacacattgggcttgctaagctaaggaaggagtggattgatcgtcgggagaagctaggaacaccaagatacactcaaatgtactacgctaagcaagggatcataactgangaaatgctctactgtgctactanggagaagctagacctgagtttgtaagatnagaanttgcacgaggacgggcgaat

SEQ ID NO: 5669 - DNA, 500 bp, Arabidopsis thaliana
  unsure at all n locations
  Clone ID: LIB23-010-Q1-E2-B2
actgttgcttgntctagccgtccgganattccanggtcgacccacgcgtccggagctttttctctctgggtttagggttccggtaattttgcgacgacaccgagcgattcgtgcctccctccccttcctttgacttcggttctaacttgattaccagtgagaagtaggctaagatggaaatcatgtcaagagagaatgagactgctttgtcaggtcctaggccgatggaatggtctaccgtcccacacagtgcttctcaaggacctggtcccaatggcaagaaccggacctcgagcttggaagcacctatcatgttgctaagtggacatccgagtgctgtctataccatgaagttcaatcctgctggaactctgattgcatctggattccatgacagagaaatcttcctccgggagagttcacggggactgcaaaaactcatggttttgaaaagncacaagaacgccatcctttgatctcaattggacaagtgatggctc

SEQ ID NO: 5670 - DNA, 454 bp, Arabidopsis thaliana
  unsure at all n locations
  Clone ID: LIB23-010-Q1-E2-B4
acgcgtccgactcaatcgagttcggattgcttccccttactccgttcggcttctgtcagtaaaacctatttcaaatgtcgatgatgcgaagtttcgatctcaggaagaagaagatcagtccagttacgatcagaaaacagtatgcgaagctctcacatgttacagcaacgattggcaaaaggcgttggagtttttcaactgggtcgagagagaatccggattcagacataccaccgagacattcaatcgggtgatcgatattctgggtaagtatttcgagtttgaaatttcttgggctttgattaaccgcatgatcggaaacacggaatctgtgccgaatcacgtcacgtttcgtataatccttaagcgttatgtgacggctcatcctgttcangaggctattgatgcgtatgataaattgggtgaattcaatttgagaagatgaacatcattt

SEQ ID NO: 5671 - DNA, 477 bp, Arabidopsis thaliana
  unsure at all n locations
  Clone ID: LIB23-010-Q1-E2-B5
aaccganattcgcgcgggtggncccacgcgtccgagttgttggaaatggcagcaaaactctgcattccctcttcttcgtttagccacagaactaatgattccataacctcatcatcttcttcatattcatcattgcttgctttgcctcaattcttctgtccaccatctccattaggattcccacagttcaagcttcacgccaagttaggtggaggagatggagaagtgaagcctaaagataagaagaagttcattaccaaagatgaagaaccagaacagtattggcaaagcgttggagaaagagaaggagagaatccgatgaagacgcctcttccttacattatcatcttcggtatgtcaacgccattcgtcatcttagccattgcttttgccaatggttggatcaaagttcccattcgttgatagcctttcttttttgcttctgctacacttgtgtaaggctgatcttaaacatgt

SEQ ID NO: 5672 - DNA, 452 bp, Arabidopsis thaliana
  unsure at all n locations
  Clone ID: LIB23-010-Q1-E2-B8
acgcgtccgcttccttcgtgtggaacagccatggctatggagtttctgaggagcagtagaagaatattggaatcttctggatgcgcgatcgctttgatttttctgctcttcatccatggagctcactcattctatctcccaggtgttgctcctcaggatttcgagaagggtgatgagctgaaggtgaaagtgaataaattaacttccataaagactcagcttccatactcgtattactcccttcctttttgtcgccctagcaagattgtggacagtactgagaatcttggagaagtgcttcggggtgaccggattgagaatgccccatactcgtttaaaatgcgggaggcacaaatgtgcaatantctcggccggggtcactccttgatgccaagacagctaaagcgtttaaagaaaagatcgatgataagtacnggtcaacatgattctcg

SEQ ID NO: 5673 - DNA, 453 bp, Arabidopsis thaliana
  unsure at all n locations
  Clone ID: LIB23-010-Q1-E2-B9
acgcgtccgcagagagactgtaacagtagtagtagctacttttgcttgttgtcttcatttcaaatctgcaattttactttctttttgagttctaagtgaactcaacatttagcttctttttcttttctaggtttcataaaaacagtttggatcttaagctcacagctgaaaataacccgactttgattactgggtatataaaagccgccattgttgttcttttcactctttgggttattagggtttacgatttctgggtggtagataaatttgttcttcaaaaaagtttccttttttaaaaaatctcttagattcttaaagaattgtaatttagggttttaaatgcatggatgggagagaagctatggcatttccaggcccgcattctcagttctatcttcagagaggagtttttaccaatcttacaccttcccangtcgcgagtggtctcac

SEQ ID NO: 5674 - DNA, 458 bp, Arabidopsis thaliana
  unsure at all n locations
  Clone ID: LIB23-010-Q1-E2-C10
acgcgtccgccnacgcgtccgtcttcactggtttcccaatatcttcatcgttgtcgtcgtcttcttctccttgagaagttcacaagttgtactagaagaagaagaatccacagtcgttggatacggctacgtcgttagatcagtgggcgttgattctaaccggcaagttttgacggcgaagcttgatctgataaaaccatcgtccgtttacgcaccagatattaaatcgcttaatcttcatgtcagcttggagacaagtgagcgtttgagaatcagaatcacagactctagtcaacaaagatgggagataccggaaaccgttattcctcgtgccggaaaccactctcctcgccgtttctcaacggaggaagacggaggaaactctcccggagaacaatttcctaacagatcctcatcggacttggtttcactctccaaaacacgacgccgttttggtt

SEQ ID NO: 5675 - DNA, 464 bp, Arabidopsis thaliana
  unsure at all n locations
  Clone ID: LIB23-010-Q1-E2-A1
acgcgtccgcaaaaacaaacgaaaagaagcgacttttgcctcttttggtctctccccttctccggagagatctgctctctctatctatctctcaatctgtaagaagaagattcccacttcagtaaaagccctaactttacttgggaaagttcttcatctatcatccttcaatcgtcatcatccatggctgatcaacaaaccctagattcctctactcctcctcctactcaatccgatgatctatctcactcccactctacttcctctactacttcagcttcttcttcctcagatccatcactcttgaggtctctctccttaagtcgactcaacgccggagctcctgagttcgttcctggtcgaactactcctccgctgcctcaanctcccgaaggatgattatcccgcctcctccggcggcaagggtatgcttcataaggtatcaacaacaagctccctttaaa

SEQ ID NO: 5676 - DNA, 447 bp, Arabidopsis thaliana
  unsure at all n locations
  Clone ID: LIB23-010-Q1-E1-D1
acgcgtccggtcttaaactcattcattctttctctctctataaccagagttctgtctgtgaaaacacacaaatctaagagaagttatgaataaacaagatgttatgaaacttcagacttgtgttctgaaagtgaacgtacactgtgaagggtgtaagcataaagtgaagaaacaattgcagaaaatcgaaggtgtttactctgtaaaagcagatgtagaacaggggagagttactgttacagggaacattgacccagctcttctggttaagaaacttagcaaatcaggcaaacatgccgagatcttnnnnnnnnnnnnnnnnnnnnnnnnnnnnnnnnnnnnnnnntttcctaatctgaatgggcaatttgcaaatctcaacatgggtggaaacaataagcctaaaggtggaaaagagaataaccaagtcaaaggtaaaactggngg

SEQ ID NO: 5677 - DNA, 435 bp, Arabidopsis thaliana
  unsure at all n locations
  Clone ID: LIB23-010-Q1-E1-D5
acgcgtccgctttgagtttttcattcatctatcggttgtttccattctcaggtttcagtcgaaaattccctctctttcttttcgatttgatctgggtttcattgtacatagctcgatcttcaagtttcgtcatctgggtcttgtaaagttttagacttttagggttgttttacttgtgaagtttctctcttttctaatggattctctgggtaattgatcgattagggtttaagattttagcggtggggaaagctgtttggttctagaattctatcttgattaacgtcacttgcagctttctcacaggttttggaattgtactaggttttgattgataatcatagattggtagtgatttgggagtttcttgattgtgtaatcatggcggaggctattggtgctgtatctttggtgggtcatcgaccttcaantgtg

SEQ ID NO: 5678 - DNA, 419 bp, Arabidopsis thaliana
  unsure at all n locations
  Clone ID: LIB23-010-Q1-E1-D8
aaagttggaatcgtgcacgcctctcgagttatctccggctccgatactccatctggtggattctgtanaagaaaaaatttcaatctttgttggattttctgggaaaaactcagatgggtttgctctgaatcgattggaaaatcaaaccggtgtggactctgcaaagttggttgatatgaacagtcttgtgagaagaaaacaagttgattctgttcatcttatcaaaaacgatggacctcatcagcttgccaagaaactatccgccgttgatcntgttgctattggagttgggacaanaattggagcaggagtgtatantcttgtgggaacggtagctanagagcacacaggacctgctcttgctgtagcattcctcattgctggagtanctgcggctctctctgcctgttgntatgctg

SEQ ID NO: 5679 - DNA, 449 bp, Arabidopsis thaliana
  unsure at all n locations
  Clone ID: LIB23-010-Q1-E1-E1
acgcgtccgcccacgcgtccgcggacgcgtgggttcagtgggagttgttgggtgatcggtccgaggcgacatacaagatgaccggaaactcttttaactcgatgaaagatttcctgaagcagacaggcggctatgcggtaatagacggagggcttgcaacggagttcgagagacatggagcagatctcaacgatcctctctggagcgccaaatgccttgtcacctctcctcacctcattcacaccgtgcatctcgattaccttgaagctggtgctgatatcatctccagcgcttcttatcaggccacgattcaggggtttgaagcaaagggattttctagagaagagagcgaatctttgcttaaaaagagcgtagaaatagcgactgaagctcggaactcgtattatgacaaatgcggaactaactcctccaaggatgaaaaaaatcnc

SEQ ID NO: 5680 - DNA, 441 bp, Arabidopsis thaliana
  unsure at all n locations
  Clone ID: LIB23-010-Q1-E1-E2
acgcgtccgcggacgcgtgggcggagaagctcggtgacgctggtattaagcttttggaggatgtcgcgaatgtcgactgttcgtataacatgactcctgaggagctcaacattaagatctcgctctgtgacgccttgatcgtgaggagtgggactaaggttggccgtgaggtgttcgaatcgtctcacggacggctcaaggttgttggtcgcgctggtgttgggatcgacaacgtggatctgagtgcagcgacggagtttgggtgtttggttgtcaacgctccgacggcgaacacgatcgctgccgctgagcacggaatcgctcttatggccgccatggctaagaacgtagctcaagctgatgcgtctgttaaggctggagagtggaagaggaacaagtatgtangtgttcacttgtgggaaagacccttgcagtgttggg

SEQ ID NO: 5681 - DNA, 438 bp, Arabidopsis thaliana
  unsure at all n locations
  Clone ID: LIB23-010-Q1-E1-E3
acgcgtccgcccacgcgtccgggcttctacttcttccctcgctctctctcaagctctcctagctcgtgcaatctctcaccatggttctgaccaacgtggatctttaccagctttctctggactcaaatccaccggttcacgcgcctcagcttcgtctcgtcgacgtatcgctcaatccatgaccaaaaaccgatctctccgtcctcttgttcgcgctgcagctgttgagactgttgagccaaccactgattcgtcgattgtggacaaatcggtcaactcgattaggtttttggctatcgatgcggtggagaaggccaaatcaggtcatcctgggtcttcctatgggttgtgctccgatggctcacattttgtatgatgaggtcatgangtataaccccaagaaacccttaatgggtnaaacgtgaacgaatccntcca

SEQ ID NO: 5682 - DNA, 447 bp, Arabidopsis thaliana
  unsure at all n locations
  Clone ID: LIB23-010-Q1-E1-E5
acgcgtccggtttgatcgtattggcttataacccactaggatggaagcgagtggacattgtccggcttcctgttgtgggcggagacgtttcggtacatgactctgagggacacgaagttgagtctcaacttgttccatttactgatgaatatgtggccttaaggaaatatcatgtagaggcatacttaggtcaaagccctacacaggtgccaaagtattggcttgtgttttcagtaactgtgcctcctcttggcttcactacttacactatctccactgctaagaaaacagatggatattctagcaaatcatacgtctccaatatcctaaaaggcgaacagtcaataattaacattggtcatgggcatctgaagcttagtttttccactgatcaagggacagcaatcaattatgttaacggcagaacctcgatgacaagaancaatc

SEQ ID NO: 5683 - DNA, 444 bp, Arabidopsis thaliana
  unsure at all n locations
  Clone ID: LIB23-010-Q1-E1-E7
acgcgtccgccaattttcatcttcccttttaggttggaattttgagttttatcttcccatttctggattttgtttctctctagtctattccttcaaaaccaagaacccaactttgttttatattcaaaagttgtttgctttcatcgcgtttggtgttcatcttcatctggtttgagattataataacatggaaggaatcattgtgagaagagttataccatctgataacagttgtctcttcaatgcaatcggttatgtcatggacaaggacaaaaacaaagctcctgagctcagacaggtgatagcagcagcagttgcaagcaacaaggagaaatataatgaagcatttctagggaagctcaatgaagaatattgtgcttggattctcaatccagacaagtggggangtgcgattgagctttcgatattaacanattaataagg

SEQ ID NO: 5684 - DNA, 446 bp, Arabidopsis thaliana
  Clone ID: LIB23-010-Q1-E1-F1
acgcgtccgcacacagctgcaacactatcttctcagaaatggtaaccgaagctttcgaattcgtcgccgttcctttcaattccgatggctggggacctccagacgcttccgacgtttcctcctccgcctctcccaccagcgtcgccgccgctaatcttctcccgaacgttcctttcgcttccttctcccgttccgataagctcggccgtgtagctgattggactcgcaatctctctaatccatccgctcgtcctaacaccggatccaaatcagatccgtctgcagttttcgatttctccgctttcgcaatcgacgaaggcttcggtctcgcttcctccggtggtaatcccgacgaagacgcagctttccgtctcgtcgacggtaaacctccgccgcgtcctaaattcggacctaaatggcgtttcaatcctcaacaaaatcgggat

SEQ ID NO: 5685 - DNA, 443 bp, Arabidopsis thaliana
  unsure at all n locations
  Clone ID: LIB23-010-Q1-E1-F3
acgcgtccgcccacgcgtccggttctacgcaactccataatttcaattcctctcgacgtttcacggcgaagcttcagatctacttttccccagctcagtatggagacggttgattctcggaacaaattgcattcccggttacgtttatgggaattccccgatcagtacatcatcgagccagctgatggctcaggctcttcatgtttggatattagtcgtgttgatgcttccatgaagctcatcgatcaagtcccagaaagcaattccgtgcgtgtccctaaaatccgttccatttttggtgtggttgggatgttgaagctccttgcaggatcatacttggtggttgtaactgagagtgaacgtgttggatcgtttctggggcatcctatattcaaaagttacaacgcctaagggtcctccctgtgatnaatcactaaaaaacc

SEQ ID NO: 5686 - DNA, 440 bp, Arabidopsis thaliana
  unsure at all n locations
  Clone ID: LIB23-010-Q1-E1-G1
acgtagatcctgggtgaagccaaaggcatcgtgagcaaaatccgcagttttctacattaatggattgtttctgttctagagcttctcttccgtctctgtgatttctgggtagattctaggatttctatttgcatctctaacctgagagctgctaatagtccacacaactttttagtttgtgagttttcctaatttagggttaggacaaatttctgtatttttcatccaaggggataaagatgtatgctgataaattggaggctgagtctggaagcaggaaggtcgttaaggatcgtatcaatggcggttctggagacatctctactcgcgtgcgacaagtgactgggaagaggcaaaggcaggacgacaaatgggagcatgatcttttcagtagtgacaaacctcaactttcaaatcncaaggttgattctaaaantctc

SEQ ID NO: 5687 - DNA, 443 bp, Arabidopsis thaliana
  unsure at all n locations
  Clone ID: LIB23-010-Q1-E1-G7
acgcgtccgcggacgcgtgggctttactgagaaagaaacaaaccgctccaaagtcattgcccatttctctcaatgtggatcagtcggtctccgatcctactgctgttccaacaacaagaaaatcgttgatcatggaacgaatgggagataaagacatcgttagacgtgcatttaagagttttcagaagagtttcgaccaaatgaaatctactgatgatgggcaagatacagctccaaagcaggttcttgcaaaggcaactgctgttcagaggttaggtacaactggtcagaaaaatgtcaggcttgcaaaatcagatggcacggagagaaaaggtcctaactctcaccgttcttcatctgttgtatcaaaaagcaacgggacagccgagaaacagaangnaccttcctaagctttggacaagaacttttgagaaggatacnat

SEQ ID NO: 5688 - DNA, 439 bp, Arabidopsis thaliana
  unsure at all n locations
  Clone ID: LIB23-010-Q1-E1-H4
acgcgtccgcccacgcgtccgcagaaaccctaacttcaacgggaactcaaaaatcagaatctccagatcgagagcttaaaaagtcgatttcaattcccctttaagattttttgcttttggaatgtagtgtgaagaagaaaccctagttttttctcacttgaattctctgccttctttagtaatgtcaagtgagcagcgagaaggttcgcaagagacgacgacgacgacggtggaaggtaacggaacaattgcaggtcagaattctcattcggcggctcccacgacattgagagctacctctacgatggtttcttgccagagactaaggctaaaccctaacaacgagcatagacccgatagttatgaagatctgcagcttgatttcccaaactcggtatattctagtctggagaaagtacttgcctccgaatatgntcgt

SEQ ID NO: 5689 - DNA, 428 bp, Arabidopsis thaliana
  unsure at all n locations
  Clone ID: LIB23-010-Q1-E1-H8
acgcgtccggaagagagaggctctgataaaanaaaaaacaaaanaaaatgacaaaggcttattcaacacgtgtcctcacgtttctgatattgatctcgctaatggcggtgacactgaacctttttcccacggtagaggcaaagaagcggngtagagatgctcctanantgaaaggtctctcatggaacttttaccagaaagcatgtccgaaagtcgaaaacatcatcagaaaagagctcaagaaagtcttcangcgagatattggtttagccgctgccatccttcgtatacatttccatgattgcttcgttcanggatgtgaagcatcagtgctgctagctggatcagccagtggaccanggagaacaatcatcaatcccaaatctgacactacgacaacaagcctttgtcgtcattaanaaccttcg

SEQ ID NO: 5690 - DNA, 448 bp, Arabidopsis thaliana
  unsure at all n locations
  Clone ID: LIB23-010-Q1-E1-C7
acgcgtccggcccaatgttgacgaaaaagcaattctctgacatgattcaacccattgaagaaaggatgcgtaatgtggagacctatgtcaagtctatcaagcccgagctggttgtacaagccgaacccattacagatccatatggcccttctatcgtagatgaaaatttggaagctattgttgtcagcaaagagacattacctggtggcttgtcagttaacagaaaaagagcagaaagaggtctttcacagcttaagattgaagttgtggaaatagtttctgatggatcgagtggaaataagataagttcaagtactctgagaaaaatggaggctgagaaagcgtctaaacaaaaacaaccagcagaagaaaaagcatcatgaactcatcatatataaactctcaactttgcatgtaatttaataccctttgtnaaccaaaaaggccg

SEQ ID NO: 5691 - DNA, 437 bp, Arabidopsis thaliana
  unsure at all n locations
  Clone ID: LIB23-008-Q1-E1-H11
acgcgtccgcggacgcgtgggcttttccaagtttttnnnnnnnnnnnnnnnnnnnnnnnnnnnnnnnnnnnnnnnnnnnctttggttccggatcttgattatggcaaatgggtgggtcaaatcgttacaatgcaagtcgaaagctttcgatgatgtttacnnnnnnnnnnnnnnnnnnnnnnnnnnnnnnnnnnnnnnnnnnnnnnatctcatgtcaagctacagttgcagaaaaagcacacagagtctaaaagatgtgatcgaaaccaaaaaacccaaacctaaaccgaagaaacccaatccaaaaccggataaacgagaaaccgacccggttttatcaccatcaacccggatccgatcaaccggagttcgtgatcgtgatccgtttttaccgacattgacggagctatcggaaggncatcaatcacgtaatgtgg

SEQ ID NO: 5692 - DNA, 438 bp, Arabidopsis thaliana
  unsure at all n locations
  Clone ID: LIB23-008-Q1-E1-H3
acgcgtccgncctgctttcgcacttcatagcctcaatctctcaacaagcagaagagattcgattctccattatcttccttctaaatgccttccctaatgttatctgnnnnnnnnnnnnnnnnnnnnnnnnnnnnnnnnnnnnnnnnnnnnnnnnnnnnnnnnnnnnnnnnnnnnnnnnnnnnnnnnnnnnnnnnnnnnnnnnnnnnnnnnnnnnnnnnnnnnnnnnnnnnnnnnnnnnnnnnnnnnnnnnnnnnnnnnnnnnnnnnnnnnnnnnnnnnnnnnnnnnnnnnnngcgattcangctcggagaanaangaanagcancannaaggttaagttgggcgttgaggatgttgaagttgannaccctaatgctgttccaaagtttcggatttctgcanctttgacgggagaagcttaacgggaaatgggattgna

SEQ ID NO: 5693 - DNA, 443 bp, Arabidopsis thaliana
  unsure at all n locations
  Clone ID: LIB23-008-Q1-E1-H7
acgcgtccgaacacaggaacaacttttgcagctacaaatttggataatctaagcagagaattatgtcatcgaaccaagaaaatgccaaggaagagaaactccatgtcaaaataaagacgcaggaattggatccaaaagagaagggggaaaatgttgaggtggagatggaagtgaaggcaaagtcaattnnnnnnnnnnnnnnnnnnnnnnnnnnnnnnnnnnnnnnnnnnnnnnnnnnnnnnnnnnnnnnnnnnnnnnnnnnnnnnnnnnnnnnnnnnnnnnnnnnnnnnnnnnnnnnnnncaaaaagaaagatggaaaaatggtctccaagaaacatgaagaaggccatggagatctggaggttaaagagagcgatgtgaaagtggaagagcatgagaaggaacacaagaagggcaaagagaagaaacacgaaggantaaga

SEQ ID NO: 5694 - DNA, 497 bp, Arabidopsis thaliana
  unsure at all n locations
  Clone ID: LIB23-008-Q1-E1-H8
gncagtaccgaaacaagaattcgcgggtcgacccacgcgtccgggaataatctctgtccgaagaagatctctcattccccttcaaaagcagacagattcgaaactttcccccaaattcgtggaaattttgtgttagggtttgggttattctcaaatagaatcaatcagatcgtttttttttttgttagaagaagatgaagatagcggccaatggccggtttttcacaatcggactcgtagcgtcatggtattcatcgaacatcggagttttattgctgaacaagtacttgttaagcaactatggattcaagtatccgatcttcctcaccatgtgtcacaatgacgggcttgttctcntctcaactacgttgcctattggcttgggatgaagaaggntcccgaatgcaaaacgattccgattcccaagttcantttccttaaagaatncgcctgcngttaangtccccgttttcccggtggtgtcccggtggggtttt

SEQ ID NO: 5695 - DNA, 437 bp, Arabidopsis thaliana
  unsure at all n locations
  Clone ID: LIB23-008-Q1-E1-H9
acgcgtccgcccacgcgtccgcggacgcgtgggcatgaagaagttggctccaattcagcgcaaggagctggatcccctgtcatgattgatgctatgtcacacatcacaagttgcttcagctctgacactaaggtgctcaaaaaagcgattcagaaaagtttgcttgtctctgctgacatggcacatgctttacatccaaactttatggacaaacacgaagagaatcatcagccaaagatgcacggaggacttgtcatcaaacacaatgcaaatcaacgttacgccactaatgccgtaacttcctttgtattcagagagatagcagagaagcataatctgcctgttcaggattttgtggtgcgtaatgatatgggttgcggatcgaccattggtccaatcctaacaagcaatgtgggggataangacggttgatgttg

SEQ ID NO: 5696 - DNA, 415 bp, Arabidopsis thaliana
  unsure at all n locations
  Clone ID: LIB23-009-Q1-E1-B2
acgcgtccgcccacgcgtccggaaaaactttgggatcaatcaacaatggcggatctctctcttcctcccgattccctcttcctcggcttcgacagctctacccagtcaatgaaagcaactgtgttggattcgaacctgaacattatcanaancgaactcnttcatttcgattctgatcttcctcaanacagnaccaaagacggggtttanagatacactagtgtagacngaagaatcgtatctccaactctcatgtgggtcgaagcatttgatctcattctccaaaatctctctaangncaatttcaatttcnncaaagttatcgctgtttcaagnacagggcaataacacggtagtgtgtactggtcagangaatttatggggaattgagatnatggaggcattgagatgnctg

SEQ ID NO: 5697 - DNA, 425 bp, Arabidopsis thaliana
  unsure at all n locations
  Clone ID: LIB23-009-Q1-E1-B4
acgcgtccgcccacgcgtccgcggacgcgtgggccagatcaattttctcgagaaaaagaaaatgtgattatccattcgattttttcgcagaagaagacgaaagagagaagaagagaaagagatttgaaatcatggcgaatgtagtgggacagctaaaacgaggaatctcgagacaattctcaactggatcgcttcgtcgtacgcttagtcgtcaattcacgcgtcaagcttcacatgatcctcgccggaacaatatgcgatttagttttggtcgacaatcgtctttagatccgattcgtcggagtcctgatggttctaacggtccgcagcttgctgtaccggataatctcgacgctactatgcagcttctatttgtggcttgtagaggtgatgttgaaggtgttcaaggatcgcntgatgaaggt

SEQ ID NO: 5698 - DNA, 435 bp, Arabidopsis thaliana
  unsure at all n locations
  Clone ID: LIB23-009-Q1-E1-B5
acgcgtccgtgtttttataggttgtgtatagtctttcttggtttcgatgtgttctttgttgttttctgcgttgcattggcttgtgttatcggcattgctgtttgctgctgcttgccttgcatcattgcagttctatacgccgtagcagaacaggaaggagcttcgaaagaagacattgaccaacttactaaattcaaattccgaaaggttggtgatactatgaaacacactgttgatgaagaacaaggacaaggagattctggaggagtgatgactgaatgtggtacagattcacccgttgaacatgctcttcctcatgaggatgcagaatgctgcatttgtctttccgcttatgaagacgagacagagctaagagaacttccttgtggncaccatttccattgcgttgtgtggataaatggctttacataaatg

SEQ ID NO: 5699 - DNA, 419 bp, Arabidopsis thaliana
  unsure at all n locations
  Clone ID: LIB23-009-Q1-E1-C1
acgcgtccgacgaaaacgaacgaatcagtgtcggctcttgggttccgaacaaaaacaacattgtacgtcggatccaaaaaacgcgcgttatataaacgcttaatttctccaggattcttcttctgcttccgccattgctcgaaaatcgcgtcttctgacaatgtgctgaaactgagtcatcgtccgagttagcaaagtgaaacttcgaagtttctcttacactaatctcaggtttgggattttgtaagaaaccgcgtttacaaaatgttcaagttgaagcaatggttgatttatttggtgtgttcgttaagtaataatgaacacagaangactgtttgtcaatattacatttgttcgnaanncactcgctaaanggggccgtttgtttanatgganatccaccagcttatcatttggnt

SEQ ID NO: 5700 - DNA, 438 bp, Arabidopsis thaliana
  Clone ID: LIB23-009-Q1-E1-D2
acgcgtccggagaccgctctctcttccttatcctccatcttccaatggtttaatccagcaactgtcgacgatgtcgataacgtactccgctatttcctctagtacagtttctgggttttcaccaaaaagtgtaccttttgctattcatagcgtaaccaggaggcaatttcttaatcccaacacgttttatagatttgggttctctccttctcttcagggaagtagcattgagtttagccttcagttgaattcaagagttgtgcttagtaaagagcgtcgatctctgccattagttgtgagaaatgatcgtcctcagaatgaagacttacctaagcagtacacaaggcgagagaagaaacctttcccagtccctattgtggacctgagacgagctgcgaaggaaagagtcaagaacaacagagacaaacctaaagagac

SEQ ID NO: 5701 - DNA, 438 bp, Arabidopsis thaliana
  unsure at all n locations
  Clone ID: LIB23-009-Q1-E1-D8
acgcgtccgaacgtgagaaactttgnnnnnnnnnnnnnnnnnnnnnnnnnnnnnnnnnnnnnnnnattggtttggtctccggaaacagcatcaaaggcttatatagacaccgttaaatcggtaagttttttttttattttccggtgagttgtgaaggaataataacacacgcttcttctctccagttctcgaaaactcagatcttaattttgttaaagattcatggtttgttcttgtaacgatttttttcttttcttttttgttcagtgtgagaatcttgaaacgccggacgcggcggagctaatagcggcgatggcggcgggatggaacgtgaagctgatcgtggaaacttggtcagaaggagacgcaatagcttcaagtattggtttaaacgtancaagcanacacgcaaacgctaaacacatatgtatantacaa

SEQ ID NO: 5702 - DNA, 438 bp, Arabidopsis thaliana
  Clone ID: LIB23-009-Q1-E1-E2
acgcgtccgaataatcgaaacccagcacgagaaaaatgcatgatttttgcttcactatcccgtacgggatgcttctcatcggcggaggatttatcgggtacatgaagaaaggaagtataacatctttcgccggaggtgcaggcactggattattactcattctcgctggttatatcagtctcaaagcttttgagaagaagaagaattccactattgctatggttcttcagacagtcatcgcagctgctctcacactagtcatgggacagcgttacttgctgactggaaagattatgccggctggtttggttgctgggatcagtgctctcatgacctgtttttacgtatacaagatcgctactggtggcaataaatttccagcaaaagctgaatgatggttctgctacatgcagatgatactatccgttgttgaatttg

SEQ ID NO: 5703 - DNA, 436 bp, Arabidopsis thaliana
  unsure at all n locations
  Clone ID: LIB23-009-Q1-E1-E7
acgcgtccgctctgctttgtctctctccttcttcaaagtcaaaattcaacagtggttcatgagtggtattgtgatcgatctgttactttcggagagcgagcaataagaagaggatatgtcgtcactcagcagagaactcgtgtttttaatacttcagtttctcgatgaagagaaattcaaagatactgttcacaggttggagaaagagtctggttttttcttcaacatgaggtactttgaagatagtgtaacagctggtgaatgggatgatgtagagaagtatcnttctggattcactagagttgatgataatagatactctatgaaaagatttttcgagattcggaatcagaagtaccctgaagcacttgacaagaaagatcattcnaangcggttganattcngngttaaggatttgacagtgtcncgacatca

SEQ ID NO: 5704 - DNA, 433 bp, Arabidopsis thaliana
  unsure at all n locations
  Clone ID: LIB23-009-Q1-E1-E8
tcttcttctcctttttcaaaaatttgtcacctccgagatcagatctgatcgtcggaattgagatggcgaggaataaacttgtaagtggtagtcatgggatatggaaatatttcaacccagcgttttatctccgaagaccaagacgtcttgctttgctcatcatcctcttcgtctctgtttcaatggttgtttgggatcgtcaatctctttcccgagactaccagtttgaagtttccaagttaaatgaagaagttttgcggttgcagcagatgttggaagagataaagagcgtcactgaggatgtgtctgtcaatagtttgaaggatgttcaggaagatccagttgatgctcagcgaatgcagagagttaaagaggcaatggttcatgcttggagttcatatgaaaagtatgcctggggacaaagatgagcntc

SEQ ID NO: 5705 - DNA, 450 bp, Arabidopsis thaliana
  unsure at all n locations
  Clone ID: LIB23-008-Q1-E1-H1
ccgggncgacccacgcgtccnaaaaccatgtgtatgtattcggtggggtgagcaaaggcggtactatgaatactcccacgcggttcaggacaatcgaggcgtataacattgctgatgggaaatgggctcagctaccggatccaggagataacttcgagaaaagaggaggagcgggattcgctgtggtacaagggaagatttgggtggtttatgggtttgcgacctcgattgtgcccggaggcaaagatgactatgagtctaatgctgtgcaattctatgatccggcttccaaaaagtggaccgaagtagagactacaggagcgaaaccttccgcaaggagcgtgtttgcccatgcggtagtgggaaagtatataataatatttgcaggtgaggtatggcctgatctcaatgggcattatggtcccgggacgctgtccaatganggatatg

SEQ ID NO: 5706 - DNA, 441 bp, Arabidopsis thaliana
  unsure at all n locations
  Clone ID: LIB23-008-Q1-E1-D4
acgcgtccggtttggtctcttgtgttttcttatgatcgttgaccgagcctacgctagagagtttacggtcggtggtgcaacaggttggaccgtcccttctggttctcaagtgtacagtcaatgggcagaacagagcagattccaaattggtgactctctgttgttcgtctaccaatcaaaccaagattcagtgctccaagtcacaagagacgcttacgacagctgcaacacggactcaccaaccgctaaattcgccgatggcaaaacttctgtcacgctgaaccactctgggccatactatttcattagtggaaacaaagacaactgcaagaaaaacgagaagcttgtggtcatcgtcatggctgatagaagcggcaacaaaaacaccgcatcatcaccgccgtccccagccccagctccctcangagaatcccgctcctt

SEQ ID NO: 5707 - DNA, 452 bp, Arabidopsis thaliana
  unsure at all n locations
  Clone ID: LIB23-008-Q1-E1-D6
ttcncgggtcgacccacgcgtccncggacgcgtgggcacacacccagagagagacagagattcatcgatatggcggtttcttgcaaccactctgcgattctcttctctccatcatccaccgctggttcctcctccgttacttcttcctcgtcgctcatcggctttcctcgtttccaaacgctgcgtttcaaatcaagaagcgtttattcgaaatctagagtttcttctcctgtctcggcattgcctttacgttctctagaagctctgattttcgattgcgacggcgtgattctcgaatccgagaatctacaccgtcaagcttacaacgatgctttctcgcatttcgatgttcgatgtcctccttcttcctctgagtctctcgattgggagcctcgagttctaggataagtttcagaatctantcggaggttgggaaaccganaatgcgttgg

SEQ ID NO: 5708 - DNA, 431 bp, Arabidopsis thaliana
  unsure at all n locations
  Clone ID: LIB23-008-Q1-E1-D7
acgcgtccgcccacgcgtccggttaacgagtggatatgaggtagcaaacgtagaaaggactcgagaagtcatggcttctgcttaatctcctcttccttaaaaaccagaagatcctttgttccacgtttctcgtttgtagcttcttctctctcagaattcaattcgaattttgacaagtcttgacgaagaagaagaaacagagctgcttcaatggcttctaactcattactacgttcttcttcaaatttcttcttaggatcccatatcataatctcatctcccacccctaaaaccaccagaaaaccctctttccctttctccttcgtctcccgtgctaaataccaaatcactcgatcgtctcaagacgaaaattcgncaaatggtaaacccanttcgccattctcgtcgnangtagccttaggcagccnatt

SEQ ID NO: 5709 - DNA, 439 bp, Arabidopsis thaliana
  Clone ID: LIB23-008-Q1-E1-D9
acgcgtccgcccacgcgtccgggtacaacaagactcgtcgctcttcgctttttcttctctctttctttctcttgccagtagtgtgatcttacgaagcttttagtagagaaaaagcatatacgctttgtctttcttaatcgactgataagtccttaggatcagatggaacaaatgggtggctactcaaaacaacaaggtccatttttagtttgattaagggatttggatctgagcttacttcatcaactttgtcggaatatacatttgctttgtgtggatttggaagttgtccctgaatggcgtccgaggatttgaatattgttgcggaatcaaagaaaggggaagagaatgttattgttgataattccaaggacatgaatagacctgagaatcttgacttatctactgagaaaactgatactggcaatgagaatgggcc

SEQ ID NO: 5710 - DNA, 439 bp, Arabidopsis thaliana
  unsure at all n locations
  Clone ID: LIB23-008-Q1-E1-E11
acgcgtccncaaaccctagatttatccgcccctcttcttcctctgatgataagaaagtcgaagactttgagaatctaaagctgaaaaattttgttttttttcattgagggaatcgaatcgagttatgtacaaggatcggagtggaggaggaataatgggtggtggtggatcatcgagatcggagatccttggtggagctattgatcggaaacgaannnnnnnnnnnnnnnnnnnnnnnnnnnnnnnnnnnnnnnnnnnnnnnnnnnnnnnnnnnnnnnnnnnnnnnnnnnnnnnnnnnnnnnnnnnnnnnnnnnntaaatctcagcttcattctcgttcccccgatgttgaatctgacacggatagtgaaggatcaagatgtgagtggttcagaaggtgatgatacctcctggatctcatgggtttgtaatttganaag

SEQ ID NO: 5711 - DNA, 473 bp, Arabidopsis thaliana
  unsure at all n locations
  Clone ID: LIB23-008-Q1-E1-E2
ttttattcgnccgccacggtcaacatcccgggtcgacccacgcgtccgcccacgcgtccgcccacgcgtccgaaaaagctgaaaattgggggaagaagagagaagagtttcatcgtcactggaatcaatagagtcaattggcgggagaggttagtctcgaaaagaagtggaagccctagggggaaactttctcgctcactcgctcgtctgcaaacaccatggaagacagtcctcaaggccttaaaaggagtagagatccggatcaggatcaggatgacgacagcggcgaggctggcaaggccgacggaagcggcggagagaatcaggagcgcagcagcgaccagattgagctcgatgacgacgatttccaggaaacccgtcccaagcccaagcgtagtcgcacccatcctcctcaacagaatctcattgaggttgtcaaaggcaacggggatcttatttctaaagccgtcaan

SEQ ID NO: 5712 - DNA, 443 bp, Arabidopsis thaliana
  unsure at all n locations
  Clone ID: LIB23-008-Q1-E1-E4
acgcgtccgaaatcgccagaagtgacgaaattgaaaatctcagatttctcttaatcggcnnnnnnnnnnnnnnnnnnnnnnnnnnnnnnnnnnnnnnnnnnnnnnnctcgaatcgctcctggtgttggagctaatcttctcggccaacactccgctgagaggaaccaagacgccactgtttacgtcggtggtctcgatgctcagctttctgaagaattgctttgggaattgttcgttcaagctggacctgttgttaatgtctatgtaccgaaagatagagtgacaaatcttcatcaagaactatggattcattgaatatcgtagtgaggaagatgctgattatgcgattaaggttcttaacatgattaanctccacggggaagnctattctgtttaacaangnatctcaaggatangaagagcctggatgttggtgctaacct

SEQ ID NO: 5713 - DNA, 411 bp, Arabidopsis thaliana
  unsure at all n locations
  Clone ID: LIB23-008-Q1-E1-E9
acgcgtccggtaacattaaagacaaagatagaatccagatgggctctagggttcttgtacctttcccttgcgaatgtcaacctggtgatttcctagggcacaatttcagctacagtgttcgacaggaagatacttacgaaagagtcgcgattagtaattacgcgaatctcacgacgatggagtcgttacaggcgaggaatccttttccggcgactaacatacctctctctgcgacgcttaatgtattggtgaattgttcttgtggtgatgagagtgtttcgaaagattttggtttgtttgttacgtatccgcttcgtcctgaagacagtctcagttctattgcganatctccggtgtatcggcggntattctgcatnnatatnaaccngggtgttnctttaactccgggga

SEQ ID NO: 5714 - DNA, 426 bp, Arabidopsis thaliana
  unsure at all n locations
  Clone ID: LIB23-008-Q1-E1-F12
acgcntccnatttgaaatctctttatccagatccatctctccgtcacaatcttccatctaccgtcaccggaaccggcgagttagtcgtcgggattccagatctgtttgtctacgtcttccttctgtctctgtgttcatcagagtaccaattcgctcgattgttgctgcatttcgcgaattgtattaggtttatagcgtctatgaactcctgttttcgctcgatttgagtaacctaggtatttctctacgttgattgtttggatttgaagaaaaggcgcaaagtatgagtagaaatttcggaagtttcatgaagatttgagggattgagttaggtattgtagttgtagagagaatgcagagtttatcgagctcggctccgacaccggaggcgatattagaatggttacagaaggaaatggggtacaa

SEQ ID NO: 5715 - DNA, 436 bp, Arabidopsis thaliana
  Clone ID: LIB23-008-Q1-E1-F5
acgcgtccgcacgatttcgacggcgacaaagggcttgccaagggatttctcgagaatttcgccgacgctaatggcagatctaagtacatggagattctccaagaggtttcaaatcgtaagattcgagctattcaagtcgatctcgatgacttattcaattataaagatgaaagtgaggagtttctcggacggttgacggaaaacactcgccgatatgtttcaattttctccgccgctgttgacgagttgttacccgaaccaacggaagcgtttccagatgatgatcatgatattctcatgactcagagagcagatgatgggactgataatccagatgtttctgatcctcatcagcaagattccttctgagattaaaagatattatgaggtttattttaaagctccttcaaagggaagggcatctaccatcagggaa

SEQ ID NO: 5716 - DNA, 431 bp, Arabidopsis thaliana
  unsure at all n locations
  Clone ID: LIB23-008-Q1-E1-F6
ggtaccgaaacanaaattcgcgggtcgacccacgcgtccgcacgcgcctnnnnnnnnnnnnnnnnnnnnnnnnnnnnggaaatcgatatacgattctcactctctacccgcgaaaaaacactaattgattcatatcctccgtcaaggataaatctgtgtttgattcaccatatctctttcttctccctccgcgctaagctacgacgcctacagatctggctggtaaaaatcacgcagatagagactctggcccgatgctctctttacccattgatccaggctttttctgatttctctttgttcctagaaaccattaagctcctacctctttctanttgatgctcgtgttctcttcactgtcnatnactccangttgtgatanctcaaaatctccgtgtctttggncctggtttgaatcgctcnttcactta

SEQ ID NO: 5717 - DNA, 422 bp, Arabidopsis thaliana
  unsure at all n locations
  Clone ID: LIB23-008-Q1-E1-F9
acgcgtccgcaaaaccttacccagctcactgatctcagcctgcaaaacaattctcttagtggtccaattcctaacctccctcctcgccttaaatacttgaatttgagcttcaataaccttaacgggtcagttccatcttctgtcaagtccttcccagcatcctcatttcaaggtaatagccttctatgcggtgctcctctgactccatgcccagaaaacaccactgcaccatctccttcaccgacaacaccaacagaaggtcctggtacaaccaatataggtcgtggtaccgccaaaaaagttctctccactggtgctattgtgggcattgcagttggaggttcggttctgttgtttatcattcttgccatcataaccctttgctgtgccaagaaaagagatggccgggcaagatacancgc

SEQ ID NO: 5718 - DNA, 437 bp, Arabidopsis thaliana
  unsure at all n locations
  Clone ID: LIB23-008-Q1-E1-G1
acgcgtccgnccacgcgtccgcggacgcgtgggatgctggactacaaaatggaatggttttgatatttgacatgcgtcaaaccacgggacctttcgcatcgatgacaggcttaacaaccaatccagttcatactgtccatcatctctctggcaattccactccaacttctgatgtccgtaccctcttatctgcttcttccatcgggctgtgtcagtggaacattagtggtagcgagggaagcccatcattagtttcggaaacgggaaacccaggtgtatgcatatcctcctcgtactgtccccgcagcaatcatatagtagcttcttatagaccaagagttggatcatctgatgatacagtcccgactcagccctcattgactcaaacaggagtcagtaatagtaatagtaatggtgtanatgggatttcatgtttg

SEQ ID NO: 5719 - DNA, 428 bp, Arabidopsis thaliana
  Clone ID: LIB23-008-Q1-E1-G12
acgcgtccgcttgctcgaacaaaaaaattctctccgcgatacttacaaagcacaagtgagctagctttgagaaagattcaatttttgagccttaagattgtgatgggagttgtgtctatttcaagttcagctgcaagatctccactcgggttgggcaacgatcttttgacacatcggtcttcacttaaaaagccatccattgttgcttttaaagccgatgattccagcaattcagctttgatcattcctcctcgtgagcaagttttgattcctgctgaaaagcataatgagaagaagagagaagtaacgaggagaaagccttgtaaaaccccgaaaaaaccgctttccttggaacataattcggctccttcgtgttcgttaggagtagattacaatgaagctgctgcaagacttgaaagcatatacaa

SEQ ID NO: 5720 - DNA, 433 bp, Arabidopsis thaliana
  unsure at all n locations
  Clone ID: LIB23-008-Q1-E1-D12
acgcgtccgcggacgcgtggggccggaatattcggaagcacgaaagaaacaagccacacattgccacactccgccacaagagccgccatgcttgtacgaatcaacactctcctccaaggattttccggtatccgatttgagattctcgaagcaattaccagtttcctcaacaacaacatcactccatctctccccctccgtggtacaatcaccgcctccggagatctcgttcctctctcctacatcgccggacttctcaccggtcgtcccaattccaaagctactggtcccaacggtgaagctttaacagcagaggaagctttcaaattagcaggaatcagctccggattctttgatctccaagcctaaggaaggtctcgcgctagtcaatggcacggcggttggatntgggaatggggtcaaatggtgttan

SEQ ID NO: 5721 - DNA, 454 bp, Arabidopsis thaliana
  unsure at all n locations
  Clone ID: LIB23-007-Q1-E1-H7
acgcgtccgggatgatttggaagcttactattctcactataatttaccggcgatggttcctcctccgccgccgggagtttctccgattccaattacttcagctcattccgtctatttgcctacccatgtctcaattggagctcgcgatgaggttaggacgcttttcgtcgccggacttcctgaagatgtcaagcctcgggagatctacaatctctttcgtgagttcccaggatatgagacttcgcatctccggagctcagatggagctaagcccttcgcatttgctgtgttctcggatctgcantcangctgtancngtgatgcatgctctcaatggaatggtgtntgatcttgaanaggaattctantcntcaaaattggaccttgccaaaagcaaattcccnaantctaaancggtcaannaacaaaatnaatgggtttgggaaaancttta

SEQ ID NO: 5722 - DNA, 420 bp, Arabidopsis thaliana
  unsure at all n locations
  Clone ID: LIB23-007-Q1-E1-H9
acgcgtccgaccacgcgtccgaatggcgactctttatagtcaagttccttctgtatcagcagttttctctctttacacatctttttccgcaatcacgatgctttttcgaacaatcctcanngagattgtgcctaaaagaatcagagagtacatagctatgaaagctgtagacttcttctcttcttactttcaatctgatttcacttttgtgatagagcaacgttgggagtttgttgagaatcagacgttccgtgctgctgaagtttacttacctacctgtctcgccggactttctacaggcaaacttcttgtgggttcaagtaatcttaagaatccagctgctgaagccaaaacttggtanccctgtgaacactnnngattattgataactttgaagggatcatctagaatggantcttc

SEQ ID NO: 5723 - DNA, 436 bp, Arabidopsis thaliana
  unsure at all n locations
  Clone ID: LIB23-008-Q1-E1-A1
cacgcgtccgcgcttgacgaatcattcatcaacacacgcagagagctctgaatctcgaggaagaagatggtgaggatcattcctatggctgcttcctccattcgaccttccctcgcctgcttctcngattctcctcgcttccccatctccctcctctccagaaatctctctcgcactctccatgttcctcaatcacagctttttggtttaacttctcataagcttttgagaagaagtgtaaactgtttaggagttgctgaatctggtaaagcagctcaagctactacacaagatgatcttctcacctgggttaagaatgataagagaagaatgcttcatgttgtttancgtgttggcgatatggaccggacgataaagttttatactgaatgtcctgggaagaaanctccacgtaagcgtgatataccaanaagag

SEQ ID NO: 5724 - DNA, 422 bp, Arabidopsis thaliana
  unsure at all n locations
  Clone ID: LIB23-008-Q1-E1-A10
acgcgtccncccacgcgtccgctccaaaattgttcatttgcatttctccaacttgtaaaatcgagcacctgcatttgggggctttcctcttatctggaaacaaagagagccgccactgatggaatgagtttccgtgaatcatccacccaggtgaaaggaatcataatttggttggtcaactaataataaaaatgggtgaggcaagtgattcagattcgtctgatgagtctttgaaacacaatagcaccccaccactctttagcatctctggcttcntttgtgttgccaaaggaagagactctgatcccggtaggagccctacttctccccttgattttggagtctttggtggcctctttanccccangtcntcntcttcntcaaccctccaacggaaacaaatggtttctcanaaaagtcgg

SEQ ID NO: 5725 - DNA, 458 bp, Arabidopsis thaliana
  unsure at all n locations
  Clone ID: LIB23-008-Q1-E1-A11
aattcccgggccgacccacgcntccaaaccaataagtttatttggtggttttccctccacagcttggtttgatgttgtggacatcaatgaagatggacctgatgatatggaaggattggatgtggctgctgcacatgttgcaaatctgttgtcgaatgagcctgctgacattaaattaggtgttggaggattcagcatgggtgcggcgacatctctatattctgcaacttgttttgctctcggtaaatatggaaatggcaatccataccctatcaatttaagcgcaatcataggcttaagcggctggcttccttgtgcaaagacattggctggcaaactagaagaggaacangatnaagaancgagctgcatcgttgcccattgttgtctgtcatggaaaagctgatgatgttggtaccgttcaagtttggggagaaatcttcacaggcnttgctttc

SEQ ID NO: 5726 - DNA, 439 bp, Arabidopsis thaliana
  unsure at all n locations
  Clone ID: LIB23-008-Q1-E1-B2
acgcgtccgcgaacttctccctcctcctctcactttcaccatggattccgtctccggttacgccgccggagcaggtcagcctcgagtcggtgggaaaattgttcgaccacgacgcaccgctgttgtcaggacgccgtgtgagcgccccgttcagagatcccgagatcctcctcagcaaaaccctagttggatctccaggctcgtttacaaacccgccagcgtaattgcttccggcgccggaaaattcatttcttccgtcgtcttctccgactcttcctcatcttcggaggaggacgaggattcatcttcagatattgatggtgatgaggatgttgagaagaacaatcccgattttactgaagaggacttctgagtgcccaagcaaccaagcattcaacgactcanttctaagcgtgtaattgagcanttctcttgcaag

SEQ ID NO: 5727 - DNA, 431 bp, Arabidopsis thaliana
  unsure at all n locations
  Clone ID: LIB23-008-Q1-E1-C10
acgcgtccncttctggctcctttagcagaattgtccggtgtcgccgtcctccatcggttggttcctctaccaacggtggttggctcttgtctagcttctccgtcgtccgtctccggcggtttaggctagcttttggccggatttctttttcggttttgttttatgttctcgttttctatagatccagtttgattttgctcctttgtgttctaactcttagagggctcaattccttgaacctcctttgtttaaagggctcaatttgtttttcaagcttatcgatttcaattatataaggaacaaattagagttgtggattggggttttctctaatgcctttgagttgggttttatgcaattgaagtcaattgtcatattgggtttttggaaacgagtgtttttattttacttttaagtgttcatggaagttt

SEQ ID NO: 5728 - DNA, 440 bp, Arabidopsis thaliana
  Clone ID: LIB23-008-Q1-E1-C11
acgcgtccggttccttgctcatttcttatctctagaaacctgtctgatttgctccgtcgcctaaaaagtctaaaaccctaagtgtctccgcctcgtagctttacccgattcaacgaagagtgaattcgcgtgagctcaagcagtatcgaaatctaccaatcatggcgagtcaaacaccgaatctcgagtgtcggatgtacgaggcgaaatacccagaggtggatatggcggtgatgatccaggtgaagaacattgccgatatgggagcttatgtttctctcctcgagtacaacaacatcgaaggcatgatccttttctccgagctctctcgtcgtcggatccgaagtgttagcagtttgattaaggtcggaagaattgagcctgtcatggttctccgtgttgacaaagagaaaggttacattgatctgagcaaacgtaga

SEQ ID NO: 5729 - DNA, 442 bp, Arabidopsis thaliana
  unsure at all n locations
  Clone ID: LIB23-008-Q1-E1-C2
acgcgtccgcaaactgctgaagtggtgactaacgcggataaccagttggaagctagcagtggtatgacaactggtccagctacagagaagaagagaaagcgaacgaagggctcaaaagatcacatcaaacaatctactgctgctgctactacaaattcaagaaaaattgtgaatgagataaatgaattacctggaaatggagattgtggtgatgctacttctaaatctcttccaatcccagaaagagaaactcttcaaaatcctcttgtagaagcaatacaaaaagaaactgagttgggtgtgaaaactgtcgaagatgtgggaacaaataatatggaaactgatactctagtgagccacccggaaaatcatttggtggccaacagtgagttgacatctactccagttactgagaagaagaaaaggcaaaagaaagantcaa

SEQ ID NO: 5730 - DNA, 463 bp, Arabidopsis thaliana
  unsure at all n locations
  Clone ID: LIB23-008-Q1-E1-C3
cggtccaaanaatcccggggtcgacccacgcgtccgaacggatccgttttgagatcaagaagaagttcattttatcgtctttcatggcgaaggagcagcacttacgaccttggtttctggatctagtaccggctttggttgttttgctcgccgcagctcatgtcatcgccttgggttactggatttacagattggccactnnnnnnnnnnnnnnnnnnnnnnnnnnnnnnnnnnnnnnnnnnnnnnnnnnnnnnnnnnnnnnnnnnnnnnnnnnnnnnnnnnnnnnnnnnnnnnnnnnnnnnnnnnnnnnnnnnnnnnnnnnnnnncgattaggtgggggttttgtgatcattgatttaagtcgcttatgaggatttcggaaatgtttgcttggaattccgcctaactagaagtgattttgaagatactgggttagatggatcatatcagctcacgaattcgt

SEQ ID NO: 5731 - DNA, 478 bp, Arabidopsis thaliana
  Clone ID: LIB23-008-Q1-E1-C4
acttattcgccgccacggtcaacaatcccgggtcgacccacgcgtccggacactaccactttccattacaatctctttgaacaaacctcctctgaggaagagaatagtaaaaagaatcttctggatatggtagagagaagcgcttattatgcagtccgagtcattctgaaacgtttgctttcggaacacgaaaacgctcggtttgtagtcactggtcacagcttaggaggtgctttagcgatactgtttcccacattgttggtgttgaatgaggaaacagagataatgaagaggctgcttggagtttacacgtttggacaaccaagaatcgggaacagagaggtcgggttattcatgaaagctcaactgaatcaacctgtggatcgatacttccgagtcgtttactgcaacgatatcgtcccgagattgccctacgacgacaaaacgttcctctataaacatttcggactctgtcttt

SEQ ID NO: 5732 - DNA, 431 bp, Arabidopsis thaliana
  Clone ID: LIB23-008-Q1-E1-C5
acgcgtccgctcgagtcctcgtcgctcgtagacggtgccaagcttcagtccttagaccctacggcggtttaaagccctttctttccttctgcagcttacctaactccactgcgccgttccgggattcgttgagagcaaaatccgatggattggctcgggcctatgttaccggagcgccgcctatcgtggaagaaccagacccaaagattgaagaatccaaatctgaggctgaatcgaaggatttaattagttgggggcttctgtggagcttgatgagcaagcacaagctcaggctcagtgtttgcttattgactctccttggatgcagtacttgcactctctctatgcctgttttttctggtagattctttgaagtactgattggggtgaagaccggagcctttgtggcggctgctgaacaaaattgctgt

SEQ ID NO: 5733 - DNA, 436 bp, Arabidopsis thaliana
  Clone ID: LIB23-008-Q1-E1-C8
acgcgtccgatttctctccactcagatttccaattcctaaagatagagagaatgactaaaatctctgttggattgcaacttgtgacaagagattcgagggaaaaactaaacaatatagtgatcaaatcttcactgagactaaaccgatccaatccaaacatctcggagctttgtttccttaaaacatgtcatctctgcaataaacaactccatcaagacaaagatgtttacatgtacagaggagatttgggattttgtagtagagagtgcagagaaagtcagatgttgattgatgatagaaaagaactagaggcttcgacgaagatgatgttggcttcgtacagacgatgtaataacggcgccggaaaaagcgagtctcggaatttgtttgatgatctccggcgacgactcaattaattatagttccttgaggctt

SEQ ID NO: 5734 - DNA, 434 bp, Arabidopsis thaliana
  unsure at all n locations
  Clone ID: LIB23-008-Q1-E1-D10
acgcntccnagtgaagtatcacgactttgatttatttctgtatatctaatgatgcangcggtatcagttgatnanaccaaaaacacggtggtgctacgggcggtgcacaagaatgaanaaggccggaaatctgttgataagttcgaagtgaagacacntagtccgganacnatcaagagcgttgatcggaagcttatggagaaaggtgttcaacggatggatcgtcatccttccgatgggattcctctcaggcgaccaccatcnaagtcaggtcacggnnggaagtacacntgggaaggacctgatcggatggaggattaccagatgcagcnggatccancggcgatngatgaaggacatcntaattacgacgacgaacaggtgaaagaagantgggtgatgacctnnnggttgaaccttgttaaacgagaagg

SEQ ID NO: 5735 - DNA, 406 bp, Arabidopsis thaliana
  unsure at all n locations
  Clone ID: LIB23-007-Q1-E1-H5
acgcgtccgtaagcattaagtcctttaggattccagagctttttattgaagttccagaaactgcaacagtaggatcactaaagaggactgtgatggaggctgtcagtgttttactcagcggaggaatacgtgttggggtgttaatgcatgggaagaaggttagagatgaaaggaaaactctgtcccagactgggatctcatgtgatgaaaatctagacaaccttgggttcaccttggagcctagtcccagcaaagttcccctacctttgtgttctgaagatcctgctgtgccaaccgaccctacaagtttgtctgaacggtctgcggcgtctcctatgctagattctggaattccacatgcagatgacgtgattgattcaagaaatattgtggncaataacctcca

SEQ ID NO: 5736 - DNA, 473 bp, Arabidopsis thaliana
  unsure at all n locations
  Clone ID: LIB23-006-Q1-E1-D4
ccggcccggtcacacaataacgggncgagccacgcgtccanccaancgtccgcccacgcgtccggaaatattcatcgcaattcgtatcggtttaaagtaaaaaaagcaatgggaggtggtaaagacaagcatcatgatgagcaagagaaaggatttcatggttttccaggaggtggacattacccacctgctcaaggaggttaccctcctcaaggttacccaccacaacaagggtatcctccagctggaggctacccacctgccggatatcctcctggtgcttaccctgctgcgcccggtggttatcctcctgcacctggaggttaccctcctgctggctatcctgcacctggagctcaccattcangacattctggtggtggactccngatgcatgatancaggtgcaactggtttanccgcaagcaagctttatggagctcancatgttnggcaagnctcttaaaaaccct

SEQ ID NO: 5737 - DNA, 437 bp, Arabidopsis thaliana
  unsure at all n locations
  Clone ID: LIB23-006-Q1-E1-D6
acgcgtccnctgaactccttggtggcattgagcaactgctgataggtaaatgatgatccaagactcccaaagtttatagagactcctcctcttgagggaagtgtttcatcaggaggtaatgggccaacaccgttgtgtcttcctctaggatgattacttgttgatgatctgtttcttcgacggacacagaaactcactgttattggtaacactatgagaatgagcataagcaatatagaccctccaactgcagcaagtataactattttcgtgtggcttaaccaggaagttttagaactcttcttctcttcatgttgtccgaaattgttgaaagttaagcccttttttgaataaaacaaagtgcaatccgacaacttccgctgcttctctgggccctgaagacaattgttgctcaatgaagctctggttggcacaaa

SEQ ID NO: 5738 - DNA, 470 bp, Arabidopsis thaliana
  unsure at all n locations
  Clone ID: LIB23-006-Q1-E1-E1
gggcccggtcacnaattaacgggtcgacccacgcgtccnnccacncgtccgcacgcacaacaaaaagcaagaatatataccactttgtgaacttcagagatcctatagcaatggcgaacctaccgattcttttggattactggccaagtatgttcgggatgagggctagagttgcgttgcgagagaaaggtgttgagtttgaatacagagaggaagatttctcgaacaagagccctttactcctccagagtaatcccattcacaagaaaatcccggttctggtccacaacggtaaaccggtatgtgaatctcttaacgttgtccagtacgtcgacgaagcttggcccgagaagaanccgttcttcccttccgattcttacnggaaaactcaaggctcgaatctgggctgaattcntggacaaagaaanttcaccgaagcccaaatcaaaggattggggggnaaaaaaggg

SEQ ID NO: 5739 - DNA, 443 bp, Arabidopsis thaliana
  unsure at all n locations
  Clone ID: LIB23-006-Q1-E1-E2
cccggtcanaaataaacgggtcganccacgcgtccncccacncgtccggttcaacaaacaaacaatatggatgttcattagggacatgatcaaaggaacattcctctctgtcatactaggcccacccattgttgctgcgataattttcatagtccagaaaggaggtccttatcttgccatctatctgtgggcattcatgtttatcctgtctctagtgatgatgactatatacccggtcttgatagcaccgctcttcaacaagttcactcctcttccagatggagacctccgggagaagattgagaaacttgcttcttctctaaagtttcctttgaagaagctgtttgttgtcgatggatctacaaggtcaagccatagcaatgcttacatgtatggtttccttaagaacnaaaggattgttccttaagatacgttgantcagc

SEQ ID NO: 5740 - DNA, 445 bp, Arabidopsis thaliana
  unsure at all n locations
  Clone ID: LIB23-006-Q1-E1-E3
taacgggtcgagccncgcgtccnaggagactttcatgattcgtgtcttggagaacaagcttctcttcgttaagaagaatttgatactattcttctcgatttagaaatttcaggggtttgttcttgtttcaggttttgggaagagaatctgtgcgacaagagactgtgactggtggttgctggaacgagaaaacctccaagactggtggtaatgttgatagaaacagggaacaacaggagaatcatggttcaggttatcagcaggatcagagagtacaaccctgtcatctgagttcttccatctattacggtggtcctgatgtttatttccagcctcaaaattccaccagcaactctacgaacaaagaaagatggaggcgaaagatgantccgggaagtgcctcaaagaaggaaattggtggcaanggtcccctgtattaacnaag

SEQ ID NO: 5741 - DNA, 452 bp, Arabidopsis thaliana
  unsure at all n locations
  Clone ID: LIB23-006-Q1-E1-E5
attcccgggncgacccacgcgtccncccacgcgtccgcccacgcgtccgcggacgcgtgggggagagtgagagaagagagaaacatttcgagacaaatggccgccgccgctgctcgtcctctcgtcaccatccaaaccttggatggtgacatgtccaccgatcaatcctccaccgtcgtacttcccgacgtcatgacggcgccagttcgaccagacatcgttaacttcgttcacgcccaaatctccaacaacagccgtcagccatacgccgtatcgaagaaggccggtcaccagacctccgccgagtcctggggaaccggacgtgccgtgtctcgtatccctcgtgttcccggtggtggtactcaccgtgctggtcaagctgcgttcggtaacatgtgtcgtggtggtcgtatgttcgctccaaccaagatctggcgccgctggcaccgtcg

SEQ ID NO: 5742 - DNA, 476 bp, Arabidopsis thaliana
  unsure at all n locations
  Clone ID: LIB23-006-Q1-E1-E6
tactcgcccgncagtaaagtcacaaattcccgggcnccacttagagagaagcagacagaacataactaaaatcgagaaaaatggcaaacagtggtgaaggtaaagtggtgtgtgtaacaggagcctccggttacatcgcctcatggctcgtcaagttcctacttagccgtggctacactgttaaggcctccgtccgtgatcccagtgatccgaaaaagacacaacacttagtttcactagaaggtgcaaaggaaagacttcacttgttcaaagcagaccctttggaacaaggttctttcgactctgctattgatggttgccatggagttttccacactgcttctccattttttaatgatgccaaagacccacaggctgaacttattgatcctgcggtcaangggacgcttaacgttttgaattcgtgcgccaaaacctcctccggtaaaaagggttgttgttaacctcccccangg

SEQ ID NO: 5743 - DNA, 438 bp, Arabidopsis thaliana
  unsure at all n locations
  Clone ID: LIB23-006-Q1-E1-F11
acgggtcgacccacgcgtccgaaacacaacaccaaagcctttataactctttctggggtttttaattctctcaacgaacaaaaaaaaaaactcaactaatattctccatcctctttcttcagatttaagagaaaccttatcgttatattctctcttctcttttctttttgactcccacaagaagaaagcaaatttctttttctcaggattgcttgaaaactgtagaaatctttaaggtttttttacaccaatannnnnnnnnnnnnnnnnnnnnnnnnnnnnnnnnnntctattcataaaaaagacaggtaatctcaactccgnnnnnnnnnnnnnnnnnnnnnnnnnnnnnnnnnnnnnnnnnnnnnnnnnnnnnnnnnnnnnnnnnnntgggtgcttttttaacancttgggcctgggaaaactttgnaatcccca

SEQ ID NO: 5744 - DNA, 465 bp, Arabidopsis thaliana
  unsure at all n locations
  Clone ID: LIB23-006-Q1-E1-F12
aatttattcgccgccacggtcaanaatcccgggtcgacccacgcgtccgngcatcttctaagataaatctctccccgattctctctttttctcgctagatactctttttcttcanttagggtttcttctcgcttgccttttaattctctccagctgatctgatctccgttaccgatggagtctactgctaacgcactcgtcgtcaangtgagctatggaggtgtgcttaggcgtttcagggtgcctgttaaagctaatggacagcttgatcttgaaatggctggtcttaaggaaaagatcgctgctctctttaacctctctgcggatgctgaattgagtctgacttactctgatgaggatggggatgtggttgcccttgttgatgacaacgatctctttgatgttactaatcagcgtcttaagttctaaagatnaatgtgaacgctggggtgtccactaactccg

SEQ ID NO: 5745 - DNA, 456 bp, Arabidopsis thaliana
  unsure at all n locations
  Clone ID: LIB23-006-Q1-E1-F2
nggcccggtcaagaattaacgggtcgacccacgcgtccncccacgcgtccgcccatcttgagtttagcaggaaagagaggatggctgaccattatgagtctgtgaaggaagattatccttttgtggagttgggatcaagagtggtggatgaacgagatgatcactacaggaacttccgtaacgaagaaagaaaggttgtttatttggataacaaatgtcaagtactgagaaaggattatctatatgatggtgttgacagtaagaagaatcttgatttcagtgaaccatatgctgtagtagatcgagatgataaagcttcacagagcataacacgttgcttaaataaagaaagggaagcatatttggataatgagagaatgctgttttttcagatgataaaagacaggaactgnnaaacgagtatcaccctggcaatgatggtangatacattcctg

SEQ ID NO: 5746 - DNA, 431 bp, Arabidopsis thaliana
  unsure at all n locations
  Clone ID: LIB23-006-Q1-E1-F9
acgcgtccanccaagcgtccgcttgttttctcctccttgccgttaagttccattgaannnnnnnnnnnnnnnnnnnnnnnnnnnnnnnnnnnnnnnnnnnnnnnnnnnnnnnnnnnnnnnnnnnnnnnnnnnnnnnnnnnnnnnnnnnnnnnnnnnnnnnnnnnnnnnnnnnnnnnnnnnnnnnnnnngacttttgaagttttgatctgaagaaaagaggtttcgttgtaattggtttatacatcatgtctgggtcgagtatgtataagacgaagctttgtattctgttcaataagactggtgattgttcgaggccgaattgtacttttgctcatggaaatgctgagcttcgtcgtcctggcgaatcttcctttacaggaagactcacaatatgggatagtgacttaagagatagacgtcacaatatgnta

SEQ ID NO: 5747 - DNA, 482 bp, Arabidopsis thaliana
  unsure at all n locations
  Clone ID: LIB23-006-Q1-E1-G1
ttactnggcccggccgggtcaangaatnaacgggtcgaggcncgcgtccgnaccttgaaaggntacgacaaagtatccgaccaagaaaaccaaatccatcatcatcatcattctccacttncaaaaccatcatcattttcccgtaaaaccctaatcgccaccggntccgtcgtatctctcctcttaatcctctccgtcgtcgctttaaccgccggagctttcactcactctcctccacaccatccacctatctcctccgcctctctcaagtcactatgctccgtgactcgttacccagagacctgtttcaactctctatcatcttctctcaacgaatctgattcaaagcttaaccctgaatcaatcctcgagctttctcttcgagtcgctgctaaagagatctcaaacntctctatctctttccggtnaatcaacgatatgcctgaaggaccngcgggtggtgantggtgtgaaacctttca

SEQ ID NO: 5748 - DNA, 432 bp, Arabidopsis thaliana
  unsure at all n locations
  Clone ID: LIB23-006-Q1-E1-G3
acncgtccgattggccaaggctttggccggtcagacaaatgagagtttcttcactgccaacgctgacgcattgtcttcgaggaggtcttccccaagagtcaccaatgagtctgtccagaaggctgctgctgctttgaagggatctgaccaccgccgtacaactgaagttagcgcaaggctagatgctcagcagaagaagcttaaccttccaatcctcccaaccacaaccattggatccttcccacagaccgtggaactcaggagagttcgccgtgaatacaaggccaagaaaatctctgaagaggattacgtcaaggccatcaaggaagagatcaagaaagttgttgacatccaagangaccttgacattgatggttcttgttcacggagaacctgagagaaacgacatgggtgagtacctttgngaacaaa

SEQ ID NO: 5749 - DNA, 478 bp, Arabidopsis thaliana
  unsure at all n locations
  Clone ID: LIB23-006-Q1-E1-D3
ttccacctgntccggcccggtcacaaatnacgggtcgacccacgcgtccacccacgcgtccgcacgcgactccttgtgagattctccgattgcttcgcctgagtttctgggttaactctccacgccgtcactttgatctttgcttttccgatctttagggtttttgtttagggaattgtcgaagactctgctctaacatgtctggaagaaaagaaacggttttagatttggccaagtttgtagataagggtgtgcaagttaagctcactggtggtagacaagtgactggaactcttaaaggctatgaccaattgcttaatcttgttcttgatgaagcagtcgagttcgttcgagatcatgatgatcctttgaagactacggatcagacaagacgccttggtttgattgtttgccgtggaacancgtgatgcttgtctcaacaaccgatggcancgaagaaatcgctaaaccgttcgtt

SEQ ID NO: 5750 - DNA, 437 bp, Arabidopsis thaliana
  Clone ID: LIB23-006-Q1-E1-A8
acgcgtccgcccacgcgtccggataactccgagaaatctattgagctcttcattagtattggtttggacgagaaaacagctcgtaataccatcaataataacaaggtcaccgccaatctcaccgccgttatccacgaggctgctgttactgatgggtgcgatcgaaatactggcaatctgttatactcggtcgctactaagttccctacaaatgctcttgtgcatcgccctacattgctcaagtacattgttaactctaagattaaaactccagcccaattggaagctgcatttgccttttttgccagtaccggtcctgaggactttaagctgaatgagtttgaagaggcatgtggtgttgggattgaagtttccccagaagatattgagaaagcagttaaaggaatctttgaagagaataagaaaacaatattggg

SEQ ID NO: 5751 - DNA, 427 bp, Arabidopsis thaliana
  unsure at all n locations
  Clone ID: LIB23-006-Q1-E1-B1
gcgggccgagcccgcgtccgcttgcatgcaacacagtttgtgacttttgttttgttttacgtcaggacatatttctagcaggagttggaacaagctccactacattgatatgggcgatgaccgagctgatcagaaacccgagagtgatgaagaaagttcaagacgagattcggacaacacttggggacaagaaggagagatcacagaagaagatttaaaccagcttcactacttcaaggctcatggccaaagagatatccanggttacaccaanaagtccacttttgctcccangagagacattgtcncatgtcaagatccaaggctacnatattccngctaaaacacagatcatgatcaacgcttacgcnattgcacgtgatccaaaactatggacaaaccctgatgagtttancccgaaaggttc

SEQ ID NO: 5752 - DNA, 392 bp, Arabidopsis thaliana
  unsure at all n locations
  Clone ID: LIB23-006-Q1-E1-B10
acgcgtccgaacgaaagacgttgcagaggagaaaattcaaaacccacctccggagcaaattttcgatgactccaaancccttactgttgttgagaaacctgtagaagagcctgcaccggcgaaacctgcgtctgcatcgctcgatagagatgttaagctagctgatttgtcaaaggaaaagagattgtctttcgtcagagcgtgggaagaaagcgaaaagagcaaagcagagaacaaagctgagaagaagattgcagatgttcatgcttgggaaaacagcangaaagcagctgtcgaagcgcaactcaagaaaatcgaggagcaactagagaanaagaaagcacgagtatgcaagagaggatgaataataaggttgcatcgattcacaanga

SEQ ID NO: 5753 - DNA, 442 bp, Arabidopsis thaliana
  unsure at all n locations
  Clone ID: LIB23-006-Q1-E1-B11
acgcgtccgctagttggcgcaggaatcaagcctacttcaattgtgagctacaatcacttgggaaacaacgatggaatgaatctctcagctccacagactttcagatctaaggagatctccaaaagcaatgtcgtggacgatatggttgctagcaatggtatcctctttgagcctggggaacacccggaccatgttgttgtcatcaagtatgtaccgtatgttgcggatagtaagcgagccatggacgagtacacatcagagatattcatgggagggaagaacacaattgtgatgcacaatacctgcgaggactctctcttagctgctccaatcatcttggatcttgttctcctcgcggagctcaacaacaaggattcagttcaaatccgaagggaaaagggaaagnttcactcctttcaatcctgttggcaacataatcanc

SEQ ID NO: 5754 - DNA, 449 bp, Arabidopsis thaliana
  unsure at all n locations
  Clone ID: LIB23-006-Q1-E1-B2
cgggncgacccacgcgtccntgatgatttaagtcttgcgatcaagaaaactcaaatcttaaaactttctggaaaaacaaaaatgtcaggaagaggaaaaggaggaaaagggttaggcaaaggaggagcaaagagacacagaaaggttctaagagacaacattcaaggaatcacaaagccagcgattcgtcgtcttgctcgtagaggaggtgtgaagagaatcagtggattgatctatgaagaaacgagaggtgtgttgaagatttttctggagaatgtgattagagatgctgttacttacactgagcatgcgaggaggaagacggtgactgctatggatgttgtttatgccttgaagagacaaggaagaactctatatggatttggtggttgatcaattgagatctgggtttccggtgaatgatgatgattttaatcctgcatttnaaa

SEQ ID NO: 5755 - DNA, 437 bp, Arabidopsis thaliana
  unsure at all n locations
  Clone ID: LIB23-006-Q1-E1-B3
cgtccgtttttntgatctgagaaaaaaaatggcgaatggagctaatagagtggatctcgacgggaaaccgatacaaccgttgacaatatgcatgatcggcgccggaggtttcatcggttcacatctctgtgaaaagctcttgaccgagacgccacataaggtgcttgcgctcgatgtttacaacgataagatcaaacacttgcttgagcctgataccgttgaatggagtggtcggatccagtttcatcgtatcaatattaagcatgattcgagacttgaaggtcttgttaagatggcggatctgattataaatcttgctgcgatctgtactccaagctgattacaatacacgtcctcttgatactatctacagcaatttnattgatgcgcttccagttgtgaaatactgttcctgagaacaacaaacgtctcaatcn

SEQ ID NO: 5756 - DNA, 431 bp, Arabidopsis thaliana
  unsure at all n locations
  Clone ID: LIB23-006-Q1-E1-B6
acgngtccgcccacgcgtccgctcctgtttccgttttactcgacatcgttccgacgacttttgacctggaatcgacgcagtgacttcaattcaactattgcacttggtttgttggcaatggacaaaggagcacctcctagtatttttgtgaatgatgggtcattcatggaaagattcagacagcttcaacaggagaaagataaagacaaggataaggttgtccaagttgaggattctaagccggtgaagattatatcaaatcccaaacctgctgctaataaaatttccattggattaaagcccaatgatgcccagaagaaaggtggtaagcttgctttcagcttgaagcaaaagtctaagcttcttgcacctcctgtgaagcttggtacagaagaagatgaagatgatgaagatgttaacatgnacaaagg

SEQ ID NO: 5757 - DNA, 436 bp, Arabidopsis thaliana
  unsure at all n locations
  Clone ID: LIB23-006-Q1-E1-B8
acgngtccgcggacgcgtgggttgtcatggaatttatacattccactcctcaaagtacttgaatatcttccacgggggagtccttcggaagcatgcttgatgaaaatatttgttgccactgtggaaacaatactcagtagaacttttccgcctgaatcttccagggaactaaccagaaaagctagatcgagttttaccacaagatcagcgaccaaaaatcttgctatgtctgagcttcgtgctatggtccatgctctctttttagaatcatgcgctggtgtggaattagcttcacgcctactttttgttgtgttgactgtatgtgttagccatgaagcacagtctagtggtagcaagagaccgagaagtgaatatgctagtactactgaaaatattgaggcgaatcaacctgtatctaacaatcaaactgctaacc

SEQ ID NO: 5758 - DNA, 432 bp, Arabidopsis thaliana
  unsure at all n locations
  Clone ID: LIB23-006-Q1-E1-C12
acgcgtccgcccacgcgtccgaaaaagaataacaatccgacgagaaagaggaaagatcaaatcatctaagtgctggtgccttgattctgcagttctccattttaatccaacaaaaaaagaagctgaatcgacggtatagattcttcaaagaagcaatcataacgcaattgattatatccccaaaagaaaaggtttttaaactccaaaaatgcagactccaaaatcaagtgattgtgattgtgtgtgataggccaggatcattggagctgccacaaaagaagtctcctttaccagctcccaaagttgttaggagactcaaaccaagcggagcagaatccgattcaaaaaccaagacaatatcgaaaactcaaatcccgaaagtataactgatngtcgctctgcaagaaaccctcccaatgagaatcagaagaa

SEQ ID NO: 5759 - DNA, 397 bp, Arabidopsis thaliana
  unsure at all n locations
  Clone ID: LIB23-006-Q1-E1-C4
cggtcaaaganataacgggtcganccacgcgtccgaacgaattcttctcaggtgttaaagaatgtctcggagatatgatagccgtaccacaatcttctcgccanaaggtcgtctttaccaggtagagtatgctatggaggccattggaaacgccggttctgcgattggaatcttatccaaagacggtgttgtgttgatcggtganaagaaagtcacctcaaagcttcttcaaacctcaacctctgctgagaaaatgtacaagattgattgaccatgttgcctgtgctgttgctggtataatgtcngangctaacatacttatcaacacggntcgagttcaagctcaacgttacaccttcatgtaccaagagcccatgccggttgagcaagctggntc

SEQ ID NO: 5760 - DNA, 435 bp, Arabidopsis thaliana
  unsure at all n locations
  Clone ID: LIB23-006-Q1-E1-C7
acgcgtccncnnnnnnnnnnnnnnnnnnnnnnnnnnnnnnnnnnnnnnnnnnnnnnnnnnnnnnnnnnnnnnnnnnnnnnnnnnnnnnnnnnnnnnnnnnnnnnnnnnnnnnnnnnnnnnnnnnnnnnnnnnnnnnnnnaaatcgtttcatcttttttccttcttctaattttttttaggtttttaattaacttttgcttcaagttttcttctatagatttcttactcagaaaagtttcgaattcgaccctgtagcttagttgttgtttataatttcttgtgatcattcacagtacaaaaaaactaattcacccaccgannnnnnnnnnnnnnnnnnnnnnnnnnnnnnnnnnnnnnnnnnnnnnnnnnnnnnnnnnnnnnnnnnnnnntccgggaaatttgatctctttacctttcgtcattattaagtangga

SEQ ID NO: 5761 - DNA, 465 bp, Arabidopsis thaliana
  unsure at all n locations
  Clone ID: LIB23-006-Q1-E1-C8
gtacaagtcanaaattcccgggccgacccacgcgtcnacccacgcgtccgccgtgtgctgagaaccagaacgaaaccctagcaaaatatcgccatgggtaaggtcaaaggaaagcatcgtttggataagtactatcgtctcgctaaggaacgtggattccgttctcgagcttcctacaagcttcttcagctcgacgccaagtactctcttctccactcagctcatgccgttctcgatctctgcgccgcccctggtggttggatgcaagtcgccgtcgagaaagttcccgtcggcagcctcgttctcggtatcgatcttgtcccgattctccctgttcgtggctgtgttactatgacgcaagatatcacaaggactgagtgtaaatcgaagatcaagcaagtgatggagnagcatggtgttagtgcttttaatttggttctgcacgatgggtctccaaatgttggt

SEQ ID NO: 5762 - DNA, 446 bp, Arabidopsis thaliana
  unsure at all n locations
  Clone ID: LIB23-006-Q1-E1-D1
acgggtcgggcncgcgtcgatacatctcagaaangganctgcatcaatggggaacaataatgattttggggcnttcaatgagaaagttacaatctctccaacttctacttcctcgtcgcctccttctctacagggtcttactttcgccattaaagacatttttgatgtggaaggacgcgttaccggttttggtaacccggattggttaaggacacactcggcagctacttctacagctccagtagtttcatctctcttagaagctggtgccacagctttgggtattaccattatggatgaaatggcttacagtataaacggagaaaatgcgcattatgggactccgagaaacccgattgctttcgatagagtgcctgggggatcatcgagtggctcanccgtanctgtanctgctcgtcctgtggattttccaatgggactganaa

SEQ ID NO: 5763 - DNA, 414 bp, Arabidopsis thaliana
  unsure at all n locations
  Clone ID: LIB23-006-Q1-E1-D2
cgggtcganccacgcgtccgcccacncgtccggagctttattcttgccctagagataccgagcgggagattccagattgagagcagcttcgagtctctctctcctcgccgttccttttcgcttcttcaagtttcgttgccagagagattctaggtattgaagttatagaatggactttgatgagtatgagtacttagagaagacagttgaaaatcctcacctggagaatgaagttggtaatggtggtggtgatgagaaagtcaaatctgaagggaaagagaggagtaggagctcaaggcatangggtgacaagaagaaggagagggatgaagatgaggatggtcggcgttctaagcggtcgagatcgcatcaccgttcacgttctaaggacagatagaaggataagcataaaat

SEQ ID NO: 5764 - DNA, 434 bp, Arabidopsis thaliana
  unsure at all n locations
  Clone ID: LIB23-006-Q1-E1-A6
acgcgtccnctgctctcggctgataatagctggacatgataggaggatatatattgttgacgttggtagcatggagttattacattcttttacaccacgccaggagggacaggaaggtgaatctcctcctcatgagcctccaattacaaaactgtatactagctcaaatgatgattggttagctgctatcaattgctttggggacatatatgtgttcaacctggaaacgcagaggcagcattggttcatatcaaggcttgatggtgcatctgttgcagccgctggttttcatccgagggacaacaatgtgattgtgatctccacctcttcaaaccaggtctttgcattggatgtggaggctagagagttgagcaagtgggcattgctgcanactttttgtctgccaaagagctaccaaaattttcctgggtgan

SEQ ID NO: 5765 - DNA, 453 bp, Arabidopsis thaliana
  unsure at all n locations
  Clone ID: LIB23-005-Q1-E1-G1
cgggncgagccacgcgtccaagcgttaaaatggcggtatcgtacaatgcattagctcagtctttagcgagaagtagctgcttcatccccaaaccttattcctttagagatactaagctgagaagcagatccaatgtcgtattcgcgtgcaatgataataagaacattgctcttcaagctaaggtagataacttgttggaccgcattaaatgggatgacaaaggattagctgtggcaatagcacaaaacgttgatacgggagcagtattgatgcaaggctttgttaatagggaggccctctccacaaccatcagttctcggaaagctacattctttagtcgatnaagatctaccttaaggactaagggagagacatccaataacttcatcaataatcctgatgtgtaagttgantgtgatcgtgaatcgattatttnccttgggacaactgatg

SEQ ID NO: 5766 - DNA, 464 bp, Arabidopsis thaliana
  unsure at all n locations
  Clone ID: LIB23-005-Q1-E1-G11
aactgcccgcgggtcaggtaaaggtanaganttcccgggncgacccacgcgtcnggatcagagacgtgccatgactttcccgagagatagtatgatttaccgagaaaggcattgcgctcctgagaatgagaagctccattgtcttataccggctcctaaagganatgtgacacctttctcttggcctaagagtcgagactatgtgccttatgctaatgcgccgtataaagcattgactgttgagaaggctattcagaattggattcagtatgagggagacgtttttagattccctggtggtggaactcagttccctcaaggtgctganaagtatatcgatcagcttgcttccgtgatanctanggacgaacggaactgttaggactgctttggacactggttgtggggttgcaagttggggagcgtacttanggagcagatnatgtgcgtgcaantgtcctttg

SEQ ID NO: 5767 - DNA, 460 bp, Arabidopsis thaliana
  unsure at all n locations
  Clone ID: LIB23-005-Q1-E1-G2
ttggntcagccccggtacaganaacccgggccgacccacgcgtcnancttttttaaaggaccctaatcactctgagtaccactgactcactcagtgtgcgcgattcatttcaaaaacgagccagcctcttcttccttcgtctactagatcagatccaaagcttcctcttccagctatggctgcttcagtacactgtaccttgatgtccgtcgtatgcaacaacnnnnnnnnnnnnnnnnnnnnnnnnnnnnnnnnnnnnnnnnnnnnnnnnnnnnnnnnnnnnnnnnnnnnnnnnnnnnnnnnnnnnnnnnnnnnnnnnnnnnnnnnnnnnnnnnnnnnnnnnnnnnnnnnnnnnnnnnnnnnnnnntctgagagagctnagcanagaaaacacaccaattggtccttcttctcctggatttnaaccaattccaaccttttgaagaaagcctttctaaaa

SEQ ID NO: 5768 - DNA, 487 bp, Arabidopsis thaliana
  unsure at all n locations
  Clone ID: LIB23-005-Q1-E1-G4
cttgntcagcccggtacagacaacccgggccgacccacgcgtcnngaccaaacaagttccgggtgttttgaaagaaccccgacaatggcgtggaacgtgttcaagttctgcacagcacttcgcgccttgggttcgatcatgatcttaattgttatcgggatcatcggattcacatactacgccgttgtcgtcgttaattacggacctgctctactgatcggtggtgtcgattcattactatctgttctcgtcttagcgttcttccactttctgcttataatgctactgtggagttatttctctgttgttgtgacggaccctggtggtgttccaacgggttggaggccagaattagacatagagaaaagcgaaggaaaccaagctttgantggagaagcttcggttgganatcctccgtcncaatggtgtaagatattgtnaaaaagtgaatcaataataaaccgccccgtttcaacaattgttaatn

SEQ ID NO: 5769 - DNA, 445 bp, Arabidopsis thaliana
  unsure at all n locations
  Clone ID: LIB23-005-Q1-E1-G5
acgcgtcnncaaatttgtgtgatcttctccagaagaaacttgaggaactttaagctaaacctctgtagttttcagattgattcgttggtggaaagcgtctaaattttgcgtaaatggcggcagctcttgtacgcagattctgccggggatcatcttttccggtctctggtcatggatataggatgctatcgacggttgaaaatgtatctgaaagtggtaaatcgatgaatctatactctgctattaatcaagctcttcacatcgctttagagaccgatcctcggtcttatgtttttggggaagatgttggatttggtggtgtcttccgatgtacaacaggattagctgaacgttttgggaaatctcgagttttcaacactcctctctgcnagcaaggcantgttggcnttggcantgggttaaccgcaatggaaatcnaattatt

SEQ ID NO: 5770 - DNA, 468 bp, Arabidopsis thaliana
  unsure at all n locations
  Clone ID: LIB23-005-Q1-E1-G6
aantcccgggccgacccacgcgtcangatagaatcacaaaaaggaaagagaaaatgagaggagaaatcgatgaagctaatcttgctcctgaaacttcacttattaacaaagagaatcaagactcatcggcgacaataacaactactctcttgctcaccacttttgtagccgtgtctggttcctttgtctttggctcagctataggatattcatcacctgttcagtcggatttaaccaaggagttgaatctctctgtggcagagtactcgctcttcggttcgattctgacaattggagcaatgatcggcgcagctatgagtggacgaatcgccgatatgataggcagacgagctactatgggtttctcggagatgttttgcattctcggctggttagcaatctaccttccnaaggttgcaattggctttaactttgggaanattcctgggttgggttatggaaatgggc

SEQ ID NO: 5771 - DNA, 446 bp, Arabidopsis thaliana
  unsure at all n locations
  Clone ID: LIB23-005-Q1-E1-G8
anagaantcccgggccgacccacacgtcagctcgactgttttcttcgtctactatttgttccttttggatattcttcggacttttcgttgatttgattttcaagagagagagtttgaacaaggaaggattgaactatggaagatgcatcagagactagctactggtgtcacatgtgctcccgatcggtgattccattgattcaagacgaaatcatcaaatgcaatttctgtcaaagtggttttgttgaagaaatggataataatgatgaccatcaggctgctgattctctctggactcctatcttgatggagatgatgaacaacaatcacgaccaacattctacaaatcaggaagactcagaatctattcttggaagatgagacgaagacgaagatgatggtgatgatggtgatnagaacaagatggagaaattgtatnaccctca

SEQ ID NO: 5772 - DNA, 472 bp, Arabidopsis thaliana
  unsure at all n locations
  Clone ID: LIB23-005-Q1-E1-H10
agcgnccaggtaacggtcaaagnattcccgggctttatttcctctancaaaccccaacaactacctgaagactattctctctcaaaagcttacggaacgaaatgactcaccgtatagctcctcgatgtttctccaccatcatgcttctatgtcttctatatacttcacctctagatgttatagctcagggtcagggaggacaaggtgatataccagttgttaatcctacagctccaggtggtagtaccacaacaccaaccataacacaaccgtcaccgccttccttgacattcccaggtccaactacaccaactggtggttatccacctcttgacggtaccacgccaaccggtggttacccaccactttatggtactacaccgccannnnnnnnnnnnnnnnnnnnnnnnnnnnnnnnnnnnnnnnnnnntacacctggtgggaggtggaggtggaggtggtgacactggtg

SEQ ID NO: 5773 - DNA, 456 bp, Arabidopsis thaliana
  unsure at all n locations
  Clone ID: LIB23-005-Q1-E1-H4
ccgggccgncccacgcgtcnactctntcgtcctcagatagtgcgcattgcagaacacaaaatctctacaagaaaaccccaaaaatggacggactttgctacgtcatcttcatcatcttctccctgctatcctgcgctttctctcccttatcatacgcctctccggccactttcagtcgccgtcaccttcttcaagctcctgtaactgannnnnnnnnnnnnnnnnnnnnnnnnnnnnnnnnnnnnnnnnnnnnnnnnnnnnnnnnnnnnnnnnnnnnnnnnnnnnnnnnnnnnnnnnnnnnnnnncaattttgcgaaatttccgggggaanaaccncggtccnngtcttccttngttccccnaaacggaaaaatccttccgntaaatccttatccngggaanncggccgtggcccnccggnggaaaattaatcgncttgggccttttcttcaaagg

SEQ ID NO: 5774 - DNA, 441 bp, Arabidopsis thaliana
  unsure at all n locations
  Clone ID: LIB23-005-Q1-E1-H8
acgcgtcngcccacgcgtccgcccacgcgtccgcaaaaggcttcgttatccccaagccatacgagagattacgagtaagtgatacgttagccaaagagtgtcaccaattgattcaatatcccnnnnnnnnnnnnnnnnnnnnnnnnnnnnnnnnnnnnnnnncgatttttataaaaatggcggcggatgctctgagaatctcgagttctagttctggttcgttggtttgtaatcttaatggttcacaaagacgacctgnnnnnnnnnnnnnnnnnnnnnnnnnnnnnnnnnnnnnnnnnnnnnnnnnnnnnnnnnnnnnnnnnnnnnnnnnnnnaattcctcagtttctgggtacttctcgtattgggctangttcttccaagctctcacaaaagaaagaaacaattctcaatcttcgctgcaactgaaaccgaagngaaa

SEQ ID NO: 5775 - DNA, 473 bp, Arabidopsis thaliana
  unsure at all n locations
  Clone ID: LIB23-006-Q1-E1-A10
aattcnattgntcgcccggtcttggtaacccgggncgacccacgcgtccagtccattgctanccaggggagcttcaatgttcgtaaagaagttgaaaacttggtagtagcgtncatgacaccaangctgataagtaaccttaaaccanagacgcaatcaaagcttatagataatctcaacgccttcaatcttgattggtttaagtccttcttaagactctctacttggaaagctgtcaccaaagncctcaagtcacgcgaagaagctatccaggtgatgaaagacgttctcatgatgagaaaagagacgcgagagangcaagaagacttccttaanacgcttctagaagaantggngaangacggtagctttttcgactaangatcggctatnaatctcatcttccttctggcgtttgccttgagagaangtacctccaagttgtactgctttggccgtnaaagttcaaatcc

SEQ ID NO: 5776 - DNA, 453 bp, Arabidopsis thaliana
  unsure at all n locations
  Clone ID: LIB23-006-Q1-E1-A2
tctgcccggtcacacataaacgggncgagccacgcgtccnatcaantagttttgtttttcctctttcaaaaatgcatttctcttcgtcttcaacatcgtccacttggacaatcttaatcacattgggatgtcntatgcttcatgcatctttgtccgctgctcaactcacccctaccttctacgataggtcatgtcctaatgtcactaacatcgtacgagaaaccattgtaaatgagttaaggtcggaccctcgtatcgctgcgagcatccttcgtcttcacttccacgactgctttgttaatggttgtgacgcatccatcttgttagacaacaacgacatcatttcgaacagagaaagatgcgtttgggaaacgcaaattcggctcggggatttccagtgattgatagaatgaaanntgcggttggaaaaggnatgcccaanaaccgtttcat

SEQ ID NO: 5777 - DNA, 460 bp, Arabidopsis thaliana
  unsure at all n locations
  Clone ID: LIB23-006-Q1-E1-A3
atagtcnggaggtccgggccgngtcngnccacnagtccgcggacgcgtgggcgaagaacgacgagctcgagattattgattttcaagtggagattgaatcagtgataatggacaatgagacgaaagcaaccaccttcagcaaatcaacagggcttcctaggaagagattctacagagcaagagctcatagtaacccacttagcgattctcacttcccaatccccatatctccagctcatgtcgactattcacttcacttccccaaattcgttgaagctgacaacaaattcatcaagaaggttgagtttgcggatatcggatgcgggtttggtggcctactaatctcccttgcgacgcttttccccgatacgctaatgatcggtatggagctcagagataaangtgacgggagtacgttnaagaacggatcttancttttaaggggaacaaactccggggg

SEQ ID NO: 5778 - DNA, 442 bp, Arabidopsis thaliana
  unsure at all n locations
  Clone ID: LIB23-006-Q1-E1-A5
caganaggtcccggggccgacccacncgtccanccacgcgtccgcccacgcgtccggcagtgactgctgctcaaggacctcaggatacccaggccctgaacggaagattggcagcacctagttcaccatttgatgatgactctgatgatgttgatgagcaacctcttgttagacacaggccaagacgtgcagcatccggatctctggctccacctaacgctgatcgttcccggagtgggagtcctgaagaagaacatgcaagtattaatccagcggagcgtggcagtgggtttccttctgagtggggaggcatttcatctgaggaacatgatgaagctgtcatgctcgaggcaaccatgtttggtggcattcctgaaactggatataatcatcttccattcttacctcctcaaccgaaggcccaancaagtcaacctcaact

SEQ ID NO: 5779 - DNA, 431 bp, Arabidopsis thaliana
  unsure at all n locations
  Clone ID: LIB23-005-Q1-E1-F5
acgcgtcnnggaaaacagctatatctattttcagtggaaaatttgccaagtcctcccaagttactgatacttcagccaataaagctgaggagaaggtcacagaggcaagatattcaactcattctttggaagaagttgctgggatgatacgcaagactatttctgtctatgaagcaaaggtgaacagcacattttgtgattttgatgaatcatgcattctccgcccatttatgagtgatgccattaacgaagtatcaaaagcatgccaagcttttgaagccaaagagtcaacgccccacagtgctgtcgttgcactgagaaaaatccaggcggaaatcactaagatttatatccaaaggctttgctcttggatgaagggcctccacggaaggaattcaaaagaggaacntggatccggttccaatcctgaa

SEQ ID NO: 5780 - DNA, 444 bp, Arabidopsis thaliana
  unsure at all n locations
  Clone ID: LIB23-004-Q1-E1-A8
acgcgtccggtttttgctttatcgtaggcttccttcatttgcacgaacaacaacaacaacccttctctgcaaatctatggagcctgcgataacagcgacttcttcttcttctttcggtggtggctcttctcgtctcgccgctttagcccagcaacttcgccaatacaagcccccaccttcttcatcgttcgatgactccgaggagatgcagacagatcaggagaccgctgggaaagtcgtttctcaggttgggtttcaggaatctattgctcctctttcgaaagaccctgataggtttaaacccaagagagccgctgtgttgatctgtctctttgaaggagatgatggtgatttgcgtgttattcttactaagagatcttccaaattgtctactcactctggagaagtttcattgccaggtggtaaagcggaggangatgataa

SEQ ID NO: 5781 - DNA, 461 bp, Arabidopsis thaliana
  unsure at all n locations
  Clone ID: LIB23-004-Q1-E1-B3
gaattaacgggccgaagccacgcgtcanctcacnctttgtgcaagaaaccttgagagcttaaaaattcttcacttgggtctcttctctctctcttctcttgcgaccattccgttcgatccatatatcaaagcttgatttagttggttttcaatgggggacagtcagtactcgttttctctcaccaccttcagcccatcagggaagctggttcagatagaacatgccctaacagctgttggatcaggccaaacatcacttggaattaaagcttcaaatggagttgtcattgcaactgaaaagaaacttccttctatattggttgatgaagcgtctgttcaaaagattcaacatttgactcccaacattggaactgtttacagtggtatgggtcctgatttccgagttcttgtgcgaaagantangaagcatgctgagccantatccccgtctgtacnaggaa

SEQ ID NO: 5782 - DNA, 440 bp, Arabidopsis thaliana
  unsure at all n locations
  Clone ID: LIB23-004-Q1-E1-B5
acgcgtccgaaaaattaaatatccatccaactgtgtgaattagatattttctcttatctcttctctttgttcgatcaaaaattcaattttcccgagatttttgtttctctcgatcgattcaacacctaaagattgaagcttttgctcgtgggttatgtaaagtttccacctttcgtcttctttctgatctgtgagcaaaaatgggacaacagcaatcaaaaggggaattgctgtatcagcaagttagttatggtaactctgaaggaattcgagctcttcatcgagatggtggagaccttgagtggatggatagagaaggaaaaactccgttgatcttggcttgtatgaactccgagctatttgatgttgctaagactttgattgagttgggttctaatgtnaatgcttatcgtcctggcgtcatgctgggactcccctgc

SEQ ID NO: 5783 - DNA, 485 bp, Arabidopsis thaliana
  unsure at all n locations
  Clone ID: LIB23-004-Q1-E1-B6
taactgnccgcgggacagtaaaggtanagantncccgggccgacccacncgtcangttgaagcgagcaagatacgacacgaaatcgatctcccccttgcgttttccatctccgtcgtctgctgaaaccatttgatcgatctctcagataaggttctcaggatttaggttgcttctatgagaaggacacgttgcagttggtgcttcatgtctagtttctcaaccgtatagggagtcttcaacttctgggcataagcaagtttgcaccactcgtaatggctggacagcatttgtaaaaagagtctctatggctagtggagcaattaggagattccaggagcgtgttttagggcctaataggaccggtcttccgagcacaactagtgacgtatggctcttgggtgtctgctataaaanatctgcggatgagaactcaggggaaaccgatactggcactgtattggctgcattgcaactagatttttca

SEQ ID NO: 5784 - DNA, 445 bp, Arabidopsis thaliana
  unsure at all n locations
  Clone ID: LIB23-004-Q1-E1-B8
acgcgtccgctccaatttcttcattttatcagcttcctctcttctttagtttctgggtcactttagtttcgctctttccgaggaaaaacaaaacaaagatttgatttttctttttggtgggtttaaacagtgatttcttcttttgcccttttattggttcttattgttctcctcaaaagtctacaggattgtcggaagcaaacacacttgtccatggttatgaatttccctctaattggtgaagaagacacatgaagcagtgaaatctctgtttgtattgaatcttattagtctcaaactatgaatttccgacaagagaagtttgtaaggtttcaagattggaagtcggataagacttcctccgacgtggaatattccggtaaaaacgagattcaaactggaatattccaagagaacaataanctcaatctccgacaagttttac

SEQ ID NO: 5785 - DNA, 454 bp, Arabidopsis thaliana
  unsure at all n locations
  Clone ID: LIB23-004-Q1-E1-C10
ggtcnacccacgcgtccggttaaggattttggggagaagagttgtttcagcttcgaaagagcttactagtattcaacaatggcggatccgaccaggaaccgattctcgtcccgatccttttcgaactttccggggactacaaaagggtttctgcgtgggcattttaccggacggagtcgacagaaattcggaggctttttctagcaattcgatcgccatggaagggatcttatcggagcttcgttcccatatcaaaaaggtattggccggaggtggagaggaagcggttaagaggaacagaagcagaaacaagcttttgcctagagaaaggattgatcggctacttgatcctggttcttcctttttggagctctctcagcttgcaggacatgaattgtatgangagcctttgccttcangtgggataatcacanggatagggaccaatccaagg

SEQ ID NO: 5786 - DNA, 483 bp, Arabidopsis thaliana
  unsure at all n locations
  Clone ID: LIB23-004-Q1-E1-C3
agtgcccggtcangagaattaacgggncgacccacgcgtccgctgcancatctgctgactcgatacattctgctgctgcagaaattgatgaggccattgaatcacatcgagcttcaatgcgcttatcaggacgcttggcgtgtttgtcaccccaattttaaacaacccttctcttctctcgaagatgcttgcgagagattattaccttatcatgtcgtagcagattacgaagcagaagaggatgatagaatccttgattcagacccaacaggccaggccttgtcccgctctcaacaatgggataacaacattgctgcgaaagttgctgaattcacggcaacgtttgagaagcaagcactagcttttaacataataactcgaaagagagctatgggagaattcagatctgaggaaangttgatggtagaacaagctttgctacaagatnaaaggaaagcgttgattgaactgaaagcngaaatg

SEQ ID NO: 5787 - DNA, 477 bp, Arabidopsis thaliana
  unsure at all n locations
  Clone ID: LIB23-004-Q1-E1-C4
ggcccggtcanagaattacgggncgacccacgcgtccgtaatgattttccaggaggaccagatgggtttgagctggtttcaaggttctgttaccacaacggagaaatcttaatcgacgtctcaaacgtctcgactttgtactgctgctctgtttttctaggcatgtcggagaagttctgtttctctaatctcttccttcagacagagaagtttctagaagaagtgttctatgggtcttggagcgacatcgtttcgtgtctcaagaactgcgagcaagtgttcttccaagcagattcgtatggtcttgtagataaactcattttcgcagctttgaacaaaatctctcagaattcagacgannnnnnnnnnnnnnnnnnnnnnnnnnnnnnnnnnnnnnnnnnnnnngagatggccaagaacacgtcagaatcagacggtaggtatatttcgcggtctgttgcttgcggaagaagcaac

SEQ ID NO: 5788 - DNA, 461 bp, Arabidopsis thaliana
  unsure at all n locations
  Clone ID: LIB23-004-Q1-E1-C6
anttcccgggccgacccacncgtcnaatggcgtccaagattgtctcagccatagtatttgtgtttaacctcattgcctttggtttagccgttgctgctgaacaaagaagaagcactgcaagggttgtgcaggacactgaggtgcaatataactactgtgtgtatgactcggacagagctacagggtatggagttggagcctttttgttctcagtggctagtcaaatccttatcatgctcgttagccgttgcttctgttgtggaaagcctctcaagcctggcggttcacgcgctcttgccctcattctcttcattgttagctggatgttcttcttgatagcggagatatgtctattagctggatcggtagagaatgcataccacacaaagtacaggacaatgttcatggacaatcctcctgattgtcaaactctacgtaaaagcgtctttgcagcangcgcc

SEQ ID NO: 5789 - DNA, 438 bp, Arabidopsis thaliana
  unsure at all n locations
  Clone ID: LIB23-004-Q1-E1-D1
cacncgtccggtttgggggagaaaacaccccttcggagaggagcaaagcctctcctggggaagaagaagaagnnnnnnnnnnnnnnnnnnnnnnnnnnnnnnnnnnnnnnnnnnnnnnnnnnnnnnnnnnnnnnnnnnnnnnnnaaattaggttttttttgttgtttccattagttgtctcattgtctgtgaagagaaaggaacagaggaaaatgtcagacctagacaagcaaatagagcagcttaaacgctgcgaggctttgaaggaatcagaagtgaangctctttgtcttaaagctatggagattctanttgaaagagagcaatgttcaaagagtcnatgctcctgtcactatatgtggcgacattcatggacagttctatganatgaangagcttttcanagtttggggtgattgcccctaagaccagntattt

SEQ ID NO: 5790 - DNA, 464 bp, Arabidopsis thaliana
  unsure at all n locations
  Clone ID: LIB23-004-Q1-E1-D10
tcanaattcaaaggtcgaccnacccgtccgancacgcatccgcccacgcgtccgctgtaacattaccaaaacgaaaccttccttgtggattcccacttctttcttctgttttcttcttcctcttctttaaattggatgttttgggcaagaaacagagagaaacacgttaatttgagagtttgtcattgaatatttggtttgcaatggaaagagattttctgggtttgagcgacaagcagtatctaagtaataacgttaagcatgaggttaacgatgatgctgtcgaagaacgagggttaagtacgaaggcagctagagaatgggggaagtcaaaggtttttgctacttcaagtttcatgccttcttcagatttccaaggaaggctaaaggcgtttccggggtgcataccaattggggatnaagtttctgccggccaatgttttccgcagatgccaatttggngg

SEQ ID NO: 5791 - DNA, 479 bp, Arabidopsis thaliana
  unsure at all n locations
  Clone ID: LIB23-004-Q1-E1-D2
cccggtcanagaattaacgggncgacccacgcgtccgaaaaaaaggaaggcgaatcgtagacgggaaattgttcttttgccgctctcggacgaatcgtctgtttccatttttggtgatataatacaaatagtgtattagtagtttgattctcttcaccacggtgtcggtacgattgaagctcctccctccaagagccttcgtacagagacgtttctgctgaaatttcaagcaagtgtgtttgtcagatggagcggtatgaagtcttggagcagatcgggaaagggtcctttggctctgctcttcttgttagacacaaacaagaacgcaagaaatacgttttgaaaaagattcgtctcgcccgccaagtctgatagggctcgacgatcagctcatcangagatggagctcatttctactgtccgcaatccatttgttgtcgagtacaaagattcatgggttgaaaagggttgccatgtgt

SEQ ID NO: 5792 - DNA, 488 bp, Arabidopsis thaliana
  unsure at all n locations
  Clone ID: LIB23-004-Q1-E1-D3
gcccggtcanagaattaacgggtcgacccacgcgtccgcccacgcgtccgggctggaaactggctcattgggggtgatcttgaggttcttgagccagtgaagtacaatgatgggcttgatcgtttcaggctttcgcctgctgagttacgtaaagagttggagaagcgtaatgcggatgcggtgtttgctttccagctgaggaatcctgttcataatggtcatgctcttcttatgactgatactcgtaggagacttcttgagatgggttacaaaaaccctattcttttgcttcatccgttaggtgggtttacaaaggctgatgatgttcctttagattggaggatgaagcaacacgagaaggttctagaggatggtgttctcgatccggagactacagtggtttcgatattccccgtcanctatgcattacgcctggtccaaaccgaaattgcaattggcacgccaaaggcctagaatccaatgcctgg

SEQ ID NO: 5793 - DNA, 491 bp, Arabidopsis thaliana
  unsure at all n locations
  Clone ID: LIB23-004-Q1-E1-A3
ctttacgctnccaggtgccggtcaaagaattaacgggtcgacncacgcgtccgccccaactctcttttctctgtctttctctccctgcagttaccggattcctccactccggctagatctccccgttcaccgccgatgacagaacgaatcagagcaagaggacccagatcatcctctgttaactctgttcctctgattcttgacattgaagacttcaagggtgatttttcatttgatgcattatttgggaacctggtaaacgacctcttgccgtctttcctagacgaagaagcagattctggggatggccatggcaacattgctggagttgatggtttgacaaatgggcatttacgtggacagtctgctcctttgtcctctgctcctttttttcctgaagtagatggtcttttgtctctgttcaaagatgcttgcaaggagttagttgatctcggaagcaagttgatggaagggtcaatacactaaaggaa

SEQ ID NO: 5794 - DNA, 490 bp, Arabidopsis thaliana
  unsure at all n locations
  Clone ID: LIB23-003-Q1-E1-F7
nggccggtcaaaaataacgggtcgangcacgcgtccgaacgcncccatctacaatgaccgagaacgcctccagatatacctctctgatgcgggtattctagccgtctgttttggtctttaccgttacgctgctgcacaagggatggcctcgatgatctgcctctacggagtaccgcttctgatagtgaatgcgttcctcgtcttgatcacttacttgcagcacactcatccctcgttgcctcactacgattcatcagagtgggactggctcaggggagctttggctaccgtanacagagactacggaatcttgaacaaggtgttccacaacattacagacacacacgtggctcatcacctgttctcgacaatgccgcattataacgcaatggaagctacaaaggcgataaagccaaattctggggagactattaccagttcgatggaacancgtnggtatgtanccnatgtatangggaagcaaaaggag

SEQ ID NO: 5795 - DNA, 473 bp, Arabidopsis thaliana
  unsure at all n locations
  Clone ID: LIB23-003-Q1-E1-F9
gctgccaggnaccggtcaaagaattnccgggtcgacccacgcgtccgcgtatagatgcgaatgggtctcattagacccgactcaagatccgatttcaacaaccgggtttaaaatcttaaccgattggggttacggacggatctacacaacagtcgtcgttaactgtactttctcatcaatctccgccgtgaatccacaaaactccggtggaactctcatcctccacgccaccaccggagatccaactctcaatctcaccgattcaatctcagtcctaaccgaacctcccaaatccgtcgatttcgatctctataactccacgaagaagacgaagaagtacgattatctctattgcggatcgtccttatacggtaacctaagtccgcaacgagttagagaatggatcgcttaccacgttagattcttcggtgaacggtcacatttcgtgctacacgacgccgganggattcatg

SEQ ID NO: 5796 - DNA, 478 bp, Arabidopsis thaliana
  unsure at all n locations
  Clone ID: LIB23-003-Q1-E1-G11
anggcccggtcaaagaatacccgggncgacccacgcgtccgtattaagtggaggagatatggttaacttgaatcttgactggagagaggctgttccgcatcctgatgaccgtgttgagtatgagttgtggactaatagtaatgatgaatgtggggttaagtgtgatatgttgatggagtttgtgaaagattttaagggagcggcgcagattcttgagaaaggcgggtttacgcagtttagacctcattatattacttggtattgtcctcatgctttcacgttgaagtcgacagtgtaagtctcagtgtatcaataaaggaaggtactgtgctcctgatccagagcangactttagctcnggataccatggaaaaagatgttggtcntggaaaaacntgagacagcctttgtgtttacaanggtggcgaatgaaaccggccaaaccttgggtcnngtgggatatgttcctgattccana

SEQ ID NO: 5797 - DNA, 448 bp, Arabidopsis thaliana
  unsure at all n locations
  Clone ID: LIB23-003-Q1-E1-G5
acgcgtccgtgcgtctaggaatcctttacgaattccaaagattacagagtaccttgagcaaaaatgttacaaagaattgcgaaatggaaatattggttcagtgaaagtcgtcttatgcatttataagaaactgctttcatcatgtaaggagcagatgcctcttttttcgtgtagtttgctaagcattgtcagaactcttttggagcaaacaaaagaggaagaagttcagatcttgggttgcaatactcttgtcgactttataagtttacagactgtgaattcgcacatgttcaacttagaaggtctaatccctaaactttgtcaacttgctcaagaaatgggtgatgatgaaagatcactccaattacggtcagcaggaatgcaggctttggcattcatggtatctttcattggtgagcattcccaactatcaanggacttggatatg

SEQ ID NO: 5798 - DNA, 491 bp, Arabidopsis thaliana
  unsure at all n locations
  Clone ID: LIB23-003-Q1-E1-G8
gtgcccggtcaaaaattaacgggccgacncacgcgtccnaaattttagtcgaagaaacaaaaaaaaatggcgacggtacaattgtccacccaatttagctgccaaaccagagtttcaatctcaccgaactctaaatctatctccaagcctccgtttctggtaccggtgacctcaattattcaccgcccgatgatctccaccggaggaatcgctgtttccccccgtagagttttcaaagtccgagccacagatacgggagagataggatcagctctattggcggcggaggaagcaattgaagacgtggaagagacggagcggctaaagagatcgctcgtggattcgttgtacggaacagatcgaggtttaagcgcatcgagcgaaaccagagctgaaatcggagatctaatcacacagctcgagtctaagaaccctactccagctccgacggaagctcctttccttctcaaaggnaaaatggattctcgcct

SEQ ID NO: 5799 - DNA, 475 bp, Arabidopsis thaliana
  unsure at all n locations
  Clone ID: LIB23-003-Q1-E1-G9
cccggtcanagaattaacgggncgacccacgcgtccggtacttttacttccataacactggtctacaggctcaaagtgtgctttatatgcaggataatctggatgctgagccagaggttttgcttgatccgaacactcttagtgatgatggaacagtggccttaaacaccttttctgtcagcgaggatgctaagtacttggcctatggtcttagttcaagtggtagcgactgggtgacgattaagctgatgaaaatcgaggataagaaagtggagcctgatactttatcatgggttaagtttaccggcattacatggacgcacgacagtaaaggatttttctatggtcgctacccagctcccaaagaaggagaggatattgatgctggcactgagactaagtctaanctttatcatgagcctgtattaacatttcaantgggancggatcaatcctcaagatnccttaagcctgg

SEQ ID NO: 5800 - DNA, 458 bp, Arabidopsis thaliana
  Clone ID: LIB23-003-Q1-E1-H1
acgcgtccgcccacgcgtccgaaaatttgatatttgaagcgaatcaacaacaacagtcgggttcgtgaaaaaaaaagatttgatcggctaaacttggtcgctttcaggtttatcgtggaaggacttgtcaatggcagacgtacctggatacctgcgcacttgtttggatatggggaagatagctttcttagcaatccttgtatctacagggattgtgttgcagattctggcttgtgctctgttcaataactggtggccaatgctaagtgttataatgtatgtgctcctcccaatgcctttgctcttctttggtggatcagacagtacatctctattcaacgagtcagataatagttggatcaatgcagccaagttcttgactggtgcatcagcagttggaagcgtcgcgataccatcgattctaaaacacgccggactcatcggttggggcgcattaa

SEQ ID NO: 5801 - DNA, 485 bp, Arabidopsis thaliana
  unsure at all n locations
  Clone ID: LIB23-003-Q1-E1-H12
cttttacgcttccaggtgccggtcaagaattaacgggtcgacccacgcgtccgagaaaaataagataccactcaccaaaaacttcctcaaaactaacaaatggatactaataaagcaaaaaagcttaaagttatgaaccaactcgttgaaggccatgacttaacaactcagcttcagcaactcctctctcaacccgggtccggtctagaggatctagtggctaaaatcttagtgtgtttcaataacaccatctccgttcttgataccttcgaacccatctcctcctcctcatccctcgccgccgttgagggatctcaaaatgcttcatgtgataacgacggcaagtttgaagattccggcgatagtcggaaaagattgggacccgttaagggtaaaagaggatgctacaaaagaaaaaagagatnggagacgtgtactatagaatcgactatacttgaggacgcattttccttggaaggaaatat

SEQ ID NO: 5802 - DNA, 459 bp, Arabidopsis thaliana
  unsure at all n locations
  Clone ID: LIB23-003-Q1-E1-H2
acncgtccngatttaacaggaatttgcggaattttgattatatcagtgagtagaagaaatgagcgcagtctcgggtgtaatctcgaggcaagttttgcctgtttgtggtagcctttgtattctttgccctgcgcttcgtgcaaggtctagacagcctgtgaagaggtacaagaagctcattgctgagatttttcctcgtaatcaggaggaaggcataaatgatcgaaagataggaaaattatgtgagtatgctgcaaaaaacgctgtgcgtatgccaaagatatcagattccctggaacatagatgttacaaggaattgaggaatgagaatttccactcggcaaagataaccatgtgtatttacagaaggcttctggtcacttgtaaggagcaaatacctctattttctagtggtttcctaaggacgtgcaagctcctttggatnaaactcgacaagaa

SEQ ID NO: 5803 - DNA, 484 bp, Arabidopsis thaliana
  unsure at all n locations
  Clone ID: LIB23-003-Q1-E1-H6
aaaattaaacgggncgaagncncgcgtccgcgcaaaatctcaacgaagctcgaaaatggattcacgaaccaaggggaagacggtgatggaagttggtggcgatggcgttgccgtcataacactcatcaatcctcccgtcaattctctatccttcgacgtgctatacaatctcaaaagtaattacgaggaggccttgagcaggaatgatgttaaagctattgttattactggtgcaaaggggaggttctctggtggctttgatatatctggttttggtgaaatgcagaaggggaatgtcaaagagccaaaggctggttacatttcgattgacatcataaccgacttgcttgaagctgctaggaaaccgtctgtcgctgccattgatggacttgccttgggaggaggattagaacttgctatggcttgtcatgctangatatcagctccctgctgcacagttaagcttccngaactgcaacttggt

SEQ ID NO: 5804 - DNA, 476 bp, Arabidopsis thaliana
  unsure at all n locations
  Clone ID: LIB23-003-Q1-E1-H9
gctgcccaggnaccggtcaagaattnccgggtcgacccacgcgtccgggcgtttggtttgatcggaagagttgttggaaccaaatcatcacgattatccacggcggcgcgattgattccggcgcgatggacatcaacaggatcagaagcacaatcgaaagcttcaaccggcggcggaggagcgagtctgaagacgtttcagatctatcgatggaatccagataatcctggaaagccagagcttcaagattacaaaatcgatctcaaggattgtggtccaatggttctagatgctttgattaagattaagaacgagatggatccatcgctcactttccgtcgctcttgccgtgaaggtatttgtggttcgtgtgctatgaacattgatggatgtaatggtcttgcntgtttaacgaagattgaatctggatctaaagagacgacgattacgccgttgcccgcatangtttgtgatta

SEQ ID NO: 5805 - DNA, 453 bp, Arabidopsis thaliana
  unsure at all n locations
  Clone ID: LIB23-004-Q1-E1-A1
acgcgtccgctctgctaaagtttcagatcttggtcttcggtctattggtcgtagctgcccttctctcgggtctctttcactgtggaacgtttctaccattactgacaatggacttttggagattgctgagggttgtgctcaacttgagaagcttgagctgaaccgctgctctacaatcactgacaagggtttggtagctattgctaagagctgccccaacttgactgagctgacattggaggcttgttcaagaattggagatgaagggtttgctagccattgcaagatcctgctccaagctgaagtcagtctcgatcaagaactgtcctcttgtcagggatcaaggaatcgcctctctactgtctaacaccacctgttccttggcaaaacttaangcttcagatnctgaatgtcactgangttgtccncttgctgttgtggggtcaattaacg

SEQ ID NO: 5806 - DNA, 473 bp, Arabidopsis thaliana
  unsure at all n locations
  Clone ID: LIB23-004-Q1-E1-A2
caggccggtcaaagaattaacgggtcgacccacgcgtccggataattatgaacaaaggcggtggatccggtggcggatccggtggaggaagcggtccaacggccgccgccgccgccgcggctttacagaagcaaaaggcgttgttacagagagtggagactgacatcacatctgtcgtcgataacttcacgcagatcgtcaatgtttcaagggtgagtgatccgccggtgaagaactcgcaggagacatacatgatggagatgcgagcttctagaatggttcaagcagctgattctcttttgaaactcgtatcagaacttaagcaaacagcgatattttcaggatttgcatcactaaacgatcatgtagaacagagaatagaagagtttgatcaagaggccgagaagacaaatcgattgttggctagaattgctgatgatgcatctgccaatcttaaagaactcgantccact

SEQ ID NO: 5807 - DNA, 462 bp, Arabidopsis thaliana
  unsure at all n locations
  Clone ID: LIB23-003-Q1-E1-F6
gggncgaggcccgcgtccgttcaccaactctttataccangcctctgtaacgttcgatcatcttgtatttcatttcaaccactcattgtttttagtttgttttacgaagaatcaactatggcgacgaagagaagcgttggaactttgaaggaagcggatctgaagggaaagagtgtgttcgtgagggttgatctcaacgttcctttggatgataactctaacatcaccgatgacancaggattcgtgccgctgttcccaccatcaagtacttgatgggtaatggatctagggttgttctctgcagtcacttgggccgcccaaaaggtgttactcctaagtacagcntaaagcctcttgtgcccagattgtctgaacntcttggtgttgangttgtnatggcanatgactccaantggtgaggaagtccaagaagttggttgccgggactacccgaaagtggn

SEQ ID NO: 5808 - DNA, 472 bp, Arabidopsis thaliana
  unsure at all n locations
  Clone ID: LIB23-003-Q1-E1-A10
angtgccggtcaaagaattancgggtcgacccacgcgtccgatttgaacaagtgtgattgtttgtgacacagatttggatcggcgaatcttttgatgataaagattacttcatttctggttattctcgaagagtagaggtctcaaaagaaatggagtctaaggaaattagatcctcctctgtctttgagagatcgatgcgttttaatggactctttcaagataagctgagagttgttgagaaacagaatcaaccaccaaaacggtttaaccaaaaggagtctaattctggtttcacagtgattccaacgaagcaactttgtcgagtttatctccagaaaccgaatttgttggcttccaagggtataattgatgcactagctaagcctcctcatangatttttgggtaggagatatgatcagcaaaacttcaagtcaaagctgagacatccttcacacaacaagtntgatccc

SEQ ID NO: 5809 - DNA, 458 bp, Arabidopsis thaliana
  unsure at all n locations
  Clone ID: LIB23-003-Q1-E1-A3
acgcgtccgcttcttactcaacttttgcttcaggcttcgtctcttttgcaatttttgagttagccaagtgctcaagggagatacataatacctgaagatgtccaaggcaagtgatgccgtcagagaaccattggtggacaagaatatggctggatcaaaaccagaccagccgtggatggtttatctcagcacattcgttgcggtctgtggttcttttgcgttcggttcttgtgcgggatactcttcacctgctcaggctgcaattaggaatgacctttcattgactatagctgagttttcactctttggttctttactaacttttggcgcaatgatcggtgctataacaagcgggcctatagctgatttagttggaagaaagggggcgatgagagtttcctctgcattttgtgtagtcgggtggctagcaatcatctttgccaanggagtagttggcc

SEQ ID NO: 5810 - DNA, 474 bp, Arabidopsis thaliana
  unsure at all n locations
  Clone ID: LIB23-003-Q1-E1-A5
gggtcgangcacgcgtccgaaaaaaaaatgggagaaaacggagccaagcgatggaacttcggagctaacgaggtcgtcgaacgatctaactcacttaccattcgtgattaccttaacaccttaatcaattgtctcgacggtggtgatgtaagacccgtcatcccactaggtcacggcgatccttctccgttcccgagctttcgtaccgatcaagccgctgttgaagccatctgtgatgctgtccgttcgaccaagtttaacaactactcttcttcttccggtgttcctgtcgctaggaaggctgttgcagagtacctctctagtgatctctcttaccagatatcaccaaatgatgttcatatcacagctggttgtgtgcaagccattgagattttgatatccgctctcgcaattcctggagctaacattctgctacctaagcctacttacccgatgtacgaatccccgagcngc

SEQ ID NO: 5811 - DNA, 477 bp, Arabidopsis thaliana
  unsure at all n locations
  Clone ID: LIB23-003-Q1-E1-A7
taacttccggtgnccgtcaaaanattaacgggtcgacgcacgcgtccgaaaagccataaccaagattcgtcaagaaatcaacacacaactatctccaagaaccaatgattttgattcattcaatgctcaagagttaaacaagttggtgtatgtacatggagcattgtgtgaagcccttaggctatatccaccggttccatttcagcacaagtctcctacaaaatccgacgttcttccaagtggacacagagtcgatgcgagttcgaagattgtgttctgtctttactcattagggagaatgaaatcagtttggggagaagatgcatcggaatttaaaccggagagatggatttcagagagtggaaggttgattcacgtgccttcttttaagttcttatcgtttaatgccggtccaaggacttgtttggggaaagaagtggctatgacacagatgaagacagttggctgtgaaaanta

SEQ ID NO: 5812 - DNA, 489 bp, Arabidopsis thaliana
  unsure at all n locations
  Clone ID: LIB23-003-Q1-E1-B3
tgtgaccgcccggtcanagtcnnaanncccgggncgacccacgcgtccgcccacgcgtccggcttgtaatcgttggctattgacaggaacaccaacccctaacacaccaaatagccagctttcacatatccaacctcttttaaagtttcttcacgaggaagtctatggagaaaatccaaagttttgggaagctggcatccttagaccatttgaagcagaaatggaggagggtcgtttgcgtttacttcagctgcttcagagatgcatgataagctctagaaagaaagatctgcagatgattcctccgtgtatcaagaaggtgacataccttaatttccttccagggcatgcaagaagctacaatgaactagtggagacagttaggcgtaatatcttattagctgattggaatgatncgtctcatgtagaaagtctgcttaactctaaacagtgganatttcggagcattaccattagtaatgtcagacn

SEQ ID NO: 5813 - DNA, 494 bp, Arabidopsis thaliana
  unsure at all n locations
  Clone ID: LIB23-003-Q1-E1-B5
nccggtcaaaaattaacggggncgacgcacgcgtccgagcgttcgttgtgaaaccatagatccaggtgaattctggaaaacatcttgaagcgaaatcgagacatcgttggaggatcaaaacgttaattcgattgatcgatgaatcctagaagggagcctcgtggtggtagaagttctctctttgatggcatcgaagagggaggaattagagctgcttcttcttactctcatgagatcaatgaacatgagaatgagcgtgccttggagggattgcaagatagagtcattctcttaaaacgactatctggcgatataaatgaagaggtcgatactcataaccgcatgcttgacagaatgggcaatgatatggattcatcaaggggatttctctcaggaaccatggancgctttaaaacggtgtttgagacaaagtcaagccgaagaatgctgacgctcgtggcatcgtttgttggtttatttccaagtcatatact

SEQ ID NO: 5814 - DNA, 478 bp, Arabidopsis thaliana
  unsure at all n locations
  Clone ID: LIB23-003-Q1-E1-D1
taactntccgcgcgacggtaaaaggtcatgnaattcccgggccgacccacgcgtccngtataccacaaaacctcaaaattgtaatttattagattatcgtgatggccttagctaaagagttaatgggttatcctctcatcacagaaaggtcatcacttgtctcgtcggcgtcgcatttcaagaagaggacacagtcaacacagttctcgatcaacccttttgaccggagaccaagaaaaaccaaatccggcgtcgttgcagccatcagcgaggatttggtcaaaacgctgcgtttttccacaacgaccggagacagaaagagcgaanaggaggagaaagcggcggtgaagttcanggtgagagctgtggtnacngtgaggaacacngaacaaggaggatttgaanggagactcttgttaagcanttggatgcctttgctgatnnnattggncgaaacattgtccnggagcttatcatc

SEQ ID NO: 5815 - DNA, 454 bp, Arabidopsis thaliana
  unsure at all n locations
  Clone ID: LIB23-003-Q1-E1-D6
cggggtcgaggcacgcgtccgccactttaaacccttgtctacgctggtccgagtccagagtcctctactttgacagtctccctccatgtcgtcgttgtgtgcatctaattgctatccttcatcttcttctatcaatctcttctccaacaacaacaacccaactaaaccctttcttctctccctcagattcgcctcctccaattctcttccatttgttgctcctctcaaattctctactaccaatcacgtccttagtaactctcgtttctcttcgaaccgaatccaaagacgcctttttttgctccgatgcgtttcagaagaatctcagccgtctctttctatcggtaacggcggctctgaagagagagtgaatgttcttgtaattggtngaggagggagagaacacgccctttgccacgccttgaangcggtctccgtcgtggtaagtccggng

SEQ ID NO: 5816 - DNA, 409 bp, Arabidopsis thaliana
  unsure at all n locations
  Clone ID: LIB23-003-Q1-E1-E11
ctttttgtttcgtctcagtcgtcgtcatcatctctgacagaacaagtttcgagattggatattgacgacaacgatatgggacttggaggtagtgaaacaatggaatgcaagtgtggtatgcctctgtgtatctgtgtagctcctcccaaatcaactgataaaccaaacccacctgctaccattgctcctgtggttcttcctcagttgaagtcagaggcttcagcaaaaagtaaaggttccacttccagcagcaatgctagatcagctctaaatgctggactagacaccccccaaagagactatgaagccagtggggagggattaagagaagcgattaagaatggtgacagtgctggtgcgaaaaaacttctaaaaaganggcgtanaatgcaagattaccgaagacagg

SEQ ID NO: 5817 - DNA, 463 bp, Arabidopsis thaliana
  unsure at all n locations
  Clone ID: LIB23-003-Q1-E1-E8
attaacgggncgacccacgcgtccgcggcaaacacgaacgggtttacgtagaccgtcaaacgctcctccgtccnnnnnnnnnnnnnnnnnnnnnnnnnnnnnnnnnnnnnnnnnnnnnnnnnnnnnnnnnnnnnnntctcatcgatcactctctccaagatctattcacgcatcgtcggaagaattttcgcttccgacgacgtttctctcgtctgattttgtctccgaacatcctacctaatcgtattcggtgctggatttgaatccggtgaactgaatctgacaatttcgttcccggaggtgtttaaaaatggccgggatcttgaataaattgcggaatctagatgcatatcctaagatcaatgaagatttttacagccgtacattatccggcggagttatcactctcctctcctccgttgttatgttccntctcttcgtctccgagctccgtctttanctc

SEQ ID NO: 5818 - DNA, 460 bp, Arabidopsis thaliana
  unsure at all n locations
  Clone ID: LIB23-003-Q1-E1-E9
gaattaacgggcaaaagaagccaaaanttctttttgcagatgacctacaaaacgaaactttagaagctgtcccaaatataggtgagattcactgatcgatctccttttttttttgtcacttatatccaccaatttgcaaactcttatggtttattcagaagaagccaacaatgaaagaaaggcaccaacagagataaagaagaatggagaaagtagtgagaagaagagcccagaactggtttgtatggaggaggaacttcaaaagtggtcagctgaatcatttattgatttaactgcttctggtgagcctctcagatctcaaataatattggattgattgcaatatttttgaatttagatacatacatatatgcaaatgttttaggttacataagattccagttctgccttgtcataggtgatcnttgagttanggtatcagttatgggaaacatgtngt

SEQ ID NO: 5819 - DNA, 478 bp, Arabidopsis thaliana
  unsure at all n locations
  Clone ID: LIB23-003-Q1-E1-F11
ggncccggtacagaattaccgggncgacccacgcgtcancccacgcgtccgcggacgcgtgggttcaaaaacaaagtcgattacgctagaatccatggtcacgacatcttctacagcaattctcttcttcatccgaagatgaattcgtattgggcgaaacttccggtggttaaagctgcgatgcttgctcacccatttatggattgaagctttagagagaaaatgggtgatgaggcagagatcaaggaacatttaaagccacaagcttcatctgaaacaatagacaagaaacataatgtgaaagggaagaggttatggcacgaaagtcaagtatcaattggtggagtttcattcattgcctgcttatttaagagacaatgagtacatcattggtcattaccgattcggaatggcccgatnnaacagantcttcnnancatctttaccattcntaatggagacntttgagcgttttgga

SEQ ID NO: 5820 - DNA, 456 bp, Arabidopsis thaliana
  unsure at all n locations
  Clone ID: LIB23-003-Q1-E1-F3
acgcgtccgattttttctaaattttaatcttttgtgttnnnnnnnnnnnnnnnnnnnnnnnnnnnnnnnnnnnnnnnnnnnnnnnnnnnnnnnnnnnnnnnnnnnnnnnnnnnnnggtaccgtcgatttcttcctacgagttcgaaattagggtttttttcttcttcttagggctgattttgaggtcgagtagtgggttcttaacgaacttattcgttgaatttctttagggttttctttgtggtctagtttcatagagagattagaagtttggttatgctattgaacgatgtttcatggacaagggttttcgagaaaccgttgtaatgttgtggcagttgtttctggagcagagctttgcgatactaataaccagatagatggaacttctcatcaacccaaatacccttttccagatctctcttcttcagggcgtctcaagtttcaagtactgaa

SEQ ID NO: 5821 - DNA, 459 bp, Arabidopsis thaliana
  Clone ID: LIB23-003-Q1-E1-A1
acgcgtccgtagtcatcttcttcttcctctgtctcaattcttcctcctctcggatccatttttagaggagtctagtttcttacttgaacatagacatggaatcaactaataactgacaaccaagaggctgttcttttcaaatgattggtagtagttatattatgcttggacagtgccatgatgggcatctgtgagatgaaaagctgctgctcatggcttcttttgatctcgttgctttgctcactatctaatgaaagtcaagcgattagtcctgacggcgaggcgcttctgagcttcagaaatgcagttactagatcagatagtttcatccatcagtggagaccggaagatccagatccatgtaactggaacggagtgacatgtgatgcaaaaacgaaaagagttataaccttgaatcttacttatcacaaaataatgggaactttacctcctgatatt

SEQ ID NO: 5822 - DNA, 450 bp, Arabidopsis thaliana
  unsure at all n locations
  Clone ID: LIB23-001-Q1-E1-H11
acgcgtccgcccacgcgtccgcccacgcgtccggtgtattcaatgagtttatcgagattataaattaaattgttccccgggttttttgataataaaaagttacacgcttttggttaaaaatccattgcattataaaattcaattatgatacaatgccacgtcactggaccacaatgttgccgtacgttatattgttgccggagtaaggtacacgtcgtcacggtgtcaggccgtttctttaaagagttgtcacgcatttaacggcgcgtgcgtctcacgtgacactctccttgtttgttggtgatttgttcattgattacagaaccaatcgtcggtacctaccaataaccgtacgatggtgtatggcaatcctcnttgggattactancggntcaacccggtggctccactggttacgcctcaatcaanctccgaacgttggtcgaaacc

SEQ ID NO: 5823 - DNA, 451 bp, Arabidopsis thaliana
  unsure at all n locations
  Clone ID: LIB23-001-Q1-E1-H2
ccacgcgtccgcccaatctgaagatcaatcataaccttaaaccatctctcataattttagtatttctattctcaccaccaaaactcgttgatacatcacaccccaactgttgttactcatgtcctacagatcgatttaccgcactcttcgaccggtactatcatcttcggtacaatcctccggtttaggaattggaggattcaggggacatctcattagccacttgcccaatgttcggctattgagctctgacacgtcatctccggtaagtgggaataaccagccagaaaatcctatccgaacggccgatggtaaagttatatccacttattggggtatacctcctactaagatnactaaaccggacggttcagcttggaagtggaattgttttcagccatgggattcatacaaaccggatgtgtccattgatgtaactaaacatcataaa

SEQ ID NO: 5824 - DNA, 490 bp, Arabidopsis thaliana
  unsure at all n locations
  Clone ID: LIB23-001-Q1-E1-H4
tggttcgccctgccgtaccgggaaattancgggtcgacccacgcgtccgaaanaaaatttagtagcaaacttcncgattccttgattcgtgggaaaaagaaagtctagatttttgtggattttgattttgtgattccgtgattgtatgaacttgagccgttttgcttcgagattaagaatggcggaagaaatctcaaagacgaaggtgggatcttcttctactgcttcggtggctgattcatctgctgctgcgtcggctgcaacgaatgcggccaaatcaagatggaaaattttgtggcctaattcgctccggtggattcctacgtccaccgattacatcatcgccgccgagaaacgtcttctctccatcctcaagacgccttatgtacaagagcaagtcagtattggttcangaccaccaaggttctaaaatcangtggtttangtctacgagcaatgagtcacgttacatcaacactgttacatttga

SEQ ID NO: 5825 - DNA, 450 bp, Arabidopsis thaliana
  unsure at all n locations
  Clone ID: LIB23-001-Q1-E1-H5
acgcgtccgagattatctgtatttcaagtttcatgagcgtttgccaccacaacattgtcttttcggggttttagtcatacttaatggcttccaattcggagaaaaatcctcttctttcagatgagaaacccaaatcgacggaggagaataagagttctaagccggaatcagcttctgggagttcaacttcatcagctatgcctggcttgaatttcaatgcttttgatttctctaatatggctaagtattctcaacgattctagcatcagagaaatggctgagcaaatagctaaagattctgcgtttaaccaattgggctgaacaagcttcaagagatcaaatcctaacgctggcaagaangtgggttccctaacttttgattctcaacangtatgtcaatacaatgcaacaaggttatgcataacccngagtttaagacatggccgagaa

SEQ ID NO: 5826 - DNA, 461 bp, Arabidopsis thaliana
  unsure at all n locations
  Clone ID: LIB23-001-Q1-E1-H7
acgcgtccggtcncttagcctggtctcaagtgcttactatgcagcagtttttcccagttgcagatgtttcntacaatcttcancagattgcttggaaaaggnaacagcaaatgccacctcaaaggnattacaattctgatcaagttgggaaatttggagcaaggagatnangggctggggttaacaaagcatcatggtggtggtggggggtaaaaaggagctgattccatggcgagaaatgggcataatttcaatggcgttaacagtgatcgtgttgagcatcgggaggaagctaaagttggcaagtgatgttaaggcattgtcctgttgcagaagagaaagagagatggtaacgaaaaaccgagggagtgataataaaagttgagaaaaaatttggaagaatctgaaactcaagaggagatantgaaagaancataagtgttaactcngggttccaaaag

SEQ ID NO: 5827 - DNA, 482 bp, Arabidopsis thaliana
  unsure at all n locations
  Clone ID: LIB23-001-Q1-E1-H9
gttgccttgcntacggctccggaatcccaggtcgacccacgcgtccgcgacacactccaaaactcataaatctatctgatgcgaatttgactaactctttcgtaattcaggatcttactacaaatctttaactcaccaatcttcttcttattcaaagattagagagaaaatggacaacgagctgtttatgaacacagagtttccaccaccgccggagatggcgacgcatttcgaacaccaacagtcttcttcatcggccatgatgcttaattgggctttaatggatccaaatccgcatcaagattcttcctttttatgggaaaagtcaacggaacaacaacaacaacaaagcatctttgactctgctttaagctcattagtctcatcaccgacgccgtcaaattccaacttctccggcggtgggcngtgacgggtttctcatcagagaactcatngggaaaccttggnaacatcggtaaaaa

SEQ ID NO: 5828 - DNA, 461 bp, Arabidopsis thaliana
  unsure at all n locations
  Clone ID: LIB23-002-Q1-E1-A1
acgcgtccgcccacgcgtccgcggacgcgtgggaatcaagatgggagtgatgagtttgagcaagacgatggtggtggtggtattacaggtgatgatattgttgggacaagagattggtaaagtgtcgtcgactctatacaaagttggggacttggacgcttggggcatcccaattgatgctaaagtctattccaaatggcccaaatctcactctttcaagatcggtgactccctcttgttcttgtacccaccaagcgaagactcactgattcaagtgacgccctccaatttcaagagctgcaacaccaaagacccaatcttgtacatgaacgacggcaactctctcttcaanctcacccaaaacggaaccctatactcacaagtgcaaaacccgggcactgtnccaaagttccaaaagctcctantctccgtcggaacctaatcccgcccaaagcaaaagg

SEQ ID NO: 5829 - DNA, 435 bp, Arabidopsis thaliana
  Clone ID: LIB23-002-Q1-E1-A10
acgcgtccgatctatattagtgatggcttgtttttatgtatgtgaagtgctccgctcccctatataggtatgttgaggatgcaaaggtggcaagttctactttgatctatttttctcgaaattttcatctacagtcctcttttcattggagatgtctctatttctggttctatgctctgcattttcctatggtttaaatgctaatcacttcggctcgagatctactctttctacatgaattcattatcttcatataggaatttggatgatgctaggacgattctgtttcgacctgttcgcctaagatttattggcaacgagggatggatgtaatcagcttttcttcccttatctgttttccctttctggttatgtaatctgcatcttctcctatggtaatctctctgcttcagatgaaatcattaatcttcacat

SEQ ID NO: 5830 - DNA, 446 bp, Arabidopsis thaliana
  unsure at all n locations
  Clone ID: LIB23-002-Q1-E1-A11
acgcgtccgggctggtaaaggtgggaaagggcttctagctgcgaagacgacggcagcagctgcaaacaaagacagtgttaagaagaaatccatctctcgctcttctcgtgctggtattcagtttccagtgggtcgtattcatcgtcaactcaagcaaagagtttcagcacatggaagagttggtgccactgctgctgtttacactgcatcaattctagaatacttgactgctgaagtactcgagttagctggaaatgcgagcaaggatctcaaagtgaagagaattacaccaagacatttgcagcttgcaatcagaggagatgaggaacttgacactctcatcaaaggaaccattgcaggaggaggtgtgattcctcacatccacaagtcccttgtcaacaaagtcaccaanggattgantttcgctcctccgaatcctaagtccc

SEQ ID NO: 5831 - DNA, 445 bp, Arabidopsis thaliana
  unsure at all n locations
  Clone ID: LIB23-002-Q1-E1-A12
acgcgtccgcctctctctccaatggcttccttatccttcgtttcctcttctcaccttacgctacgcactccttctattgccctacgcagcactggctcttctcctcgaacctccgtttcattctccgtcaaggctcaatccgtcgcgctttcacaggacgatttgaagaagctcgcggcggagaaagctgtggaggcaattaaacctgggatggttctagggctcggaaccggatccaccgcagctttcgctgttgatcagatcgggaaactactctcttccggtgaactctacgatattgtcggtatcccaacgtcgaaacgaacggaggaacaagcacggtcgttagggattcctcttgttgggttaaatacacatcganaatcgatntcgcctaattgacgggagcaaaacgaaggactcccggtgggaagttnggttaaac

SEQ ID NO: 5832 - DNA, 455 bp, Arabidopsis thaliana
  unsure at all n locations
  Clone ID: LIB23-002-Q1-E1-A8
acgcgtccgaagaagaccaaaaggactgctcctaagtccgatgatgtctacctaaagcttctcgtcaagctttaccggtttttggtgaggagatctaacagcaacttcaatgctgtgattctgaaaaggcttttcatgagcaaagtcaacaaagctcctctttcactctctaggcttgtagagttcatgactggcaaggatgacaagattgctgtgttggttggaactatcactgatgatttgagagttcaagangattcctgccatgaangntactggccttgaaggttactgagaagggctaaggctaagaattnanaaanctgggtggagaatgctaaactttnaccaacttgcccccaaanctnccatngggaaaagannnaatttttcttaanggggccaaanaanccccnctgnancaattganncattttcggacccnggccccgggg

SEQ ID NO: 5833 - DNA, 438 bp, Arabidopsis thaliana
  unsure at all n locations
  Clone ID: LIB23-002-Q1-E1-B10
acgcgtccgcgcnattttctgtttgcatacacttgtatatatttatattaacagtccaaaattcttcgaaattgtcccgagctttgagcatataaaaaatgtcttcgataatccatggagctggagctgctacgacgacgttatcgacgtttaattccgtcgattccaagaaactcttcgttgctccttctcgcacaaatctttcagtgaggagccagagatatatagtggctggatctgatgcgagtaagaagagctttggttctggacttagagttcgtcactctcagaaattgattccaaatgctgttgcgacgaaggaggcggatacgtctgcgagcactgggacatgaactattgcttttcgaggctcctcaggaaggtctggaaagaagagatggncaagaagattcacatgtaagtgttaagggtgaaaaa

SEQ ID NO: 5834 - DNA, 445 bp, Arabidopsis thaliana
  unsure at all n locations
  Clone ID: LIB23-002-Q1-E1-B11
acgcgtccgcccacgcgtccgatcgtgatcttaaagctagcaacattcttttggaccaagaaatgaatccgaaaatcgcagattttggattagctaaactctttgactcaggccaaaccatgacacatcgattcacaagcaggattgcaggaacttacggatatatggctccggaatacgcaatgcatggacaattctctgtgaaaacagatgttttcagcttcggtgtattagtcattgagatcattacaggtaaaagaaacaacaatggtggatcgaatggtgacgaagatgcagaagatcttcttagttgggtgtggagaagctggagaagaagacactatactaagcgtgatcgattcgagtttaaccgcaagatnaagaaatgagatcttgagatgcatacacattgggcctttangtgtgcaagaaaagtgcaacgacc

SEQ ID NO: 5835 - DNA, 436 bp, Arabidopsis thaliana
  unsure at all n locations
  Clone ID: LIB23-002-Q1-E1-B12
acgcgtccgcggctctcaaaatgagagcttcgtttagcagtgggagtagtggaagtagtgcaagtagagagattctggtgcagcatttgcttgttaagaataatgatgttgagctctttgccgaactccaaaagaaattcttggatggagaggagatgagtgatcttgcggctgagtattcgatttgtccttccaaaaaggacggtggtatacttggatgggtaaaactgggtcaaatggtaccagagtttgaggaagctgcgtttaaagcagagctgaatcaggtggtgaggtgtagaacccaatttggcttgcacttattgcaagttctatctgagagagaaccggtgaaagatatccaggtagaggagctgcattccaaaatgcaagattcaattttcatgggatgaggccagttaattgatgtcaaganaac

SEQ ID NO: 5836 - DNA, 493 bp, Arabidopsis thaliana
  unsure at all n locations
  Clone ID: LIB23-001-Q1-E1-H10
actggttgnggtccctagggccccgcaatcgcaagggatctctcncagtgcacagtggttgtcactcttctcctttggtcgaaactctttcttggaaagagcattttgttatcaagactctgaagagctcttttgggaggatagtaaggttggatgatgagagggagatctgatggaggcctaaagaagcgtcttattgcttcggtctgtgtcgtggctctattcgtctgtttcttgtttatgtactatggttcctctagccaaggtgcatcagcattggaatatggaagatctttgagaaaactcggatcgtcttanttgagtggagatgatgataatggtgataccaaacaggatgattctgtggctaatgcagaagacagtcctgttgtcgccaaaagttttccctgtttgtgatgaccggcactcggaaatcatccccttgcntanataggaatttcaaccaacaaaatgaaggttgaaancttgattc

SEQ ID NO: 5837 - DNA, 488 bp, Arabidopsis thaliana
  unsure at all n locations
  Clone ID: LIB23-001-Q1-E1-E9
acggttgccttcctagcctccggaatccangtcgacccacgcgtccgaaangtggatgaaccgtcgaaatatggagtggttgttatggaagaaagcactggaagagtggagaagtttgtggaaaagccaaaactgtatgtaggtaacaagatcaacgctgggatttatcttctgaacccatctgttcttgataagattgagctaagaccgacttcaatcgaaaaagagactttccctaagattgcagcagcgcaagggctctatgctatggtgctaccagggttttggatggacattgggcaaccccgtgactacataacgggtttgagactctacttagactcccttaggaagaaatctcctgccaaattaaccagtgggccacacatagttggggaatgttcttgttgacgaaaccgctacaatttggggaangattgtttgatttggaccaagacgttgccattggtnccaagctgcattgttta

SEQ ID NO: 5838 - DNA, 488 bp, Arabidopsis thaliana
  unsure at all n locations
  Clone ID: LIB23-001-Q1-E1-F1
nggttgttggcctacggtccggaatcacgggctcgtgctcgtgcagctgaatatccctgctctgattcgtcaaatccatggaagatgaggatgatccaaccacaaagaacagcaacaacacagatgattttgctatagagcctcgtgaagggattatatttgaatccgaggatgcagctaagatgttctatgatgattactctagacgattagggtttgtaatgcgtgtaatgtcttgccgaagatccgagaaagacggaagaattcttgcccggagattcggttgtaacaaagaaggtcattgtgttagtattcgtggtaagtttggatcagttaggaaacctagaccgagtacaagagaaggttgcaaagctatgattcatgttaagtatgaccggtctggcaaatgggtcattaccaaattcgtcaaagaacataaccatccactcgttgtttcacctcgcgaggctcgccataccctggacgag

SEQ ID NO: 5839 - DNA, 492 bp, Arabidopsis thaliana
  unsure at all n locations
  Clone ID: LIB23-001-Q1-E1-F10
actggttcccttgcctagcctccggaatccaaggtcgacccacgcgtccggtttctaccgtctttcttcagttcttcacaactctcgatttcgtccccttccttgctcattgcgtcaagacaatgtcgcttccgattctgatttcattcccaaagactccgcttttgaggttacggattcagctgagagtaatagattggtttccgatacggaggtttcggaattagagacgaatgatagatttgtgggtggtgaggagacgaaaagtggaggagaagaagcggaggttagtaatggagtaacggaaggtaaggaggaagatcagaagaagagcaagtttaggattgtggtgttgatgatggcactatgggcggctataaagagagtatagagaaggtaatggagtggggaatgggntaaactggtgggctttctctcgccaaggaagaaacggntccaagaaacttaatgcctggaaggctggatgccaaa

SEQ ID NO: 5840 - DNA, 448 bp, Arabidopsis thaliana
  unsure at all n locations
  Clone ID: LIB23-001-Q1-E1-F6
acgcgtccgcttgtagtgaattcactgcaaagtaagggaaagcttggcttggaaatgggagttgaacaagccatcgattcgggctaatgtgtatagtttgattcgtctggggagcttttgagagatagcaatttagttttccgcttacgaatgatctttttctgatgcgtcattttgattaagtgtgtacttctgcaatggaggcttctctagctgttatacagaggcctcaagctggagcttcgaatacggtttataagagtggccctctcttcatatcatcaaaaggactaagttggacatcctggaanaagcgttgggttaaccctaacccgaactttctttggcctttttcaaaaatgatccaagtgcattaacaacaaaaagggaaggtnaattaaatttgacccttgganggaattgacttgaacagttcggggaatgcctg

SEQ ID NO: 5841 - DNA, 446 bp, Arabidopsis thaliana
  unsure at all n locations
  Clone ID: LIB23-001-Q1-E1-F8
acgcgtccgcccacgcgtccggtgataactcaattgaggtttcctgtttcagatagcgagagatttggtgtcccggagcaagttgttgttatggattcgagcgtcttgagcggtggaggagctttaggggagcttaagtttccggtgattgctaagccgttggatgctgatgggagtgctaaatctcataagatgtttttgatttatgatcaagaagggatgaagattttgaaagctcctattgtgttgcaggagtttgtgaatcatggtggtgtgatctttaaggtctatgtggttggagatcatgtcaaatgtgtaaagaagaagatctttacctgatatctctgaagagaagattgggacgtcgaaagggtctcttccgttttcgcanatatcgaatctgactgctcaagangacaagaacattgantatggtgaaggatagg

SEQ ID NO: 5842 - DNA, 448 bp, Arabidopsis thaliana
  unsure at all n locations
  Clone ID: LIB23-001-Q1-E1-F9
acgcgtccgcccacgcgtccgagttttcattgtccttgtgaaaaatgcaattctcttcatcttctattacttctttcacttggacagttttaatcacagtgggatgtcttatgctttgtgcgtctttctccgatgctcaacttacccctactttttacgacacttcatgtcctaccgtcaccaacattgtaagagataccattgtcaacgagctaagatcggaccctcgtatcgccgggagcatccttcgtcttcacttccatgactgctttgttaatggttgtgatgcttcgatcttgttaagacaacacgacatcatttcgaacagagaaagatgcacttggaaatgcaaattcagcccgagggatttccaagtgattgatagaatgaaagctgcngtgggagaaggcatgcccaagaaaccgtttcatgcgcaagatatgctcaa

SEQ ID NO: 5843 - DNA, 437 bp, Arabidopsis thaliana
  Clone ID: LIB23-001-Q1-E1-G2
cacgcgtccggatggatcgttcttcaagcgtttgcagaaattgttagatccgttgcagcagagacttgcagatggatgccatttggcaagaaacacgagagagtgcatcttggaagctggttttagtggaggagttgaagtacagaccttttctatgtatagcttcccttggatgacaagacctcatatctatggactagcttacaactaaaactatcatctttattcaattacactaaaatgattggctttgaatgttttgattcgctgattgctgttattactaaataatatggagaaaaaatgctaattatgtgtaattaaaaagatttgattttgtggacagaatctgaagtagagaaaaacatatcttcatgttactcttatgctctgttttgggtatatgaagtaatttgagctttgataagttaaaaaaa

SEQ ID NO: 5844 - DNA, 494 bp, Arabidopsis thaliana
  unsure at all n locations
  Clone ID: LIB23-001-Q1-E1-G4
cgattggttngccgccttccggaaatnacgggtcgacccacgcgtccgcccacgcgtccgctctggtatataggaatacctcatggtgcggacaatacaatcccagagtgggtgtagttcttgagttcctctacaacatcatcgagtttagtgcagttttttagttagaaatttatagtcaagcaataatggatcacacggtgtgcaagcaagttcagccagtcgttaggaaagcgaagaagaagcatggtaaagatgaatttgatcgtatcaaacaagctgagaagaaaaagagacgtttggagaaagctcttgctacttctgcagccatccggggctgagcttgaaaagaagaagcagaagagattgggaagaacaacaaaggttagatgaagaaggagctgcaattgcagaagctgttgctctgcacgtcctactggggcgaaagattcctgatgattcatctcgagtcaagtttggtgaagaaaagggtt

SEQ ID NO: 5845 - DNA, 446 bp, Arabidopsis thaliana
  Clone ID: LIB23-001-Q1-E1-G5
acgcgtccgcggacgcgtgggatcaagatcaccaccacaaggcaaaatctaaactctctctgcaaaatttctgctaacttcttcctcccattttcttgccatggaaatcgattccgccaccaacggaaactctgacaccgtcatgacggaatccgccgctacgatcactccgtcgccggtcgtcgtctcgtcttcgagatcgaatcaatttacggaatctctcaagcttgagcaccagctcctccgcgttcctttcgagcattacaagaagacgatccgtaccaatcaccgttcgttcgagaaagaggtctcaaccattgttaacggcgtcggagaattggctgattccgattggtctaaagacgataccgtttcgcgtcttacttgccttgttactcgattacaaggcctcaaacgaaagttggaagaagggagcaatgtggaga

SEQ ID NO: 5846 - DNA, 447 bp, Arabidopsis thaliana
  Clone ID: LIB23-001-Q1-E1-G7
acgcgtccggtttcttgaaagcattccctagctttttggaggaaactgatatctacaaacgacgtgagctactcgaggagacaagtaatttagcggctgagcctgctccttcagctcctagtccttctcccgggattataactgaagcttcacctcgaagcagcgggtctttccctgcagtaaccaatgcaaagaagagaagaccacctttagtccctcctgtaccttctcctgataagggcagtactagtcctgatatctctaagaatcagccacaagataataaacagtcaaaaggatcaaaacatgtatggctgtatgtggttatcgcggttgcttctttcgtcggtttactgattatagtagcggttatcttcttctgccggaaaagagctgtcaagagcataagtccttggaaaactggtcctagtggacaattgcaagaaa

SEQ ID NO: 5847 - DNA, 446 bp, Arabidopsis thaliana
  unsure at all n locations
  Clone ID: LIB23-001-Q1-E1-G8
acgcgtccgggcaacgattgtaagcagagggaaggcgaagaattatgataacctctcatcaacgataagacaaaatccataaactagtaatatcatccaatcctctcacttcttccttattccctcactttcactctcactatctgttgacttcacatggcttccaccgccgcaactgcagctctttcgatcatcaaatccaccggtggcgccgccgttacacgctcctcccgcgcctcctttggacacattccctccacatctgtctccgcacgtcgccttggcttctccgccgtcgttgactctcgtttctcggtccacgtggcgtccaaggtccactccgtgcgcggaaagggcgccaggggagtgattacgatggcgaagaagagtgttggagatctgaattctgtagatttgaaggggaagaaggtgtttgttanagctga

SEQ ID NO: 5848 - DNA, 493 bp, Arabidopsis thaliana
  unsure at all n locations
  Clone ID: LIB23-001-Q1-E1-G9
cctgncctaggcctccgganatccaaggtcgacccacgcgtccgctcnattaanccagcttatagaagaagaaacggcaccagcttctgtcgttttagttagctcgagatctgtgtttctttttttcttggcttctgagcttttggcggtggtgggtttttctggagaaacccaaacgactatcaaagttttgttttttacaattttaagtgggagttatgagtggggtggattaagtaagttacaagtatgaaggagttgaagattcgaagaagcggttttgaagtcggngagaccaagattgcgaagcttatttggctgatgatttatttcagggaagaagaaataaatcngttttttttagggtttttaagatttggttggtgaatggggtgggaangtggaagggaaacaagtttaaaaanagttatggcttttaagtgtctccttccttcaatnaanttncatttggggcaatcttgaaatccttggg

SEQ ID NO: 5849 - DNA, 451 bp, Arabidopsis thaliana
  unsure at all n locations
  Clone ID: LIB23-001-Q1-E1-H1
acgcgtccgcccacgcgtccggtgcgtgtcttcttcttcgtttgacctgtaattttaaagcgcattttcttcttcgcatagcagaagttttatttctccttggatccacttccacgtctttttttctccggatcttcagctctgaggatttttaaagcttttaagcgcttattggagttcgtatgagcaaacgtgagtcttgtctgcctgaaaaatcttctcttggcttggttctgaaatgtgactgaaagtattggttttaggcagattttgattcttcaattttttttcgttaagagggtttcgtgtatcaagacaacatctgaacagagaaaagtatttatcttttctgttggttactacaagaattggtgggattttattgcaaaangtcaataaatggcaagaccaaagctctgttgatgggattttagagtttccttaagaataa

SEQ ID NO: 5850 - DNA, 453 bp, Arabidopsis thaliana
  unsure at all n locations
  Clone ID: LIB23-001-Q1-E1-E5
acgcgtccgcaacttcactctctctcttnnnnnnnnnnnnnnnnnnnnnnnnnnnnnnnnnnnnnnnnnnnnnnnnnnnnnnnnnnnnnnnnnnnnnnngccactcacgaacactcctcagtaaccagagagagaagaagaagaacaacaagccatgtcttaactcttaactaatctcttcttctccctccatttcaccaaccaaaaaccctaaaatccttaaaatcacaagtttcttcagcaatgatgcttcaaagaagctgcattgtacttttcttctctctttttctgttggttncacaaatggttttctcgatgctcaacaagaactcttcttctcataccacatcctgacccggaactagtcgcttatcaagttcagtggaaagtaaatgcatctataacaaggngtcaagctctagacacgacgggaccaaggccggttcgaccccg

SEQ ID NO: 5851 - DNA, 454 bp, Arabidopsis thaliana
  unsure at all n locations
  Clone ID: LIB23-001-Q1-E1-B5
acgcgtccgcgatcaggtaaaaacaagcgagctgatttctcacaagggatatcaaaatttctggtgaagtgggattgtaaaattcggcgttgaaagatatataaagagtggaaggttctggagtcgtttcaattcatggatgatggtactcctaagaagctaaacatattacctgatcactttagtgctcctagtcccacagcagaatcttctcagcacgatactccatcatcttcgcagccaaaggacgatagttctctgaggccttatagccagtcacggactcgcagaaacctgaaaagagcagcaactatgttgaatttgttcactcttcgccgtctgccttgggtttcagatggtcaagagaaggtcgagctatcagcagcggagttagaatcacttagatcagaactttctgatatggaaagaaagagaagcttacctcaaagcccan

SEQ ID NO: 5852 - DNA, 447 bp, Arabidopsis thaliana
  Clone ID: LIB23-001-Q1-E1-B6
acgcgtccgaagagagagagctatcaatcgatcattgattgattgcagagaagcagcgaaagagacatttccaaatctaatctcaatccaatccaattcagggttgttgctaccttcacgaatgacgacgacttctgtttgcccgttctcgaaagctgctcgtcctgacgatgggtcgactcgaaaacaaggcgaaattaccgcttctggttgtcctttttctaaagctgctcgtcccgacgatgcctctgctcgaaagcaaggggaaacgacggcttctggttgccctttttctaaatctgctccgtcctgacgaaaatgggagtaaaggatgtcctgaacaagaaggaaacttgaataaggactctactgattctgcaacggtacctgccaagtgcccttttggctatgactctcaaacattcaagcttgggccttttagctgta

SEQ ID NO: 5853 - DNA, 483 bp, Arabidopsis thaliana
  unsure at all n locations
  Clone ID: LIB23-001-Q1-E1-C10
acggttgcctgtgcctagggtccggaatcccnggtcgacccacgcgtccgcccacgcgtccgcccacgcgtccgcggacgcgtgggacgtctcttcttttcttgtcgattttccccagataatcagttgaaaacacacccaaattcatcttcgaatcaataatggatataagtaatgaggctagtgtcgatcccttttcgattggaccatcatctatcatgggtcgaaccattgctttcagagtcttgttctgtagatcaatgtcacagcttaggcgtgatctctttcggttcttgttgcattggtttcttagatttaagctgaccgtttcaccgtttgtgtcgtggtttcatcctcggaaccctcaagggattttaagcggtggttacaatcattgcctttgtgttgaaacgatacacgaatggtgaaaataaaggcggaaatggcttaacgganggaagttttggaggaataagatgccgg

SEQ ID NO: 5854 - DNA, 457 bp, Arabidopsis thaliana
  unsure at all n locations
  Clone ID: LIB23-001-Q1-E1-C3
acgcgtccggaanaagaacttctctgcatcaatggcgatctccaagctccatctactcttccttctctcagtctttctctcccttcatcctcttgttctttccgacaccgccgatgaagaagatgttcttcttacaggcatcaacagttacagagcatcactaaacctaacaaccttaatacacaaccacaacgcagaatgtctagcagacgaaatcgcagaccaattcaagaaccaaccttgcacaaacaccactggctcagcctctgtccctggaaccacacctgggattcccaaacttgcctaacctcctctcaaaatgccgcctcaaccctaccgtaactagagacggtgcgattttgccagcttgtgttcccaaccttgatcctagccttgtcttgaccaaatttcacaatgtcacagtactccaaggacctgaatgattctaagttcactg

SEQ ID NO: 5855 - DNA, 445 bp, Arabidopsis thaliana
  Clone ID: LIB23-001-Q1-E1-C8
acgcgtccgcccacgcgtccgcggacgcgtgggcgagttctacaattgtgtgatcaatcaatcttctccgatttcaagcttctcgatcaaaagaatcatcatgggaggaggaagagctatggcgacggcggcgaaggttgctggaatcggagttggtaaaggaggattcaagggatttggatttcctccggcgactgagcagtttcgtgttaaaaccgcggcggctgcggcgtcgtctaaaccggtttcggcttcgattacatcggcggttcatccttctgttgaagaagatgggatgattatgcagagaccggtttgggatgattgggaatttgctgaagaagaaccgattcctagggttgtttttagcaaacctcctagtcttgaagaagctaaagaagctactgaagatcttaaagaagcaattaatttggtgtatatgtca

SEQ ID NO: 5856 - DNA, 426 bp, Arabidopsis thaliana
  unsure at all n locations
  Clone ID: LIB23-001-Q1-E1-D10
acgcgtccgcgcccatggccgccttctccgtcaacgggcagcttatcccgacggcaacaagctccactgcttccacctctctctcttcccgtcggaaatttctctctccttcctcgtctcgtctccctcgcatctccactcaatctcctcgtgtcccatcgataaaatgcagcaaaagcttacctaaccgagatacagagacttcctcaaaggattctctccttaaaaacctagctaaacctctagccgtagcctcagtctcctccgctgcttcattctttctgttccgaatctcgaatcttccgtcggttctgaccnnnnnnnnnnnnnnnnnnnnnnnnnnnnnnnnnnnnnnnnnnnnnnnnnnnnnnnnnnnnnnnnnnnnnnnnnnnnnnnnnnnnnnnnnnnnnnnnnnnttcccccttc

SEQ ID NO: 5857 - DNA, 437 bp, Arabidopsis thaliana
  unsure at all n locations
  Clone ID: LIB23-001-Q1-E1-D11
acgcgtccggaatttacagtatttgaaaaaatacaaaatggcgaaaatctaccggaagttgacaggctacggtggtgaaggagggcgtgaatgggacgatgatgtatatgagggtgtaagaaaagtgtatgtaggacaagatatcaatcgtatcacttacgtcaaattcgagtatgtgaaggaagacggccaagtcgtaacaactgaatatgggaaaatcattcaacaacccaaagagtttgtacttcaatatccggacgaacatatcatagcggtggaaggaaactatcgcggagtggctctatgtgccacagaggtgatcacaaacctcgtcttcaagacctcaaagggtagaaagtcaccactgtttggtccaaacttgcttggaattacgaccggtacaaagttccgttattgangatggaggaaaagaaaat

SEQ ID NO: 5858 - DNA, 464 bp, Arabidopsis thaliana
  unsure at all n locations
  Clone ID: LIB23-001-Q1-E1-D12
gtccggaatccnggctccttctctctttctctcntcctccaatggcgaaactaacaacagactctcctctctgccggaaaatcgtccgttctttcttaaattttcttgattccgttgaggttgctccaggtgttgacgaagaaggtcttgaggttgctagagaatgtttaagagaagcttttaaacttaattcagattcttcaagagatgatgatgatgatagctttaaacctatttcacttgttaatttgtttacttcattggacaacaatgaannnnnnnnnnnnnnnnnnnnnnnnnntgttgctgctactactcaggatcctagttcctccggttctcatgtctccgtggatacgtgtaaagagcctaagttttactgggacttctagagatgaactgtttgggtcaactctttgggtgcgcttganaaagtacggtattttaaggaatacacctgaagg

SEQ ID NO: 5859 - DNA, 450 bp, Arabidopsis thaliana
  unsure at all n locations
  Clone ID: LIB23-001-Q1-E1-D4
acgcgtccgcccacgcgtccggaatttggtaccgacactattattcaggattttcagtttgaagagattgatgaagttctgaaatattacccgcacggttatcacagtgtagataaagaaggcaggcctgtgtatattgaaaggcttgggaaagttgatcctaacaaactgatgcaagttactacgcttgatcgatatattagagatcatgttaaggagttcgagaggagttttatgctcaagtttcctgcctgcactattgctgccaagaagtatattgattcaagcacaactattttggacgtccaaggagtgggactgaagaacttcacaaagtctgctcgtgagcttattacaaggttgcagaagattgatggagacaattatcctgagaacctccaccaaatgtttatcatcaatgcanggcccggattccgtctgctttgggag

SEQ ID NO: 5860 - DNA, 463 bp, Arabidopsis thaliana
  Clone ID: LIB23-001-Q1-E1-D6
acgcgtccgctttcatccataaacttctatttttctcatcgcaaacttgaaccgtcgtaaccctaaatcgccatcttcatcatcggcaaatcgaatctccgattatatatcaaatagcttaccaaatccgacatgacccaggccctcgttttcggaggactataatgatcggactcttcgtgtcccgtctcgattgcatggggtttgagctatgccggagcttcgccgtggagtccgccgtggccgtgttactgatgctgtagctcccaatcagcttccgcaaacacctacagaaaagaaaccgaagaagagtaccgttaaagctccaaaaccggttgccggcggagttacagggagtttgcaagagagggccgaaggactaagattaacgggcgaagaaaatttaaagggaggaaagataaagaagatacctcaaggagaatcccgggttggttgttgccgt

SEQ ID NO: 5861 - DNA, 445 bp, Arabidopsis thaliana
  Clone ID: LIB23-001-Q1-E1-D8
acgcgtccgcccacgcgtccggtttattagggatcttgtggttcttgctggagttttagcactacaggtgcccttgaaggtgctcacttcctcgctactggcaaactcgttagtctcagtgaacaacagctcgtcgattgtgatcacgagtgtgatccagaagaggaaggttcatgtgattctggttgtaacggtgggcttatgaacagtgcctttgaatacacgcttaaaaccggagggcttatgcgagagaaagattatccttacaccggtactgatggagggagctgcaagttagacaggtctaagatcgttgcctctgtctccaactttagtgttgtgtccatcaacgaagatcaaatagctgcaaaccttatcaaaaacggtcctctaactgtggcgatcaatgcagcttatatgcaaacctacattggaggagtctcgt

SEQ ID NO: 5862 - DNA, 450 bp, Arabidopsis thaliana
  Clone ID: LIB23-001-Q1-E1-E2
acgcgtccgggtcgtctcttctcggtttacctcaaatgtccttactaccacgggtattttccgatacagtaattctgctggtggtgtttctggacctattcctggtggacctaccattcaaatcgactggtccttgaaccaggctcgagccatcaggactaacctttcagcgagcggaccaaggccaaatccacaaggatcgtaccactacggtatgataaacactacaagaacgatcagacttgctagctctgctggtcaggttgatgggaagcaacgatacgctgtgaacagtgtctcattcaaacccgcagacactcctctgaaaatcgcggactacttcaagattgacggtgtttacaagaagtggaagcatacagtaccaacccactgggtggaggaatatacctcgacacatctgttatgcaagttgattacagaacctttgtg

SEQ ID NO: 5863 - DNA, 453 bp, Arabidopsis thaliana
  unsure at all n locations
  Clone ID: LIB23-001-Q1-E1-E3
acgcgtccggtcntctaaatctctatcgaatttttctagggttagggctcctgatcgatttcgcgagctctgcgattattttaagtattaggatccgaaattagaaatgggtggagagggagattcaagtcagccgcagagtggtgaaggagaagctgtggctgtgaacatcaggtgctctaatggcacgaaatttagtgtgaagacgagtctcgattcaacggtggagtctttcaaagagttggtggctcagagcagcgatgttccagctaatcagcagcgcttgatttacaaggggtcgtatcctcaaggacgatnaaactctcctcagctatggtttgcaggctgatcacaccattcatatggttagaggctctgcaccttcttcaacaccaactcctgctccggccgcaagccaaaccactgcanctaatgttactccaaggggttggg

SEQ ID NO: 5864 - DNA, 451 bp, Arabidopsis thaliana
  unsure at all n locations
  Clone ID: LIB23-001-Q1-E1-E4
acgcgtccggagctttctcaatctctctttactgattcttaatgaaagtcatctcctttctctttggtatcccttttcttcttctctgcttaattcctgaccaaaaattgtgacaagatctttcaatccaaaagctatatacattaagagctcaggtcactatctgacgggatccgtgacaatagtggttactggagtcaaaagcagctccttgaatcttgagtgttaagtagataggtaaggtaaccgttcatggcctcgaagtatggttctggagttctcccagaaaataannaggaaaagggcgataaggaaaccccggaaacatcttattccaagtcaaagtgtctcagtaaacactttggcaagatcaagtatcttcaactttgtcctttgctccaagcagcgacaagtaaaactggaggtgaagttaaatttaatgaaaagtctg

SEQ ID NO: 5865 - DNA, 450 bp, Arabidopsis thaliana
  unsure at all n locations
  Clone ID: LIB23-001-Q1-E1-B4
acgcgtccgctangcaccctgctgttaactgcattagtttcacgggtggtgataccggaatctcaatctcaaagaaagctggtatgatccctcttcaaatggaacttggaggtaaagatgcatgcattgttctagatgatgctgatcttgatttagttgcttccaatatcatcaaaggaggattctcttacagcgggcagagatgcactgcggttaaggtagtcctagtgatggaatcagtagcggatgagcttgttgagaaagtgaaagctaaagtggccaaactcacggtgggaccgcccgaagagaactccgatatcacggcagtggtgtcggaatcttcagctaatttcattgaaggattggtgatggatgctaaggagaaaggagcaacgttttgtcaagagtataaaaagagaaggtaacttgatttggccgttgcttttggga

SEQ ID NO: 5866 - DNA, 276 bp, Arabidopsis thaliana
  Clone ID: LIB23-009-Q1-E2-G10
cccacacgtcggcgcatctcattgcttcatcattagcatatcatcaacttaatcgtttcactcaaaattagggttttctcttttctcgaaagtcttgccgttttctgaatcatctctatctggtttgagggtttcgtttgatatctggataaaggggtttctggaaacaaggagttcaaaattcgcgatcttgataaatcgatcgtcagtacatattggcacatgaatgagattacgagggattctacatgtggtaaaataaattccattagtaat

SEQ ID NO: 5867 - DNA, 339 bp, Arabidopsis thaliana
  Clone ID: LIB23-047-Q1-E1-G2
cccacgcgtccgcggacgcgtgggattgcttcatcattaccaaatcatcaacttaatcgtttctctcaaatttagggttttctcttttctcgaaagtcttgcggttttctgaatcatctctatctggtttgagggtttcgtttgatatctggagaaaggggtttctggaaacaaggagttcataattcgcgatcttgatctatcgatcttcatttatatataaaagcgtgaatgagattatgatggagtcgaaaggtggtaaaaagaagtccagcagtagtagttccttattttacgaagctcccctcggttacagcattgaagacgttcgtccaaacg

SEQ ID NO: 5868 - DNA, 307 bp, Arabidopsis thaliana
  Clone ID: LIB23-058-Q1-E1-F5
cccacgcgtccggcttcatcattaccaaatcatcaacttaatcgtttctctcaaatttagggttttctcttttctcgaaagtcttgcggttttctgaatcatctctatctggtttgagggtttcgtttgatatctggagaaaggggtttctggaaacaaggagttcataattcgcgatcttgatctatcgatcttcatttatatataaaagcgtgaatgagattatgatggagtcgaaaggtggtaaaaagaagtccagcagtagtagttccttattttacgaagctcccctcggttacagcattga

SEQ ID NO: 5869 - DNA, 385 bp, Arabidopsis thaliana
  Clone ID: LIB23-049-Q1-E1-C3
cccacgcgtccgcaattgatcgttggagagagatgaaacgatcaattggactcttacgtactctctgagtccagcttctttgtctacccctacaaagtcatcatcaagacttgcggtaccactaagctcctcctctctatcccaccacttctaaagctggctggtgagctctctctgagtgtcaagtctgtgaagtacactcgcggctccttcctctgccccggaggccagccttttcctcaccgcagcttctctgaagaagtctctgttcttgatgggcactttactcagctgggcttgaacagcgtagcctacttgatgggcaatgatgatgagactaagaaatggcatgtccatgctgcctcggcccaggactccaacaaac

SEQ ID NO: 5870 - DNA, 336 bp, Arabidopsis thaliana
  Clone ID: LIB23-007-Q1-E1-G3
attgcttcatcattaccaaatcatcaacttaatcgtttctctcaaatttagggttttctcttttctcgaaagtcttgcggttttctgaatcatctctatctggtttgagggtttcgtttgatatctggagaaaggggtttctggaaacaaggagttcataattcgcgatcttgatctatcgatcttcatttatatataaaagcgtgaatgagattatgatggagtcgaaaggtggtaaaaagaagtccagcagtagtagttccttattttacgaagctcccctcggttacagcattgaagacgttcgtccaaacggtggaatcaagaaattcaaat

SEQ ID NO: 5871 - DNA, 344 bp, Arabidopsis thaliana
  Clone ID: LIB23-047-Q1-E1-C6
attgcttcatcattaccaaatcatcaacttaatcgtttctctcaaatttagggttttctcttttctcgaaagtcttgcggttttctgaatcatctctatctggtttgagggtttcgtttgatatctggagaaaggggtttctggaaacaaggagttcataattcgcgatcttgatctatcgatcttcatttatatataaaagcgtgaatgagattatgatggagtcgaaaggtggtaaaaagaattccagcagtagtatttccatattttacgaatctcccctcggttacaacattgaagacgttcgtacagacggtggaatcaagatattcaaatcttctgtc

SEQ ID NO: 5872 - DNA, 369 bp, Arabidopsis thaliana
  Clone ID: LIB23-028-Q1-E1-G10
cttcatcattaccaaatcatcaacttaatcgtttctctcaaatttaaggttttctcttttctcgaaagtcttgcggttttctgaatcatctctatctggtttgagggtttcgtttgatatctggagaaaggggtttctggaaacaaggagttcataattcgcgatcttgatctatcgatcttcatttatatataaaagcgtgaatgagattatgatggagtcgaaaggtggtaaaaagaagtccagcagtagtagttccttattttacgaagctcccctcggttacagcattgaagacgttcgtccaaacggtggaatcaagaaattcaaatcttctgtctactcaaactgctccaagaggccatcctg

SEQ ID NO: 5873 - DNA, 370 bp, Arabidopsis thaliana
  Clone ID: LIB23-048-Q1-E1-D7
aaagaagctcctcctctctatcccaccacttctaaagctggctggtgagctctctctgagtgtcaagtctgtgaaatacactcgcggctccttcctctgccccggaggccagcctttttcctcaccgcagcttctctgaagaagtctctgttcttgatgggcactttactcagctgggcttgaacagcgtagcctacttgatgggcaatgatgatgagactaagaaatggcatgtctatgctgcctctgcccaggactccagcaactgcaacaacaatgtctacactctcgagatgtgcatgactggtctggacagagagaaagctgctgtcttctacaaggatgaagctgacaagactgggtcaatgac

SEQ ID NO: 5874 - DNA, 374 bp, Arabidopsis thaliana
  Clone ID: LIB23-038-Q1-E1-D5
attgattcatcattaccaaatcatcaacttaatcgtttctctcaaatttagggttttctcttttctcgaaagtcttgcggttttctgaatcatctctatctggtttgagggtttcgtttgatatctggagaaaggggtttctggaaacaaggagttcataattcgcgatcttgatctatcgatcttcatttatatataaaagcgtgaatgagattatgatggagtcgaaaggtggtaaaaagaagtccagcagtagtagttccttattttacgaagctcccctcggttacagcattgaagacgttcgtccaaacggtggaatcaagaaattcagatcttctgtctactcaaactgcttcaaagaggcatcctga

SEQ ID NO: 5875 - DNA, 406 bp, Arabidopsis thaliana
  Clone ID: LIB23-023-Q1-E1-G5
cccacgcgtccgaaatcatcaacttaatcgtttctctcaaatttagggttttctcttttctcgaaagtcttgcggttttctgaatcatctctatctggtttgagggtttcgtttgatatctggagaaaggggtttctggaaacaaggagttcataattcgcgatcttgatctatcgatcttcatttatatataaaagcgtgaatgagattatgatggagtcgaaaggtggtaaaaagaagtccagcagtagtagttccttattttacgaagctcgcctcggttacagcattgaagacgttcgtccaaacggtggaatcaagaaattcagatcttctgtctactcaaactgctccaagaaggcatcctgagtaccaacgtgcatcgattctcataatatagttatag

SEQ ID NO: 5876 - DNA, 403 bp, Arabidopsis thaliana
  Clone ID: LIB23-013-Q1-E1-C7
acattgcttcatcattaccaaatcatcaacttaatcgtttctctcaaatttagggttttctcttttctcgaaagtcttgcggttttctgaatcatctctatctggtttgagggtttcgtttgatatctggagaaaggggtttctggaaacaaggagttcataattcgcgatcttgatctatcgatcttcatttatatataaaagcgtgaatgagattatgatggagtcgaaaggtggtaaaaagaagtccagcagtagtagttccttattttacgaagctcccctcggttacagcattgaagacgttcgtccaaacggtggaatcaagaaattcaaatcttctgtctactcaaactgctccaagaggccatcctgagtagcagcgtgcaccgatcttcataat

SEQ ID NO: 5877 - DNA, 408 bp, Arabidopsis thaliana
  Clone ID: LIB23-063-Q1-E1-B10
cccacgcgtccggcttcatcattaccaaatcatcaacttaatcgtttctctcaaatttagggttttctcttttctcgaaagtcttgcggttttctgaatcatctctatctggtttgagggtttcgtttgatatctggagaaaggggtttctggaaacaaggagttcataattcgcgatcttgatctatcgatcttcatttatatataaaagcgtgaatgagattatgatggagtcgaaaggtggtaaaaagaagtccagcagtagtagttccttattttacgaagctcccctcggttacagcattgaagacgttcgtccaaacggtggaatcaagaaattcaaatcttctgtctactcaaactgctccaagaggccatcctgagttacagcgtgcaccgatcttcata

SEQ ID NO: 5878 - DNA, 442 bp, Arabidopsis thaliana
  Clone ID: LIB23-020-Q1-E1-D12
caacttaatcgtttctctcaaatttagggttttctcttttctcgaaagtcttgcggttttctgaatcatctctatctggtttgagggtttcgtttgatatctggagaaagggggttctggaaacaaggagttcataattcgcgatcttgatctatcgatcttcatttatatataaaagcgtgaatgagattatgatggagtcgaaaggtggtaaaaagaagtccagcagtagtagttccttattttacgaagctcccctcggttacagcattgaagacgttcgtccaaacggtggaatcaagaaattcaaatcttctgtctactcaaactgctccaagaggccatcctgagtaccagcgtgcaccgatcttcataatatagttatagctttctttactttccagtttataattttcttctttcaaagctccttttctgctgg

SEQ ID NO: 5879 - DNA, 416 bp, Arabidopsis thaliana
  Clone ID: LIB23-060-Q1-E1-D7
agcgagtcacgcgccgagttttcctcacttgttctcaataaatctctctctctttcttctctatcgctttcatttttctcctccagatctcgattccaatctctctccctctctacttccttcaacagaaatggaaacgttcctatttacctctgaatccgtcaatgaaggacacccagacaagctttgtgaccagatttctgatgcgatccttgatgcttgcttagagcaagatcctgaaagcaaagtggcgtgtgagacatgcaccaagaccaacatggtgatggtgtttggtgagatcactaccgctgcgaaagttgactatgagaagattgttagatccacttgcagggagattggttttatctctgctgatgttggtcttgacgctgacaaatgcaatgttttggttaaca

SEQ ID NO: 5880 - DNA, 374 bp, Arabidopsis thaliana
  Clone ID: LIB23-028-Q1-E1-B6
cccacgcgtccgccttcttcgctcgctgttcagattttgctttgaggctttaggctccccagatctctaatcgccgcagctttaagaaatggagactttcctattcacatctgagtctgtgaacgaaggacaccctgacaagctttgcgaccagatctctgatgcagtccttgatgcctgccttgagcaagaccctgatagcaaagttgcttgtgagacatgcaccaagaccaacatggtcatggttttcggtgagatcaccaccaaggctacgattgactacgagaagattgtccgtgacacttgccgttccattggattcatctctgacgatgttggtcttgatgctgacaaatgcaaagtccttgttaaca

SEQ ID NO: 5881 - DNA, 245 bp, Arabidopsis thaliana
  Clone ID: LIB23-047-Q1-E1-A3
aattgcttcatcattaccaaatcatcaacttaatcgtttctctcaaatttaggggtttctcctttctcgaaagtcctgcggttttctgaatcatctctatctggtttgagggtttcgtttgatatctggagaaaagggtttctggaaacaaagagttcataattcgcgatcttgatctatcgatcttcatttatatataaaaaccgtgaatgagattataatggagtccaaaggtggtaaaaaga

SEQ ID NO: 5882 - DNA, 373 bp, Arabidopsis thaliana
  Clone ID: LIB23-055-Q1-E1-C11
ctcttcttcgagatctgatcgccgaatctcataatctcccatcgaagcagaatggagacttttctattcacatctgagtctgtaaacgagggacacccagacaagctctgtgaccagatctctgatgcagtcctcgatgcctgccttgaacaagaccctgacagcaaagttgcttgtgagacatgcaccaagaccaacatggtcatggtctttggtgagatcactaccaaggctactgttgactacgagaagattgtccgtgacacctgtcgcgccattggatttgtctctgatgatgttggtcttgatgctgacaaatgcaaagtcctagtcaacattgagcaacagagcccagacattgctcaaggagttc

SEQ ID NO: 5883 - DNA, 436 bp, Arabidopsis thaliana
  unsure at all n locations
  Clone ID: LIB23-010-Q1-E2-H12
cccacgcgtccggtttctcttcttcgagatctgatcgccgaatctcataatctcccatcgaagcagaatggagacttttctattcacatctgagtctgtaaacgagggacacccagacaagctctgtgaccagatctctgatgcagtcctcgatgcctgccttgaacaagaccctgacagcaaagttgcttgtgagacatgcaccaagaccaacatggtcatggtctttggtgagatcactaccaaggctactgttgactacgagaagattgtccgtgacacctgtcgcgccattggatttgtctctgatgatgttggtcttgatgctgacanatgcaaagtcctagtcaacattgagcaacagagcccagacattgctcaaggagttcacggtcanctcaccaaatgtcctgaagaaattggacccggtgaccaa

SEQ ID NO: 5884 - DNA, 385 bp, Arabidopsis thaliana
  Clone ID: LIB23-029-Q1-E1-A6
gattgatccaatctgtgctcttcaggctcttatggaaggtcttcaagttctgacccttgaggatgttgtctcagaagctgatatcttctgtaccactactggtaacaaagatattattatggttgatcacatgaggaagatgaagaacaatgccattgtctgtagcattggtcattttgacaatgaaatcgagatgcttggacttgagacctaccctggtgtgaaacgtattagcatcaagccacagaccgataggtgggtgtttcctcataccaactctggcatcaatgttctagctgaaggtcgtttgatgaacttgggatgcgccattggacacccgagtttcgtgatgtcgtgctcattcaccaacgaggtgattgcacag

SEQ ID NO: 5885 - DNA, 387 bp, Arabidopsis thaliana
  Clone ID: LIB23-042-Q1-E1-D8
gcttggacttgagacctaccctggtgtgaaacgtattaccatcaagccacagaccgataggtgggtgtttcctgataccaactctggcatcattgttctagctgaaggtcgtttgatgaacttgggatgcgccactggacacccgagtttcgtgatgtcgtgctcattcaccaaccaggtgattgcacagcttgagctctggaacgagaagtcaagcgggaagtatgagaagaaggtctatgttttgcctaaacacttggatgagaacgtagctgcacttcacttaggcaagcttggtgcaagactcaccaagcttaccaaggaccaatctgactatgtcagcatacccgttgaaggtccttacaagcctgttcactacaggtactg

SEQ ID NO: 5886 - DNA, 384 bp, Arabidopsis thaliana
  Clone ID: LIB23-023-Q1-E1-B1
ctctcatctccactcttctcattccgtaagtaaaaaaacaaaaaacaaacaaaaatggcttcccacattgttggatatccacgtatgggacctaagagagagctcaagtttgcattggagtctttctgggatggcaagagcagtgccgatgatttgcagaaggtgtctgctgatctcaggtctgatatctggaaacagatgtctgctgctgggattaagtatatcccaagcaacaccttttctcattatgaccaggtgcttgacaccaccgccatgcttggtgctgttccatctagatatggatttaccagtggtgagatcggtctcgatgtttacttctccatggctagaggaaatgcctctgttccagctatggagatgaca

SEQ ID NO: 5887 - DNA, 390 bp, Arabidopsis thaliana
  Clone ID: LIB23-026-Q1-E1-H8
tgcccatctctcatctccactcttctcattccgtaagtaaaaaaacaaaaaacaaacaaaaatggcttcccacattgttggatatccacgtatgggacctaagagagagctcaagtttgcattggagtctttctgggatggcaagagcagtgccgatgatttgcagaaggtgtctgctgatctcaggtctgatatctggaaacagatgtctgctgctgggattaagtatatcccaagcaacaccttttctcattatgaccaggtgcttgacaccaccgccatgcttggtgctgttccatctagatatggatttaccagtggtgagatcggtctcgatgtttacttctccatggctagaggaaatgcctctgttccagctatggagatgac

SEQ ID NO: 5888 - DNA, 326 bp, Arabidopsis thaliana
  Clone ID: LIB23-018-Q1-E1-G2
cccacgcgtccgctttttccttcctcctctccgattcttcctccgtcagtaaaagaaaatcaaaatggcttcacacattgttggatacccacgtatgggccctaagagagagctcaagtttgcattggaatctttctgggatggtaagagcactgctgaggatcttcagaaggtgtctgctgatctcaggtcatccatctggaaacagatgtctgccgctgggactaagttcatccctagcaacacctttgctcactacgaccaggttcttgacaccaccgccatgctcggtgctgttccacctatgtatggatacactggtggtg

SEQ ID NO: 5889 - DNA, 277 bp, Arabidopsis thaliana
  Clone ID: LIB23-057-Q1-E1-C11
cttccccaagagtcaccaacgagggtgtccagaaggctgctgctgctttgaagggatctgaccaccgtcgtgcaaccaatgttagtgctaggctagatgctcagcagaagaagctcaatctcccaatcctaccaaccacaaccattggatccttcccacagactgtagagctcaggagagttcgtcgtgagtacaaggccaaaaaggtctcaaaggaggactacgtttaaacccatcaaggaagagatcaagaaagttgttgacctccaagaggaac

SEQ ID NO: 5890 - DNA, 348 bp, Arabidopsis thaliana
  Clone ID: LIB23-053-Q1-E1-G3
caacgatgatgtatctcgtttattttcgctataaataaactcacacagcccactcttcttcctcgctctctctttcgccttctcttagcctaccctttttccttcctcctctccgattcttcctccgtcagtaaaagaaaatcaaaatggcttcacacattgttggatacccacgtatgggccctaagagagagctcaagtttgcattggaatctttctgggatggtaagagcactgctgaggatcttcagaaggtgtctgctgatctcaggtcatccatctggaaacagatgtctgccgctgggactaagttcatccctagcaacacctttgctcactacgaccagg

SEQ ID NO: 5891 - DNA, 381 bp, Arabidopsis thaliana
  Clone ID: LIB23-051-Q1-E1-E5
acccacgcgtccggtcaccaacgagggtgtccagaaggctgctgctgctttgaagggatctgaccaccgtcgtgcaaccaatgttagtgctaggctagatgctcagcagaagaagctcaatctcccaatcctaccaaccacaaccattggatccttcccacagactgtagagctcacgagagttcgtcgtgagtacaaggccaaaaaggtctcataggaggactacgttaaagccatcaaggaagagatcacgaaagttgttgacctccaagaggaacttgacatcgatgttcttgtccacggagagccagagagacacgacatggttgagtactttggtgagcatttgtctggttttgccgtcactgcaaacggatgggt

SEQ ID NO: 5892 - DNA, 422 bp, Arabidopsis thaliana
  Clone ID: LIB23-015-Q1-E1-B8
agcctaccctttttccttcctcctctccgattcttcctccgtcagtaaaagaaaatcaaaatggcttcacacattgttggatacccacgtatgggccctaagagagagctcaagtttgcattggaatctttctgggatggtaagagcactgctgaggatcttcagaaggtgtctgctgatctcaggtcatccatctggaaacagatgtctgccgctgggactaagttcatccctagcaacacctttgctcactacgaccaggttcttgacaccaccgccatgctcggtgctgttccacctaggtatggatacactggtggtgagatcggccttgatgtttacttctccatggctagaggaaatgcctctgtgcctgccatggaaatgaccaagtggttcgacaccaactaccattacatcgt

SEQ ID NO: 5893 - DNA, 430 bp, Arabidopsis thaliana
  unsure at all n locations
  Clone ID: LIB23-062-Q1-E1-H11
cttctcttagcctaccctttttccttcctcctctccgattcttcctccgtcagtaaaagaaaatcaaaatggcttcacacattgttggatacccacgtatgggccctaagagagagctcaagtttgcattggaatctttctgggatggtaagagcactgctgaggatcttcagaaggtgtctgctgatctcaggtcatccatctggaaacagatgtctgccgctgggactaagttcatccctagcaacacctttgctcactacgaccaggttcttgacaccaccgccatgctcggtgctgttccacctaggtatggatacactggtggtgagatcggccttgatgtttacttctccatggctagaggaaatgcctctgtgcctgccatggaaatgaccaagtggttcgacnacaactaccattacatcgt

SEQ ID NO: 5894 - DNA, 395 bp, Arabidopsis thaliana
  Clone ID: LIB23-003-Q1-E1-E3
aaaagaaaatcaaaatggcttcacacattgttggatacccacgtatgggccctaagagagagctcaagtttgcattggaatctttctgggatggtaagagcactgctgaggatcttcagaaggtgtctgctgatctcaggtcatccatctggaaacagatgtctgccgctgggactaagttcatccctagcaacacctttgctcactacgaccaggttcttgacaccaccgccatgctcggtgctgttccacctaggtatggatacactggtggtgagatcggccttgatgtttacttctccatggctagaggaaatgcctctgtgcctgccatggaaatgaccaagtggttcgacaccaactaccattacatcgtcgctgagttgggccctgag

SEQ ID NO: 5895 - DNA, 448 bp, Arabidopsis thaliana
  Clone ID: LIB23-022-Q2-E1-C10
acttctcttagcctaccctttttccttcctcctctccgattcttcctccgtcagtaaaagaaaatcaaaatggcttcacacattgttggatacccacgtatgggccctaagagagagctcaagtttgcattggaatctttctgggatggtaagagcactgctgaggatcttcagaaggtgtctgctgatctcaggtcatccatctggaaacagatgtctgccgctgggactaagttcatccctagcaacacctttgctcactacgaccaggttcttgacaccaccgccatgctcggtgctgttccacctaggtatggatacactggtggtgagatcggccttgatgtttacttctccatggctagaggaaatgcctctgtgcctgccatggaaatgaccaagtggttcgacaccaactaccattacatcgtccctgagtttggccctg

SEQ ID NO: 5896 - DNA, 422 bp, Arabidopsis thaliana
  Clone ID: LIB23-043-Q1-E1-G1
accaccgccatgctcggtgctgttccacctaggtatggatacactggtggtgagatcggccttgatgtttacttctccatggctagaggaaatgcctctgtgcctgccatggaaatgaccaagtggttcgacaccaactaccattacatcgtccctgagttgggccctgaggttaacttctcttacgcatcccacaaggcggtgaatgagtacaaggaggccaaggctcttggtgttgacaccgtccctgtacttgttggcccagtctcttacttgctgctttccaaggctgccaagggtgttgacaagtcattcgaacttctttctctttcccctaagattctcccgatctaaaaggaagtgattaccgagcttaaggctgctgggtgcacctggattcagcttgacgagcctgtccttgt

SEQ ID NO: 5897 - DNA, 438 bp, Arabidopsis thaliana
  Clone ID: LIB23-010-Q1-E2-G11
ctattacgcatcccacaaggcggtgaatgagtacaaggaggccaaggctcttggtgttgacaccgtccctgtacttgttggcccagtctcttacttgctgctttccaaggctgccaagggtgttgacaagtcattcgaacttctttctcttctccctaagattctcccgatctacaaggaagtgattaccgagcttaaggctgctggtgccacctggattcagcttgacgagcctgtccttgttatggatcttgagggtcagaaactccaggcctttactggtgcctatgctgaacttgaatcaactctttctggtttgaatgttcttgtcgagacctacttcgctgatatccctgctgaggcatacaagaccctaacctcattgaagggtgtgactgcctttggatttgatttggttcgtggcaccaagaaccttga

SEQ ID NO: 5898 - DNA, 332 bp, Arabidopsis thaliana
  Clone ID: LIB23-007-Q1-E1-E11
agaatcattgagaaacgaaacaacaatggccgtctcatcattccagtgccctaccatcttctcctcctcctcaatctccggctttcaatgccgttctgatccagatctcgtcggttctcccgtcggtggatcatctcgccgtcgtgtccatgcctccgccgggatttcttcctcattcaccggggacgctggattatcctccaggatcttaagatttcctcctaatttcgtccgtcagctgagcattaaagcccgtagaaactgtagcaacatcggtgttgcacagatcgtggcggctaagtggtccaacaacccatcctccgcgttacctt

SEQ ID NO: 5899 - DNA, 103 bp, Arabidopsis thaliana
  Clone ID: LIB23-059-Q1-E1-B4
cttcctccgtcagtaaaagaaaatcaaaatggcttcacacattgttggatacccacgtatgggccctaagagagagctcaagtttgcaatgggaacctttcgg

SEQ ID NO: 5900 - DNA, 410 bp, Arabidopsis thaliana
  unsure at all n locations
  Clone ID: LIB23-019-Q1-E1-B5
caaaaagagagagaagagaacgagagaatcattgagaaacgaaacaacaatggccgtctcatcattccagtgccctaccatcttctcctcctcctcaatctccggctttcaatgccgttctgatccagatctcgtcggttctcccgtcggtggatcatctcgccgtcgtgtccatgcctccgccgggatttcttcctcattcaccggggacgctggattatcctccaggatcttaagatttcctcctaatttcgtccgtcagctgagcattaaagcccgtagaaactgtagcaacatcggtgttgcacagatcgtggcggctaagtggtccaacaacccatcctccgcgttaccttctggcgggggngatgctgctatctcgtccgcatctgcggtttcctccgccgcat

SEQ ID NO: 5901 - DNA, 398 bp, Arabidopsis thaliana
  Clone ID: LIB23-017-Q1-E1-H7
accacgcgtccgaaaagagagagaagagaacgagagaatcattgagaaacgaaacaacaatggccgtctcatcattccagtgccctaccatcttctcctcctcctcaatctccggctttcaatgccgttctgatccagatctcgtcggttctcccgtcggtggatcatctcgccgtcgtgtccatgcctccgccgggatttcttcctcattcaccggggacgctggattatcctccaggatcttaagatttcctcctaatttcgtccgtcagctgagcattaaagcccgtagaaactgtagcaacatcggtgttgcacagatcgtggcggctaagtggtccaacaacccatcatccgccgcccctgtggctgccgcgcctctcgtcgtgctgaaaagc

SEQ ID NO: 5902 - DNA, 161 bp, Arabidopsis thaliana
  Clone ID: LIB23-063-Q1-E1-C1
accacgcgtccgggttcttacccttgaggatgttgtctcagaagctgatatctttgtcatcaccaccggtaacaaagacatcatcatggtcgaccacatgatgaagatgattaacaacgctattgtgtgcaacattggtcactttgacaatgagattgaca

SEQ ID NO: 5903 - DNA, 382 bp, Arabidopsis thaliana
  Clone ID: LIB23-049-Q1-E1-C9
acccacgcgtccgctctgcctcctttcggattcaaatctcagatctagctcaaccatggcgttgctcgtcgagaagacctcaagtggccgtgaatacaaggtcaaagacatgtctcaagccgatttcggtcgtctcgaactcgagctcgccgaagttgagatgcctggactcatggcttgtcgtaccgaattcggaccttcgcagccattcaaaggcgctagaatcaccggatctcttcacatgaccatccaaaccgccgtactcatcgaaaccctaactgctctcggtgctgaagtcagatggtgttcctgcaacatcgtttccactcaagaccacgccgccgcagccatcgctcgtgactccgccgctgttttcgcctgg

SEQ ID NO: 5904 - DNA, 470 bp, Arabidopsis thaliana
  Clone ID: LIB23-072-Q1-E1-G3
ctctgaggagactactactggtgttaagaggctttatcagatgcaggagactggagctctcttgttccctgccattaacgtcaatgactctgtcaccaagagcaagtttgacaacttgtacggatgccgacactcgcttcccgatggtctcatgagggctactgatgttatgattgctggaaaggttgctgttatctgtggttatggtgatgtaggaaaaggttgtgctgcagcaatgaaaaccgcgggtgctcgtgtcatagtgactgagattgatccaatctgtgctcttcaggctcttatggaaggtcttcaagttctgacccttgaggatgttgtctcagaagctgatatcttctgtaccactactggtaacaaagatattattatggttgatcacatgaggaagatgaagaacaatgccattgtctgtaacattggtcattttgacaatgaaatcgacatgcttg

SEQ ID NO: 5905 - DNA, 390 bp, Arabidopsis thaliana
  Clone ID: LIB23-030-Q1-E1-E12
cccacgcgtccgcttctcctcgcacacacttctctctctctctctctctgcctcctttcggattcaaatctcagatctagctcaaccatggcgttgctcgtcgagaagacctcaagtggccgtgaatacaaggtcaaagacatgtctcaagccgatttcggtcgtctcgaactcgagctcgccgaagttgagatgcctggactcatggcttgtcgtaccgaattcggaccttctcagccattcaaaggcgctagaatcaccggatctcttcacatgaccatccaaaccgccgtactcatcgaaaccctaactgctctcggtgctgacgtcaaatggtgttcctgcaacatcttttccactcaagaccacgccgccgcagccatcgctcgt

SEQ ID NO: 5906 - DNA, 386 bp, Arabidopsis thaliana
  Clone ID: LIB23-058-Q1-E1-C10
atctctctctctctctgcctcctttcggattcaaatctcagatctagctcaaccatggcgttgctcgtcgagaagacctcaagtggccgtgaatacaaggtcaaagacatgtctcaagccgatttcggtcgtctcgaactcgagctcgccgaagttgagatgcctggactcatggcttgtcgtaccgaattcggaccttctcagccattcaaaggcgctagaatcaccggatctcttcacatgaccatccaaaccgccgtactcatcgaaaccctaactgctctcggtgctgaagtcagatggtgttcctgcaacatcttttccactcaagaccacgccgccgcagccatcgctcgtgactccgccgctgttttcgcctggaaagg

SEQ ID NO: 5907 - DNA, 395 bp, Arabidopsis thaliana
  Clone ID: LIB23-070-Q1-E1-G1
ctctctctctctctctgcctcctttcggattcaaatctcagatctagctcaaccatggcgttgctcgtcgagaagacctcaagtggccgtgaatacaaggtcaaagacatgtctcaagccgatttcggtcgtctcgaactcgagctcgccgaagttgagatgcctggactcatggcttgtcgtaccgaattcggaccttctcagccattcaaaggcgctagaatcaccggatctcttcacatgaccatccaaaccgccgtactcatcgaaaccctaactgctctcggtgctgaagtcagatggtgttcctgcaacatcttttccactcaagaccacgccgccgcagccatcgctcgtgactccgccgctgttttcgcctggaaaggtgagactct

SEQ ID NO: 5908 - DNA, 427 bp, Arabidopsis thaliana
  Clone ID: LIB23-043-Q1-E1-E8
cccacgcgtccgtctctctctctgcctcctttcggattcaaatctcagatctagctcaaccatggcgttgctcgtcgagaagacctcaagtggccgtgaatacaaggtcaaagacatgtctcaagccgatttcggtcgtctcgaactcgagctcgccgaagttgagatgcctggactcatggcttgtcgtaccgaattcggaccttctcagccattcaaaggcgctagaatcaccggatctcttcacatgaccatccaaaccgccgtactcatcgaaaccctaactgctctcggtgctgaagtcagatggtgttcctgcaacatcttttccactcaagaccacgccgccgcagccatcgctcgtgactcggccgctggttttcgcctgaaaagtgagactcttcaggagtactggtggtgttacgag

SEQ ID NO: 5909 - DNA, 422 bp, Arabidopsis thaliana
  Clone ID: LIB23-073-Q1-E1-F6
acttctctctctctctctctctgcctcctttcggattcaaatctcagatctagctcaaccatggcgttgctcgtcgagaagacctcaagtggccgtgaatacaaggtcaaagacatgtctcaagccgatttcggtcgtctcgaactcgagctcgccgaagttgagatgcctggactcatggcttgtcgtaccgaattcggaccttctcagccattcaaaggcgctagaatcaccggatctcttcacatgaccatccaaaccgccgtactcatcgaaaccctagctgctctcggtgctgaagtcagatggtgttcctgcaacatcttttcgactcaagaccatgccgccgcagccatcgctcgtgactccgccgctgttttcgcctggaagggtgagactcttcaggagtactggtggtgtac

SEQ ID NO: 5910 - DNA, 407 bp, Arabidopsis thaliana
  Clone ID: LIB23-046-Q1-E1-G6
ctttcggattcaaatctcagatctagctcaaccatggcgttgctcgtcgagaagacctcaagtggccgtgaatacaaggtcaaagacatgtctcaagccgatttcggtcgtctcgaactcgagctcgccgaagttgagatgcctggactcatggcttgtcgtaccgaattcggaccttctcagccattcaaaggcgctagaatcaccggatctcttcacatgaccatccaaaccgccgtactcatcgaaaccctaactgctctcggtgctgaagtcagatggtgttcctgcaacatcttttccactcaagaccacgccgccgcagccatcgctcgtgactccgccgctgttttcgcctggaaaggtgagactcttcaggagtactggtggtgtaccgagcgtgctct

SEQ ID NO: 5911 - DNA, 409 bp, Arabidopsis thaliana
  Clone ID: LIB23-055-Q1-E1-B8
attcggattcaaatctcagatctagctcaaccatggcgttgctcgtcgagaagacctcaagtggccgtgaatacaaggtcaaagacatgtctcaagccgatttcggtcgtctcgaactcgagctcgccgaagttgagatgcctggactcatggcttgtcgtaccgaattcggaccttctcagccattcaaaggcgctagaatcaccggatctcttcacatgaccatccaaaccgccgtactcatcgaaaccctaactgctctcggtgctgaagtcagatggtgttcctgcaacatcttttccactcaagaccacgccgccgcagccatcgctcgtgactccgccgctgttttcgcctggaaaggtgagactcttcaggagtactggtggtgtaccgagcgtgctctaga

SEQ ID NO: 5912 - DNA, 460 bp, Arabidopsis thaliana
  Clone ID: LIB23-018-Q1-E1-F7
atcagcccacgcgtccggcctcctttcggattcaaatctcagatctagctcaaccatggcgttgctcgtcgagaagacctcaagtggccgtgaatacaaggtcaaagacatgtctcaagccgatttcggtcgtctcgaactcgagctcgccgaagttgagatgcctggactcatggcttgtcgtaccgaattcggaccttctcagccattcaaaggcgctagaatcaccggatctcttcacatgaccatccaaaccgccgtactcatcgaaaccctaactgctctcggtgctgaagtcagatggtgttcctgcaacatcttttccactcaagactacgccgcggtagccatcgctcgtgactccgcaggggtttctcccggaaaagtgagactcctcaggagtactggtggtgtaccgagcgtgctctacattgtggtccaggtggtggtcatgatctga

SEQ ID NO: 5913 - DNA, 442 bp, Arabidopsis thaliana
  Clone ID: LIB23-062-Q1-E1-E5
cttcgcgctctctcactctctgcctcctttcggattcaaatctcagatctagctcaaccatggcgttgctcgtcgagaagacctcaagtggccgtgaatacaaggtcaaagacatgtctcaagccgatttcggtcgtctcgaactcgagctcgccgaagttgagatgcctggactcatggcttgtcgtaccgaattcggaccttctcagccattcaaaggcgctagaatcaccggatctcttcacatgaccatccaaaccgccgtactcatcgaaaccctaactgctctcggtgctgaagtcagatggtgttcctgcaacatcttttccactcaagaccacgccgccgcagccatcgctcgtgactccgccgctgttttcgcctggaaaggtgagactcttcaggagtactggtggtgtaccgagcgtgctctagattgggg

SEQ ID NO: 5914 - DNA, 421 bp, Arabidopsis thaliana
  Clone ID: LIB23-006-Q1-E1-D12
agtgacgctactcttttgattcatgagggtgttaaagctgaggagatctttgagaagactggtcaagttcctgatcctacttctactgataaccctgagtttcagatcgtgttgtctattatcaaggaaggtcttcaagttgatcctaagaagtaccacaagatgaaggagagacttgttggtgtctctgaggaaactaccactggtgttaagaggctttaccagatgcagcaaaatggaactcttttgttccctgccattaacgttaacgactctgtcaccaagagcaagttcgacaacttgtatggttgccgtcactcactccctgatggtctcatgagggccactgatgtcatgatcgctggaaaggttgctgttatctgtggatatggtgatgttggaaagggttgtgctgctgcca

SEQ ID NO: 5915 - DNA, 436 bp, Arabidopsis thaliana
  Clone ID: LIB23-024-Q1-E1-H9
caggagtactggtggtgtaccgagcgtgctctagattggggtccaggtggtggtcctgatctgattgttgatgatggtggtgacgctactcttttgattcatgagggtgttaaagctgaggagatctttgagaagactggtcaagttcctgatcctacttctactgataaccctgagtttcagatcgtgttgtctattatcaaggaaggtcttcaagttgatcctaagaagtaccacaagatgaatgagagacttgttggtgtctctgacgaaactaccactggtgttaagaggctttaccagatgcagcaaaatggaactcttttgttccctgccattaacgttaacgactctgtcaccaagagcaagttcgacaacatgtatggttgcggtcactcactccctgatggtctcatgagggccactgatgtcatga

SEQ ID NO: 5916 - DNA, 281 bp, Arabidopsis thaliana
  Clone ID: LIB23-059-Q1-E1-D12
gccattcaaaggcgctagaatcaccggatctcttcacatgaccatccaaaccgccgtactcatcgaaaccctaactgctctcggtgctgaagtcagatggtgttcctgcaacatcttttccactcaagaccacgccgccgcagccatcgctcgtgactccgccgctgttttcgcctggaaaggtgagactcttcacgagtactggtggtgttccgagccgtgtccaaaattggggtccaggtggtggtcctgatctgattgttgatgatggtggtgacgct

SEQ ID NO: 5917 - DNA, 444 bp, Arabidopsis thaliana
  Clone ID: LIB23-004-Q1-E1-B2
agctctgcctcctttcggattcaaatctcagatctagctcaaccatggcgttgctcgtcgagaagacctcaagtggccgtgaatacaaggtcaaagacatgtctcaagccgatttcggtcgtctcgaactcgagctcgccgaagttgagatgcctggactcatggcttgtcgtaccgaattcggaccttctcagccattcaaaggcgctagaatcaccggatctcttcacatgaccatccaaaccgccgtactcatcgaaaccctaactgctctcggtgctgaagtcagatggtgttcctgcaacatcttttccactcaagaccacgccgccgcagccatcgctcgtgactccgccgctgttttcgcctggaaaggtgagactcttcaggagtactggtggtgtaccgagcgtgctctagattggggtccaggtggtggtcctg

SEQ ID NO: 5918 - DNA, 374 bp, Arabidopsis thaliana
  Clone ID: LIB23-044-Q1-E1-B3
acatcaagccacagaccgataggtgggtgtttcctgataccaactctggcatcattgttctagctgaaggtcgtttgatgaacttgggatgcgccactggacacccgagtttcgtgatgtcgtgctcattcaccaaccaggtgattgcacagcttgagctctggaacgagaagtcaagcgggaagtatgagaagaaggtctatgttttgcctaaacacttggatgagaaggtagctgcacttcacttaggcaagcttggtgcaagactcaccaagcttaccaaggaccaatctgactatgtcagcatacccgttgaaggtccttacaagcctgttcactacaggtactgagaggactaaacagccaagctttgg

SEQ ID NO: 5919 - DNA, 479 bp, Arabidopsis thaliana
  unsure at all n locations
  Clone ID: LIB23-025-Q1-E1-F5
acgcgtccgcccangcgtccggatactggcagagatatatctacttgtggattgattatgcactgtttgaagagattctagctgaagacgtggagcgtactcgagctgtgtacagagaatgcctcaatcttatcccctcactccaaattctcttttgccaagatatggttgctcgctgcacagtttgagatcaggcaattgaatctctcgggtgctcggcggatactaggaaacgccattggcaaagctccaaagcataagattttcaagaaatacattgagattgaactccacttgggaaacatagatagatgtanaaagctgtatgcgcggtatcttgaatggtcncctganaattgctatgcttggaccaagtttgctgagtttgagaagtctcttgctgaaacagaacgagctaaaagctatttttgagccttgcaatancncaacctgttcttgacacccccgagctggggang

SEQ ID NO: 5920 - DNA, 507 bp, Arabidopsis thaliana
  unsure at all n locations
  Clone ID: LIB23-025-Q1-E1-F9
aactggtntgcctgtctctaccggcnccggaantcccggntttgncactgaatcgaaaaanatggatgctaatttcgagatgcctccagtcggtggaatgaacgacgacgacgacatggatttcggtgacggcgcctcgtttcttaaagtcggtgaagagaaagagatccaacaaggtttgaagaagaagcttcttaaagaaggtgaaggatatgaaactcctgagaatggcgatgaagttgaagtgcattacactggaactttgcttgatgggacgaagtttgattcgagtcgtgatagagcaacgcctttcaaattcactcttggacaaggtcaagttattaaaggatgggatattggtattaagacgatgaagaaaggtgaaaacgctgttttcactatacctgcggagctagcatatggggaatctggttccccgccaactattcctgcgaatgctacgcttcagtttgatgttggagttgcttaaatgggacagtgtgaagg

SEQ ID NO: 5921 - DNA, 513 bp, Arabidopsis thaliana
  unsure at all n locations
  Clone ID: LIB23-025-Q1-E1-G10
ctggtctgcctggntctaccggncccgganatcccggatcgacccacgcgtccgcggangcgtgggttcaagctcttgaaaagttgaatttagagttagctaccaagtcagtgctcttgggaaacggattgacgccatcggcagctgatgttgctgtgttttcagctctgcattcttcagtgcttggcctctcagattcagacaaggagaaagtaccacatgtcataagatgggtgaattacatccanaataaagaagagttgtcgacattatttgcaccaatacctgtgaagctaccagaatttagcttccaggtaccaaaaacctgccattaaggtgggaaacaaattctaattcaaaaaaagctgcanaaaggtgttaaaacctgttnacaagccacatttgcaaccgcagctnggcacaaagnaaactgagccnagaggaaccaaganaatgcgncaaagagaaggntgcaaaaaggaaanaagaacccgctgaaccagaccactaaga

SEQ ID NO: 5922 - DNA, 468 bp, Arabidopsis thaliana
  unsure at all n locations
  Clone ID: LIB23-025-Q1-E1-G3
acgcgtccgctctaaatgcgttcactgcttcaccgtactatcttactcacatctccgtctcattctcttatccggcgcacttctctctccgccatggccaccaccgcctcctcttccttgctcctcccttccatatctctcaacaatctctcctcctctaaaaatgcctcctttggcttcgccgccaagaatctcagccgatctaggatttctatgagcgtctctgctggatctcagagtactactgttcacgattctctgttcgctgattacaaacccacctctgcttttctctttcccggtcagggagctcatgcagtaggaatgggaanagagtctcanagtgttggagcagctgnngaagttgtatacganagctantgatngcttaanggtatgatcttttggngtatttgngtaaatgggacaaannnagaaccttgggtctaaggtcataagccatcctgg

SEQ ID NO: 5923 - DNA, 511 bp, Arabidopsis thaliana
  unsure at all n locations
  Clone ID: LIB23-025-Q1-E1-H11
aactggtctgcctggntctaccggcccgganatcccggntcgacccacgcgtccgcgannaggaatcaaatcagaacgaagaaacttctgccgaagatgaagatcctgagatctccaagtgggaagctatcatttggctttcaatattgactgcttgggtctctcttctttctggctatcttgttgatgccatagagggtgcctcagtctcatggaatataccaatagcttttatcagtaccatcttgcttcctatagttgggaacgcagctgaacatgcaggggctatcatgtttgccatgaaagacaagctggatctgtctttgggagtggctattgggtcctcgatccagatttccatgtttgcggtcccattctgcgtggtgattggatggatgatgggtcaacagatggaccttaacttccaacttttttgagacgggcgatgctgttcatcactggtaatantantancaatttttccccaaggaaagggtcatccaanttactt

SEQ ID NO: 5924 - DNA, 479 bp, Arabidopsis thaliana
  unsure at all n locations
  Clone ID: LIB23-025-Q1-E1-H12
ggtccgcctggncgtgaaantcccggancgacccacgcgtccgcaagncctctcacttcttcttcttcctccgacaccgttgcttaacggttttccatttttgtcccttcaagatgatctcatggcacgacctctacacggtcctcaccgccgtgattcctctctacgtggccatgatcctcgcttacggctctgtccggtggtggaaaatcttctcacccgaccaatgctccggaatcaaccgttttgtcgccatcttcgccgtccctctcctctcttttcacttcatctccaccaacaatccttacgcaatgaatctccggttcatcgccgccgacactctccaaaaaatcancatggttgtcactttaagcccaatgggntaaattcaaccgctccnggaacctccaaatggagcaatacaatccttttcctncccaaannttccaanaatcctggtaaggggaatccncccctga

SEQ ID NO: 5925 - DNA, 512 bp, Arabidopsis thaliana
  unsure at all n locations
  Clone ID: LIB23-025-Q1-E1-H3
acggttgcctgtcctaccggcccggaatccgnntcgacccacgcgnccgcttcatcttccncgcttaaacccattaattcaatttcttcatagccagcaataagatctggcaaattaaaccattccactatgcttcgtatagttcaaatcacgcttctttgtttcgttctcgccgccgggatctcgatctccgccgtgatcgccgagaatgaatctatagacgagatccttctagcgaatggattacctttggggctatttcctaaaggcgtgaaaggatttaccgttaatggcgaaacgggacggttctcggtttatttgaatcagtcatgccaggctaagtatgagacagagctgcattacgatgagattgtttcgggaacgataggttatgctcaaatcanggatttatcgggaatctcagcgcaaagagctgttcttgtggttacaggtgaaaggaatccgantccaacttgccaactcctgggcttaaattcttcgacgttggngtt

SEQ ID NO: 5926 - DNA, 533 bp, Arabidopsis thaliana
  unsure at all n locations
  Clone ID: LIB23-025-Q1-E1-H4
ttcccnacggcccggaaatcccgnancgacccacgcgtccgctcgatttcacaggcggaataaacaagttggatgggactcggcaaaaagtatttcttctcatcccaaccaatttaggctctatgttattgttatatggttacagttattgttacttttcatggcgtgtatctgacacatccatcatgaaaattgcaggtacttcatcttatgattgcttcttcaaacactggttctgttatttatttcgtggctgcggttatagcgacttgcacaaggtggcatcattgggtccaacgcattaggttttctactcatggcctttcccaaaaattctgtttcctggcaaactttcctccngcttcccnctttcngggtaaaaagntttgcaaccagggaaaatgggnaaggagggatnatgatgaagatgaaagaaaattancatccaacaaantgttgccttgaaaaaagcaangnncaanccangttcttcnaangcaantggttcttaaaaatggttggccccttccaag

SEQ ID NO: 5927 - DNA, 436 bp, Arabidopsis thaliana
  unsure at all n locations
  Clone ID: LIB23-026-Q1-E1-A10
acgcgtccggaaaaagaaaacattaatttcaaccaaagcanaacanagagaaaaaaatagagagagtgaatcaatttcggtggagaaagagaagaatggagcagccgtacgtgtacgcatacccgcaaggtagtggcccctcgggagctccgactccacaagccggaggagtggtagtggatccaaagtactgcgctccttaccctatagatatggcgatcgtacngaagatgatgtcgttaacggacggcaatttcgtgataacggacgtcnacggcaacctgctgttcaangtgaaagaaccggtgttttggnccccacgacaaaaagggtcttgccggatgggtctggtaatcccggtcctcactttganaggaaanatggtggncatgcatgacangtgggaantgtttaaaaggagggattacggttancg

SEQ ID NO: 5928 - DNA, 473 bp, Arabidopsis thaliana
  unsure at all n locations
  Clone ID: LIB23-026-Q1-E1-A11
tngcccggtcgacccacgcgnccggccnaaagctctcgcgattcctgatgttcttcagtaatttcttgcaatccttataaacaaagagcgtggagaatcgtttcagaggaaagaaaactaaaaatggcgactcttttcaacaaatttcagcaggctgttggagttcttgccaagagtaccacatttgctaagaacccaaggcaactgcagtttgaagcagacgttaacaaactctttatgtatacaagctataaccggttgggacgagaagctgaggagactgatgcagaggaagatnattgagatggctggtaaagccactttatctgagcaacaagaangcaaagttcaagagaacattcactagcaagttgaaaaattccgctcctttgatgggatgggnatccttccgtccctgatgttangaaggacgaatccggggtcacaatcaacaagccctcgttctcccncgt

SEQ ID NO: 5929 - DNA, 481 bp, Arabidopsis thaliana
  unsure at all n locations
  Clone ID: LIB23-026-Q1-E1-A2
tccatactcggtggcgactcaaaatgggtcaagaatcgtttatctatagcttcgtcgccagaggaactatgatcctcgccgagtataccgaattcacaggcaatttcccgtctattgctgctcagtgtctccagaagcttccgtcctccagcaacagcaagttcacttacaactgcgatcaccataccttcaatttccttgtcgaagatggctacgcatattgtgttgtggcgaaagattctcttagcaagcaaatctcgatcgcatttctggagcgtgtgaaagctgatttcaagaagagatatggaggtggaaaagcaagtacagctatcgccaaaagtctcaacaaggagttcgggccggtgatgaaaggaacacatgaattatattgttgaccatgcagaaggagattgaaaaactaataaaagtcaaggntcaaggttcagaagttaaagtataatgttggggaatattgacaagg

SEQ ID NO: 5930 - DNA, 484 bp, Arabidopsis thaliana
  unsure at all n locations
  Clone ID: LIB23-026-Q1-E1-A3
cgacccacgcntccgcggacgcgtgggttcctcttcctttttctttccttatatcgagaaaagcctctgcctcatatagagataactaaacagaacagagcaagaactatacagccataacaatggctgtcacaaaacttattctctttgcttctgcattacttctaacagctctatttatcggcgttaatgcatccaggtccaatgaaacatggnatgaacatgcagttgagaacccagatgaagtcgctgccatggtggacatgngcattcgaaacagcacagagcggagaagattangttacttctcctgcgccaccggcaacccaatcgacgattgctggcgttgcgaccgcaaatggnaactccgtcgcaaacgtttaacccgattgctcaatccggntttggccgcaacgcaatcggagggcgccgacggtccgttctacgttcttaaccgancctggagacgacgattcccgtttat

SEQ ID NO: 5931 - DNA, 456 bp, Arabidopsis thaliana
  unsure at all n locations
  Clone ID: LIB23-026-Q1-E1-B11
acgcgtccgcgancgtagaaaccttgaaaatccgagacatccacaatgccgccaaagttggatccgagtcagatcgttgacgtgtacgtccgagtaaccgggggagaagtcggagcagcgagttctctagctcccaaaatcggtccgctaggtctcgcaccaaagaagatcggagaagatatcgcgaaagaaaccgcaaaggaatggaaaggattacgtgtaaccgtcaagctcacagtgcagaatcgtcaggcgaaagtgacggtggttccatcagcagcagcactcgtcatcaaggcgttgaaagaaccggagagagataggaagaaggtgaagaacattaagcataacgggaacatctcgtttgatgatgtgactgagaatgctaagatcatgaganctanatctantgctaaaggaattgagtgggacagtganggaaaatctgggaacttg

SEQ ID NO: 5932 - DNA, 483 bp, Arabidopsis thaliana
  unsure at all n locations
  Clone ID: LIB23-025-Q1-E1-F3
acgcgtccgcccacgcgtccgaataatttgagatggcgataggaaacccagaagtagcaactatggggaaggagaacactgaagccgagtcctctaatggaaacgagtctcagttaagttctgacttaacgaagagtcttgatctggctnnnnnnnnnnnnnnnnnnnnnnnnnnnnnnnnnnnnnnnnnnnnnnnnnnnnnnnnnnnnnnnnnnnnnnnnnnnnnnnnnnnnnnnnnnnnnnnnnnnnnnnnnnnnngttctcttcaacagactgatcctccttcaattcctgttcttgagctcttcccttctggagattttcctcaaggtgaaatccaacagtacaatgatgataatttgtggagaacaacatctgaagagaagagagagatggagaggctgcaaaagccgatatataactctcttcgccaagcagcggaagttcacntcaagttaggaagtanatgaaaaagtaactgcc

SEQ ID NO: 5933 - DNA, 448 bp, Arabidopsis thaliana
  unsure at all n locations
  Clone ID: LIB23-025-Q1-E1-D3
aatggtcctacggcccggaatccgggtcgacccacgcgtccgacggaaacgggtttgattctcatgtggttccctttgataatattgggattgtttgttttgaaatgggtgctgaagagagtgaatgtttggatttatgtgtccaaacttggtgagaaaaaacactatctgccaccaggtgatttgggatggccagtcataggcaacatgtggtcctttcttagagctttcaaaacatctgatcctgaatccttcatccaatcctacatcaccaggtatgggcgtaccgggatttataaagcacacatgtttgggtacccatgtgtactattaacaacaccaganacttgtaggcaanttctaacagatgatgatgccttccacataggttggccaaaatctaccatgaaactcattggcaggaattcctttgttggtncccctttga

SEQ ID NO: 5934 - DNA, 445 bp, Arabidopsis thaliana
  unsure at all n locations
  Clone ID: LIB23-025-Q1-E1-D6
acgcgtccggtgtttcatcgtgatttgaagcctaaaaatattctagccaactctgattgcaagttgaagatttgcgactttgggcttgctcgagtgtcctttaatgatgcaccttcggctatattctggactgactatgttgctacaagatggtaccgtgcgccagaactttgtggctctttcttctccaaatatactcctgccattgatatatggagcataggatgcatatttgcaagaaatgctcactgggaagccattgttcctgggaagaagttggtgcacaattggtatatgactgatttgcntggnaactcctcctccnaannctattgcaaggattcntangggaaaaggggnangagatattccgggantaataanggggaaaaccgccaanttccaancaattccccaaantttcccccaagtnggaccccaattg

SEQ ID NO: 5935 - DNA, 463 bp, Arabidopsis thaliana
  unsure at all n locations
  Clone ID: LIB23-025-Q1-E1-D7
acgcgtccgcccacgcgtccgggacagagcggcatgaatcacgtcgaatagacaatcagttgcgtgggcgaagtggccggcaaggggatcctggaagttcccgattcttccttagtcttgaagataacatattccgcatttttggtggagatcggattcagggtatgatgagggcattcagggtggaagatttaccgatcgaatccaagatgcttactaaagctctagatgaagctcagagaaaagttgagaattacttctttgacatcagaaagcaattattcgaatttgacgaggttctcaatagccaangagatcgtgtttatacagananaaggcgtgcncttgtttcggananccttgacccccggattaccgantaggctnanttganaanggttgacattctaaggnnaaatttgggcccanatnccccaagggaaaccgggattttgaaanccca

SEQ ID NO: 5936 - DNA, 503 bp, Arabidopsis thaliana
  unsure at all n locations
  Clone ID: LIB23-025-Q1-E1-D8
aantggtctgccggtgccctgggcntacnaatccgganattcncgggtcgacccacgcgtccgttctcatctcatcttcaagccatctccgatcatcatcagacaatggcagcagctatggcaacagcaaccaagtgcatgtctctaaacccatctcctcctaaactccaaaaccaaaccaaatccaaaccattcatctccctaccaaccccaccaaaaccaaacgtctctctcgccgtcacaagcaccgccctagccggagccgtcttctcttccctcagctactctgagccagctttagccatccaacagatcgctcagctcgctgcangcanacgccagtagcgacaacngtggcttagctcttctccttcccatcgtcccaanccattgcatgggtcctttanaacatcctccangccagctattaancaaggtcaacangntgcgtgagagtaaaggtatcgntgttggtctaggtantggtggtggtcntgcagggt

SEQ ID NO: 5937 - DNA, 504 bp, Arabidopsis thaliana
  unsure at all n locations
  Clone ID: LIB23-025-Q1-E1-D9
actggtntgcctggctctaccggcccggaaatcccggntcgacccacgcgtccgtcggattttcaccgctggcattgcttccttctacgagggttactatgccaacaaaggaattaacattgtcaaaggcactgttgcatctggtttcactaccaactcaaatggagaggtcactgaggtgaaattgaaagacggaagaacgttagaagctgatattgtgatagtgggtgtcggtggtagaccaattatatcactcttcaaagatcaagttgaagaagagaagggtggtttgaagactgatgggttcttcaaaacaagccttccagatgtatacgccattggtgatgtagccaccttcccaatgaaactctacaatgaaatgagacgcgttgaacacgttgaccatgctcgcaaatccgctgaacaagccgtaaaggcaatcaaggcggctgangaaaggaactcaattccggaatatgactatcttccatactttactcccga

SEQ ID NO: 5938 - DNA, 465 bp, Arabidopsis thaliana
  unsure at all n locations
  Clone ID: LIB23-025-Q1-E1-E1
aactgttncccacgccccggaaatcccgnagtcgacccacgcgtccgcccangcgtccgggatcattcgactctcattagtactgctacttgcatctgagtttatgaattgggacaatggatctgcagattgtgtgtgatctgatgaaaccattgttgtgtttttttgtttcatctcaagaaactagctaaagagatctgttactgcattatctattgatgttgtctatttatgtgtgtttcaggtgatttaagacaacatcaatagataatgcagtaacagatctctttagctattgatgttgtctatttatgtgtgtttcaggtgatttaagacatttcctcgatgatttgtgatccaactcngtttctcttttgntgttgtactcncatgttcccacttntgtcccaagtgttaactcagaantttacnccncagtnanaaaaaaaaaaaangggcgggccg

SEQ ID NO: 5939 - DNA, 529 bp, Arabidopsis thaliana
  unsure at all n locations
  Clone ID: LIB23-025-Q1-E1-E10
ctggtttccctgggccctaccgggtccgganattcccggntcgacccacgcgtccgggaaactgagaagaaattggaacttaaagacggtaaaggaggaaaacttgtgggattccatgggaaagctagtgatgttctttatgctcttggcgcttatttcgctccaacaacaaattcaactacgccatcgactccttctacatctaagaaactacaagcaagaggtggaaatggaggagcttcttgggatgatggtgtttttgatggtgttagaaagatacttgtacgtcaaggaaacgatggtgtagctttcgttacgtttgagtacaacaaaagctctcaagcaatcctccgtgatcgtcatgggaaagcaaacattacctgggnactgaaaacgttttgngcttgantaaccaagtgagtacatcacttcggtagaaagggtaccaatgacaaaaattttcggngtttgaaacctgaaantggtgaccantcctaacgttccaaagaactaaccaagagaaacntct

SEQ ID NO: 5940 - DNA, 459 bp, Arabidopsis thaliana
  unsure at all n locations
  Clone ID: LIB23-025-Q1-E1-E11
acgcgtccgggaaatctgctgttagtcacagtataatatggagtagaccactcactgcaaaacgagtagagatcgatggagctactgcttattctgttgatggaactcctgcggattgcactggtttgggcttatcggaagcactctttccttctcgtcctgacctggttctgagtggtataaacgtgggtagcaactgcggttataacatcgtctattctggaactgttgctggcgctcgtgaagccttcctttatgatgtgccttctgcctccatatcatatgattttgattggaaacgtggagagatgaatgctaatgattttgccctttctgcccaancctgcttgcccattatcaacggcatactcggtgcaatcaagaacaaaactcancctatgcaatgctttctgaatatcgatttgccgactgatattgctaaccacaagggatacaaac

SEQ ID NO: 5941 - DNA, 472 bp, Arabidopsis thaliana
  unsure at all n locations
  Clone ID: LIB23-025-Q1-E1-E2
gttcctacgnccccggaaatcccgnagtcgacccacgcgtccgggttnctcttcggttcttttgagcctagagttgcgtattgtgatgctgctgctgcaatagatgatgattaccttggtgctatacggaaaatgtctgcggatgttttgcagcgtcaaccccttgcgtatatttctaggtccaaggaatacaatatccagccaaaaccagttctctcggcctttgagttcagggcacttgcaatgactacagtgagatcccttttgatgttttatttgcctcttttggagcctaaaacggnttcagaggatgatgatgatttcctaaacaatgctgcagaagaaaaccgccacacagacttgattgttcctcttaaanagtcagcaaagcatgattgcccgtgaaaccananttgnaaccactcagncantccttggaaggctgggactnaagttactcncacaacgtaag

SEQ ID NO: 5942 - DNA, 452 bp, Arabidopsis thaliana
  unsure at all n locations
  Clone ID: LIB23-025-Q1-E1-E8
acgcgtccgagcaaccactgaatctcgactttgatcaattgagagagaaatgaacaccggcggtggccaatacacggattttccggcggtggaaactcacggaggacagttcataagttacgatatcttcggtagtttattcgagatcacatctaagtatcgtcctccgattataccaattggtcgtggagcttatggaatcgtttgctctgtgttggntacngagaacaacgaacctantaccatgaagaagatagctaatgcttttgataatcatatggatgctaaacgtacgcctcgtgagattaagcttcntcgtcatcctgatcatgaaaacattatagctattagaaatgttgttcaccaacactaagaagacaatttnatggngtttaaaacccacngaattaaggggaacngtttncaacaatcatcaagatttaancagagtt

SEQ ID NO: 5943 - DNA, 463 bp, Arabidopsis thaliana
  Clone ID: LIB23-025-Q1-E1-F11
acgcgtccgcacaagaacagggcaaggaaaatgtcggttttcctctgtttcctcgtcctcttacccctgatcttaatcttcttgaacgttttgaaaccttcgaaatataagcttcctccgggtccaaagaagcttcccatcatcggaaacttacaccaacgcaggacactacatccgaggaatcgccgtaatctcgccgaaatgtatggaccagtggcgcttctccaatacggattcgtccccgtggtcgcgatctcttcgaaagaagcagcagaggaagtgctaaagatcaacgatcttgagtgttgtagtcgaccaagaggcggccggaatgagagcaactttttacaacttcaaagacatcggggatggcacccttcggtgacgagtggagtctgatgcggaagctctcggtggtcgagctcttcagcgtgaaaaagcttcaatctttcaagtatatcat

SEQ ID NO: 5944 - DNA, 504 bp, Arabidopsis thaliana
  unsure at all n locations
  Clone ID: LIB23-025-Q1-E1-F12
gttccctggntctaccggcccggaaatcccggatcgacccacgcgtccgcttcaagcttccggaatctttggtgatcaccgaccggatctggacgaagaatctcgttaacaaactcaacaagcattctccaaagcttcctcctttttcttcaacgatcgtcattgcattgtaatttggagagtttagctacaaagtctgtcttcatcgaattaagatctatctgatttttctgggtggntctcatgtgtgagatttttgatgggtttagagttgtcggatatggaangtcttcttatctttgatttgtnttataaattaagcggnaanaattttganggtgactttgagccgaaaaacctggattccttccaaggaagtaattaatggtccctgangaantcccctgtttttgccgncaaattttcaattttccngagtggtaataaatttagaatcnataatgcagcaagatananagaaantgtgttaatcngaagaagacc

SEQ ID NO: 5945 - DNA, 481 bp, Arabidopsis thaliana
  unsure at all n locations
  Clone ID: LIB23-025-Q1-E1-F2
acgcgtccgcccacgcgtccgattcaataaaaggcgaaaaatctctcactgcactttatctcgagagctcagatctccgatctagagcctttcgcttctcctcttctgttcatataacaactgaataatgtcgatctccgcccaaaatccggatatttccggcgatagacaatccggccaagatgttcgtactcagaacgtgatggcttgtcaagctgtttctaatattgttaagacctcacttggtcccgtcggcctcgacaagatgttggtggatgatattggtgatgtgactattacaaatgatggtgctactattcttangatgttggaggtcgagcaccctgctgctaaggttcttgtcgagttagctgaacttcaagatagagaagtcggtgatgggactacatccgttggtaatggtanctgctgaattgttgaagaaggcaaatgatttggcaggaacaaaatacatccaaca

SEQ ID NO: 5946 - DNA, 506 bp, Arabidopsis thaliana
  unsure at all n locations
  Clone ID: LIB23-025-Q1-E1-D2
aatggttgcctgtcntaccggcccggaatcccgngtcgacccacgcgtccgtgtancttcactaattccacatactcagagagaaatggcaaccgaaaccgtattagccacggcggtgagcaatggcaaaagcaaaggatgttgcaagtccggtccaggttacgcgacgcctctcgccgccatggccggtccacgggaaaagctcatctatgtcactgccctttactccggaacggggcgagacaaaccggactacttggcaacggtggatgtggatccaagctcacccacattttcaagcgtcattcacagactaaaaatgccatatataggagatgagcttcaccacactggttggaactcttgcagctcttgccatggtgatgcttctgctgatagacgttaccttgtcttacaagcttantttcnggcgcatctangcaatcgacacaaagacgacccaanggtcctcttgtanaaggttttaagcctaggnaattccgaaa

SEQ ID NO: 5947 - DNA, 540 bp, Arabidopsis thaliana
  unsure at all n locations
  Clone ID: LIB23-025-Q1-E1-B4
ggaactggtttgcctgttccctaccggcncgggaaatcccgantcgacccacgcgtccggcaancaaaatgtttgttcttgatgaagctgatgaaatgctctctcgtggtttcaaggatcagatatacgacatcttccagcttcttccttccaaggttcaggttggtgttttctctgctacaatgcctcccgaagcccttgagatcacaaggaagttcatgaacaaaccagtcaggattctggtcaagcgagacgagctgactcttgaaggtatcaagcagttttatgtcaatgtagacaaggaagagtggaaactcgagacactatgcgatctctacgagacactggccatcactcaaagcgtcatctttgtgaacacaaggcgtaaggttgattggctaaccgacaaaatgagaaaccgtgaccacactgtttcagctacacacggnggacatgggaccaagaacacaagagacatcatcaatcccnaaattccgctcctgggtcctncccgtgtccncaaaaacactggacctccnt

SEQ ID NO: 5948 - DNA, 459 bp, Arabidopsis thaliana
  unsure at all n locations
  Clone ID: LIB23-025-Q1-E1-B5
acgcgtccgctcgcttaatttctcaataacgctctcagagagaccatttgatgaagcttctcgcttctggaatttgaaaaggatttgataagacgagttcatagaagattaccgcaagttcatcaactttttgaacttgttatggagataatctcactgaacgttgtgccccagtgctctgtggttacttggagtagtaaattagcaacgaaaagattggtcccaaatcggtcaagtttgttattctcaggggtcaaaaaatccagacttgtgattcgaagtggaaattccgatggttatgttgttggtgagaatgatgacttgggtcgtatagccagaagaggagaatcaacgtcaaangntttgattcccggtttgcctgatgaatcaaatggtgaaattgctgctcgaatcaatcaatcccactgcgantggaagccaagcctaaagtacantatg

SEQ ID NO: 5949 - DNA, 466 bp, Arabidopsis thaliana
  unsure at all n locations
  Clone ID: LIB23-025-Q1-E1-B8
acgcgtccgcccaagcgtccggagagtgtatccatttttggaggggaaaacaaagtatgcagcagccctgtgtgatagtgggttcgaagtactgctcaccaaaccctgtaggtttggcgatcgtccgtaaggtgatgaagataacggacggtaacttcgtgataacgagtgcggacggtaagttattgttcaaggtgaangatcctttgtttagtcttcacggcaagangatcttgctggattgttctggagctaaggtcttaactttgagagggaagatgatgaccatgcatgacaggtggcaagtgtttagagganggagtacgganganggtgctctactatacacggtgaaaagatcgtccatgattcanctaacccctaaacttnaggtgtttttggctaacaacgtanagganaagatatgtgatttcaaagtcaaaggggcctggctcgacnacccttg

SEQ ID NO: 5950 - DNA, 476 bp, Arabidopsis thaliana
  unsure at all n locations
  Clone ID: LIB23-025-Q1-E1-C1
acgcgtccgctcaatctttttcgtcgtcaaaagccaaagctttttgcttttttgtcttaatgggtttcatctcttgcatctcatttccgacgatcaattcaagaattctatcgactcaccacttttccaagcactcgacttcagcgtcttcttcatattcacttaagtttgctttgagacgtcaggaggataaacccaaagtctcgttttttcttccattaacgtcttcgttaatggcgacccctattcaagcctcttcttcctccaccattggtgagaccagtgatggcttgaaggtccagtctcatgtttcaattggagcaaacgatctgctgattgttggaccgggtgttcttggacgcttagttgcagaacagtggagacaggaacatccagagtctcaaatcttgggcagacagtaacaacaaatcatcaaggggaanttggngaaattgggtatcaaaccatcncctaaa

SEQ ID NO: 5951 - DNA, 479 bp, Arabidopsis thaliana
  unsure at all n locations
  Clone ID: LIB23-025-Q1-E1-C10
acgcgtccgcccanctctttttttttttttaacttgtcttctctctttccttaactttgatggcactgtcccttctctcctacaacgtctccgacctctgtctcggcaaacctcctcttcgttgtctttcctcctcttcctcctccgtatccgacgccatcgctgccctcaaatcctctgaagacactttcctctccgtctggaattgcaatcacgacgatgacaataacacagagtgcgagtgcttggggaaaatatcaatggctgacgtcatctgccacttgtccaaagaccatgaccacagtctctgtgccttaaaactcatccgtctctgttcttctccccaaaactcgttccattgtcctccatgttcaaccaatcctgcaagttccttaatccttccaaaactcccctccnggttttgaagggtctacaattaaaaanttcaaccctttaagtttgtggcctaanccggtttc

SEQ ID NO: 5952 - DNA, 472 bp, Arabidopsis thaliana
  unsure at all n locations
  Clone ID: LIB23-025-Q1-E1-C11
acgcgtccgcccangcgtccggaaacaaacacgagaagaaatacttctacaaaaggaaagaagaagataaaagaaatccttcaaaaagcagatgctgcagggacaacttctgatctctatatggcttacaaagggcctgaggaaaagaaagagagctcaaatgttgttcatgatgtttcgaaccagaacctgttacctgccatacctcaggctgttgaagccattgtggatactgaaccagtgaaaaatgaaccagaagactgggaagatgcagccgatgtttctacaccaaagctggaaactgcagataattctgtgaatgcaaagagaggttcctcagatgaggtcagcgacaactgcatcaatacagaaaagaagtactcccgggatttcctccctaaaattttgcaaganctgtgttactggctccttccctgaagggaatttgacgttttcncctgataattgccaa

SEQ ID NO: 5953 - DNA, 660 bp, Arabidopsis thaliana
  unsure at all n locations
  Clone ID: LIB23-025-Q1-E1-C12
aaantgggtttcgcctgggcnngtaccgggctccgggaaaattcccgggagtcggacccaacggcgntccgggcaaaaacaaaaggggaaagaaaggaaatcaaagaatgggctctggggaaaaatcctggtggttggaaaaaagctggcctggtttggggtggctccctggattcaatcctcgggcggaactggtcccggtttcaaagcccaaacgggggcctcctttctccaacaactccgaaagggaagaaagaagtcctttaaccctaacaaaaatcccatctggattaaacccttctcctggaacaaaaacccccaagttgggtttctttgggacatttaagtcccttcaaaggggaaaagttaccaagttgcnttaangattcgaacgaacaangttgggttgaactggatttcccgaacgtncatccgtttgggtaataactccnaaggaggaanttatccctgattcaaccaantcaaagaactccctggctgaaattttgcccnccggtttgggttcaacaatttttgggnacttttggggaaattcttngaagagcaaanggntccaatgacggtttgaaaaanccttggtttttnagcctaaaacnttgggaaacctcttaannttccnaatgggccttttttccccgg

SEQ ID NO: 5954 - DNA, 530 bp, Arabidopsis thaliana
  unsure at all n locations
  Clone ID: LIB23-025-Q1-E1-C2
antggttgcctgttcctaccgccccggaaatcccgantcgacccacgcgtccgtgcaagcaaggaaacagcgagaagcagtacttgaggctgcactagctgagaaagaatacatagaagaagagtttaggaaaaaagctgaagaagcaaagagaagagaagaggcccttgaaaacgatttagccaacatgtgggtgcttgttgccaagttgaagaaagccaatagtggcgccttgtcaatacaaaagagtgacgaagcagagcctgcaaaggaagatgaagtgacagagttagataataagaatgaacaaaatgcaatcttgaaagagaggcaactcgtgaatggacatgaagaagtaatagttgccaaggctgaagagacaccaaaggaggaacctcttgttgctcgtcttaaggcaagaatgcaagagatgaaagagaaagagatgaaatctcangcggctgcaacagctaatgctgatgcaaactcacatatatgttaaagtcngttttgagtcccccgaccgccac

SEQ ID NO: 5955 - DNA, 469 bp, Arabidopsis thaliana
  unsure at all n locations
  Clone ID: LIB23-025-Q1-E1-C3
acgcgtccgttcttcttctcttgatcaccattgctattgcatatgctgcaactcctgcccaaccagtatttccatctgcatttaacgcagaagtctccagatatagaggaggacaaagaccagttaaaggtgaatggtactatagcgttgctctcaatgctgaaagatttgattttgatatgattgatcacaatgaccaacctgttcatgaagcattttatgcacttcataatgaatcaactggatatttgatgaccactgctggaggtagcttctcatgcagaaaacttaacattggatccaaactttttgttccatctctcactggattcacttatactggattagatgttgtccaactcaatatgccaacccctgcatacaaatggataaactctaaccaaactgatgaactcaaagtatactacaatcaagtttactgctcaaaataccccngttagagcaagat

SEQ ID NO: 5956 - DNA, 480 bp, Arabidopsis thaliana
  unsure at all n locations
  Clone ID: LIB23-025-Q1-E1-C5
acgcgtccgcgcaaaaatcagtttctctttgagtaagtgtttattacaattaaactaactcaggcaagtctatgatcatggcttcttctgctgctgcatcgatctctatgataactctaaggaacctctctcgcaatcatcaatctcaccaaagcacttttctcggtttctctagatccttccataaccaaaggatctcatctaacagtccaggtctctccacacgagcaagatccaccacttcctccactggaggtttcttcagaaccatttgcagcaagcagtagcaatgactactccaagaccaactaagattcaagagcttaacgtctacgagttcaacgaaggtatcgaaacagtcaagcggttttaaaactaagggaaaaaaccaagatcagcctttgtctccgagatcttgtccccttcacaaacaaactcctacacanggagatntcacaaaacgcataggaatcaccgcan

SEQ ID NO: 5957 - DNA, 460 bp, Arabidopsis thaliana
  unsure at all n locations
  Clone ID: LIB23-025-Q1-E1-D11
acgcgtccggttaatttagagcaacatccgtccggtgttccaaactttcaagcaccaatgggatggccaaaccatatgcctcaatacttttacccgtctccataccaaggctatccgtaccctcctatgcaacacatgccaaatcaaaaccaaggaaacatgccatggccttcaaggggcaaaacatccaagaaaaaagggaagggggattctgatggagatgagtctagtgaatcaagtgaatctagtgaatctgaatcggccagcgatgattctgcttcatctttggaagatcaaggtaaaagacactctcgtacaagtaaaaactcacgccgatnaaagaaaaaccggaagaagtcatctaaaactgttatcatccgtaatattaactatataacccggagggaaaaaatggagacatggaggggaaatgantttacgggacaacggttccntccaa

SEQ ID NO: 5958 - DNA, 501 bp, Arabidopsis thaliana
  unsure at all n locations
  Clone ID: LIB23-025-Q1-E1-D12
cggcccggaantcccggatcgacccacgcgtccggtanaccgtcaaacgctcctccgtccnnnnnnnnnnnnnnnnnnnnnnnnnnnnnnnnnnnnnnnnnnnnnnnnnnnnnnnnnnnnnnntctcatcgatcactctctccaagatctattcacgcatcgtcggaagaattttcgcttccgacgacgtttctctcgtctgattttgtctccgaacatcctacctaatcgtattcggtgctggatttgaatccggtgaactgaatctgacaatttcgttcccggaggtgtttaaaaatggccgggatcttgaataaattgcggaatctagatgcatatcctaagatcaatgaagattttacagccgtacattatcccgggggagttatcaactcctctcctnctncgttggttaagttccctcccctcctcctccgaactccgtccttaaccttcaatacaagtcaacgngacgaaagcntaaaagtagataccttcaan

SEQ ID NO: 5959 - DNA, 471 bp, Arabidopsis thaliana
  unsure at all n locations
  Clone ID: LIB23-025-Q1-E1-B3
acgcgtccgggtgtttgaagcattcgaagtcggcacagtcccattcaattccgatggttggggaccaccagatgcttccgacacttcctccaccagcgtcgcggcggcgaatctcctcccaaacgtccccttcgcttccttctcacgatccgaaaaactcggacgcgttgctgattggactcgagctctctcaaatccatcagctcgtcctcacaccggatccaaatcagatccatcagcgatcttcgatttctcagcttttgcagtagatgaaggatttggtctaacaaactcaggtggaaacgccgacgaagacgccgctttccgattagtcgacggaaaaccaccgccgcgtcctaaattcggacctaaatggagattcaatcaataccataaccgaaatcagcttcctcaacgtcgtgatgaagaagttgaanctaagaaacgtgaagctgagaaagtngagctcgt

SEQ ID NO: 5960 - DNA, 447 bp, Arabidopsis thaliana
  unsure at all n locations
  Clone ID: LIB23-023-Q1-E1-D12
acgcgtccggaaaaattcattcctctttgaatgttgttttttattcccgtcgtacagatcaaaaaccaaacagtccctctcgacctactggattcgcgttttgcttttgatcacatcttcgtcattgagcttcntcttcttctcgatccctgttggttttggttgttgtttttgatgaactgatagtggagatcagagatctggaaaacagagccgtgtgttactgttttggattgatggaactgaagaaacgttgtgagaaagttagggaaactgtgaanaaatgaagttttacatatcancgacggggattaagaaggttacgatatcaaatcccggcgtcggaatcggtaaaggaagcggaggatgtgcggctgcaacggcggcgttagcancgcggagattctctaatcgcacgttgttactgttgctgctgctgcacgcaac

SEQ ID NO: 5961 - DNA, 463 bp, Arabidopsis thaliana
  unsure at all n locations
  Clone ID: LIB23-023-Q1-E1-D2
acgcgtccgcccacgcgtccgattttctctgaaacgtcacgaacgtgtgaattgggttaaaaaattcatctcattgatcnaaacttgaaaccctaatttcgaatctctttgctgatttggtgagatctcaatttcgganagaagatgacgaaggatttcgcagttccacctgtagttttcccctccggtggatcttcaggcggtgctaatgtccagcaacgaanattcccagcganaccgtttcaaccgccgcgtccctcttcttccgcaatccctttcatgtcattcgacattggatccgcagccgcgtcgtccgctacacctgccggacattcggcgggacaatcgcntcgtcttcntcttttggtggaggttcagcntcgtttgagaanaggnagcattanccaacaanncgnaancaancaaattnaatctggannaagacaaantgatccatcctttt

SEQ ID NO: 5962 - DNA, 494 bp, Arabidopsis thaliana
  unsure at all n locations
  Clone ID: LIB23-023-Q1-E1-D4
acgcgtccgcggacgcgtgggctcagtctcaaagagagtcttggacaagaagtctccttgtaacttcctcgtctttggcttaggacacgatagcttgatgtgggcatctctcaatcacggtggacgcactttgttcctcgaggaagatgaagcttggattgagacagtaactaagaaattcccaaacttggaatcctaccacgtcgtatacgacacaaaagtgaaagattccaacaagcttatggagctaaagagaacagaggattgcaaagccgtgtctgatcctagagattccaaatgtgctctgtctctcaagggttttccagctgacgtgtacgagacgcaatgggatgtgataatgggccatgctcccactgggttaccaacgaatgaagctccaangggaaggatnaancgctaatttacaactgcccgggtttaattggctccgttaaccggttaatgaacgggttggggaaaactgaatgtttttc

SEQ ID NO: 5963 - DNA, 466 bp, Arabidopsis thaliana
  unsure at all n locations
  Clone ID: LIB23-023-Q1-E1-D6
acgcgtccgctcaccctttgtgcaagaaaccttgagagcttaaaaattcttcacttgggtctcttctctctctcttctcttgcgaccattccgttcgatccatatatcaaagcttgatttagttggttttcaatgggggacagtcagtactcgttttctctcaccaccttcagcccatcagggaagctggttcagatagaacatgccctaacagctgttggatcaggccaaacatcacttggaattaaagcttcaaatggagttgtcattgcaactgaaaagaaacttccttctatattggttgatgaagcgtctgttcaaaagattcaacatttgactcccaacattggaactgtttacagtggtatgggtcctgatttccgagttcctgtgcgaaagagtangaagcaagctgagcaatatctccgtctgtnacaaggaaccatccccgttaccaacttgttng

SEQ ID NO: 5964 - DNA, 460 bp, Arabidopsis thaliana
  unsure at all n locations
  Clone ID: LIB23-023-Q1-E1-D7
acgcgtccgcncacgcgtccgcaaaaacactatggataagacaatgacactgttcttgctcttgtccactctcctcctcacgacttctttagctaaagatctctgtcataaagatgacaaaactaccctcctcaagatcaagaaatccctaaacaacccttaccacctcgcctcatgggatcccaaaaccgactgttgctcttggtactgcctcnagtgcggngacgctnctgtcaaccaccgtgtcacttcnctaatcatacangacggcgagatntccggtcagatcnnccctgaantcngtgacttaccgtatcttacatcncttatcttccgcaaactcactatcctcactggtcacatcaaacccactatggcnaagctcaanancctcanttttctcagattaanctgggacaatccgaaccggtcngggtcctgaatttcngagtccagctca

SEQ ID NO: 5965 - DNA, 506 bp, Arabidopsis thaliana
  unsure at all n locations
  Clone ID: LIB23-023-Q1-E1-D8
tgttacgcctggcggtagcggtccgnaaattcncgggtcgacccacgcgtccgcgtgacgcgtgggaagaaaaccaacaanaatccaactcaaaatcnaagaccgtgaagagcttgaacaatcccgcaaatctcaaccatnnnnnnnnnnnnnnnnnnnnnnnnnnnnnnnnnnnnnnnnnnnnnnnnnnnnnnnnnnnatagacccanaacacaaaaacccttcctccaaatccgaccgaatcggtctctcttaaaacactccatggaagtcgaagtcaagctccgtctcctaaccgccgctgctcatctccgtctcaccactctcctcactccatacnanctcaanncccttcacgaangcaacaccttcttcgacacacccaaanacgacctctctctcggccgcgccgtcctccgtctncgcttccttcaaaacgccggcggtttccggcgggttntccttctcggngcgttggtangtctcgcttaaagcgnaggcaaatc

SEQ ID NO: 5966 - DNA, 450 bp, Arabidopsis thaliana
  unsure at all n locations
  Clone ID: LIB23-023-Q1-E1-D9
acgcgtccgtttggaccgaaaaaaaaaaaaaagaattcatccccaaatctgcacctcctctcatcttcttcatctccttcaatcttcattatttataacctagaacgactgaatctttctctctctttatctccattttctaggtgtgcttatcanagctagaaagttcttacatttaaatcgccctagttggagaaagccgtcggtttctcattttgaaatttccaaggagatctgaaagttttaattttttggatcgatttcatcgttatcatactccgatcatcatttctgttcaagggttaatcgtaaatcgttcatcgggttagttaaagaggtttactgaaagcannatacgttcttactcgttgtatggagtaagaatgccanagttaagaaggtggagcacgtagattgagacaacctagccctcaggtgacnggtcaggcg

SEQ ID NO: 5967 - DNA, 449 bp, Arabidopsis thaliana
  unsure at all n locations
  Clone ID: LIB23-023-Q1-E1-E10
acgcgtccgtctcagtctttgactcagactcccaccgcgtaattccgagctaggtttccatttctccggcgaatcggacctctctctcgctctctcttccaatttccccttttttcgtttcccagcgatgatttgcaagtagcttccgctaataatcgcaactctctgacggatgctatggcaatgggacttattcgtcttctttctatagcttttacacttgttctactttcaatccttcctcttcatctctctctcgctgatgagataacatctattgaatctgtacctgaccttcagaagctaatgtatgttgctgttgatgggtttccttgtgtacgtcttctcaatctgtctggagagattggatgttcaaatcntgnaataaanaaagtggtggctccaatcataaaattaaanggacgttaaagntttggttcagccacaca

SEQ ID NO: 5968 - DNA, 461 bp, Arabidopsis thaliana
  unsure at all n locations
  Clone ID: LIB23-023-Q1-E1-E11
ttcccgggtcgacccacgcgtccggaaaacttcgtctctcttctctgcttcgccctctcatttcctgtgagataaaggcggagtctctctccagttattctgctcatccatcgattcttagagttcaaaatggntgatcaagttcagcaccccactattgcgcanaaagctgccgggcagttcatgcgttcaagtgtttccaaggacgttcaagtgggttaccatgaggccttctatgtatcaangacatgcaacctacggnaactactccaatgcngcatttcaatttcctccgacatcccggatgttggcaacaactgcntctcccgtgtttgtccaaaccccagganagaangggttcactaantttgcccttgantttctgatgggtggngttctgctgccgtctcatgactgctgctgctctattgaangtgtaaagcttttgatcaaaaccanga

SEQ ID NO: 5969 - DNA, 450 bp, Arabidopsis thaliana
  unsure at all n locations
  Clone ID: LIB23-023-Q1-E1-E12
acgcgtccgcccacgcgtccgcggacgcgtgggaaatacctaaatctcaacttcacggaacaccgatacataaagacaatagagtggtaataatttgttgagaccaaaagtaattaaacacattacacatggggaaaaagaacggctcttcttcttggctcaccgctgtaaagcgagctttccgatctccgacgaagaaagatcatagtaatgacgtcgaagaagatgaagaaaanaanagagagaagagacggtggtttanaaaaccggcgactcaagaatctccggtgaagtcttccggtatctctcnaccancacctcaggaagattcacttaacgtaaactcaaaaccctctccggagacagcaccgagttacgcaactacgacgccgccatccatcgccggtaaaccccngtcgccgtaatccccatcgccangtcagatctaaa

SEQ ID NO: 5970 - DNA, 469 bp, Arabidopsis thaliana
  Clone ID: LIB23-023-Q1-E1-E2
acgcgtccgcaacaatttacgcagagtacgaagatgtggatatgaagcgtgattatgcctttgttgaatttagtgatcctcgtgatgctgatgacgcaagatattacttggatggacgggatttcgatggaagtcgcatcactgtggaggcatcaagaggggctcctcgtggttcgcgggacaatggtagcagaggcccacctcctggttctggtcgctgttttaattgtggtgtcgatggccactgggcccgagactgcacagcaggagactggaagaataaatgttaccgctgtggtgaaagaggacacattgagagaaactgcaaaaacagtcctagtccaaagaaggccaaggcaaggtggaagctattcaagtcaccaatcaaatcccgctcccctcctcgccgaaagagccaaaccgtacctagttacagtcaaggtcgcaactacatccattgcgattccaa

SEQ ID NO: 5971 - DNA, 456 bp, Arabidopsis thaliana
  unsure at all n locations
  Clone ID: LIB23-023-Q1-E1-E3
acgcgtccgcttcctctttctctttctctgtttctgcaacacaaaaacaccattgagaaccaatcaaaatgtcgacaaaccctaacccatggtcaccatacgattcatacaatgattgttctcaaggaatctgcaacatctactgtcctcaatggtgttannnnnnnnnnnnnnnnnnnnnnnnnnnnnnnnnnnnnnnnnnnnnnnnnnnnnnnnnnnnnnnnnnnnnnnnnnnnnnnnnnnnnnnnnnnnnnnnnnnnnnnnnnnnnnnnnnnnnnctcgtcagctactacactctcatctcaaaatactgtcatcgccaccaccaaacctcctcttcaaaaactcttaanctaaatcataacggtgagggtttcctttcctccangcaaagaatctccacgaatggntatggnctcaattagtccatgantaaatcaatcactggttaagaan

SEQ ID NO: 5972 - DNA, 452 bp, Arabidopsis thaliana
  unsure at all n locations
  Clone ID: LIB23-023-Q1-E1-E7
acgcgtccggcgggggaatgtacgtctgctgccagagatgcttcttccgtttcagctgcagcttcagcttcagctggctctgagatggatgccagagttgaatttgatctaaatgaaggttttgatggagacgatgcacaacatggggacncaaataacttctctggatctgtagttttgacgcctactcctctacaaccacttaataccttaccttttccggtggctcctgtatctagtggaattcctgcatccattactgttgctgctgccgtcanaggtccgtttgttccacctgaagatctgttganatataaaggggctgttggntggagaagatctgctgccactantgccttccgccnngctgagccanganaagctcaggatntgttactgagcattaacaatactcnacatctgatgcaaccaactcctgctgggaaaacana

SEQ ID NO: 5973 - DNA, 447 bp, Arabidopsis thaliana
  Clone ID: LIB23-023-Q1-E1-D10
acgcgtccggggtttgatcatctcttcgaggtcggttctagggtttcactacgagaatggacggagatgagctcaccgagcaggaaactgctctttatgaccgtcaaattagggtatggggagctggtgctcaaagaagattgagtaaatctcatgttttggtatctggaattaagggcactgttgctgagttttgtaagaacattgtgttggcaggagtaggtagtgtgactctgttggatgatcgattggttacaacggaagtcttcaacgcaaacttcttgattcttcctgatgaaaatgcttatgtaggcaaaaccgtagctgagatttgttgtgattcacttaaggattttaaccctatggttcatgtttcaatagagaaaggtgatttgtcaacacttggtgttgatttttcaaaagtttgatgttgtggttatcggctac

SEQ ID NO: 5974 - DNA, 435 bp, Arabidopsis thaliana
  unsure at all n locations
  Clone ID: LIB23-023-Q1-E1-B10
acgcgtccgcttccttgctcctctcgcttttgaatggagatgtgagctttcttcattcaaagagcaaaactatctaattccatggcgttctccctcctctctccaattcctacctctgcctctctttttttcactctctccgccattaccgcttctaataatgcttcctcctcctctctctcccgtctttactctttatatcaccccaaaggaaccttacgaaccagaaccgcgacctcgtttttcggagcttctgggaacttgaggattgtttccatggcggagaataggcaattggtttgtaggattggtggcggagccggtgctgaattggatgatatggatgaaggtgaaatccagaggattggaaatgaagacgaagacgacgatgaattcatacaagtcaatgctaataattcctctgctgcttcnctg

SEQ ID NO: 5975 - DNA, 474 bp, Arabidopsis thaliana
  unsure at all n locations
  Clone ID: LIB23-023-Q1-E1-B2
acgcgtccggtttcaaatggagactcatgccttcaatgcagaagtatgaagagattagggaacagcttcttgaaaacccgtttttctgcgatacagcgcgtgagtggaagccggatatttcttgtgatgttcctgctgatatctatcaagatggaactcgtctttgggctattgataaaccgaatatctctcgtccacccgctggctggcaacgtttactgcggattagaggtgaaggaggtaccagatttgctgatgtttattatgttgctccgtctggaaagaagcttcgatcaactgtggaggtccaaaagtacttgaatgacaactccgaatacattggagaaggggtgaaactttcacagttctcgtttcaaatccccgaaaacgctgcaggatgactaacttaaggaaaccgcccaactccaactactggattccatcgataatacaaacancccctgttactaaaga

SEQ ID NO: 5976 - DNA, 469 bp, Arabidopsis thaliana
  unsure at all n locations
  Clone ID: LIB23-023-Q1-E1-B3
acgcgtccgacgccattccggcgcttacgaaaacattgttggaggatgttaagaagatattcaagaccacatcagggacaccttttctgtttcccacgaccgggactggtgcttgggagagtgccttgaccaacacgttatctcctgnagacaggattgtttcgtttctgantggacaatttaacttgctctggattgaccancagaanacgcttaatttcantgttgatgtggttgagagtgattggggacaacgtgctaatctccaagtcttggnctcaaagctctcacatgacgagaatcataccatcaaagccatttgcattgtccacaacgagacngcgacnggnggttacaaatgacatctctgctgtccgcanatcctcgattactanaagcatccnggntttgctgctaatggaccgtgttccgtcancctnnccccttganttcccgaattgggtgattg

SEQ ID NO: 5977 - DNA, 450 bp, Arabidopsis thaliana
  unsure at all n locations
  Clone ID: LIB23-023-Q1-E1-B4
acgcgtccgcccacgcgtccgcccacgcgtccgcccacgcgtccgcccacgcgtccgcccacgcgtccgcccacgcgtccgccgagctcacgtcatcgctctcggtgctttcctctgggccactgccactttcctcgtcgccgtctccactactttcttccaggtggcagtatcaagaggcttgaacgggatagggctagccattgtgacacccgcgattcagtccctagtcgctgactcaactgatgactataaccgtgggatggcatttgggtggttangattcacatcaaacattggttccatacttggctatgtatgttcatcctctttgcctcaaaatctttcaatggtgtcgcttggattggagnaatcgccttcccttttggtaagcaagtccgttaagccgtgaaaagtagggcatttttgggtccggtctcctncgcaaca

SEQ ID NO: 5978 - DNA, 460 bp, Arabidopsis thaliana
  unsure at all n locations
  Clone ID: LIB23-023-Q1-E1-B7
acgcgtccgaatcaatcttgagattgtgtcaagaaacctcaagagtgaaaatgagttttttcagatcaaagacttcaaaaactgaaacacaacaaccatcatcgtatggacaacaacaagacgctatgtactcatcttacggaaccgtgagtgacgaagtgttattacagattcatggatgcagagctcatctcatcaacggatccgaagctgtggagctagccgccggagacttcgagcttgtacaagtcttagacagcaacgtagccttagctatggtcgtgaggatcggaaatgacttacaatggccggtgattaaagacgagccagtggtgaaacttgactctcgtgactacctcttcacgttgccggttaaangatggagagccacttattacggcatcacgtttttccctantgatgaaaatgacatcgtttttgtgaataagtacgantttgc

SEQ ID NO: 5979 - DNA, 466 bp, Arabidopsis thaliana
  unsure at all n locations
  Clone ID: LIB23-023-Q1-E1-C1
acgcgtccggtctccgtcttctattaccaagatcgagctttgttcttcgagcttctcatctctttgttcaatctcaaaggtttttgagtatcagcaaagatgggtgacaatcttatggacaaagttaccgcatttggtgagcgcctgaagatcggaggttcggaagtgagcaacaagatcagtgctggtgtgagctcaatgagctttaaagtgaaggaactttttcaaggtccaaacccaactgataaaatagtcgaagatgctactactgagaatctagaggaacctgactgggatatgaatttggaaatttgtgatatgataaatcaagagacaattaatancgttgagttgatccgtggtataaagaagangattatgatgaagcagccgaggatcantaccntgccctgggtttgccccagactgtgttaagaactgtgagaaagggttttcaaaaggtgga

SEQ ID NO: 5980 - DNA, 450 bp, Arabidopsis thaliana
  unsure at all n locations
  Clone ID: LIB23-023-Q1-E1-C11
acgcgtccgccagaatcagttggataggaaaatggcggcgaagcaaatggaagagatacagaagaagctacggctgctaagttaccctagggcaaatgctccagctcagtctctcctcttcgccgggatggaacgttatgctcttctcgaatggctctttttcaagttattangtgataaatcacctttctcacagcaaaatctccaaggagatgctggagttcgtgatgaagaaactgttcgtattcaatatttggcagagattgcaaagtttttggggattacaccaactgtagacattgaagccattcaangacatggaacctatgaagatcggatggaaatgcttcgcantattgttgatttagtggangcgaacctcttctcagataatcaagatgggngtattgatgaacaanttgccaaaagatattcagctcatagatgcaa

SEQ ID NO: 5981 - DNA, 445 bp, Arabidopsis thaliana
  unsure at all n locations
  Clone ID: LIB23-023-Q1-E1-C12
acgcgtccgcttcttctctccggatccaaaaatgaatcgtctcttttctctcttctccatagctctgatcgctttcctctgcctccaccatcatgttctcgcttcttcctcttccgacttcgaaggtttcgatgctgaagacgacgatgtttcagaagattccactgagcttcaccactctctccgtcctcctcttctgactcagtctgagtcaacggttctggatctggacccatctcccgattctgattctactcctgcatctaaatctgatccncccactcagaccgtgaagccttcgtcctccatctccttcgattactgggatgaagatgagttcgaaggattgccggaggacgagaaatctacggagtctccggttttttccgatgacgcctcctctctgccgatcaaaagacgccgggatcttgagtcngcttcagaa

SEQ ID NO: 5982 - DNA, 467 bp, Arabidopsis thaliana
  unsure at all n locations
  Clone ID: LIB23-023-Q1-E1-C2
acgcgtccgataaatctaacccaaacccttctcttcttcttctgccctcttcttcatctctctttcgctgctttcactccaactgataattatctcatcaattccggttctaacaccaatacatctttcttcacaacccgttcttttctcagcgactcttcagaacctggctcgagttttctctccaccgatcgatccatctcgatttctgacacgaacccatctccagattcacccgttttgtacaacacagctcgtgttttccccgtcggaggatcatacaaattccaagtcactaacaaaggnactcactttaaccgtccccaattcgcgccctttaaaagcctccaagaattaacntaaaggccggcaaaattccagtttgataatggggtccccgggatnacaanttcaatacaactccgtcgttggtaaaggaatcaaactcaaaatcgatgacccggttt

SEQ ID NO: 5983 - DNA, 476 bp, Arabidopsis thaliana
  unsure at all n locations
  Clone ID: LIB23-023-Q1-E1-C3
acgcgtccgctctatcgtcgtcgtatccaaagctcttcaatggagaccgatctcaagtcaacctttctcaacgtttattctgttctcaagtctgaccttcttcatgacccttccttcgaattcaccaatgaatctcgtctctgggttgatcggatgctggactacaatgtacgtggagggaaactcaatcggggtctctctgttgttgacagtttcaaacttttgaagcaaggcaatgatttgactgagcaagaggttttcctctcttgtgctctcggttggtgcattgaatggctccaagcttatttccttgtgcttgatgatattatggataactctgtcactcgccgtggtcaaccttgctggttcaanagttcctcaaggttgggtaagggttgcaatcaatgaaggggaatcctaacttncgcaatcacatccacaagggattcccaaaaagnaatttccgtgaaaaagcc

SEQ ID NO: 5984 - DNA, 465 bp, Arabidopsis thaliana
  unsure at all n locations
  Clone ID: LIB23-023-Q1-E1-C6
acgcgtccgcggacgcgtgggcggacgcgtgggtttacacacacgcctctcattttttttcatttcaatggcgatgcaatctctttcccctgttcctaagcttctctccacaacaccaagctctgttctttcttctgacaagaacttcttcttcgtcgatttcgttggattatactgtaagtccaagaggaccagacgcagacttcgtggagacnnnnnnnnnnnnnnnnnnnnnnnnnnnnnnnnnnnnnnnnnnnnnnnnnnnnnngccgttatcgaccttgaacgtgttcatggcgtctctgaaaaggatctctcctctccttcagctttaagacctcaggttgctaatttggaggatatattgtctgaaagaggagcttgtggagttgggttataacaaacttagataacataccttcacatggagttgtcaaagatgctcctaatgctcctgggtgtatg

SEQ ID NO: 5985 - DNA, 433 bp, Arabidopsis thaliana
  unsure at all n locations
  Clone ID: LIB23-023-Q1-E1-C7
acgcgtccgtgtgtcttccatcctaaagattgtaaagggaaaccgttttcgattttcagagaagatcacacatctttcgtcccttcactgccatacgtgtcgataaagatggcggctatggcggcgaagcttcagttatcggcgaaatctgatcaaagcagtgtgcgattaccgagagtgatcaacctctcccgcgatccaacgactagagtctcgtttccgcgaaatggatcagtttgttccctccacacnaatttctcttctccacatctcgcgaaaccttgcgccggangtggtggtggtggaatgcaccggtaataacggcggcggaagcggaagcggnggaggaggtggtggttntggaggttcanggggtganncagtganganncatcncatggggacantanggtatcatccaaggangatatca

SEQ ID NO: 5986 - DNA, 461 bp, Arabidopsis thaliana
  unsure at all n locations
  Clone ID: LIB23-023-Q1-E1-C9
acgcgtccgaaagagaggaatccttctccagaggaccaagaannnnnnnnnnnnnnnnnnnnnnnnnnnnnnnnnnnnnnnnnnnnnnnnnnnnnnnnnnnnnnnnnnnnnnnnnnnnnnnnnnnnnnnnnnnnnnnnnnnnnnnnnnnnnnnnnnnnnnnnnnnnnnnnnnnnnnnnnnngtctcaacgttccagttatggttcggggtcagggtccggttcgggctcatgttcangaaaccgtctctacgtgggcaanctttcttggggtgttgatgacatggcacttgagaacttgtttaacgagcaangacatntngttgaaatctaaaggtttatctacgacagggacaccggtaattcaacgggtttntggattttgttaacactttanctcnttccaaanaagttcaagaaaggccattaaattcccttgaattgggaagcaaaatttggaatn

SEQ ID NO: 5987 - DNA, 465 bp, Arabidopsis thaliana
  unsure at all n locations
  Clone ID: LIB23-022-Q2-E1-H3
acgcgtccgcccangcgtccgccctctttctaaaatctgcggcacaaagtatatgaattaagaaagcaacatgagtttgtggtatatcatagttgtgttcgtcttctttgcatctatattcattgcaaagaacacaagaaagacaaagaagaatctacctcccggaccaccaagacttcctataattggtaacttgcaccaattgggatcaaaacctcaccgttcgatgttcaaattatctgaaaaatatggacctctagtgtacctaaagcttggaaaggtaccgtctgttgtggcctcaactccagagacagtgaaggatgtcttgaaaacgtttgacaaagattgttgttcgcgagcttttttgacatatcctgcaagaatttcatacaatttgaaagatctgcgtttgctccctatagcaaatattgggaagngggtacgaaaagatgacggttgtcnaac

SEQ ID NO: 5988 - DNA, 460 bp, Arabidopsis thaliana
  unsure at all n locations
  Clone ID: LIB23-022-Q2-E1-H6
acgcgtccgcggangcgtgggcaaagacactgaataaatccttaaaacaaacttttgaaagaaaaaaatggcttcaaagaactcagcctctattgctcttttcttcgcccttaacatcatattcttcaccttaaccgctgcaacagattgtggttgcaacccaagtcctaagcacaagcctgtcccaagtcctaaacccaagccggtcccaagtcccaaacccaagccggtcccaagtccttcagtaccaagtccttcggtcccaagtcctaaccctangccggtcacgcctccgagaacccctggctcatctggaaactgtcctatcgatgctctcagactcggtgtatgtgcgaacgttttaagcagtctactcaacattcaattgggtcagccatcanctcaaccatgttgctcgctcatccaaggttggttaactcgacgctgccanttgccttgc

SEQ ID NO: 5989 - DNA, 456 bp, Arabidopsis thaliana
  unsure at all n locations
  Clone ID: LIB23-022-Q2-E1-H7
acgcgtccgcggangcgtgggcggacgcgtgggcggacgcgtgggtttcactgatagtattctcagctcttgcaccgccgatgaacggatcatggtgtttacgatgactgggaaagaacaaattgacccggctatgcttcgaccgggtcgggtcgacgtacacattcattttcccttatgtgatttcacggcgtttaaaacgctcgctaataactacttaggtgttaaagagcacaagcttttctctcaagttgaaggaatatttcaaaacggtgcgtcnttgagtcccgccgagatcngagagttgatgatcgcgaatcgtaactcgccgactcgtgcattgaagcatgtcatcaatgctttgcagactgatggtgatcggagaggaactggacgacgtttgcttttanaaaaatggtcgagaaagtcgactcggaggantttctgatgatataa

SEQ ID NO: 5990 - DNA, 465 bp, Arabidopsis thaliana
  unsure at all n locations
  Clone ID: LIB23-022-Q2-E1-H8
acgcgtccgaaaacctcctttcatttccaaacaaaaacttctttttattctcacatcttaaagatctctctcatggcgatgtctttctcaggagctgttctcactggtatggcttcttctttccacagcggagccaagcagagcagcttcggcgctgtcagagtcggccagaaaactcagttcgtcgtcgtttctcaacgcaagaagtcgttgatctacgccgctaaaggtgacggcaacatcctcgatgacctcaacgaggccacaaagaaagcttcagatttcgtgacggataaaacaaaagaggcattagcagatggtgagaaagcgaaagactacgttgttgaaaaaaacagtgaaaccgcagatacattgggtaaagaagctgagaaagctgcggcgtatgtggaggagaaaggaaaagaaaccgcaaacaaagnggnanaattcgcggagggtaaaaca

SEQ ID NO: 5991 - DNA, 458 bp, Arabidopsis thaliana
  unsure at all n locations
  Clone ID: LIB23-022-Q2-E1-H9
acgcgtccgcctcaaccggncagagaggactcgcctcttctcggcaagggacctcccctctccagccagtttaagaccttcgccaacgtcttcatcgctgtcgtcggcgctggtgttcttggtcttccttacgccttcaagcgaaccggatggctcatgggtgtcctcctcctcgtctccgtctctgttttgacccatcactgtatgatgcttcttgtctatacccgccgcaagctcgactctttcaatgctggnatctccaagatnggntcctttggggaccttggattccccgttcggcggtncctngggaaggttgtncttnacctaattaacnatccgtnncaaactgggttttgtgtccgataacctaaccntcatcggnactactttagctaatcnanccgattctgaatcgnccaacantctgaaggatcaatttacaaaggntggggttt

SEQ ID NO: 5992 - DNA, 462 bp, Arabidopsis thaliana
  unsure at all n locations
  Clone ID: LIB23-023-Q1-E1-A1
acgcgtccgcccacgcgtccgcttctatcgtgcgcacctctctctcttaatcctttatcctgcgcaccannancaccatcttcntctccggcgaaaacaaacccaccgccatggggaaaggtcgtgcactttccgacggagtgatcaaaaagatcatcctttcatacacctatgtngcaatctggatcttcctcagcttcacagtcatcgtctanaanaaatacatcctcgacaagaagatgtataattggccattcccaataactctcaccatgatccacatgggtttttgctcntccttanctgtgattctcatcaaagtcttnanagtcgtcgagcctgtttcaatgtcacgccagacntatcgcatattngtcgtncaaatcggngcgttgtagtcaatttctctctgggttatcaaactcggcntacatctagctccccnggttcccttcatcaaat

SEQ ID NO: 5993 - DNA, 401 bp, Arabidopsis thaliana
  unsure at all n locations
  Clone ID: LIB23-023-Q1-E1-A10
acgcgtccggaacaccgtggctttccctatggttctcaaagccgccttcgagcttggcgtcatcgacaccatcgctgctgcaggaaacgacacgtggctctcaccgtgtgagatagcgtgtagtctcccaaccaaacccaccaacccggaggcgccggtgttgcttgaccggatgctgagcttacttgtcagccactcgatcttgaagtgccgtatgattgaaaccggagagaacggtcgaaccggaaagatcgagagggtatatgcagccgaaccggtttgcaagtattttttgagagatagtgatggtacaggatntctcgtgcctcngtncatgttgctcataaccaagtgttttcangacttggncaaaccttaaagatttgtcccaanaaggaaga

SEQ ID NO: 5994 - DNA, 447 bp, Arabidopsis thaliana
  unsure at all n locations
  Clone ID: LIB23-023-Q1-E1-A12
acncgtccgcccacgcgtccgnnnnnnnnnnnnnnnnnnnnnnnnnnnnnnnnnnnnnnnnnnnnnnnnnnnnnnnnnnnnntccttcaatggaaacagcaacatcgacaacctcctaatccaaaccctacttggacgtctccaaattcgtccccctaactctcatttcctctctcaatccctagacgacctcctcttcaaatccgacgacagcgacggcgatgatgacggagaaggtcagaccagtctcgacagagaagaagctaggcttgagaaagagctaatccgagtcatcgtctctggtcgaagcgattctctcaagccgaattcaggtcaagccgtgacagtcaacgancaccacatctgcgttgggtttcatgangatgaggaatcggattatcgtgtttgggagtggcatggtcatatcatgttggtttgatgaagana

SEQ ID NO: 5995 - DNA, 495 bp, Arabidopsis thaliana
  unsure at all n locations
  Clone ID: LIB23-023-Q1-E1-A2
acgcgtccgatctcctcttactgcttcgaattcgatcgttactagaaactgcgaccacgacattggtcgtggcctcgttggggaagaagtagtcaaagtcacccgcatcgattgggacacgttcttcttcatcaacctaatcgaatcttttatcctctcttcgatcccaacatcgataaattattattaccatttgcggcgttgttgagtgatctccgcgactatggagagatcagcgtcggtgggtgttaacgacggccgttttggtggcaaccaattccaatccgcaaccttcctcctcctcctccttccttcttccttccaatggagacatgttaaattacaagttgtgggatctgtgggtatgaactaaanctggagctccacgaatccgaatcacatcngacaatcgggtnaaaagttacgggtaaaatccaatgaaagaatggggatnatanccttccttcaaacatccgacgaagggaaagattcant

SEQ ID NO: 5996 - DNA, 469 bp, Arabidopsis thaliana
  unsure at all n locations
  Clone ID: LIB23-023-Q1-E1-A3
acgcgtccgattctctctctctgttttccttgttctccaagccagatctctctccataaatctctcttcatctctctctttccaccaaacatccgcgatcctcgattctcaattccgtgtctgttttttttcttcacttagcgatggcgatgatagagcaaaggccgaagacgaagatcgtttgtactctaggtccagcttccagatctgttccgatggtcgagaagcttcttagggctggtatgaacgttgctcgtttcaatttctctcatggatctcatgaataccatcaagagactctcgataatcttcatcaagctatgcttaacactgggattctctgtgccgtcatgctcgacaacaaagggccaagaaatcccgaaacgggttcntggaaagatggggaaaacaatccaactgaaacaaggacaaagagatnactatttcgacngactatgacttgaagggt

SEQ ID NO: 5997 - DNA, 469 bp, Arabidopsis thaliana
  unsure at all n locations
  Clone ID: LIB23-023-Q1-E1-A6
acgcgtccgtccaagttgactttgcaaggtcagaagatgccgcacagaaaaatttggagcttgaattcaaaaggaacaaagaaagatttacgttccttaagtggggttcaacagccttccaaaacatgctggtcgttcctcctgggtctgggattgtccatcaggtcaacttggaataccttggacgtgttgttttcaactcgaaaggatttctctaccctgatagcgttgttggaaccgactcccacacaaccatgattgatggattaggagtcgctgggtggggtgttggaggaattgaggcanaggcagcaatgcttggtcagcccatgagcatggtgttacctggcgtggncgggttaagttggatggaaagtttnaaggaaggggttacggctactgatttaattctcactgtganccaaatattgangaagcatggtgttgtccgggaagtttgttgaaattt

SEQ ID NO: 5998 - DNA, 439 bp, Arabidopsis thaliana
  unsure at all n locations
  Clone ID: LIB23-023-Q1-E1-A7
acgcgtccgggatctgcagcaattggactcagatctcgttctcatgtcgttctcgcttgtgttaacaaagctcaatcggagctttcttcgcatcagaggaagatctttaaagtcgatgaccatatcggtgttgcaatcgctggtctcacagccgacggtcgtgtattgtctcggtatatgagatcggaatcgattaatcactcttttacttatgagtctcctcttcctgttggtcgtctcgttgttcatcttgctgataaagctcaggtctgtacccaacgatcatggaaacgaccctatggtgttggtttgctggtangtggattggatgagtctggagcccaactttactacaactgtcccaacggaaactacttcgagtancaagcttttgctattggattccgttcccaagcagcaaagactaaccggaacgcan

SEQ ID NO: 5999 - DNA, 488 bp, Arabidopsis thaliana
  unsure at all n locations
  Clone ID: LIB23-022-Q2-E1-H2
nccggaatcaagggtcgacccacgcgtccgcgaaaatgaagttttggggctggatgcatcataagttccgggagaatagcaaagagccattaaaagatgcttctactggcaacagctattccattctttcagctcatccatcccttgatagccaagaggtttacccaacagcatgtgctggctccagatacaatactggattcagaaaacaggtcaacctgttccaggaaagctccttcgcaggacccaagcaatacacagaggaagacttcaaggatgagagaaacagtgatttttttgatggatttcttgccattggaacccttggtggagaaacacttcttgatgaacaaccaagcaacgccgacatttggcatgtcatttgaggacccagcaatagatgatgcaagatgtgacaagagaatgatttgaagctcataagcaatgaattgggtaagttcccttgaggctgaagctaaaagaaagnc

SEQ ID NO: 6000 - DNA, 517 bp, Arabidopsis thaliana
  unsure at all n locations
  Clone ID: LIB23-021-Q2-E1-G2
gaantggtttgttggccctgccggtccggaantcaagggtcgacccacgcgtccgctcnctctctcttggaaaagtcaaaatcaagggtttcgtcgtcgctttgactggcttggactcgcttgctgattgagaagcgaaaaatgcttgaatcaggaatttgcaagtatgcgtgaacaaaggagcaagaaacaatgatctaaagaagatgaagttccacttactgttagagagacgtttcctaagatggtgatggaagaaagatcttgtcatactgctaacagagttggggatgtccaaatgggtaatggtcataagcgtggnaagaagcgaaagattcatccagcaacaatgttagtataagtgtggagactgataaacangatatgttgtcaaacaaagcccaaaagaagtgggtccttggaaaatgtgtcaatccttcaactgtggatgccccatgtttcaaagaaatgatgactggnnaatggtggtcaaatggggcttgaaaacccgaatgtc

SEQ ID NO: 6001 - DNA, 513 bp, Arabidopsis thaliana
  unsure at all n locations
  Clone ID: LIB23-021-Q2-E1-G3
gaactggtttgttggcccgccggtccggaatcangggtcgacccacgcgtccgcccangcgtccgcaaggagggcatttaccagattatgctccacaccctgctattgtcttgaaaatggaagatggaactggtcttctccttccgattatcgtcttggagatgcctagtgtgttacttatggcagcaatgaccaatgtccaaattgcaagaccaaccatgtatcaagtggtgaaggaaatggtggacaagatgggttacgaagttagacttgttagagtcaccaaaagagttcacgaggcatattttgcccagttattcctttcaaaggtgggtaatgcctcggagtgtgtcagctttgatcttangccttcagatgcaatcaatatagctgttagatgcaagatacctatccaagtgaacaagtaccttgcatatagtgatggaatgagagtcattgagtcanggaagatatcaacaacgggcaccaanttcaaatggntaataatttact

SEQ ID NO: 6002 - DNA, 465 bp, Arabidopsis thaliana
  unsure at all n locations
  Clone ID: LIB23-021-Q2-E1-G5
acgcgtccggttcaaaacaagttcattcgatctatagagacgaaacaaaaagagagatcgtacgcaaaagtttccgatatggctcgctcgtttggagctaacagtaccgttgtgttggcgatcatcttcttcggatgtttatttgcgttgtcctctgcaatagaagaggctacgaagttaggatcagtgatagggatagatcttggtactacttactcttgtgttggtgtttacaagaatggtcatgtcgaaattattgccaatgaccaaggaaaccgtattacaccttcatgggttggttttactgactctgaaagactcattggtgangctgctaagaatcaagcagctgttaatccanagangactgtcttcgacgttaagagattgatcgggcgaaaatttgacggataaaggaggtcaaaangntaaggaaacttgtaccttacagattgtgacaaggat

SEQ ID NO: 6003 - DNA, 478 bp, Arabidopsis thaliana
  unsure at all n locations
  Clone ID: LIB23-021-Q2-E1-G6
acgcgtccgccaancgggccgcccttttctaccgccggctaaatttgacggtcacatatagagccccaaaaactctccaccatgtccactcttcctttcgcgccttctgtcacccatgcgcactttagccactccctctcccccatgtttatcctgcgccatctccctcttacacgccatctccgtttatcccgaaataaccgcgtcncttcngttgtatccgccgccgccgttcgccaggacgcttccctctgngactccanctcntctctctctaatcgaatcaagctgcaagaatccgcttttccaacaatctcaatcggacatttnaaacgctccggatntcgtagcttcgtanacganaaccggtcagtaactccaagattcgtggtcccngatgttgaagaaaccctcctttaagggaaanggtttctctncnttcttggcgtcctccccgtgggggcttccgnaattcttg

SEQ ID NO: 6004 - DNA, 516 bp, Arabidopsis thaliana
  unsure at all n locations
  Clone ID: LIB23-021-Q2-E1-H12
ccttgccggccctaccggaacgganatctcggntcgacccncngctgaaacttcatctctgccgtcttaagaagattttgccagtgcgggaagcggcggagattgagagattagcgacgatggaggaaagcaaacagaactatgacctgacgccactaatagcgcctaacctggacagacacttggtgtttcctatattcgagttccttcaagagcgtcagctttaccctgatgagcagatcctgaagtctaaaatccagcttttgaaccagacgaacatggttgattacgccatggatattcacaagagtctctaccacactgaagacgctcctcaagaaatggtggagagaagaacagaggttgtcgctangctcaaatctttgggaggangctgctgcaccactccgtgtcntttcttttgaaccctaacgctgtgcaaggagctaagaactgacaagcaatacaatctccaaatgctccaagggaacgctancaaaattggtccaagaccaa

SEQ ID NO: 6005 - DNA, 469 bp, Arabidopsis thaliana
  unsure at all n locations
  Clone ID: LIB23-021-Q2-E1-H3
acgcgtccggtcgntgcaatcaatgtgagtccgattgagtatgggcatgtgttgctgattcctcgtgttcttgattgcttacctcaaaggattgatcacaaaagccttttgcttgctcttcaaatggcggctgaagccgataatccgtatttccgacttggatacaacagtctaggcgctttcgctaccattaaccatcttcactttcaggcttactatttggcaatgcaattcccgatagagaaagcttcttccttgaagatcactaccaccaataatggcgtcaaaatctctaaactcttgaattaccctgtgagaggtcttctagttgaaggtggaaacaccattaaagatctcgcagatactgtatcaaacgcatccgtttgtcctcagaacaacaacattcctttcaacaatcccanctctgactcctggnaaacgaatcctccctctcctcaatggttacgca

SEQ ID NO: 6006 - DNA, 468 bp, Arabidopsis thaliana
  unsure at all n locations
  Clone ID: LIB23-021-Q2-E1-H5
acgcgtccgcccangcgtccggttaggtttggtgatgagaatgagcgatcaagagctatgacagaaatgaatggtgctttctgttcaagcaggcaaatgcgtgttggtatcgcaaccccgaaaagggctgctgcttacggccaacaaaatggttcacaagctcttacacttgctggtggacatggagggaatggttcaatgtctgatggagaatcaaataactcaacaatatttgttggcggtcttgatgctgatgttactgaagaagacctcatgcaacctttttccgattttggggaggttgtttcagtgaagatcccagtagggaaaggatgtggctttgtccaatttgccaacangcaaagtgctgaangaaagcatccggaacttgaaccggacagtcattgggaagaacactggtcccgcctttcatggggaaaaaancccaacaaacagtggggaaatnac

SEQ ID NO: 6007 - DNA, 473 bp, Arabidopsis thaliana
  unsure at all n locations
  Clone ID: LIB23-021-Q2-E1-H6
acgcgtccgcccangcgtccgctgaactttcgtctctataaaccctttcgacgacgagtgaagaagaaagcgagacgaagaagcaaagatgttcaagaaaccaatacgacacagatgttacgacatggagtccaacaggtcgtttattccaagtggaatacgccatggaagcagtgaagcaaggatctgcagcaattggactcagatctcgttctcatgtcgttctcgcttgtgttaacaaagctcaatcggagctttcttcgcatcagaggaagatctttaaagtcgatgaccatatcggtgttgcaatcgctggtctcacagccgacggtcgtgtattgtctcggtatatgagatcggaatcgattaatcactcttttacttatgagtctcctcttcctgttggtcgtctcgttgttcatcctgctggataaaagctcaaggtctgtnnccaacggattatgggaaacgaa

SEQ ID NO: 6008 - DNA, 468 bp, Arabidopsis thaliana
  unsure at all n locations
  Clone ID: LIB23-021-Q2-E1-H7
cctgaagcttgagaacacactgctcgatgggagccctgctccgcttttgaaaatctgtgattttggttactctaagtcatctatactacattctaggcctaaatcaactgttggaactccagcttacatagcacctgaagttctttcacggagagaatatgatggcaagcacgcggatgtgtggtcatgtggagtaaccctttatgtgatgctggtgggagcttacccgtttgaggaccctaatgatccaaaaaacttcaggaaaacaatccagcgcataatggctgtacaatacaagatcccggactatgttcacatatctcaggaatgcaaacatcttctctctcgcatattccgtcactaactctgctaaagagaatcacacttaanggagatnaaagaatcatccgttggtactgaagaanttgccaaaagaactgctaaatccgctcaagcggcgtatacaaa

SEQ ID NO: 6009 - DNA, 470 bp, Arabidopsis thaliana
  unsure at all n locations
  Clone ID: LIB23-021-Q2-E1-H8
acgcgtccnnnnnnnnnnnnnnnnnnnnnnnnnnnnnnnnnnnnnnnnnnnnnnnnnnnnnnnnnnnnaccattgcttagaactctcttccaattgttcctccattttcgcttcttccaaatccantccncgtttctctccttccaagctctcctattccactttcttctctcgctctgccatctattacagatcaaaaccaaaacaagcctcgtcttcttcttccttctccactttccccccatgtctcantcggaaaagctccctcacgcatgttctcaaacccgtctcagagctcgccgacaccactaccaagcctttttctcgnggagatcgtcggnaagagaaccgatctgannaagattangattctcggggctggtccgattgtcattggggcaangcttgtggagtttgantactccgggactcangggtggtnaagccttaggagaaagagggntatgagg

SEQ ID NO: 6010 - DNA, 464 bp, Arabidopsis thaliana
  unsure at all n locations
  Clone ID: LIB23-022-Q2-E1-A3
gtccgcnnnnnnnnnnnnnnnnnnnnnnnnnnnnnnnnnnnnnnnnnnnnnnnnnnnnnnnnnntcagttcgtcgttgacgatcgatgtcgaagatgaagcatcttctacggaagctccacatcggnggaagtagtggcgtcggcggcggatttgctgaccatcacaggttagacgactcgactagacctatgatcgatcctagccctattcttaagtactagccctagccctgcatcgacttcttccgtctcttcctctggttttggtaacgcttccacgacaatgccgagactggatacatttgagcctgttggccgtgatctgacggctgttgatggtgttgatttcaatttgatggaggaggagtaccaaagtccagttaggctatgggcgattaagcgtctcctgatcctgattccgagagagaatgcanatacagctcagcttgatgccgctaagagg

SEQ ID NO: 6011 - DNA, 462 bp, Arabidopsis thaliana
  unsure at all n locations
  Clone ID: LIB23-022-Q2-E1-A9
acgcgtcangaaaaagttcccgacacttgtgagagactataaaagtatacgatctcctcctctcgctctcttcagatcacaaagttttcgtttttagggttctctcatcgatctcggtttgtgatcttcttcttcatcaatggcgtctagtgataaacaaacaagcccaaagcctcctccttcaccgtctcctctccgtaattccaagttttgtcagtcaaatatgaggattttgatctcaggaggagctggattcattggttctcaccttgttgataagctgatggaaaacgaaaagaatgaggtgattgttgctgataactatttcactggttcaaaggacaaccttaagaagtggattggtcatccaagatttgagcttatccgtcacgatgtcacggagccacttttgatcgangttgatcagatttaccatcttgcatgtcctgcttctcctaacct

SEQ ID NO: 6012 - DNA, 482 bp, Arabidopsis thaliana
  unsure at all n locations
  Clone ID: LIB23-022-Q2-E1-B11
gganaatccggctcgacccacgcgtcnngcaaatttatttatcttggtcaagagacattgattctcttaaatttctgcaaaattaagctcagagattcacaccgcatctgaaattgtgctcagaggggttccaaatattaccagtcgttaggaagcaatcacgagttgttttaggaattagtgaacgtgataatggctagcaatgagatggaaaaatcgagtaaagagaaggaacctaaaacacctcctccttcttctactgcccctccctcttcacaggaaccttcatcggctgtgagtgctggcatggctactccagattggtctggttttcaggcatattctcctatgccgccgcctcatggttatgtggcatctagtccccaacctcaaccttatatgtggggagttcagcatatgatgcctccttatggaactccgcctcatccttatgttgcaatgtatcccccaagtggcatgtn

SEQ ID NO: 6013 - DNA, 500 bp, Arabidopsis thaliana
  unsure at all n locations
  Clone ID: LIB23-021-Q2-E1-G10
aactggtttgctttgcnctgccgtccgganatcaagggtcgacccacgcgtccgcccaancgtccgggttttttgagaatttgcgtaaaggaagaaactttttcaaaacttttttttgcatcaatggagaacataaccgcgcagctcaaacgaggtatctcaagacaattctcaactggttcgattcgtcgaacattgagccgacagttcacgcgtcagtcatctcttgaccctcgtaggaccaacatgaggtttagtttcggtcgtcagtcttctctcgatccgatcaggaggagtcctgattcttccaagagtgatgacgagccacatatgtcggtaccggagaatctcgattcgacgatgcagcttctctttatggctagcaaaggtgatgtcagaggaatcgaggagcttcttgacgaaggaattgatgttaatagcatcgatcttgatggccggacggngcttcacatcgccgcttgtgaaggacatcntggtgt

SEQ ID NO: 6014 - DNA, 454 bp, Arabidopsis thaliana
  unsure at all n locations
  Clone ID: LIB23-021-Q2-E1-D1
acgcgtccgcccacgcgtccgagttgcagagcacgaggatttatgattatttgggtctttcgccgagttttccctcaggagttctccatgagagcaacatgggaagtgatcttgtcattggttttcttgactcaggagtatggccagagtctccggcttataatgacgaagggcttgaaccaataccgaaacattggaaagggaagtgtgtagccggagaggattttgacccagcaaagcattgcaacaagaagttagtaggagcaaagtacttcactgatggctttgatgagaacaattctggaatcagcgaggaggactttatgtcccctagaggttatagaggacatgggacgatggtctcttcaattgcagcctcttcatttgtgcctaacgtgtcatatggtggccttgcacctggtgtcatgananggcgctgctccaaangccctaa

SEQ ID NO: 6015 - DNA, 500 bp, Arabidopsis thaliana
  unsure at all n locations
  Clone ID: LIB23-021-Q2-E1-D10
tggccctncccgtccggaaatcnagggtcgacccacgcgtccgttcaattctcgtttggaacaatttcgttgctcaatcttgccaatccgtcgttacctatatatttcccgatcaaagctcttcgagacctgaaatttcgttattacttcgattccttttcacttccagtttaatctctccaccgttcctctccggcgacactccgatgacttaccgaatcgcccaagggatttagtccgccacgatatgaaaggaggatgaagaggacaagtggatatatataagggtgtgaaaacgacgccggatttgcgaatcgtttcggatggacatttttgtttacttctctccttctctggccactcttcctccttctgctggaccaatactgctcatanggatgatggcgttaaaagagatgaatcgcgatttgtgtattgctgaggatttatgcgcagaagtgtttatggaaacntgaaggtatggggacttcatcacagaa

SEQ ID NO: 6016 - DNA, 519 bp, Arabidopsis thaliana
  unsure at all n locations
  Clone ID: LIB23-021-Q2-E1-D4
gtggaagtggtctgcttggggcgtnccggtccgganatcangggtcgacccacgcgtccgcccaagcgtccgaaaccctcattccaaaaaatggggtctcgctctcaaaacctctcctttctcgtcctcctcctccttggcttcgttgccgtctcctatgcttgcgactgtacccctcctaaaccatcaccagcacctcacaaaccaccaaaacatccagtcaaaccgcctaaacctcctgccgtcaaaccacctaaaccaccggcagtaaaaccacctactccaaaacctcacaccgtgaaacctcatcctaaaccaccaancgtcaaaccccatcctaaancaccaaacgttaaaccccaacctaagccanccancgtnaaaccancccaacctaaaccaaccaacaaanctnaaccccaaccaaaacctcccatcgtnaangcancaaccaagnctcctccgttcaaccctaaancttccaanaaaacttccccgttcaaaacgtaaacnttccaa

SEQ ID NO: 6017 - DNA, 464 bp, Arabidopsis thaliana
  unsure at all n locations
  Clone ID: LIB23-021-Q2-E1-D5
acgcgtccggcgacttttgcctcttttggtctctccccttctccggagagatctgctctctctatctatctctcaatctgtaagaagaagattcccacttcagtaaaagccctaactttacttgggaaagttcttcatctatcatccttcaatcgtcatcatccatggctgatcaacaaaccctagattcctctactcctcctcctactcaatccgatgatctatctcactcccactctacttcctctactacttcagcttcttcttcctcagatccatcactcttgaggtctctctccttaagtcgactcaacgccggagctcctgagttcgttcctggtcgaactactcctccgctgcctcaacctccgaggatgattatcccgcctcctccgccgcacggtatgcttcatatgtatcaccaccagnctcctttcaatactccagttcntggtcctgttcca

SEQ ID NO: 6018 - DNA, 511 bp, Arabidopsis thaliana
  unsure at all n locations
  Clone ID: LIB23-021-Q2-E1-E3
antggttgttggccgccggtccggaatcaagggtcgacccacncgtccgcggacgcgtgggcttgaaatcgatggaaagcaatcgaacccgaaattctctcatttctcaatcaaaactatcttctttcacttctgggcaagaagctctgttgtggaacatcggaaatcagaactgaaacagaaacagaaaccatggagaagagagaagacgaacaacaaaagcgcgacgattctagattcaatcaaacactcaagaacgtccaagggtttcttaaaggtagaagtattcctggtaaggtattgttgactaggagatcagatcctcctccatacccaatctctccaacatatcaacggagcttatctgagaatgacgccggaagaaatgagctattcgaaagtcctgttgangtggaggatcacaattcaagcaagaaacatgataatacatatgctgggtaagctacgatnaaactctagtgctgaaaggagtgtgaaaagaagttcaaaa

SEQ ID NO: 6019 - DNA, 467 bp, Arabidopsis thaliana
  unsure at all n locations
  Clone ID: LIB23-021-Q2-E1-E5
acgcgtccgcccaagcgtccgcgccactctctctcccccatcaccaccaacctccgtcaaaaccctaaaccactatctctctctctctcttcatatcgcaacaatggagtccgtcgctctatctcgcataggtctcgccggtctcgcagtcatgggacaaaacctcgccttaaacatcgccgataaaggattcccaatctccgtctacaatcgaaccacttccaaagtcgacgaaaccttagatcgtgcctccaacgaaggaaaactcccagtcgctggtcaatactcgcctcgcgatttcgttctctcgatccaacggcctagatccgttatcatccttgtcaaagccggtgctcccgttgancaaaccatctctgctctctctgaatacatgggagcctggtgattgtatcatcgacggtggaaatgagtggtatcagnacacagagcgacgaatcgttgaagct

SEQ ID NO: 6020 - DNA, 466 bp, Arabidopsis thaliana
  unsure at all n locations
  Clone ID: LIB23-021-Q2-E1-E6
acgcgtccgcggacgcgtggggcgatttgctctgttttcatggcgggcgcctcatcaccggcgagtttgagagcttctcgtagccgtcggctggggaaggagacgaatcgatccgatctattcaaaaaacctgcagttccattcgcattcgcgctaattcttgctgatgcaatcctagtcgcacttattatcgcctatgttccatacacgaagatcgattgggatgcttacatgtcacaggttagtgggtttctcgggggagagagagactatgggaacttgaaaggcgatacagggccattggtttatccaacaggtttcctctatgtttactctgcagtgcagaacttaactggaggggaaagtctaacctgctcaaattccttttggtgttctctacattgtcaatccggggatcgtcntgatcatcctacgtgaagactgatgtngggccatggtggggaat

SEQ ID NO: 6021 - DNA, 465 bp, Arabidopsis thaliana
  Clone ID: LIB23-021-Q2-E1-E7
acgcgtccgcggaagcgtgggcggacgcgtgggcaaaatcctagatttctcttcatgggtttccgacaatgtctacagaatcgtaatcatcttcctctacaacaccaccgacactgcttctctcctctgtttccaatcccaatcaactcaatctcttcaatctctcactcgccctcaaatcaactggaactcgatccaaatcgtctccgacaaaacctcaccttacgctagtttccgtacagagaaatggatcgttgtgtcggtgacaaagcacccaacagaggagctcaaaggtttggtcaagattaaaggatggcaagttctagcgatcggaaactctttaacacctaaagattggaatctcaaaggtgcgatttttctatctctagatgctcaagctgagcttaattaccggattttggatcatttgccttaagattccttcgtacgcaaaaatgtcggtta

SEQ ID NO: 6022 - DNA, 505 bp, Arabidopsis thaliana
  unsure at all n locations
  Clone ID: LIB23-021-Q2-E1-E8
tggttcgccgcctacggaaggaatccgggncgacccacgcgtcancggacgcgtgggtgtaacattaccaaaacgaaaccttccttgtggattcccacttctttcttctgttttcttcgtcctcttctttaaattggatgttttgggcaacaaacagagagaaanacgttaatttgagagtttgtcattgaatatttggtttgcaatggaaaganattttctgggtttgagcgacangcattatcnaagtaataacnttaagcatgaggttaacgatgangctgtcnaanaacnagggttaagtacgaaggcagctacagaatgggggaagtcannggtttttgctacttcaagtttcatgccttcttcagatttccaaggaggctaaagcgtttccggggtgcanaccagtggggatcagtttctgcggncaatgttttcccgcagatgccaanttggngggtgggtttcaagaacggngacgccgctttaccaanggggggca

SEQ ID NO: 6023 - DNA, 509 bp, Arabidopsis thaliana
  unsure at all n locations
  Clone ID: LIB23-021-Q2-E1-F10
cttagcnctgccgtccggacatcaagggtcgacccacgcgtccgcggaagcgtgggcggacgcgtgggcattattttcactgagcgcataacatttttgagacaagagannnnnnnnnnnnnnnnnnnnnnnnnnnnnnnnnnnnnnnncggcgatggttgttgctatggaccaacgcaccaatgtgaacggagatcccggcgccggagaccggaagaaagaagaaaggtttgatccgagtgcacaaccaccgttcaagatcggagatataagggcggcgattcctaagcactgttgggttaagagtcctttgagatcaatgagttacgtcgtcagagacattatcgccgtcgcggctttggccatcgctgccgtgtatgttgatagctggttcctttggcctctttattgggccgcccaaggaacacttttctgggccatctttgttctcgggcacgactgtggacatgggaagtttctcaagacattcctctactgaataatgtggg

SEQ ID NO: 6024 - DNA, 487 bp, Arabidopsis thaliana
  unsure at all n locations
  Clone ID: LIB23-021-Q2-E1-F4
gaagtggtttgttggncctgccggtccgganatcaagggtcgacccacncgtccgcccacgcgtccgcccacgcgtccgggctaagcgagacacacacacacgcgcagtcttcttcatcttgcttgcttctggttgcttaaccaaaacaccatggaatctccctaaatttcctcacctactcacttccaatttcaacctgctcgattcttcccctcttcttcgcaaaagccctagttttgatcatcgcacttcactctcctccgcatgagaaatcgagaaatccgctcgacgtagtagatagataaaaccacaaagttagggttttttcaattgggtatggnaactcgtgttgggaaaaaagtttngccttggncgnaaaattgggaacggntncttcggggaaanttaactcggnaatgaagttcaaactaacgaagnaantgccaattagccttgaaatgttaanaactggcgcaatcngcaatt

SEQ ID NO: 6025 - DNA, 486 bp, Arabidopsis thaliana
  unsure at all n locations
  Clone ID: LIB23-021-Q2-E1-F5
ttggtttggccgccctaccggtaagganatcccgggncgacccacgcgtccgnccaagcgtccgcccacgcgtccgcccacgcgtccggacgtgacggtggcgtctgttgagactcaggttggcgttgatgcttgtcatggcatcaagatggtcgctgatactcttctcnctgatattaccgactctgttttcgaccttattgtgctccccggagggcttcccggtggcgagactcttaaaaactgtaaatctttagagaacatggtcaagaaacaagactctgatggccgacttaacgcagctatatgttgtgctcctgccttggctcttggtacttggggtctactanaaggcaataaagcaacgggttaccctgtttttatggacaaacttgcggctacttgtgcaactgctgttgagtcaagaagtgcaaattgatggaanaatagtgancaatcgtggaccaaggaancaccattgaattc

SEQ ID NO: 6026 - DNA, 464 bp, Arabidopsis thaliana
  Clone ID: LIB23-021-Q2-E1-F7
acgcgtccggaacagtcagcatcgttttgcttgcttgtgcgtttctctcgaactctctccatggctgttgcgctccaattcagccgattatgcgttcgaccggatactttcgtgcgggagaatcatctctctggatccggatctctccgccgccggaaagctttatcagtccggtgctcgtctggcgatgagaacgctccttcgccatcggtggtgatggactccgatttcgacgccaaggtgttccgtaagaacttgacgagaagcgataattacaatcgtaaagggttcggtcataaggaggagacactcaagctcatgaatcgagagtacaccagtgatatattggagacactgaaaacaaatgggtatacttattcttggggagatgttactgtgaaactcgctaaagcatatggtttttgctggggtgttgagcgtgctgttcagattgcatatgaaac

SEQ ID NO: 6027 - DNA, 514 bp, Arabidopsis thaliana
  unsure at all n locations
  Clone ID: LIB23-021-Q2-E1-C9
gaatggtttgcttggccctgcccgtccggaaatccaanggtcgacccacgcgtccggatcaagctcatcaggagatggagctcatttctactgtccgcaatccatttgttgtcgagtacaaagattcatgggttgaaaagggttgctatgtgtgcattgttattggatattgccaaggcggggacatgacagataccatcaaaagagcatgtggtgttcattttcctgaggagaaattatgccaatggcttgtccaactattaatggccctcgattatcttcactccaaccatattcttcaccgcgatgtcaagtgttctaacatattcttgacaaaagagcaagacatacggcttggtgactttggactcgctaagattctaacttctgatgaccttacatcctctgttgttggaactccaagctacatgtgtcctgagcttcttgctgacataccttacggatnaaagtcagacatttggtcgttgggatgctgcatgtatgaaatggctgc

SEQ ID NO: 6028 - DNA, 462 bp, Arabidopsis thaliana
  unsure at all n locations
  Clone ID: LIB23-020-Q1-E1-H12
acgcgtccgccnacgcgtccgcggacgcgtgggatgatgatatcatatttccttgtcacacggtagattttgcattcaacgtttgggaaagtgctccggatacaatggtggggtttgtgccccgtgtgcattggcctgaaaaatcgaatgataaagccaattactacacctacagtggatggtggtctgtttggtggagtggtacatatagcatggtactctcaaaggcaaccttcttccacaaaaaaatacctcaacctttacacaaatagcaagccaacatcaatcanggaattcacaacaaagaacaaggaactggtaaagatattgcaatgtcaatcctcaatccgcaaatgctacaaacgctcctggctataatggtttaaagggtaaatatatgaaatccggttcaactgggaatantancataggagggcacacagaaaaaagacacactgcgtt

SEQ ID NO: 6029 - DNA, 491 bp, Arabidopsis thaliana
  unsure at all n locations
  Clone ID: LIB23-020-Q1-E1-H6
ttcgcctggnttagcctggccnaacggtncganactccgggtcnacccacgcgtccgagcctttataactctttctggggtttttaattctctcaacgaacaaaaaaaaaaactcaactaatattctccatcctctttcttcagatttaagagaaaccttatcgttatattctctcttctcttttctttttgactcccacaagaagaaagcaaatttctttttctcaggattgcttgaaaactgtagaaatctttaaggtttttttacaccaatannnnnnnnnnnnnnnnnnnnnnnnnnnnnnnnnnntctattcataaaaaagacaggtaatctcaactccgnnnnnnnnnnnnnnnnnnnnnnnnnnnnnnnnnnnnnnnnnnnnnnnnnnnnnnnnnnnnnnnnnnntggttgcttttttatcagcttgggccttgggaaaactttggcatcctcaagtttcctnctctacgctccaattanctgg

SEQ ID NO: 6030 - DNA, 441 bp, Arabidopsis thaliana
  unsure at all n locations
  Clone ID: LIB23-020-Q1-E1-H8
acgcgtccgcccacgcgtccgaaaaccttgtgagactgacccctcttcagagcaacgctacgggggagagttctatgtaccaagagacgaggagttctctacagccaagggcacttcattcacaggcaaggccgtactggcagctcttccctccatcttccctcagatcgagtctgttctattgagtccccaagaaccttttccacacttcaaggccatacaaaatctctttgaagaaggattcagcttcccaangatgctggcctcttacctctgctccccanaatcatcaaagctcttggcgaagctcaagatgatattctccagtttgatgcccaagttctcaataacaaggatagaatttcaagggttacgagacgaacgaagtttgctccgccaagacacttgccnggccttaaacccttatagcattcanctagt

SEQ ID NO: 6031 - DNA, 501 bp, Arabidopsis thaliana
  unsure at all n locations
  Clone ID: LIB23-020-Q1-E1-H9
acgcgtccgaaaaaaaagaaaacacaaaaacaaagattataatggcttcctcaaccatggctttgtcctcccctgccttcgccggaaaggctgtgaagcctgccgcatcagatgtcctcggaagcggccgtgtgaccatgaggaagactgtcgccaagccaaagggtccatcaggcagcccatggtacggatctgaccgagtcaagtacttgggtccattctccggcgagcccccgagctaccttaccgggtgagttccccggtgactacggatggaaaaccgctnggtctatccggccgaccaaaagaacctccgcaaggaaaccttgagctaaaanttttccaacaagcaagaatgggccaatgcctccgggagcccctaaaggctggcgttttttccctggaanctaattgggctaanggaaacgggagtnaaaagtttcgggaagaaaaccnggttttgggtttcaaaggggccgggtttcaacaagattctttcaa

SEQ ID NO: 6032 - DNA, 473 bp, Arabidopsis thaliana
  unsure at all n locations
  Clone ID: LIB23-021-Q2-E1-A1
acgcgtccggtgagattttggatttcatcctcacaaagggtggtggtggtggtggtgagcaagatcagacgaggacggtgatgacgccacctctgttctttacagggtcacctccaagtagagtttctaacccattaacaaaagattcgctttttcgagaagagcttctcatggtggcttctccgagtccatcgactccacgagcaaccaaaccgcagccaccgtcttctccaaggaacggtagttgtgttatggcggcgacgagtttcgggaacaatcctgtggttcgtgttgtggggtttgattgtgacagacgcancagcaacangagcatttcgactcttgcataaagaagtagtccaatatgcatatatatattaaccagngangagtattaaaaggancaactaagaaaaggtttaaggtattgattaagttgggaagggttttgtttggtgaaaatgtngtaaaaa

SEQ ID NO: 6033 - DNA, 477 bp, Arabidopsis thaliana
  unsure at all n locations
  Clone ID: LIB23-021-Q2-E1-A10
acgcgtccgagctattgcattagcctgaatggtcctgtctgcctttcctctctaccagatattgttgttgagactccggaaaatggaggggaagatcttctgctgaccagtgagttcctcaaggaatgtctggagatgtactctgtaccatcacgaggatttgagacaaacccacgcgggtttcaatcaaagcatcttaatatagtcgatccgcttaaagaaactaacaatcttggacgcagcgtaagcaaaggtaacttttatcgtatacgaagtgcattcacatatggtgctcggaagcttgggcaacttttttgcaagtcagatgaaaccataagttctgagcttcgtaagttcctcccctaacaatgctactcaaggcatgggaattggcaaaaggcccgaatgtccatgaagccnattccatttttaaaggtacaacaaggtacaatgccaaaattgccancttccaaccat

SEQ ID NO: 6034 - DNA, 517 bp, Arabidopsis thaliana
  unsure at all n locations
  Clone ID: LIB23-021-Q2-E1-A11
aactggtttggtttggcctggcntaccgggatatcgaaaggtcgacccaggcgtccgcccaaacagtctccctagtgagcgatgatgaaagcaaaccagaaaccgaaaccccacgcgccaccgcgtcctctcttctcctgtggcttcttccgccgctgcacacaatccgtcctcagcccaannnnnnnnnnnnnnnnnnnnnnnnnnnnnnnnnnnnnnnnnnnnnnnnnnnnnnnnnnnnnnnnnnnnnnnnnnnnnnnnnnnnnnnnnnnnnnnnnnnnnnnnnnnnnnnnnnnnnnnnnnnnnnnnnnnnnnnnnnnnnnnnnnnnnnnnnnnnnnnnnnnnnnnnnnnnnnnnnnnnnnnnnnnnnnnnnnnaagaaaccttccagatcgcagagcttcacctcacatccgtctctgaatccgacaagctcctcgctctacagctactcgagcgggtagtcgtacctgacccgccatctgattcgacttgtcaacggggtctcatgcgaagtc

SEQ ID NO: 6035 - DNA, 468 bp, Arabidopsis thaliana
  unsure at all n locations
  Clone ID: LIB23-021-Q2-E1-A4
acgcgtccgcccangcgtccgcccacgcgtccgcgtccattgaagtgaacagtcagcatcgttttgcttgcttgtgcgtttctctcgaactctctccatggctgttgcgctccaattcagccgattatgcgttcgaccggatactttcgtgcgggagaatcatctctctggatccggatctctccgccgccggaaagctttatcagtccggtgctcgtctggcgatgagaacgctccttcgccatcggtggtgatggactccgatttcgacgccaaggtgttccgtaagaacttgacgagaagcgataattacaatcgtaaagggttcggtcataaggaggagacactcaagctcatgaatcgagaatacaccagtgatatattggagacactgaaaacaaatgggtatacttaatcctggggaaatttactgggaaaatccctaaaacataatnggttttgctgggg

SEQ ID NO: 6036 - DNA, 493 bp, Arabidopsis thaliana
  unsure at all n locations
  Clone ID: LIB23-021-Q2-E1-B10
cgtccgganatccagggtcgacccacgcgtccgaacantttagcacggtgcgacaagatggcgagctcagtgacgctgcttctatggagtcttcttcttctcggtacactaagcgctattcaggccaaaaagtctaaggaaaacttaaaggagatcacacacaaggtttattttgatgttgaaattgatgggaaagcagctggtcgtattgtcatgggtctatttggcaagacagtccccaaaactgtagagaatttccgagctttatgcactggggagaaaggaataggtaagaatgggaaggcgctccattacaaggggagttcatttcataggatcataccaagctttatgctccaaggaggcgattttacacatggaaatggaatgggaggagaatctatctatggtgagaagtttgctgatgagaacttcaaactcaagcatactggtccaagggtcttatcaatggnaaatgcggtcaagataccaa

SEQ ID NO: 6037 - DNA, 510 bp, Arabidopsis thaliana
  unsure at all n locations
  Clone ID: LIB23-021-Q2-E1-B11
nttttggttggcccgagccngtccgganatcnaanggtcgacccacgcgtccgcccaaattagggttttctgggaattaggttgattaaattatgcgaggcggtggtaggagaaggtcaaacggtggtggtagttctggcaaaaacaaggctaaatctccaggacagagcacgagaaccaatcataattccgcggcggggtcttcctccggtggtcgtcaccgacgtcagaataatactactttgtttgttgaaggaggtattctctccgactaccgaaaagatcctaacttttcgacgccatctcgtggaggaagctcttcgggaaagggattgagatctagaagcatagagcgtgtaaaagcttctgcttccacgagtggtccaaggaaatgcagtggtaatacttatgtgtatcaatatccttccattgattttgaagaaaggttggatncaagatnaggagttgaaatgatnaaatgaatgaaaatccactggtgtttgggaaatc

SEQ ID NO: 6038 - DNA, 509 bp, Arabidopsis thaliana
  unsure at all n locations
  Clone ID: LIB23-021-Q2-E1-B9
aatgnttgctttgcctgcccgtccggaaatcnanggtcgacccacgcgtccgccagattattcagcctgaaggtccaagttttcgtgtaaggggttactttgtcgagtggcagaagtggaactttcgtattggattcactccaagggaaggtttagtcatacattcggtagcatatgttgatggcagtcgaggtcgaaggcctgttgcacacaggctaagttttgtggaaatggttgtgccttatggcgatcctaatgagccacattacaggaaaaatgcttttgatgcaggggaggatggtctcgggaaaaacgcacattcgcttaagaaggggtgtgactgtctgggatctatcaagtacttcgatgcccatttcacaaatttcactggaggagttgaaacaattgagaactgtgtttgcttgcatgaagaagatcatgggattttgtggaaacatcaggactggagaacaggattagccgaagtgcgaagatctaggagactaact

SEQ ID NO: 6039 - DNA, 499 bp, Arabidopsis thaliana
  unsure at all n locations
  Clone ID: LIB23-021-Q2-E1-C12
tgcccgtccggatgatcaagggtcgacccacgcgtccgctggagttgtccaactaagacaaaaagtgcaatacatgaggcgtcgaggtgcaaaggtgatgctggagggatggataacaagagaggggattcattgtgattgctgcagtaaaatactcacagtctccaggtttgagattcatgctgggagcaagtcatgtcagcctttccaaaatatttatctggaatctggcgcttctcttcttcaatgccaagtcagagcgtggaatatgcagaaagatgctacgaatcttgctctccatcaagtggacactgacggggatgatccaaatgatgatgcttgtggtatatgcggtgatggtggagatttgatttgctgtgatggttgtccatcaacatatcatcaaaactgccttgggtatgcaagtgcttccttcgggtgattggcattgtccaaattgcacatgcaagttttgtgaagcanctgtggctctggtggc

SEQ ID NO: 6040 - DNA, 466 bp, Arabidopsis thaliana
  unsure at all n locations
  Clone ID: LIB23-021-Q2-E1-C5
acgcgtccgcgcnatcttcatcatcggcaaatcgaatctccgattatatatcaaatagcttaccaaatccgacatgacccaggccctcgttttcggaggactataatgatcggactcttcgtgtcccgtctcgattgcatggggtttgagctatgccggagcttcgccgtggagtccgccgtggccgtgttactgatgctgtagctcccaatcagcttccgcaaacacctacagaaaagaaaccgaagaagagtaccgttaaagctccaaaaccggttgccggcggagttacaggagttgcagagaggccgaggactagattagcggcgaggaaattaaaggaggaagataaagagatacctcaggagattccggttgttgtgccgtctaaggatagcgatatcgataaaaacaagggtaaagaggtagtcgttgaagaagagaagaaagatatggctantggtaa

SEQ ID NO: 6041 - DNA, 455 bp, Arabidopsis thaliana
  unsure at all n locations
  Clone ID: LIB23-020-Q1-E1-H10
acgcgtccgcccacgcgtccgcttgcttcttgctaaaggccttgccttgtgcttcctcgtcctatctctcttacctccgtaatttgttcgtaagagaagtatcgtgatgggtactgagagaaagaggaaaattagtctgttcgatgttatggacgatccgtctgctccggcgaagaacgccaaaaccagtggtcttcccgacggcggaatcaacagtctgatcaataaatggaacgggaagccttattcacagagatattatgacattctggagaaacggaggactctacctgtctggctgcagaaagaggagtttctcaaaacgttgaacaacaatcaaaccctaattctggttggtgaaaccggtagtggtaaaactactcagattccacagtttgtgatagatgctgtggatgctgaaacatcggataagcgtaaggaantggttggttgga

SEQ ID NO: 6042 - DNA, 467 bp, Arabidopsis thaliana
  unsure at all n locations
  Clone ID: LIB23-019-Q1-E1-D1
cacgcgtccgaccattcctccgaaagtttatagatttcactctcccccgaactatacaaaattccctcaaaaggaaaaactaaaaagccgatcttggcttttttgtttctgagtgcatctcgatacttggaagcattctttggtgaggctgattcattctcatctgtgaaagtctttggcttttgaagcaatactatggaaggaattcagcatcctatacctcgcactgtcgaagaggtttttagcgactttcgtggtcgtagagctggtctcatcaaggctctctctactgatgtacagaagttttaccatcagtgtgaccctgagaaggaaaacttgtgtctttatggacttccaaatgagacatgggaggttaatcttcccgttgaggaggtccctcctgagcttcctgaaccagcgttaggcatcaatttcgcaagggacggaatgcangaaaaagactggat

SEQ ID NO: 6043 - DNA, 478 bp, Arabidopsis thaliana
  unsure at all n locations
  Clone ID: LIB23-019-Q1-E1-D10
acgcgtccgcnaaaatctccaaagaacccgacaaagcgccatgtcgctcactatcccggcgaatctcgttctcaacccgagatctaacaaatctctcactcaatccgtacctaaatcctccgcangattcgtctgctccgatgacaaannnnnnnnnnnnnnnnnnnnnnnnnnnnnnnnnnnnnnnnnnnnnnnnnnnnnnnnnnnnnnnnnnnnntctgctcctatgccagctgtcgctgatatctcaggtttgactccttgcaaggactcaaaacagttcgctaaaagagagaagcaacagatcaagaagcttgaatcttctcttaaagctctacgctcctgaatctgcccctggctcctggctcctcaaatggctcaagattngaagaaaaacaatncgcaaggttcgacaaactacggggaagttagggattgttatgccgggtcaagacggttttacggcacttgataantg

SEQ ID NO: 6044 - DNA, 465 bp, Arabidopsis thaliana
  unsure at all n locations
  Clone ID: LIB23-019-Q1-E1-D2
cacgcgtccggagaaatttggttgtntgttgacggaagcttcttcggtctctcttctccgtcttacgattgtcaacgcgtggttccatcttcaattttgtttctattttagcagaagtttctcgagcttcaaatactgtttcagatcaatcaatcagtcaatcatggctagctctggaaacaagaacatcaacgccaaattggtattactaggagatgttggagctggaaaatcaagtcttgtgctacggtttgtgaaagatcagtttgttgaatttcaggaatcaaccattggtgcagcttttttctctcaaacattggctgtgaatgatgcgactgtgaagtttgagatatgggatacagctggtcaggaacgataccacagttgggctccaatgtactacaagggtgcaactgctggcaataatgnccttgacattactaatcaagnctcatttgagaaggg

SEQ ID NO: 6045 - DNA, 467 bp, Arabidopsis thaliana
  Clone ID: LIB23-019-Q1-E1-D3
cacgcgtccgccgacgcgtgggtagaaatactgattacccccaaatccgaagaaacgatttcgtctggagatatcaaagatttgacaatgtcaccggatcatagaatgtcaccggatcatagagatagccatagaaagaggtctcgtcctcagtctgactacgatgataacggtggaagcaaacggagatatcgtggtgacgatagagattcacttgtgattgatcgcgatgacactgtattccgatacctgtgcccggtaaaaaagattgggagtgttattggtagaggaggtgatattgtcaagcaattgaggaatgatactagatcgaaaattagaataggcgaagcaattccgggatgtgatgaacgtgttattactatctatagccctagtgatgagaccaatgcctttggagatggagagaaagttctttctcctgcgcaggatgctttgtttaagattca

SEQ ID NO: 6046 - DNA, 527 bp, Arabidopsis thaliana
  unsure at all n locations
  Clone ID: LIB23-019-Q1-E1-D9
gtaccgccccgagaattcccgaatcnacccacgcntccgcncctttttgcaagagnnnnnnnnnnnnnnnnnnnnnnnnnnnnnnnnnnnnnnnnnnnnnnnnnnnnnnnnnnnnnnnnnnnnnngcgtgttgtaacctaatccaaatcttacncattgagggaatnggatcatcacgacgcgtcaaaattctgtatcggaggaccgagagatctccatctcctgtccagattcgattcccaccaatcccaatttcgtgaaattcgttagggttttagtttgaatctcatctcatcagatcgagtcgacccaggattangaagaagacaagcgatgaagatggcgacgaatggccgggtttttcacaatccggggctaagtccgcgttcntgggtactcatccgaaacaattgggtgttagtngttngcctgaacaagnnaccttggcttnagcaagntnacgggantcaaaggtagcccgantnttntcccaaccantggttgntnacaatgaagcggncttgttt

SEQ ID NO: 6047 - DNA, 461 bp, Arabidopsis thaliana
  Clone ID: LIB23-019-Q1-E1-E12
acgcgtccggtgcatgtggttccaagcccatatgtttaggaaagttatcagtatcacaaaatctcactgcaagctaggacttacagccacccttgtgagagaagacgaaaggattacagatttgaacttcctcattggcccgaaactctatgaagccaattggctagatttagttaaaggaggctttattgcaaatgttcagtgtgctgaagtatggtgtcccatgaccaaagagttttttgcagaatatctaaagaaagagaactccaagaaaaagcaggcactttatgtcatgaaccctaacaagttcagagcctgtgagtttctgattcgtttccatgaacaacaacgtggggataaaatcattgtctttgcagacaatctttttgcgcttacagagtatgcgatgaaactccggaaaccaatgatttatggtgcaaccagtcatatccaaaaggaca

SEQ ID NO: 6048 - DNA, 456 bp, Arabidopsis thaliana
  Clone ID: LIB23-019-Q1-E1-E7
acgcgtccggataaaccacaacatcacctgatcaagatttggcattgctttaattaggaagtgtttgacgtgctcgatctgctcctttatgtcttcattgtcatcacaaatttcttcaaacttaaatatcttaaggaccttcaccggacttgataatagagattaacgaactttgtgatgacaacgaagacacagctgatcaaatcaagtaggtcaaccactttctgaagacaatgccgaatcttgaacaattgatgttgtgctacgatacaccaaatcatttgatgataccattagaaattacatttattcacccacgattctgtatttggaaaagatgagacaattaaatatgcaaaattaggttttgaatcttaaagtcattcttaaactcatgaaaggcctcctttagtctagatgacaaaattgtttttggaagaaacaaacggttttgca

SEQ ID NO: 6049 - DNA, 461 bp, Arabidopsis thaliana
  unsure at all n locations
  Clone ID: LIB23-019-Q1-E1-E8
acgcgtccgcttccctcttctctcaccacaatccnnnnnnnnnnnnnnnnnnnnnnnnnnnnnnnnnnnnnnnnnnnnnnnnnnnnnnnnnnnnnnagctctttatcaccattgtctcctttcttctctatgctccattgttcttatcttcaccagttcctgaccctgaatctgtcgttgaagaagttcacaagagcattaatgcgtcggttgcaggaagaaggaagttaggttacctctcatgtacgaccggtaacccaatcgacgactgttggcgttgtgaccctcactgggagcaacaccgtcaacgtctcgctgactgcgccattggattcggcaaaaacgccatcggtggccgtgacggtcggatctacgtggtcaccgactcaggaaacgacaacccagttagccccaagcccggaactttaagacacgcccgtggtccaangacgaaccactct

SEQ ID NO: 6050 - DNA, 464 bp, Arabidopsis thaliana
  unsure at all n locations
  Clone ID: LIB23-019-Q1-E1-F1
cacgcgtcggcntngttgttagagaaaaaattccagttcttggattccggcgacctcattggtgaaagatcttcagagattattatatttctcttgaccggtttcgatggcggatggaaacgccagttcgcgttacgtgaaattgaggaaagagcaggctcctgtcgaagaagatatcacacccggtgaactcaatcagcccattgatgttcctcagttgaatgtccgcaagtgccatgaatgtatgcaagttctacctgaaacctatgaacctccttctgatgaaaactggaccaccggcatttttggttgtgctgaagatccagagagctgcaggactggtctcttttgtccgtgtgttctgtttgggcgtaacattgaagctgtganggaagagattccttggacccaaccatgtgtatgccatgctgtatgtgtcgaaggagtatggcacttgcancagt

SEQ ID NO: 6051 - DNA, 456 bp, Arabidopsis thaliana
  unsure at all n locations
  Clone ID: LIB23-019-Q1-E1-F7
acgcgtccgaactcactacccccagctttggtgatttgaaccacttgatttctgctactatgtctggtgtgacttgctgtctgaggttccctggtcaactcaactctgacctccgaaagcttgctgtgaatctcatcccattcccccgtcttcacttcttcatggtgggttttgctcctctcacctcaagaggttctcancagtaccgttccctcacagtccctgagctcacccagcaaatgtgggactccaagaacatgatgtgtgctgcagacccaaggcacggacgctacctcacagcctctgccatgttccgtggcaagatgagcacaaaggaagttgacgagcagatgctgaatgtgcagaacaagaactcgtcctactttgtggagtggattcccaacaacgtgaaatcgacagtctgtgacatcccanctactgggtccgaagatggca

SEQ ID NO: 6052 - DNA, 509 bp, Arabidopsis thaliana
  unsure at all n locations
  Clone ID: LIB23-019-Q1-E1-G10
ctgtttacgcctggtngtacggcccgaaaattcccgngtcgacccacgcgtccggagagaaacaaatccttcttctaaaatattcttcaatcttcttctcgaagcttctccaaaaatggcgattacttcttctagaaccaccagatcaaacggatctgcttcgctccgatccaaatcaccgtccggtcgattctgtggcgtttactcaaaccgtatgccgtcatcatctccgtcgtcgtcaggtttcgcttcttccacaagctcaagtttctcctcaccgtctacagcgtttttcagcagccacaatcagaacaaccaccaccaacacagatctgcttctccgacgcgtgtgaatctattcacatcagctccgatgacgcaatcgtttcgttactcaatcgataacagatttatatcaccgaatcgattcatcgctgtttcttccaacaaacctagcaatcatcacaaagattccggattccgaggagaanatgtatgtgctcccccga

SEQ ID NO: 6053 - DNA, 455 bp, Arabidopsis thaliana
  unsure at all n locations
  Clone ID: LIB23-019-Q1-E1-G2
taaatcttcncatgctcagctttcgtcccaaatttttcttgatcttgtggattcggtgatagctgatgtagcatctgagtgtcatcgggtancacgactaggacttgatcgtgatttggatatagtagaagaagagttgagattgtcagtggaagcgcgtgcgaagatcgctgatcctagcaacaacctcgaaaccaacaccaaatatgttgttgatatatttgggcagactcaccctcctgtagctagtgaagtgttcaattgcatgaactgtgggcgacaaattgttgcaggaaggtttgctcctcatctcgaaaaatgcatgggaaagggaagaaaggctcgtgccaagacaaccagaancacaacgggcngcacagaancggaatgcacgacgcagccccaatccacgatattccccttatccnnattctggctagtngagaaccaattag

SEQ ID NO: 6054 - DNA, 469 bp, Arabidopsis thaliana
  unsure at all n locations
  Clone ID: LIB23-019-Q1-E1-G4
cacgcgtccgcccaagcgtccgcaaattatcaactttgtttctttgatcagctttgtcatcttgaaattatcaacgttttgactaaatttaaagaacagttgtgttcgttcgtgccattcttttgaatgcttatacgtacatttcttcttgaaaagactttgaatccaagaacccgtgaggaagtaatcccagtgaagagaagacgacaaagaaaaaggagcctataaagatccaaagcttcccttgtctttagttctcatcaaaaaaattgaaaaacgtttggagttattgagagagagagagatagagaaagatgttggaaggcaaagcaatggtggaagattcagacatgccaagtgaagatgcagatgcaagctatggcatttgcttctcaagctcttgacctttttgatgtccttgactgtaaatccaattgctggtcacatcaagaagganttgatgagagat

SEQ ID NO: 6055 - DNA, 461 bp, Arabidopsis thaliana
  unsure at all n locations
  Clone ID: LIB23-019-Q1-E1-C9
acgcgtccgcccacgcgtccgttcaacaccaaaacatcaaccctcgtgacagctaccatcagtctgttgatgaaatggcttctggcttagaccattttagtggaggcattggcaatatgcttgatgatggtgactcacatccaatcggaaacatgcttcctgatgatgaggaagagcttttctctggtctaatggatgatttaaacttaagttccttgccagctacgttggatgacttggaagattatgatttattcggtagcggaggaggtcttgaattggagactgatccatatgacagtctaaacaagggcttctcaanaaaggggttttgctgattctaacgttgacaatgttatgcctcaaaacattttcaaaatgggagtgggattcaatggctggngaacaaccctaaggggaacatccctcaaaggccttggttggtccggataataacaatt

SEQ ID NO: 6056 - DNA, 511 bp, Arabidopsis thaliana
  unsure at all n locations
  Clone ID: LIB23-019-Q1-E1-A12
aactgtctcgcctgntcgtaccggcccgaaaattcccgnngtccacccacgcgtccgccnacgcgtccggtcnnnnnnnnnnnnnnnnnnnnnnnnnnnnnnnnnnnnnnnnnnnnnnnnnnnnnnnnnnnnnnnnnnctattcttacgctttcttcgatcgtcgatttgattttttcccttccttcttatttttctcggttgaagtagaagataaagcatcgatacatgatggctgattgataagagttttctccggagaggttcggagttttttttttagaaaggaaacattaaaaaagatggcagtctcttttcctcgtcttccgaggtggttgtgtggtggtagtaacactaaagatagagagaagaaagagtcaattcctaaaggatcttcttcacttagtccttcactgaagaagactactactaataagactggttcctcctccttcatcaagtgaagaaagaacaaagaganggatggattggaagaagaagattaagatnaa

SEQ ID NO: 6057 - DNA, 455 bp, Arabidopsis thaliana
  unsure at all n locations
  Clone ID: LIB23-019-Q1-E1-A6
acgcgtccgggcnacccgaaaagctctgatcaacgttcaccggatcattcgctccaccgccgtggttggccggagctctatcattcctgccgccgctaaccggtcatatcctattatattccggaatggagttgatttgggggcgagattcttctgtgagaacactgcgtctgcccagaatttcgatattgatctctctaacgaagagaataagagaagaacgatcaacagattgttgtataggagcaagcaaagagggtttttggaacttgatcttgttttggggaattgggttgaggagaatgttaattccatggacgaaaatggtgttaaatccctaattcatgtcctcaatttggaaaaccctgatctctggaaatggctaactgaacaggaacagcctccggaagcagtgagttcaaatccggtgttctcggcgttacacgagaaatcat

SEQ ID NO: 6058 - DNA, 456 bp, Arabidopsis thaliana
  unsure at all n locations
  Clone ID: LIB23-019-Q1-E1-A7
acgcgtccggagagagactctgtagaagaagcacatgaattgttctggttttatgatagctttctcttaagaagaagaagaagaaagataaattaaaagggtggttctgagttttaaggattattgtttgannnnnnnnnnnnnnnnnnnnnnnnnnnnnnnnnnnnnnnnnnnnnnttatctgattgctctaatgaatatgagaagctcgttgttcggatgaacatgcccagggtcgtaattgacaatggagtttgccctaattcaactgtcgtcaagattgatagtgcaagaagcccaggaatattgcttgaatctgtacaacttctcactgatatgaatctctggatcaaaaaagcttacatttcctctgatggaaaatggaatatggatgtttttcatgtgagcgatcttaacggagacaaattaaccgacgagaacctaatccgttacatt

SEQ ID NO: 6059 - DNA, 439 bp, Arabidopsis thaliana
  unsure at all n locations
  Clone ID: LIB23-019-Q1-E1-B1
nacacgcgtccgccggaaggcggcgaaactgattgcaactggctcaggacatttgataaaagggattctttggtgtgganatgtgactatggataggcttatttggggaaatggtttcatgaaaaggaggttgtcaaaggctganaaggatagtgaagttcaccctgacaccttgnaaagaatcagaagagtgnagaggatgaccaanatgacagagagtgtagcaaacagcatactgtctggagtccttaaagtttcnggattcttcacaagttcagtggcaaacaccaaagtangaaagaaattcttcagccttcttcctggagaatcatccttgcatctcttgacggattcaataaggtctgtgacgctnttangtncctgggaaggaatgtaatgtcaacctcntccactgttacaaccgaacccgttgatnaca

SEQ ID NO: 6060 - DNA, 478 bp, Arabidopsis thaliana
  unsure at all n locations
  Clone ID: LIB23-019-Q1-E1-B10
gcctgtntgtaccggcccganaattcccgaatccacccacgcctccgcnatctcaaaaacgctcctggagtgtcaagaacagagatttgggtcggaatcaagaaagtaatcgagactttgcaggacaactatccggaattcgtgtccagaaacatattcatcnacgttcnattctggttctacgccatgagagctgtcctctcgccattcttaactcaacgaaccangagcaagtttgttgtggctcgtctcgctaaggtcagagagactcttctcaagtacattccagctgatgagctcccagttcagtacggtgggttcaaaacagtagacgataccnaattctccaacgaaactgtctctgangttgttgttaagccctggattatctgnnancatcgaaatcccanctcctgagactganngtncatttggtattnggacataaccggttttngggaatgggaagttgaagtnc

SEQ ID NO: 6061 - DNA, 468 bp, Arabidopsis thaliana
  unsure at all n locations
  Clone ID: LIB23-019-Q1-E1-B2
cacgcgtcngggtgaatgcagtaagagacggcatgaacttagttccatataaatatatcatttgcaggcaagggaccccaggaatggataaggccatggggattagccatgactcagcccggacgagcatgcttgttgtctctgagtttatcggctgctcgccttctttgagtggtgcgatcagggtgaacccatgggatgtagatgctgttgcagaagcggtaaacttagccctcactatgggtgagactgaaaagcgattaaggcacgagaaacactatcactatgtgagtactcatgatgtgggttactgggcaaagagctttatgcaggatcttgagagggcatgccgggagcattataataaacgttgttggggtattggttttgggcttgagtttcagagttctgtcactgtctcccgagttttaggaagctatcctatcgatnacattgtcctcacgtata

SEQ ID NO: 6062 - DNA, 506 bp, Arabidopsis thaliana
  unsure at all n locations
  Clone ID: LIB23-019-Q1-E1-B3
gttgcctgcgccgnttggcctggcattccngggtcgaaccacgcgtccganaaaatatgtannnnnnnnnnnnnnnnnnnnnnnnnnnnnnnnnnnnnnnnnnnnnnnnnnnnnnnnnnnnnnnnnnnnnnnnnnnnnnnnnnnnnnnnnnnnnnnccgctggacgtcgaaacaacctgcctcgtccaaacctcagaagacgatgtaaggtcaccgcttcacgggctaatattgaacaagaaggtaacacagtgaaagaacccattcagaatattaaagtaaagggatacataacggcccaagaagagtttctggagggcataacttggtcgagaggtctcgatgacattgctgatatccgcggcagatcattgctcgtcgagcttattagcgccaagactgaccagcggattacggtagaagactacgcacaacgtgtatgggccgaagcccctgatgagaagtacgagtgcgagtttgagatgcctgaagacttggaccaatgg

SEQ ID NO: 6063 - DNA, 461 bp, Arabidopsis thaliana
  unsure at all n locations
  Clone ID: LIB23-019-Q1-E1-B6
angcgtccgcccaagcgtccgtttgattctggtcgttatccagatcagagaaatccgtgatccttttttctctctcactttcttctctgaaataggaaaaacanaaaacaaatctgataatcgaaacngatcactcactgctgattccgtaacctaaaanatgtcggnagcttcttctagctccgttcttcacctccgaancaaccaacaactgttatcactccgatctcncaaaaantccacctccgttgcttctcaattggccgttacgtctggtgttagccgtagaagatcgtgtacggcgcgatgctctgtgaagaaaccggtgattcctgagagtcctttcctagggactcgtgtgcgggagatccggatccgagacgcttcagttctggagatcagatggtcctgggacggtctgcgaanncttcgaaacggtggttaantcgtcattttccggc

SEQ ID NO: 6064 - DNA, 455 bp, Arabidopsis thaliana
  Clone ID: LIB23-019-Q1-E1-B8
acgcgtccgcaagctcatcttaggtgctgacagtcctgcgattacagaaagtagagttactacagtccagtgcttgtctggtactggttcgttgagagttggggctgagtttctcaaaacacactaccaccaaagtgtcatttacattccaaaaccaacttgggggaaccatcccaaagttttcaacttggcaggcttgtctgtggagtatttccgctactatgatcctgcaacccgtggtcttgacttcaaaggcttgctcgaggatcttggcgctgcaccatctggagctattgtcttacttcatgcatgtgcacacaatcccactggagttgacccaacctctgaacagtgggaacagattcgacagctgatgagatctaaaagcttattacccttttttgatagtgcatatcagggttttgctagtggtagccttgacacagatgcacaat

SEQ ID NO: 6065 - DNA, 474 bp, Arabidopsis thaliana
  unsure at all n locations
  Clone ID: LIB23-019-Q1-E1-B9
acgcgtccgggaaaatcaaagcagcagttatggccgacgtagcaacaaagcaccccatggaagatgaggtgaagaagacggaggcgtctagtttggtggggaagctagagacagacgtggagatcaaggcttcggctgataagtttcaccacatgttcgctgggaaaccacaccatgtctccaaagcaagtccaggcaacattcagggatgtgatctgcacgaaggcgactggggcacagtcggctctatcgtcttctggaattacgtacatgatggggaggcaaaggtggcgaaggagaggatcgaggcggtggagccagataagaacttgatcacgtttanggttatagaaggtgatctgatgaaagagtacaaagaacctccttgctcaccatccaagttganccctaaaccctggaaggccctggaaantattgtgcactgggaaccttgagtatgaagaaaaaattagc

SEQ ID NO: 6066 - DNA, 467 bp, Arabidopsis thaliana
  unsure at all n locations
  Clone ID: LIB23-019-Q1-E1-C1
cacgcgtccgcccacgcgtccgcaagaatttacagtatttgaaaaaatacaaaatggcgaaaatctaccggaagttgacaggctacggtggtgaaggagggcgtgaatgggacgatgatgtatatgagggtgtaagaaaagtgtatgtaggacaagatatcaatcgtatcacttacgtcaaattcgagtatgtgaaggaagacggccaagtcgtaacaactgaatatgggaaaatcattcaacaacccaaagagtttgtacttcaatatccggacgaacatatcatagcggtggaaggaaactatcgcggagtggctctatgtgccacagaggtgatcacaaacctcgtcttcaagacctcaaagggtagaaagtcaccactgtttggtccaaacttgcttggaattacgaccggtacaaagttcgttattgangatggaggaaagaagatcgtanggtttcatgga

SEQ ID NO: 6067 - DNA, 502 bp, Arabidopsis thaliana
  unsure at all n locations
  Clone ID: LIB23-019-Q1-E1-C12
aatgtctcgcctggtcgtaccggcccgnnaattcccgngtcnacccacgcgtccgtcnctctctctctccctctcccaaaatctcacgatgcaacctcagccgcatatttctccgaacaccgcaactgccgcgatctcagccgcgcttgaatctcagcgcagtagaaaanaccgaggaagttacaattgcggtagatgtggtcaacctaagaaaggccatgtctgtcttttaactgctccacctgatattcccactactccgatcgcttctgagccagtgagctgcatctccgccgccgcatcttcttcccgttctactgtcttatctttaacagcggcgccgtcatcgcgacagaccttcactcacttacgccgagctttatcgttcgatgacgtcgatgcgcgtaattcactcgatgaatccgatntggaagctgcatcgaaggatttggatntacaattggatacggatatgttcaacctgggangttcaagcggtggg

SEQ ID NO: 6068 - DNA, 457 bp, Arabidopsis thaliana
  unsure at all n locations
  Clone ID: LIB23-019-Q1-E1-C7
acgcgtccgtcgaaatcggaaatcgaaaatctctaatcagttttttttttttaagtagaagaagaaaagttcttacgaagaacccagattttgttaagaaatggatgtgccagaggagacgaggcttcgccacaagcgagattttatccagttcctcgatagtatgtatatggaggaaatcaaggctttggtacatcaaaagcgtcaccgtctcattattaatatctctgacattcaccaccacttcagggaagttgcctctaggatactgaagaatccaaatgagtatatgcagtcattttgtgacgcagccactgaagctactcgtgctattgaccctaaatacttgaaggaaggagagcttgtccttgttggttttgaaggttattttgtttctcgcgttgttactcctanagagcttctctctgantttattgggatcgatggtctgtgttga

SEQ ID NO: 6069 - DNA, 538 bp, Arabidopsis thaliana
  unsure at all n locations
  Clone ID: LIB23-018-Q1-E1-H8
acgcgtccgcccacgcgtccggaaaacctagaaacaaatacggtcttttttttttctttttatgggtcgcgaatctctggctgttgtgtcctcgccgccatcggcgactgcgcccagtactgctgtgtcggctacctcgcttgctcctggctttcgatttcatccgactgatgaggaactcgtgagctattacttgaagaggaaggttctgggtaaacctgtacgcttcgatgcgattggagaggtaagatatctacaagcatgagccctggggatttagcaagtgttttcgaagttgaaaaactccgggaacaaagaaatgggnacttccntcantggcgtttangataaggaaagtaacnggtaaatggggggccaagggattnaaattcngaagcaaanntaannaaaanggggttaaacgggggaaaagnnaactggggaaaaagancangnggaaaaatnccgccccggggaataattcaantttgcctccgggtaatgaaaaaaaagaangccttggtttttccaacaaagc

SEQ ID NO: 6070 - DNA, 472 bp, Arabidopsis thaliana
  unsure at all n locations
  Clone ID: LIB23-018-Q1-E1-F8
acgcgtccggttagtattgtcacagagaaagcttcagatctagaagaagaagcagagttcataaagagaaacccattttaaaccctagaaatcaagtgtcaatctcggaaaccttctgattccgcaacaatggcagttacagatactgaaagtcctcatcttggggaaattacttgtggtaccttacttgagaagttgcaggaaatctgggatgaagttggtgagagtgatgatgaacgagacaaactgcttcttcagatagagcaagagtgtcttgacgtttacaagagaaaagtcgagcaggctgcgaaatcccgagctgagcttcttcaaaccttgtcaaatgctaatgctgaacctttccaacctcaaaagggcccttgggganaaaaagcctaattggnaatccggataagtcttcaggaacgattaaagaacaacttgctgcaatagcaccggctcttgaacaact

SEQ ID NO: 6071 - DNA, 457 bp, Arabidopsis thaliana
  unsure at all n locations
  Clone ID: LIB23-018-Q1-E1-F9
gcgcagttctntttgcacggccagtactcacaaagaatggccggtcgacccangnatccgagaacttggtcatgtgtccatttttagaaatcaataaaatattataccatatatttatagtatctaactttaagagaataaatatttttatttgccgattcatngngacacacatgcgtgtggtatctatgtctatccattaaactaattatatataaacttattttctggccacaatttttgtttcgtgtatagagagagctcaaagatggaaccaacagaanaaccatcgaccaaaccatcttctcggactctacctagagacactcgtggctctctcgaagtantcaacccgtcnactcangctgacccgacccgattncccggtgttcngtccctgaaccannagcgtnggcaagacttgagtgatccacgtggcaccagtcctcaacccncg

SEQ ID NO: 6072 - DNA, 518 bp, Arabidopsis thaliana
  unsure at all n locations
  Clone ID: LIB23-018-Q1-E1-G1
aacttttatccgcccgnctaccggtcanagaattcccgggncgacccacgcgtcnncgaatcctgatgttacaggcttagatgaggaagggagaggtgaatcgaatgatttgcctcaatttcgtgagttctctatagagactataaggaacgcaacttcaggatttgcagcagagaatatagtttcagagcatggtgagagagctcctaatgttgtctataaaggcaagcttgagaatcaaagacgtattgctgtcaaaaggtttaaccggaaatcttgggctgattctcgtcaattcttggaagaagccaaagctgttggtcaattacngaatcatacgatggcaaatctacntgggtgttgttatgaanatgaanagagactacttattgcagagtttangcctaatgaaactttggnaaaacaaccttttcaccgggagtcacanccaatgaagtnggcgaatgcgactgagaagtancttttgcataatgctcaaagcgctanagtattgtacc

SEQ ID NO: 6073 - DNA, 470 bp, Arabidopsis thaliana
  unsure at all n locations
  Clone ID: LIB23-018-Q1-E1-G3
acgcgtccgaaagaaggagagaaagatgacgtcaccgagccatgcctctgatcgcggcggcggcgacggtgactcagtcgagaatcagtcccctgagctcaggaaagatccggtaactaaccgctgggtcatattctctcccgccagagccaagagaccgactgatttcaaatccaaatctccccagaaccctaatcccaaaccttcctcatgcccattttgcatcggtcgtgagcaagagtgtgccccggagttatttcgtgtgccagatnatgacccgaattggaaactccgggtcatcgagaatctgtacccggctcttagtaggaatcccgagaaccaatcgaaccaacctgaaaacgggaananttcgngaatatcccgntccgattccacgaagtnntgatngaatcccctgttcaatcgantgagngngggcganatcgattcggtgggtatcggcgatatct

SEQ ID NO: 6074 - DNA, 514 bp, Arabidopsis thaliana
  unsure at all n locations
  Clone ID: LIB23-018-Q1-E1-G5
ttgtttacgccggccangtaccgntcaggaattcccgnggtcgacccacgcgtccgattccagcgacttaacaacaacaacaacaacatattctctgctgggtattagattcgaatttctctttttgtgatcagaaatggatcgagctccggtgaccacaggaccgttggatatgccgattatgcacgacagtgatcgatatgacttcgttaaggatattggttctggtaatttcggtgttgctcgtcttatgagagataaactcactaaagagcttgttgctgtcaagtacatcgagagaggagacaagattgatgaaaatgttcaaagggagatcattaaccacaggtcactaaggcatcctaatattgtcagatttaaagaggtcattttgacgccgactcaccnggctatcaanaatngaataagctctggcggtgaactttacgancggatttgcaatgcangacggtttaatgaaagatgaggctcggttcttctttcagcaacttct

SEQ ID NO: 6075 - DNA, 475 bp, Arabidopsis thaliana
  unsure at all n locations
  Clone ID: LIB23-018-Q1-E1-G6
acgcgtcnggattaatgcaccaccccagtataaacatttgattgcaatccatgctgggaaaccaaaaggcggaattactgagtgtttaaaggtagatcctgacaaggttagacgccttagcttaagcgaagaacaacttgaaaaggcagcagaaaaatatgcgaagcagattgtgaggtttactcagcacaatttgctgaggatatacccaaaaggaactagagtcacatcatcaaattacaacccgttggttggctggagccacggtgctcaaatggtggctttcaatatgcaagggtatgggaagatcatttgtggctaatgcagggaatgtttaaagccaatgggcnggatgtggctacatcaanaaaccctgaacttcggctgaaaattggtcccggtaatgncatatttnacccaaaaactactctacctgtgaaaacaacacttaaggtaactgtatacatgggaaaaa

SEQ ID NO: 6076 - DNA, 455 bp, Arabidopsis thaliana
  unsure at all n locations
  Clone ID: LIB23-018-Q1-E1-G7
acgcgtcnagcccacgcgtccgcagatctagattcagtttttttcatcaaaaaagagcgtcttcataaacgcccttcgtcttcttccctggaaatctagtttctttcttccacgaaaatgagagagtgcatttcgatccacattggtcaggctggtatccaggtcggaaatgcttgctgggagctgtactgtcttgaacatggcattcagcctgatggccagatgccgagtgacaagactgttggtggaggtgacgatgctttcaacaccttcttcagtgaaaccggtgcaggtaagcacgtcccacgtgctgtctttggtgatcttganccaactgtgatcgacgaggtcaggannggaantaacggtaagtttncaaccngnaaaccatcagcggtaagaagatgcagtaaaaattcgcccgtggcaatacacaatgggaaagaattgtgact

SEQ ID NO: 6077 - DNA, 480 bp, Arabidopsis thaliana
  unsure at all n locations
  Clone ID: LIB23-018-Q1-E1-G9
tttttgnccgccaggtaccaancaagaattcncnggtcgacccacgcgtccgctcccccgcagctagacccaaacacaccatcaccaatcttcgccggaagcacaggaggtctcctccgtaaagcacaagtagaggaattttacgtgatcacatggaactcaccgaaagaacaaatctttgagatgccaacaggaggagctgcgataatgagagaaggaccgaatctattgaaactggcgaggaaagaacagtgtttggctttaggtacgaggttgaggtcaaagtacaagatcacttaccagttttacagagtgttccctaacggagaggttcaatatcttcacccgaaagatggagtttatccagagaaagcgaatccaggaagagaaggtgttggactaaacatgagatccatcggtaaaaatgttagtcccattgaggttaaattcactggggaaacaatccttaaganttgttag

SEQ ID NO: 6078 - DNA, 462 bp, Arabidopsis thaliana
  unsure at all n locations
  Clone ID: LIB23-018-Q1-E1-H11
attcgccggcaggtacaaacaagaattngccggtcgacccacgcntccggcttgggcggtggtcgtcggcatcgtcactaattaattattgtgattaagaaaaaatgctaaattgagtttcgtcgtcttctgcttctgcttaagcttcttcatcanttagctccagaggcggagctttcttctctctctgtggacgaccatggcggcggacgacggcgaccccactaaattcgctgcaatctacgactcatcctctccgtcacaccctcttctctctaaaccctccacgtccgctctcgattctccgcgtcnaagtgatcccgaatccgacccaactcagtttcttcagatctcctacaattttggccnaagaactttcaaggacatccctttcctacttctcttcgatcttctcgtactctccacctttggttttggaatcctctccatttttcatanaaa

SEQ ID NO: 6079 - DNA, 494 bp, Arabidopsis thaliana
  unsure at all n locations
  Clone ID: LIB23-018-Q1-E1-H2
ggtcaagaatccgggncgacccacgcgtcngcccacgcgtccgcaaaaaggaatcttaaacctcctccggcgaaacagattaagtcagctccggtggctattattgacctagaatcaaaatctgacattgattctcgatctgatgatcctcaaatgtgtggaccttatgttgctgatatctatgagtatcttcgtcaacttgaggtgaagccaaagcagagacctttaccagattacatagagaaagttcagaaagatgtaacaccaagtatgagaggtgttttggttgattggttagtggaagttgctgaagagtataaacttggatctgaaacactttatctcactgtctcacatattgatagattcctgncnttaaagacngttaacaaggcaaaaanctnaanctgtttngngnttcngccangcntaatgcctccaagtatgaagagataagtcctcctaaagtggatgattttgttacattacnggta

SEQ ID NO: 6080 - DNA, 471 bp, Arabidopsis thaliana
  unsure at all n locations
  Clone ID: LIB23-018-Q1-E1-H3
acgcgtccgcggacgcgtggggttctttgagtttcttcttctcttggaggaaaatcgagaaagacgaaacatggcttcttcttctacttctctgaaaagaagagagcaaccaatttcgcgagatggagatcaacttatcgttactccgttaggagccggaagtgaagtgggtcgttcctgtgtttacatgtccttccgaggcaaaaatattctgtttgattgtgggattcatcctgcgtactcgggcatggctgcgttgccttacttcgatgagattgatccttcttccattgatgtcctcttgattactcactttcatatagatnatgcagcatctctaccttaatttcctggnnaanacnaaatncaaggggnggggtttcaagnnacatgcaacaaaggggcatctacaagctgttgcntacaagattaagttaaagtgagcaaagtgtctgtggaaaatatgttgtt

SEQ ID NO: 6081 - DNA, 517 bp, Arabidopsis thaliana
  unsure at all n locations
  Clone ID: LIB23-018-Q1-E1-H5
atttctacgcgtcngtaccgntacgaaattcccgggccgacccacgcgtcnacggacgcgtggggttagtcaccaaaaaaaaaaaaaaaaacacaaaaagtttcaatggccgcctccacaatggctctctcctcccctgccttcgccggaaaggctgtgaacctttcccccgcggcatctgaagtcctcggaagcggccgtgtgacaatgaggaagactgttgccaagccaaagggtccatcaggcagcccatggtacggatccgaccgagtcaagtacttgggtccattctctggcgagtcaccgagctaccttaccggagagttccccggagactacggatgggacaccgctggactttcagctgattccgaaaaattcgcaanggaaccctnancctaaaanttttccaaaanaagttgggcnatnccngnncccnaaaggtggtnttccctgancttttggntaagaaacggagtcnaatttcggaaaagcggttttggntcaaaggccggtt

SEQ ID NO: 6082 - DNA, 472 bp, Arabidopsis thaliana
  unsure at all n locations
  Clone ID: LIB23-018-Q1-E1-F4
acgcgtcngcccacgcgtccgctccttctccaaacaacaaaccaaagcttctctcttttcttgcttcagagagacctagaagagttatcaacatgagtcttcttctacatctctttgctctgtctctgctcatctctgtttcaggagcaaagttctccggccggccaggaatcaactatggccagctcggaaacaacctcccgtcaccgtccgactcagtcaacctcatcaagtccctaaacgcgaaacgcgtcaaactctacgacgctaacccaaaaatcctccgccgcgttaaacggcacgacattaccgtctccgtcatggncccaaacgaagtcctcgtcaanatctccaaatccgcataatccccganaangggttccatttaaaancctcccgttttaaccaaancaccaagatncgttaactcctcgtcggnaacgagattctctccttaacagactctgagctc

SEQ ID NO: 6083 - DNA, 470 bp, Arabidopsis thaliana
  unsure at all n locations
  Clone ID: LIB23-017-Q1-E1-B11
ttctatcgnccggcacggtcanaaaatcccgggccgacccacgcgtccncgagaattatcaccatctagaatcttccctcaacctctagaaaacaactttcgtatccttcaaaaaccctaaaccctagcttttgcacagacgcaatttcatcgcatcattttgcaattttcctttactgatctgtcaccacctcttgaatttcgaaaccatggctaccgcagctctcctccgctctattcgacgccgtgaagtcgtttcctctcctttctcagcttacagatgcctttcaagcagtgggaaagcatcattgaacagttcctatctgggtcagaattttagaagcttttccaagagcctttagctcgaagcctgctggaaacgatgtcattgggtattgatttgggtactactaattcaagtgtttgccgtcatggaggggaagatccgaaagtcattgaaaatgctgaan

SEQ ID NO: 6084 - DNA, 503 bp, Arabidopsis thaliana
  unsure at all n locations
  Clone ID: LIB23-017-Q1-E1-B3
tgttattcgccgncacggtccaaanacccgggtcgacccacgcgtccggccatggaagtctcaaatcagaccagaaaacggaaagcaatcgacgccgggacatggctcgcagccgacggcgtatcgaggctcagatggtgtagatctttctctccttgaagcacttgagaagtcttcgcataatggagtagaagcgcttgatcttaaaaccctaaaaaagcttgtcctctccttcgagcggcgtcttagagacaacatagctgctcgtctcaagtatgtggagaatccagaaaagttcgctgactcagaggttgacctacacgacgatcttcagaagctcaaggtgctcgctggaagctccggaactttaaccggaccttgttgcttccaatacggttccttcgattgtcaatctcctctcccaatgaaaactcccgatatcgccaaacgatgtttgttcaancttcctcaaggattctgactgacgaaaatgccctaagaag

SEQ ID NO: 6085 - DNA, 435 bp, Arabidopsis thaliana
  unsure at all n locations
  Clone ID: LIB23-017-Q1-E1-B9
acaacncgggccgacccacgcgtcnaataaaagatatccaagttcaaaagcaaaaaaannnnnnnnnnnnnnnnnnnnnnnnnnnnnnnnnnnnnnnnnnnnnnnnnnnnnnnnnnnnngggcaaccatgattanggtcgtcacctccaggctctctctccttcctccagtcttctccgtcgttaactcttcttcttcgcgttccaaagatatgaatctagagccaaaaaagaaggttaaattaagagaagactggagagaaaagtccagacctatcccacccggaggaacctatccagctaaagaccattgcagtcagtgcgggctatgcgacacctactacattgcccatgtgaaggangcatgtgcatttcttggagatggaatgtcaaaggattgagagcttggaacctgttgtgcatggtagaggaanga

SEQ ID NO: 6086 - DNA, 481 bp, Arabidopsis thaliana
  unsure at all n locations
  Clone ID: LIB23-017-Q1-E1-C10
gcaattccattcggacggcaccggtcntacaatcccgggccgacccacgcgtccanggacgcgtgggactnnnnnnnnnnnnnnnnnnnnnnnnnnnnnnnnnnnnnnnnnnnnnnnnnnnnnnnnnnnnnnnnnnnnnnnnnnnnnnnnnnnnnnnnnnnnnatatttctcaatgtctcctctcccaatcttccatcgtcttcctcacgccacgttctcttcctttctcctcncactgtctcaagctggnagttctaatacatcagtggcattcctcantgccttcanatcagangatatcattgctcgaattggnctatggtggcancttatnagggctgttgtagttgtacctgtcttcaagttcctggtgcttctatgtttggtcatgtctgtcatgttcttcgttgaggttatgtacatgggaatcnttgttttgnatgtcaagctgtttcaagaggatagccntaaaaatttttc

SEQ ID NO: 6087 - DNA, 482 bp, Arabidopsis thaliana
  unsure at all n locations
  Clone ID: LIB23-017-Q1-E1-C11
aattctatcggcggtaccggtcacaaattcccgggncgacccacgcgtccacccacgcgtccgcggacgcgtgggttcttctaccaatataacccaaacgcagccgtatggggtgacattgtttggggtcacgccgtgtctagggacctaatccattgggtccatttgcccatagccatggtcgctgatcaatggtacgactccaacggtgtgtggaccggctcagccacatttctccctgatggctctatagtcatgctctataccggttccaccgacaaagcggtgcaggtccaaaaccttgcctaccctgaagaccccaacgacccacttctgttgaaatgggtcaagttcccggggaacccggttctaatacctccgcccggtatcctccctaaggacttccgtgacccaacgaactgcatggaaagacatcaagaaggaaaatggcggatnacgaattgggtccaagctcaaacaaa

SEQ ID NO: 6088 - DNA, 447 bp, Arabidopsis thaliana
  unsure at all n locations
  Clone ID: LIB23-017-Q1-E1-C12
ccgggncgacccacgcgtccncccacgcgtccgctctcgatcagcttcatgcggcgtccacatcatcaaattggagaagataaccgaagaaaatcgtcccccttccgccgtgatcatcatctcaaccgacggtctcaacatctgtgacttcgaacataatcggcgattttgatgaaccaaatcggagagagaagattaataagatagttttgaggaagaaatcacaattagagcttaaagcaagaataaatcacaatcacaagatgagaatttttcggacaacgtagtgataatcagtcaatcggagaaagaaggtgacccgagtgttataaccatcaattgtcctgacaaaacgggtctangttgtgatctttttcgtatcctcctcttcttcggcctcaacattgtctgangangtgattgggaaaccaaacacgagatggatct

SEQ ID NO: 6089 - DNA, 511 bp, Arabidopsis thaliana
  unsure at all n locations
  Clone ID: LIB23-017-Q1-E1-C2
ttattcgnccggccacggtccanacaacccgggtcgacccacgcgtccgcnttcctccacattaaagtaaagtatctctctcttttttctcctacgtactccatagtgatggcttcatcgcttctgacatcttccgttatgatccctaccaccggttccaccgtggttggccggtcagtgttaccctttcaatcttccctgcactctctccgcctgacccattcgtacaagaaccccgcattgttcatctcatgttgctcttctgtgtccaaaaatgcgggcaactagttctactgatctcaaacccgttgtggaacggtggccggagtacataccgaacaagcttccccgacggaaactatgtgcgtgtattcgacangacgctccgttgacggtgaacaatctcctgggtgggattccctcaatcccggccgcaaaaagctaagagaattggcccgacaagctcgcctaaaactcccgaagtaagacatcatgggaagtcggttttccc

SEQ ID NO: 6090 - DNA, 525 bp, Arabidopsis thaliana
  unsure at all n locations
  Clone ID: LIB23-017-Q1-E1-C4
acgggtcggccacgcgtccgaaaaaaaagagatggagagaaacacgccggtgagaaaccctcacacttccaccgccgatctgctttcttggtcggaaannnnnnnnnnnnnnnnnnnnnnnnnnnnnnnnnnnnnnnnnnnnnaccaagccgtccgatggaatcagcaaagattcctaaggcggtggtcaagattaacaagaatngaaagaaaccccaagtccgccttaaataaagcctaaaaagaatttggttcaangggtaacaaagttnaaaaaagaagaatngaactgggtaantggggcaataattttaactggaatnaaggggaaaaantttggggattctggaaatcccgatggctaactaactggatnccaaaagaactgggactccgttactaacaagcaagactcctgaatgggaatgagtcaagatatccttcaantgctgacggtaatgtttcccccgaagaaaacaancaactttaaccgaaggttgaaagcaaagaagagctganccggga

SEQ ID NO: 6091 - DNA, 471 bp, Arabidopsis thaliana
  unsure at all n locations
  Clone ID: LIB23-017-Q1-E1-D10
cggntcggtaccggtctgacattcccgggccgacccacgcgtccangganatcgttgtggtgttganccggagtcaccgcgtgaatcatcctcaccggagagatctgtgccactccgccgttccaaccgccaagcaaaccgtaagggagactcgtcgagaaaagccaccgagaanggtaatcgggaatcttctcgtgttgttatgtgantgtgttatttgattattaaaccatgatctaaataaaaccagttaaaaccaatgaatgtttgtttanttagaggttacntgaaattgtgtcgtgaggaacaagaagatgacttcattcattggtttagttgttanagtaccggttaattgccaaaccggaagctatctttcacgtgaatgcatggatccaattgtggacgtagtgttacgtgtagtaantgaatcannattnaantatnanatttggttggantaatttaact

SEQ ID NO: 6092 - DNA, 464 bp, Arabidopsis thaliana
  unsure at all n locations
  Clone ID: LIB23-017-Q1-E1-D12
ggtaccggtcacacattcccgggccgacccacgcgtccacccacgcgtccgcggacgcgtgggcggacgcgtgggaaattttttcccaatcnatggaagtgcctaatgaaaccacgaatttagccgatctccggcgaccattggtggttccggttgtctcggagcgtaaacctccggcagacgtcggactcggactagagagtgttttaacggagcgtagccttccgtaccggaggcgcgtgtacttaggggcatgcatagagatgaagctacttttccggttggcacttccggcgatacttgtctatttagtcaacagcggaatgggtatttccgctcggatcttcgccggacatctcggtaaaaatganctcgccgccgcgtccatcggaaacaagctgcttcaatctcgtctatggcctcatgttangtatgggcagtgcagtcgaaacactatgtggaca

SEQ ID NO: 6093 - DNA, 450 bp, Arabidopsis thaliana
  Clone ID: LIB23-017-Q1-E1-D3
acgcgtccgctcggagtttcggcatctctgatattctctcttattcgtgtttcagattcattcgttaagaaagcagatcgacatggcagctcaaggaggtgattcatatgaggaagcgttggctgctttgtcgtctttgatcacgaaacgaagtcgtgctgataagagcaataaaggggatcgctttgagttagtctttgattatctcaagctacttgacctggaagaagacattttaaagatgaatgttattcatgtcgctggtaccaaaggcaagggatccacatgtacctttacagagtctattattcgaaactatggctttcgaactggactcttcacttcacctcacctcattgatgtccgggaaagatttcgtttggatggtgtggacataagtgaagagaaatttttgggatatttctggtggtgctataacaggctcaagga

SEQ ID NO: 6094 - DNA, 448 bp, Arabidopsis thaliana
  unsure at all n locations
  Clone ID: LIB23-017-Q1-E1-D5
acgcgtccggtttctgnnnnnnnnnnnnnnnnnnnnnnnnnnnnnnnnnnnnnnnnnnnnnnnnnnnnnnnnnnnnnnnnnnnnnnnnnntcattttggttattaagtaattaacttatactaatcatgggttttatcgatggaaagtgggcaccaatgatagtcttaattgtttctaacatgattgcgggaatggttaatgctttagttaagaaagttcttgatggaggcatcaatcatatggttattgctacttatcgtttgggtatatctactcttttccttcttccagtcgcttatttttgggaacggaaaacaagaccaaagctaactctaagcatctcatgtcagcttttcgtcagtgccctttttggggcgagcttgatgcaatattctacttgccttggactgtcctacacgtctgcaacgctggggatctgctttctgg

SEQ ID NO: 6095 - DNA, 492 bp, Arabidopsis thaliana
  unsure at all n locations
  Clone ID: LIB23-017-Q1-E1-D6
tatttagccgnccgtaccgnaccnaaaattcncgggtcnacccacgcgtccgnggctttgtacggtgaaaaggagtggtattttttctcaccaagagatcgaaagtatccaaacggttcaagacccaaccgtgcagctggtactggatattggaaagctaccggagctgataaaccaataggtcgtcctaaaccggttggtattaagaaggctctagtgttttactcgggaaaacctccaaatggagagaaaaccaattggattatgcacgaataccggctcgctgacgttgaccggtcggttcgtaagaaaaacagtctaagattggacgattgggtattgtgtcgtatatataacaagaaaggtgtcatcgagaagcgacgaagcgatatcgaggacgggttaaagcctgtgactgacacgtgtccaccggaatctgtggcgagattgatctccggctcggagcaagcggtgtcaccggaattcacgtgt

SEQ ID NO: 6096 - DNA, 458 bp, Arabidopsis thaliana
  unsure at all n locations
  Clone ID: LIB23-017-Q1-E1-B1
acgcgtccgngctctcccaaaaactcatctctcaccaccgtctcaaaccaagttcgatctaaaagccttttcctttagattctctccaacaacaaatctctttgaatcactcagtcatgtcggttttacttcctctctgtctgattatctccatgttcacctattcaaacgcagcgtattgtctttgcaaagaggggaacgagcaagtgcttcagaaggcaatagactacgcttgtggaaatggagctgactgtacccagatccaacccaccggagcttgttaccaacctaacaccgtcaaaaaccactgtgacgtcgccgtcaacagttactaccaagaaaaaagcttcttccggtgccacctgtgactttaacggngccgcctccccctctactaaccctccgtcaactgcttcaaactgtttaactggttcaaagctctagtggcactccctaac

SEQ ID NO: 6097 - DNA, 449 bp, Arabidopsis thaliana
  unsure at all n locations
  Clone ID: LIB23-016-Q1-E1-F8
cacgcgtccgcaaaaacaaatagaaaaaaatacaaataaaaaatgtcaacccaacagatgaaacacactccacaaaacttgcaacagcaaggacaaggacttggtgagcaaggaagagacactcaaggacttggaagcacacaagagtttggacaacgtgatagacaacaggatcttggtagccaatttgataaaactcaacaacaaggacaacaaggacaacaaggacaacagggacaacaaggtcaacaaggacttcaaggtcagcaacagtggggaggtgctcagcaatttgatcaacaaggaggaaagcaacaagatttgggacaacaacaatttggatcaactcagcaaaagaaccaagactttggacagagatcataaagagatgaagcaacgangcgatgatgatctcccaaaaagaagaaagtctgtttaattgatgtgtt

SEQ ID NO: 6098 - DNA, 482 bp, Arabidopsis thaliana
  unsure at all n locations
  Clone ID: LIB23-016-Q1-E1-F9
acgcgtccgctcttctctgtttctctctcttcttcttgcagttttggtttggaagaaagagaacgaagaagacgacatctccagagtttttggcaataatcttttaagaaatgggaaagcttttgtgtgattcaacggcgacatttcaatctccttcaccaacggttccttggagagaaccttctacagtcgccgtgtctctcgaagatgtagatcttgttgaccaatccgcggctgctgcggcggtggacgcggttgagaagacaatgggccgccgcaactaccaccgccttggggatgaagtttttggattggaggangcncaaagacggcatctganccggctanaagcnanaaggtgtgnttgtggaaaacatcctgggtaaaagaatgaaacccccgggcttccgttcgttttccggtcnccnccncaanggggggaaaaaggtttcctccngacggggaaacngtttggttcaacc

SEQ ID NO: 6099 - DNA, 447 bp, Arabidopsis thaliana
  unsure at all n locations
  Clone ID: LIB23-016-Q1-E1-G10
acgcgtccncggacgcgtgggcaaacgcgagcaagagttttgagctccaatggcgaccttgtcgatgactctgtcaaatccgaagtcgctctcagctcctccacgaagactttctccgatcaatacctccgctttcacatctacctctttccgattgcgcaccaaatcttccttcgattcaatctcgttctcgtcttcaactcccttctccgcctcatcgctcctccttcacacgtcttataccaaaagaaaccaccgctgtttctctgttcaatccaatgctgaggtggttactgaaccgcaatcgaaaataacacacaaggtgtatttcgatataagtgttggcaatccagtggggaagttagctggggaggattgttantggattgtatggtgatgaatgttccccaaactgtggagaacttcgtgctccaagcacangtgaaa

SEQ ID NO: 6100 - DNA, 472 bp, Arabidopsis thaliana
  unsure at all n locations
  Clone ID: LIB23-016-Q1-E1-G5
acaagtcanaaattcccgggncgacccacgcgtccaacaatatcgatgtgtgattaagaagagatccaatttaacattacccacacaatcatttgattatttcctcctctccgtatctgtgtctctcttctcttgatcttttagtgttcttgctttgtcgcttcaacgcttaagtttggatttgtgtgagtctgcataatcatggcgaggaagatgcttgttgatggtgagattgataaggtggcggctgatgaagccaacgcgacgcactatgattttgatttgtttgtcatcggtgccgggagtggcggtgttcgtgctgctaggttttcggctaatcatggcgctaaggttggtatttgtgagcttccatttcaccctattagctctgaggagattggaggcgttggtggaacctgtgttatccgtggttgtgttccctaaaaagattctcgtctaaggagctacttac

SEQ ID NO: 6101 - DNA, 420 bp, Arabidopsis thaliana
  unsure at all n locations
  Clone ID: LIB23-016-Q1-E1-G8
acgcgtccnctcaaaccaaaggagaatcctctggaagaaaaagagagtttgaaaatggttgaagggaaggaagaggtcgtgagggttaagatcaagatgacaaagcatgaagctcaacggttgttgtcgaaatgcaaaaacgacagcgttttaaagttggagcatcttatggaccagatcgcacacgtccctgttcatcagcttcaagtcgctatggtgatggttggttgtaataatgagcgacaaggaaatggctgctggttatcccagctggaataagttaatcttgagtttttctatcaaattttgtagttttagagtagaaactatataaatttacgtttgtatatatattttgtaacagattaatagaagtaacatgattttgtggaattttttttgttgtcgtctcataaaaga

SEQ ID NO: 6102 - DNA, 465 bp, Arabidopsis thaliana
  unsure at all n locations
  Clone ID: LIB23-016-Q1-E1-H1
naacgggtcgacccacgcgtccgaagcttcttagatctatgaattttcaaattcgttgatccatttttccgcttcaatcgtctccgatctgatttcatcagcttcgtaccgctccggtcatgaatccattctcttccggcacgcgtctcagcgacatgattcgagctatacgtgcgagtaaaaccgctgctgaggaacgtgctgttgtgaggaaagaatgtgctgcgatccgtgcttcgattaatgaaaatgaccaggactatagacatcgggatctagcgaagcttatgttcattcatatgcttggttaccctactcattttgggcaaatggaatgcttgaagttaattgcttctcctggatttcctgagaagaggattggttatcttggattaatgttgcttcttgatgaaaggcaaagaagtattaatgcttgtcaacaactcgcctgaagcaagatttgaa

SEQ ID NO: 6103 - DNA, 451 bp, Arabidopsis thaliana
  unsure at all n locations
  Clone ID: LIB23-016-Q1-E1-H10
acgngtccanccacgcgtccgctcaaccgtccgatcatccatcttgccatcaccgttcaccaatcttcttcgtctcctctctctttctctctttttgctgtttctagctcctctctctctggatctcgccggcgaaccgtttctcttgggtgtaaacagtagcaatcaagctatagaatctcagatatcgctgaattagctgttggattttatccgccttttcttcgttatccggggctcgggtataaggtttcatcgtcttatttcatctgtaaatgggctgcttccactcaaaggcagcaaaagaatttcgaggacacgaaagacctgttaagcttgcctctgaaaacagcttttagtgtgagtgaagttgaangcattaanttgagncattcaagaacataagcagtttcggttgttgatgatggtctggattaacaagggangagtt

SEQ ID NO: 6104 - DNA, 461 bp, Arabidopsis thaliana
  unsure at all n locations
  Clone ID: LIB23-016-Q1-E1-H11
acgcntccgcttcttcatccaaaagaatccaatcttttcctcaaaagatagtttctggatcgaacgacaatggagattttctactacttggtgtttggggttttgggtctcgtcgtcgcggcgttggagcttagcaagaacaacaaggatcgaatcaacacttcttcagctttcaattctttcaagaacaattatctccttgtctattcgctcatgatggcggggtgattggttgcagggtccatatgtgtactaaccttatagtacttatggatttggtaaaagggggacattgggncaagcttttcaattgctgggntttgggntccctcnaaggttgtttgggtaccaaccttgggtccnctaagccgacaaaacaagggtcgtaagaagggcatgtgttaaccaanngnantaccgaatanattgagctggaacaccaaacaatccccccaaanata

SEQ ID NO: 6105 - DNA, 456 bp, Arabidopsis thaliana
  unsure at all n locations
  Clone ID: LIB23-016-Q1-E1-H12
acgcgtccgcccacgcgtccgttcaggtttgcccattgcgaaggcctatcaagtgggagagcgcaccaactttcgcatctccgtctgctaaaagctttgtgttccctgtggttagtggtcaaacgatggaactagctatagctcaattttggtcaagtggcctcggaagtcgtgaaccaactatcgttgactttgagattgaattccatggagttggtgtcgataaagaagaattgttacttgatggaagtgaagcaccaataaaagttgaagctgaagcactattggcatctgaaaaacttgttcccatagctgtcctgaacaaagatacgagttccatatcaacctaatgatgcacaactgaaagactcctatcaactgggccgttgatagactactgtcggggcaaacagatactaacattgancttaacctacaagttcaaaattaagaaga

SEQ ID NO: 6106 - DNA, 444 bp, Arabidopsis thaliana
  unsure at all n locations
  Clone ID: LIB23-016-Q1-E1-H8
acgcgtccgcccacgcgtccgcattctctaaattaactcaaaggagtaaataaaaatacaaatacaaaatttatacagaacaacccacaattctgtctagtttagttaaacgtgttaaaatagtcacgcaatgctttttctatttttaaaaattaataagctctgacctgtacgcaaccaaataaaacactaaaacttatctgtgatcaacttagctctgtataaaaatcttcctcctctttctttctgtccaattctctacagagaagtcttagcttttgcaaaatcattaactaatctctgttttgatgactagataacttggatgtaggattattatacctaaattctttctttccatgcatttatgtcggttttgacatctttgttctcttaagtttaaaagatatcaatattaagttatcntcaatctttgacaattgg

SEQ ID NO: 6107 - DNA, 456 bp, Arabidopsis thaliana
  unsure at all n locations
  Clone ID: LIB23-017-Q1-E1-A11
tcccgggcttttcccaaatagtacttttttttttgtttggccttcttatagaaagaagaactcaaagcacagagagaagatgagcgaagaacaaccacacgccaatctagcggttcccgcgtttaaaactgagaaagagcccataacgcaaacacgaaatggtcaaagtagcgtttggcgtttcggtggaagtgataaggcagcgaaagcatccaccgtaacgcttagaggtgtcatctacatgctcttcgacaactgcggcaaagacgtcaataagaccattttacccctcggccacggtgacccttccgtctacccttgcttccgtacctgtatcgaagctgaagacgccgtcgtcgacgtccttcgctccggcaaaggcaattcttacggtccccggagctgggattctccccgcaagaacnaacccgtttgctgattataatgaanccgaga

SEQ ID NO: 6108 - DNA, 451 bp, Arabidopsis thaliana
  unsure at all n locations
  Clone ID: LIB23-017-Q1-E1-A2
acgcgtccgcagcnactttggatggaccaagtccacctgttggtgcattgagcagtgctcttagtcggttacagtctaacccggctctcagagagttgagagaagtcgcaaagggtatgacaaagcaaataggcggaccaatgcatcagttggcggctaaggtagatgagtatgctcgaggaatgataagcgggactggatcgtcactgtttgaagaactcggtctttactatattggtccagttgatgggcacaacatagatgatttggtagccattcttaaagaagttaagagtaccagaaccacaggacctgttcttattcatgtggtgacgganaaaggtcgtggttatccttacgcgggatagagctgatgacaaataccatggtgttgtgaaattttgttcancaaccgggtagacagttcaaaactactantaagaccaatcct

SEQ ID NO: 6109 - DNA, 473 bp, Arabidopsis thaliana
  unsure at all n locations
  Clone ID: LIB23-017-Q1-E1-A4
acgcgtccggacanatttgctaaaggctagggatatctcgctcgtgaaaactcatctcgacctcagttatctcttatcttctgttgggctaccaaaacgaagcagtacttccattaggaagcaggaggttcattcaaatggtcctgttcttgatgatactctacttcaggatccagagataatggatgcaattgagaatgaaaagacggttcacaaaaccatgagtatatacaatgtanatcgttctgtttgcggtcggattgctggggtgattgcaaagaaatacggggacactggtttttgctggacaaactgaaacctaaacgttcaactgggaaatgctgggcaatcctttngcaattgtttccctaaactccttggaaattgaaataataacgttcttggttgggttgaanccaaacgaaccaatnttgggaaaangggaattggccgggaaaggttaaagttgtnaa

SEQ ID NO: 6110 - DNA, 479 bp, Arabidopsis thaliana
  unsure at all n locations
  Clone ID: LIB23-016-Q1-E1-F7
gtacaagtcatnaaattcccgggncgacccacgcgtccangaagcttgtaagagcggagatgcggtggaacgatggcgacttcagcggcgtagtcttgagagtctgcctcctcaccttgctgatgctctcctccgtcgcctcctcaaaaagcggcttcttttcccttcgttactcgaaggattcaaatattctgtagagaatatagatctccgaggcaaaagctcagttaacgcagaatggatggcttacattggaggcttcgttaatctaattactctaaatctttcagattgccagagaatcaacagttccaccctctggcctatcacaggattaacaagtttgacagagttggacctttcaagatgtttcaaggttacggatgctggtatgaagcanctccaatctgttgtaaatctgaaaaaagttgtggattttacagacaaggtgtcactgaaagttgggaatttcccttcct

SEQ ID NO: 6111 - DNA, 478 bp, Arabidopsis thaliana
  unsure at all n locations
  Clone ID: LIB23-016-Q1-E1-D11
acgcgtccgattgatattgtttgatatctactgtagatgattcgtcttgacaaagaggaaggaggctgcttgacatcgaccaccctgaaagtccttttggtacaaaggaatctcctgctgtcgtacagtcctactttgacaagagaaatatcggatgccgtggtggtgaaggcgaggatggacacgacgtcgtttggttctggctagataaaggaaagtcatttgaatgtccagtgtgctcccaatactttgagcacggaccaccagacggtcatggtgacgatgaagaccaccaccattgattccggtcttttcttaacggcgaaatgttttcctctattgtagtgagttggaataaataattccccgttgggtggaaaacactttaaataatgttttttttgatcctccaagaaagacaccaacaactttaattggcctcaagggctccnaacccctttttgcctttccttgagaa

SEQ ID NO: 6112 - DNA, 463 bp, Arabidopsis thaliana
  unsure at all n locations
  Clone ID: LIB23-016-Q1-E1-D12
acgcgtccncttctttctctcttctattctatctcttaaaccctagatttgatctgggtnnnnnnnnnnnnnnnnnnnnnnnnnnnnnnnnnnnnnnnnnnnnnnnnnnnnnnnnnnnnnnntggtcgcatccccttttatccgagaaggatctatccaaatctttgtttgtcgaatctcctctcatggctaccgttgctcctcctgctgatcaagctacagatctgttgcagaaactatccttggactcgccagcaaaagcttcagagattcctgagcctaacaaagaagactgccgtctaacaagtatggaggcgttgatgttcatgggcaaagttccttcctaagattgatcttgacaacaaatgccttcccaagtgaatgctgctgaaccttcaagtttgctaaggttcccaatccttaacaatccctaancagtaatacaatggtanaatggggaatg

SEQ ID NO: 6113 - DNA, 465 bp, Arabidopsis thaliana
  unsure at all n locations
  Clone ID: LIB23-016-Q1-E1-D7
ngtacaagtcataaattcccgggccgnnnnnnnnnnnnnnnnnnnnnnnnnnnnnnnnnnnnnnnnnnnnnnnnnnnnnnnnnnnnnnttcttggaaaacgacgccgaggctgcctctgccgccaccgccgccggaaaatctacggatggtgtttctgagtcacttaacatccaaggagaaatcttatgtggtggagctgcggcggatatcgccgggagagattttggcggcatgaactgtgtgaagcctcttgctgtggtgagaccagtgggaccggaagatatcgccggagcggtgaaagcggctctgaggtcagataaactaacggtggcggcgcgtggaaacggccattctatcaacggtcaagccatggcggaaggaggactcgttgtcgatatgantaccacggcggagaatcatttcnagttggttatttatccggcggtgatgccacngcgtttgtt

SEQ ID NO: 6114 - DNA, 490 bp, Arabidopsis thaliana
  unsure at all n locations
  Clone ID: LIB23-016-Q1-E1-D9
acgcgtccgaaaatatgtannnnnnnnnnnnnnnnnnnnnnnnnnnnnnnnnnnnnnnnnnnnnnnnnnnnnnnnnnnnnnnnnnnnnnnnnnnnnnnnnnnnnnnnnnnnnnnccgctggacgtcgaaacaacctgcctcgtccaaacctcagaagacgatgtaaggtcaccgcttcacgggctaatattgaacaagaaggtaacacagtgaaagaacccattcagaatattaaagtaaagggatacataacggcccaagaagagtttctggagggcataacttggtcgagaagtctcgatgacattgctgatatcccgcggcagattaattgctcgtcgaaccttantaaccgccaaagactgaacaaccggaattacggtnngaaagactacgccacaaacgtngtaatggggccgaaagccccttgattaagaaagtncgaattgcgaattttgaagatgcctgaaagaactttgggaccaagtgg

SEQ ID NO: 6115 - DNA, 478 bp, Arabidopsis thaliana
  unsure at all n locations
  Clone ID: LIB23-016-Q1-E1-E1
cacttgnccgggcccggtcaaaaataaacgggtcganccacgcgtccgcccacncgtccgcagaatccatggatcgtgctttaactccgcgttttgatactccagctactctctcccctttccgataccgatatgggagctctctggccatcactcgacgattcgcgccggcgattgtttgcgcgaaacgatctccgatcgatggagtgagcgacgagctgaatctgattgcttcacagaacttagatcaagctcccgcacgaagactagcccgttccgcttttgttgacttgcagcttcagctggatcactgcttgttcaagaaagctccgagtgggatcagaacagaggagtggtatgagagaaattcgaaaggggaagatattttctgcaagagttggttgccgaaatccggcgacgaaatcaaagctgctgtatgtttctgtcatggctatggaagcacttgcactttcctcct

SEQ ID NO: 6116 - DNA, 422 bp, Arabidopsis thaliana
  unsure at all n locations
  Clone ID: LIB23-016-Q1-E1-E10
acgcgtccgaccacgcgtccgattcagagagacacaacacaaccacatcannnnnnnnnnnnnnnnnnnnnnnnnnnnnnnnnnnnnnnnnnnnnnnnagccaccaccaaaatccttaanacctagacttttctcttccatcgatggcggctaataacagatccgatcatgggtcagacgaaaacacaagactttacaatccttaccaaaactacgaagtcccaatcaacaaatctcagtacctttacaagcttcctacctcncctgagtttctcttcacggaggaggctttaaggcancgtagatcttggggtgagaatctcactttctanagnggancaagcttacctcggtggctccgttgccgggagcttctgttggagtcatcnctggagtcaaaaacttcgaatctggcgacanta

SEQ ID NO: 6117 - DNA, 468 bp, Arabidopsis thaliana
  unsure at all n locations
  Clone ID: LIB23-016-Q1-E1-E11
acgcgtccgcggacgcgtgggcggacgcgtgggcggacgcgtgggggtgaggattattggcctgaaggaacttcgagccgggttagagctgctagagctcctcaaccagctggtgagtcttcgagttttccttcctatggaaagaatcctggaagtaggagaaagaagaataggaaagctactgaggagaatgtgactgttgaaacgaatgacgaagtatccgattctgaggatagctctgaagaagaggaaaatgattcctcggatgggtttgttacctataagaatgaatttgagagagaagaagaggagactggttttgaattagacaaaaagctttggaaggccacatcctttcattgattctacgaaaaaagaaacaaattgaaaagacactcacganccgatgaatcnttggtggaactggaagaaaccggagaaagaacaatgggtcaaagatggcaaaag

SEQ ID NO: 6118 - DNA, 448 bp, Arabidopsis thaliana
  unsure at all n locations
  Clone ID: LIB23-016-Q1-E1-E12
acgcgtccnctctaatctctttgccatggaggtagatcctaccgttgaaactgatgacatggctggtacagacgggatggatggtttattctctgatttggcaaatgcgattcctggaatcgatgaggctatgagttttgctgagatgttgaagttggtgcaaacaatggattatgctactattgtgtttgacactgctcctactggacatactctccgcctgttacagtttccggccacactagaaaagggactttcgaagttgatgtcattgaagagtagatttggtggcttgatgactcagatgagccgtatgtttggcatggangatgagttcggagaagatgctttgctgggaagacttganggcttgaaaagatgtgattgaacaagttaatccgcaattcaaagaccggatatgactacgttcgtttgtgtccncatcccc

SEQ ID NO: 6119 - DNA, 457 bp, Arabidopsis thaliana
  unsure at all n locations
  Clone ID: LIB23-016-Q1-E1-E4
gnccggtcaaaattaacgggtcgacccacgcgtccgcggacgcgtgggtgaatttatcttcaccatcacaccaatccaactccatttaaattcacagctctataagagtcacctagacaagtcaagagagagagatagttctgacttctgacagagactcatggcggaagcttgcggagtgagaaggattaagctaggaagccaaggccttgaggtatcggcgcaaggtcttggttgcatgggtctctctgctttctacggtactcccaagccggaaaccgaagctatcgctctcatccaccacgccattcactccggcgtcactttccttgacacctccgatatctacggtcctgagaccaacgagcttctcctcagcaaggctctcaaggatggggtgagagaaaaagtggaacttgcgaccaaatatggaatcaggtatgcagaaggggaaagt

SEQ ID NO: 6120 - DNA, 472 bp, Arabidopsis thaliana
  unsure at all n locations
  Clone ID: LIB23-016-Q1-E1-E6
cgtacaagtctnaaattcccgggccgacccacgcgtccanccacgcgtccggcttttagtatttttttcaacaatcgcttttttttttctcgatctccgtgaagctctcgaatctctggttttgagttttggagaatggtgtttttccgcagcgtatcggcctttactaggctgaggtctcgcgtcggccaacaatcttcactcagcaattctgtcagatggattcagatgcagagctctaccgacctggacctgaagtcgcagctgcaagagttaattccggaacagcaggaccgtctgaagaaactgaagtcagaacatgggaaggtccaactgggaaacatcactgttgatatggttattggtggaatgagagggatgactggattgctttgggaaacctcattgcttgacccggaagagggtantcgctttangggattgtcgaatcctgagtgcagaaaagtatacc

SEQ ID NO: 6121 - DNA, 481 bp, Arabidopsis thaliana
  unsure at all n locations
  Clone ID: LIB23-016-Q1-E1-F10
gtacaagtctcaaattcccgggccgacccacgcgtccagccgagcaactgaagcatgctgaagagcaggttgatcagaaaacacaaaatcgggatgctcttagagcggatatccagaagatacgcgcaatatgtaaggactatgatatcagttacaaggcggtcatggcagaagagagatctgcaagaaaagcaatgcattcaaaacggcaggaaattgaggcccttcagtctatgattagccgggttaaaagtgctgcgtctgttgatgatattgattcaagggtgcgtaatatggaacatacgatgcagcacacaactttatctctgaatgaagaaaaagtttcatgcgtgaaataaagcagttgaagcaacttcgcgagcagatatcttcgagtatgggtaccaaaggatgaanttaagcaagcattggattgagaaagagnaaacagaanaacgtttgaaggtgttgaggaanggaa

SEQ ID NO: 6122 - DNA, 465 bp, Arabidopsis thaliana
  unsure at all n locations
  Clone ID: LIB23-016-Q1-E1-F11
acgcgtccgatcgagaaagacgaaacatggcttcttcttctacttctctgaaaagaagagagcaaccaatttcgcgagatggagatcaacttatcgttactccgttaggagccggaagtgaagtgggtcgttcctgtgtttacatgtccttccgaggcaaaaatattctgtttgattgtgggattcatcctgcgtactcgggcatggctgcgttgccttacttcgatgagattgatccttcttccattgatgtcctcttgattactcactttcatatagatcatgcancatctctaccttaatttctggagaagacgacattcaatgggcgggttttcaatgacacatgcaacaanaggccatctacaaantgttgcttacagattaagtgannngntgagcanagtgtctgttggaaagatatgttgttcnaatgaacangacatcaacaagtctatgggacna

SEQ ID NO: 6123 - DNA, 460 bp, Arabidopsis thaliana
  unsure at all n locations
  Clone ID: LIB23-016-Q1-E1-F6
tctcnaattcccgggccgacccacgcgtccangcgagacgggaaantccatttgttggcttagaagcaagcagcagcttcggaagcagtggccgtataatgttcccaacaaaatatgaangtgttaatnataacnggaagcancgaaggcaatcaangcgcatacggttaccatgcanaactacctctagaaccgctgatgaatgttcagacaaaagcagcaatggagacatcaactagttcagggctagctccanttcagctagaagcangaagcgcgtttcagacaagccgggcaatgtcagggtctggtaatgttatggngacatcttcaccanagagcancttanactcgcatgacattcacccgtttaaagtttcgtctgaagcagaggatgcancgcanctttaatgggttctcttctgctgttgggcctgatgggtcaacancgaggacaaca

SEQ ID NO: 6124 - DNA, 481 bp, Arabidopsis thaliana
  unsure at all n locations
  Clone ID: LIB23-016-Q1-E1-D1
ntttacgtgccaggccggtcaaaataccgggtcgacccacgcgtccgcccacgcgtccgccgaaagttctcatggcgtcgaagcaaaaattctgactcgttgatccataaagcgaactctttctcgctcttagtttctgcatttcgtctatcaaaagtaggattatacactttttgtttttgtttttgtgaaaccctatacagttcgatctaaaaccctaaaaagatggtgaaaccttccgatttcaaagcagttcacaaacttattcaattgcattacagtcgagtcaacctgttcacaacgacgggatggtcaaaactctcagctttgtcttctccggctcttccttcaaatggggtttctcagcttcagcctaagtctggtttccacaccttctcgtcgagacccacttcgaaaaactttggcttatcccagattcttcctctaatggggtttctcagcttcaacctaagacaatttc

SEQ ID NO: 6125 - DNA, 421 bp, Arabidopsis thaliana
  unsure at all n locations
  Clone ID: LIB23-014-Q1-E1-H1
acgcgtccggtgccattttcaagcntttcgaccggtcaacccagaagatccaccgctagatccatttcttgttcacacattgacaatacgctttgagcctaaaagacagaggcctgttgatggacttgctggtgcgcaacaagatttgagaagttttagccttgtatttgagtacataaaagctttgcctgcgggtcaagaaacagactttattctggtatcgtgtactggttcgggagtagaagccaacagaagggagcaagtgttgaaagctaanagggctggtgaagattctttaaggagatcaggccttggatacacaatcattccgtcctgggtcccttgaangaggaaccanggcgggcaacgagctctgatatttgatcaangaaacaagaatttctcagggcattantttgcg

SEQ ID NO: 6126 - DNA, 470 bp, Arabidopsis thaliana
  unsure at all n locations
  Clone ID: LIB23-014-Q1-E1-H11
acgcgtccgaaaagcttgaacactccattgttctctactctaccactatctcacagagattcatggatacgatgcgaatctccggtgtatcaaccggagctgaggttttaatacaatgcaattccttatcaagcctcgtttctcgtcgttgcgacgacggaaaatggcgaacgagaatgtttccggcgagaaacagagacttgcgtccatcgccgacgagaagatcctttttgtcggtgaaatctatctctagcgaaccgaaagccaaagtaaccgacgcagttctcgattccgaacaagaagtgtttattagctcgatgaatccgtttgcgccagatgctgcttcggtagcttcgagtatcaagtaccacgcggagtttacgccattgttttcaccggagaagtttgagttgcaaaggngttcctttgcgactgcgcaaagtgttagagatgcttggtcatgnaattgg

SEQ ID NO: 6127 - DNA, 499 bp, Arabidopsis thaliana
  unsure at all n locations
  Clone ID: LIB23-014-Q1-E1-H2
gccgggcttttaccgggccanagattcncgaanaccgacccacgcntccnaccacgcgtcangtctagcttgaagcctttagccatggccgattcttcctcttctaccattttctcccatccttccatctcctctaccatctcttcctccagaattcgcagctccagtgtttccctccttaccggacgcattaacctgcccctctctttctctcgcgtctctctatctcttaaaaccaaaacccaccttaaaaaatccccctttgtctccttcgttgcccagacttcggattgggctgaagaaggtggagaaggaagcgtcgctgttgaggagaccgagaacagtttagagtcacaagatgtgagcgaaggagatgagaagcgaanganatgcgagcgaaatgagatgtgagcgaanggagattgaganncganngagatgtgagcgaagggagctgtgagcgaaagaagctgaattcncgggagcaaccgggaagaan

SEQ ID NO: 6128 - DNA, 479 bp, Arabidopsis thaliana
  unsure at all n locations
  Clone ID: LIB23-014-Q1-E1-H3
taccgggccanaaattcccggaaccgacccacgcntccgatcaaatacaagtgcaaatcgtgagttaagcagaagtattctggtagaggttctactgggagaggggattatcttggtagttctgacgacaaggttagtgatagtatgtggacttcagctagagaaagagaagtgcaaccatctttaggctctgagaagccaagatctgtttcaattcctgaaactcctgccagaagttctcgtgctattgcaccaccagnnttatctcctaggattgcctctgaaatttcaatggcacctcctgctgttgtttcgcagcctgttcccaagtcaaatgattcagagaaaatatggcattacaacgacccatctggtaaagttcaangacctttttcgatggcgcanctccntaaatgggaacaacactgggtacttcnctgctaagttggnaanccngggaaagcaatgacccaccgttg

SEQ ID NO: 6129 - DNA, 439 bp, Arabidopsis thaliana
  unsure at all n locations
  Clone ID: LIB23-014-Q1-E1-H5
acgcgtccgcccacgcgtccggtttacatggtgctcgacaccggcagcgacatcgtctggctacaatgcgctccttgtcggagatgctactctcaatccgacccgatattcgacccgagaaaatccaagacctatgccacaatcccctgttcttcacctcactgccgccgattagactccgccggatgcaacacccgtcgtaagacttgtctctaccaagtctcttacggagatggttctttcaccgtcggcgatttctccaccgaaacgctaactttccggcgaaatcgcgttaaaggcgttgctctcggatgtggccacgacaacgaaggtctcttcgtcggagccgccggtttattangactcggtaaaggtaaattatcgttcnccggtcaaaancggtcaacggnttaatcagaaattctcttantgtttaatc

SEQ ID NO: 6130 - DNA, 454 bp, Arabidopsis thaliana
  unsure at all n locations
  Clone ID: LIB23-014-Q1-E1-H8
tcccgggccgacncacgcgtccaaatggagtcaactcccaagacaaaacctatcaacattaaatgtgatcctacaaaacctagttctgcttggaactggttggagaggtggatgtctgttccaaaacctgagaagacttctaaagcaaatttgacaacggaagagcaaaatttggaagaaacacagaatgttaaaatatcacctcaagctgactttgtgaattctgactcaacggtagagaacaaaactgaaactgatatgccaagctatgaagcaagtaaggtagaaggtcagaatgtggagctatctgagacagagaaaatgagccaatatgattcaccagaagcatcagcggaggtttattatgactcaatccagtctcagccacttgctgctaaaccaagattcnttgctcgaagagcctgaatatgtggatggacanattaaacattct

SEQ ID NO: 6131 - DNA, 488 bp, Arabidopsis thaliana
  unsure at all n locations
  Clone ID: LIB23-014-Q1-E1-H9
tcctcttctctacctctntctcttccgtttccactccgatctcttactagtaccactcgatctctaccatttcaatgttctcctctctttttctctattccttcttcaatcgtttgnntctccactcaaantcccgaccgcgaagaggtccggtggctccgggaagagcagagatggattcgcgaggagcaacgatggattcgtgaagaacagagatggatacgcgaacgtgaatcgcttctacaagagatttcggatctacagctcagaattcaatccctagagtcacgaaattcgcaattggggaattctattcccgatacgatttcgaatatcgctgctttgcttcangttttgnagggagaagaatcggntttctgganagtggatttgagcgcaacggcgatggtanttggngaagtncgagaggaacaanttgttgacggangtggggaggaagaggaagaaggcngagtggattattgctg

SEQ ID NO: 6132 - DNA, 455 bp, Arabidopsis thaliana
  unsure at all n locations
  Clone ID: LIB23-015-Q1-E1-A1
cgggcnttaattgcatctacgacagtcgtaccttttgctaggttatcgtcgtcatgatgcagcagccacctccagcttccaacggtgctgcaacagggccagggcagattccttccgaccaacaagcttacctcnnnnnnnnnnnnnnnnnnnnnnnnnnnnnnnnnnnnnnnnnnnnnnnnnnnnnnnnnnnnnnnnnnnnnnnnnngtctgcaccgtcttctggtcaaccacagcagcagcagtatggtggtggtggatctcagaatccaggatcagctggtgagatccggtccctgtggatcggtgacttgcagccatggatggatgagaactatctcatgaacgtctttggtcttactggcgaggctacagcagctaaagttattcgcaataaacagaacggatattcagaangttatgggctttattgangtttgtgaaccaatgctaca

SEQ ID NO: 6133 - DNA, 466 bp, Arabidopsis thaliana
  unsure at all n locations
  Clone ID: LIB23-015-Q1-E1-A10
acgcgtccgggaagttgtccatgaagaacctgggtcatgttcttaaagttccctttcgtcgtgttcatttgtctggtggtgagccagcttttgataattatgacactagtggtcctcaaaatgttaatgcacacattgggcttgctaagctaaggaaggagtggattgatcgtcgggagaagctaggaacaccaagatacactcaaatgtactacgctaagcaagggatcataactgaggaaatgctctactgtgctactagggagaagctagaccctgagtttgtaagatcagaagttgcacgaaggacgggcgattatcccttccaacaaagaagcatttggagctggaaaccgatgattgttgggtaaaaagttcctggtcaaggtcaatgcgaatatccggaaactccgctgttgccaactccaattgaagaagaaatctacaanggtcaatgggcaaccat

SEQ ID NO: 6134 - DNA, 530 bp, Arabidopsis thaliana
  unsure at all n locations
  Clone ID: LIB23-015-Q1-E1-A11
cttctacgttgcccnggcccggtcanaaaatanacggggtcgacccacgcgtccgaggaaaatggtgtcttcctggctcaattgtcgtcacagccacaaacttttgccctcctaacaacgccttaccgaacaacgcaggaggttggtgtaaccctcctcagcagcattttgatctctctcagcccgtatttcaacgcatcgctcaatacagagccggcattgtccccgtcgcttaccgaagagtgccgtgcgtgagaagaggaggaataaggtttacgataaacggacactcttacttcaacctagttctgatcactaacgtcggaggagccggagatgttcactcagcgatggttaaagggtcaagaactgggatggcaancgatgttcaagaaactgggggaacagaactgggaanagtaactcctaaccttaangggnaaaccnctcctcaattcaaaagttttcaacaaagcgatggncaaaaccaantgtctcctaacaacgttgctaacgcaaggctgggtcct

SEQ ID NO: 6135 - DNA, 430 bp, Arabidopsis thaliana
  unsure at all n locations
  Clone ID: LIB23-015-Q1-E1-A2
acgcgtccggagctgcggacaatcttcatcgcagggcttcccgatgatgtaaaagagagagagcttttgaatctcttgagatggttgcctggttacnaagnttcncaagtgaacttcaaggganaaaagcccanggggnttgctcctttctccaaanctcaatttgcaatggnanccaaagatacccttcaacananggtgtttgatgctgagtcaaagtctgtgatacatacagagatggccaagaagaatctttttgttaaaagaggtattgttggggattcaaatgcttatgatcaaagtaagcgcctacgaactggtggtgactgcacacactctgtgtatagtccatctcctttccatcctccacctcctcctgtgtggggacctcctcatggatatatggcacctgcanctccaccatatgatc

SEQ ID NO: 6136 - DNA, 472 bp, Arabidopsis thaliana
  unsure at all n locations
  Clone ID: LIB23-015-Q1-E1-A9
acgcgtccgagtcgtcctttgagtaatttagaaaatcaaaatgggtcgcaacgtcaaaaccaaggcaaagaggaagaacaagaagaaagcagaggcgtcttcttccgagataccatcgataccaactagggtttggcaaccaggtgttgatacccttgaagatggagaagaacttcagtgtgacccttctgcttataattctctccatggcttccatgttggttggccctgtctgagctttgacattttaggtgataagttgggtttgaaccgaactgagtttcctcacacactttatatggtggctgggactcaagctgagaaagcagctcataactccatagggttatttaaaatcaccaacgttatctggtaaaganacttnatgtttgtgcctaaagacanttggcaatgggtgangatgaaggatgaaggatgacgaaagatgacngttgacagcgaatgatnaatg

SEQ ID NO: 6137 - DNA, 462 bp, Arabidopsis thaliana
  unsure at all n locations
  Clone ID: LIB23-015-Q1-E1-B11
cccggtcaaagaatanacgggtcgacccacgcgtccgcaagaaacgcggattaaagcccgcgaaacagccttggcttaacctttacaattactacccaccaaaatacgcaaactccaagctcaaatacacagaccaattcagatttcttgataaagccgctatcttgactcctgaagacaagttgcagccagatggtaagcctgctgatccttggaagctctgtacaatgcaacaagttgaagaagtgaagtgcatcgtgagagtgcttcctatatggtttgcatcatcaatttactacttaaccataactcaacaaatgacttatcccgtcttccaagccttcagaagcgacgtcgctaaggccaagaggtttgtgatcccgcagcactagtggtttctgatacggatgaagtttcacgatcacacgtgactgtgcacatgaaaaatactggctaacacgg

SEQ ID NO: 6138 - DNA, 436 bp, Arabidopsis thaliana
  unsure at all n locations
  Clone ID: LIB23-014-Q1-E1-G8
acgcgtccggtgggtttcgatggggtcaggtgcatcgaagaatactgaggaagatgacgatggttccaatggcggaggtggtcagctctacgtttcactcaaaatggaaaactctaaggttgaaggagagctcactcctcatgtctatggctctcttcctctcatcggttcctgggatccttccaaagctcttccgatgcaacgtgaatctgcgttaatgtcggagctaagcttcgttgttcctcctgatcacgagactttggacttcaagtttttgttgaagccaaagaacagaaatacgccctgcatagtggaggagggtgaaaataggcttcttactggtggttcgttgcaaggagatgctagattagctctgtttangctggaangtgatgtgattgttgaattccgagtcctcatcaacgctgacagagtt

SEQ ID NO: 6139 - DNA, 470 bp, Arabidopsis thaliana
  unsure at all n locations
  Clone ID: LIB23-014-Q1-E1-B8
cgccggnccaagtaccggtcanacattcccgggccgacccacgcgtccnatcagattgtaaatttagggaagagactttcgcaagcaatctagaagcaaatcgatcgccaaatctccggattatttgcaagaatcgttcccagataatcttccccagattctccacttctccagcttgaagaagacgacgaagatatggctacttcgaagaaaatgatcacacgtgaagaatgggagaagaaactaaatgctgtgaagcttaggaaagaagatatgaatactttggtgatgaattttcttgtgactgaaggatatgttgaagctgctgagaaattccaaagggagtctggaaccanaccagngatagatcttgcgaccantactgatcgaatggctgttngnnaggctgttcaagaacgcgcnntgncgangatgcgattgnaaagagtttaatggattttgaancctgg

SEQ ID NO: 6140 - DNA, 474 bp, Arabidopsis thaliana
  unsure at all n locations
  Clone ID: LIB23-014-Q1-E1-C10
acgcgtccgcgtaagtgacttgagtcaaaagtttttactcgcaatgaaatatttcgaagagccactagaggagctcctcgtgacaatgagaccagactgtcttgtcggtaacatgttcttcccttggnccactaaagttgctgagaagttcggagtaccgagacttgtgttccacggcacaggctacttctctttatgtgcttctcattgcataaggctccctaagaatgtggcaacaagttctgagccctttgtgattcctgatctcccgggagacattttgattacagaggaacaggtcatggngacagaagaagagtctgtantggggaggtttatgaaggcaatngagactcagagagagatatctttggcgtgttggtganacaacttctacgagcttgnacaaggcttactcaggantattttcnngagctttgtggggaagaagngcgtnggcatatcggtccgcct

SEQ ID NO: 6141 - DNA, 438 bp, Arabidopsis thaliana
  unsure at all n locations
  Clone ID: LIB23-014-Q1-E1-C12
acgcgtccggcggaattcgatggtggatgcgattcaagtagctgagctgagaagattcgtcgagcagttgaaattgaatccttcgattctccacgatcctagtctggttttcntcaaagaatatctccgaagtttaggagctcaagttccgaagattgagaaaactgaaagagattatgaagataaggctgagacaaaacccagtttctctcctaaacnnnnnnnnnnnnnnnnnnnnnnnnnnnnnnnnnnnnnnnnnnnnnnnnnnnnnnnnnnnnnnnnnnnnnnnnnnnngcctcctcagccgatgggagaccctactgctgaagtgaccgatgannatanggatgatgctcagtcagaganagaagcaacctatggaaggcantcctctgatgggaagtttggcganagctatagcagcatctaccaaaagnt

SEQ ID NO: 6142 - DNA, 486 bp, Arabidopsis thaliana
  unsure at all n locations
  Clone ID: LIB23-014-Q1-E1-C2
ttacgccgccctttaccggccaanaattcccggatcgacccacgcntccgtaaaatggttatcaatcatttggacaaactgtttgtcacaaatgacgctgctactatagtgaatgagctcgagattcagcacccggctgctaaacttctggttttagctgctaaggctcagcaagaagaaatcggagatggagctaatctgacaatctcctttgctggtgaacttcttcaaaacgctgaggagcttatcaggatgggacttcatccgagtgagatcattactggatatactaaagctgtcagcaaggctgttaaatactggaacaactgggttgagactgggttctgagaccatggatgtacntaacaaggatgaagttatttctcggatgagagcanctgttgcaagcaaacagtttgggcaangaggaaataatttgccccttagttactgacgcatgtattcaaagtctgcccaacgaatccn

SEQ ID NO: 6143 - DNA, 437 bp, Arabidopsis thaliana
  unsure at all n locations
  Clone ID: LIB23-014-Q1-E1-C6
acgcgtccgcggacgcgtgggttttagtttcaaatagggaaacatcacgctgttttgttcgaattcgttttgtcgccgtcggtaatggcgaaaaattacacagtcgccgatgtcgtaaatatcgacagtgacagtgacagtgacgacgacaacggaggagtaataggaatggttccgagcttggcatctctaatagagaatcagaaagtttcgatcgctgatgctgcgacggtggctcctcgagaaaccctagagtgccgaagtttctggaaagccggcgaaaactttgtgatcccttcaagtgttactctaactgccataggtatggttgagcatgctcgtgttcatccaanagtttcttcactcgaatgctacttcacataaatgggctttggagcaatcgccgagctacttgacaatgccggttgatgagatac

SEQ ID NO: 6144 - DNA, 425 bp, Arabidopsis thaliana
  unsure at all n locations
  Clone ID: LIB23-014-Q1-E1-C7
acgcgtccggatataggtatcgctgtggcggatgcaactgacgctgcacgaggtgcttctgatattgtcctcaccgagccaggtctcagtgtgatcatcagcgcggttctaaccagtagagccatcttccagagaatgaagaactacacaatatatgcagtctcaattaccattcgtatagtgtttgggtttatgctcattgctctaatatggaagttcgacttttcaccattcatggttttgatcattgctatattaaacgatggaaccatcatgactatctcaaaggacagagtcaagccttctccaacaccagatanctggnaactcaaagaaatcttcgcaaccggcgttgttcttggaggctacatggctataatgactgttgttttcttcngggccgcatacagaaaccganttcttcc

SEQ ID NO: 6145 - DNA, 421 bp, Arabidopsis thaliana
  unsure at all n locations
  Clone ID: LIB23-014-Q1-E1-C8
attcccgggccgacccacgcgtccagttagaatcaaagaaaccgcttcaaggatggtgagtgaaggagcaacaagaaaagaacttaacctctgtttcgagaatatgaagatggaaggagttttgatctctgagtggaaagatatccctgtggagcttctcatgaagattttaaaccttgttgatgatcggactgtgatcattgcttcttgtatttgtagtggctggagagatgctgtttcccttggcctcactcgcctctccctctcttggtgcaagaagaatatgaacagtttggttctatctcttgctcccaaattcgtaaancttcagactttantactgcgacaggacaaaccgcacgcttgaggacaacgcggtggaagccatagcaaatcantgtcattgagctacacnatttgg

SEQ ID NO: 6146 - DNA, 460 bp, Arabidopsis thaliana
  unsure at all n locations
  Clone ID: LIB23-014-Q1-E1-D2
ccggnccaagaattcccganaacgacccacgcctccggcgataactnggtttctctcctctctctcatctctctttgtttcgacccttttttagtatatttccaggaaatatcttcttcctcctttcgttttctctatctcagttttctctcntctcagcattaagtagtcaacggtcagcgatctcggcgttccttctaatcggaaaagtctagcttcagtttcttttttttttgcttttttggtttccgcgattaatcgatttgggtattttgattttctcttcaaattaagtcaacgggtggatacgcgttganagggcttttctcgtattctgcntctaatttcatcatcttgggantaccttgtgtgggtggtancttaatcganggattcgangatccnntttaacagggggtttaacaatgatggantttctctgantaagggataagttcga

SEQ ID NO: 6147 - DNA, 426 bp, Arabidopsis thaliana
  unsure at all n locations
  Clone ID: LIB23-014-Q1-E1-E11
acgcgtccggaaacaataacaataagaagacgaatggcgtcttcgtcgttctcagtcacatctccagctgctgctgcttccgtctatgcagtcactcaaacctcctcgcacttcccaatccaaaaccgntctcgcagagtttctttccgtctctctgctaagcccaagcttcgctttctctccaagcctagtcgcagtagctaccctgtggtgaaagcacaatctaacaaggttagtactggtgcatcatcaaatgctgccaaagttgatgggccatcatcagctgaaggaaaggagaaaaactcattgaaggagtcgtctgcttcttctcctgaattaactacagaanagtctatttctgagttcccttacccaagttnncanntcttgtcnngcttgtggggttcaaggangacattgtttggt

SEQ ID NO: 6148 - DNA, 475 bp, Arabidopsis thaliana
  unsure at all n locations
  Clone ID: LIB23-014-Q1-E1-E4
tacgccgnccttgtaccggccaaaaattcccggntcgacccacgcgtccgctttcttcactgtagaatccgtcgaccaaacaactagctccaatggcataatgagcattgtagtttgcaatttcttcttccgtgaagaagaagaagatggctttggagaaagaggaagaagcgtcacaaaacggtgcgttttgtgtccttgatgggctctattgcgaggaagaaaccgggtttgtggaggacgatcttgatgacgatggagatttagattttctcgagaaatctgatgagagtgttgtaaagtttcagtttttacctcttttggatatgttcttatgggatgacgatgagattctgagtttgatttcaaaggaaaacgaaacgaatccntgttttgggggaacanatcctagatggctttttgggtttcttgtaggaaagaagctttaggattggggtcttagggttaaatcnca

SEQ ID NO: 6149 - DNA, 492 bp, Arabidopsis thaliana
  unsure at all n locations
  Clone ID: LIB23-014-Q1-E1-E6
nagcctttacgccgggccantaccggtcanancattcccgggncgacccacgcgtccngaaccaataacaataagaagacgaatggcgtcttcgtcgttctcagtcacatctccagctgctgctgcttccgtctatgcagtcactcaaacctcctcgcacttcccaatccaaaaccgctctcgcagagtttctttccgtctctctgctaagcccaagcttcgctttctctccaagcctagtcgcagtagctaccctgtggtgaaagcacaatctaacaaggttagtactggtgcatcatcaaatgctgccaaagttgatgggccatcatcagctgaaggaaaggagaaaaactcattgaaggagtcgtctgcttcttctcctgaattagctacaagaagagtctatttctgagttccttaaccaagtaacanctcttgtcaaagcttgggggantcaaagagacattggtgaggttgcaatttggaaanaac

SEQ ID NO: 6150 - DNA, 471 bp, Arabidopsis thaliana
  unsure at all n locations
  Clone ID: LIB23-014-Q1-E1-E7
agcagcnttaccgggccaataccggtcanaaattcccgggccgacccacgcgtccnnttcttctctgcagtctctcttctctctgttttgccttgctctgttctctcttcctctcatcgtctcctccatcggcatcaactatggncaggtcgctaacaaccttcntccccctaaaaacgtcatccctctcctcaagtctgtgggagctacaaaagtcaagctctatgacgccgatccacaagccctacgtgccttcgccggctccggcttcgagctcacngtggccctcggtaacgagtacctggctcagatgagcgaccctattaaagcncaaggctgggtgaaggagaacgtccaagcttacctcccaaacaccaggatcgtggccatcgtantgggaaacgaagtcntcanctcangtnanntcaancntcagngaatcccnncttcccggctaggcaagagcantca

SEQ ID NO: 6151 - DNA, 481 bp, Arabidopsis thaliana
  unsure at all n locations
  Clone ID: LIB23-014-Q1-E1-F1
tttacgccgcccttgtaccgggccaaaaattcccgantcgacccacgcgtccgnccacgcgtccgctttagctatttcttctgtggaggctaaggaggatagacaagggaagaaagatgtaaagattaaagtagcggaaaagaaagttcctaaacatgttcgagagaagcaagagactcttgcgcggtggannnnnnnnnnnnnnnnnnnnnnnnnnnnnnnnnnnnnnnnnnnnnnnnnnnnnnnnnnnnnnnnnnnnnnnnnnnnnnnnnnnnnnnnnnnnnnnnnnnngattaggcagaagagaaagatcaggaaaatggagaagaagcaagaaggcctgattctaacagcaaagcaaaagcgtgatgctgctaagaatgaggctttcagaaaaagggtgttgactgatgctggaagtcttcttgttgcagataaaaacggtgattcctcaaaaacgtcccatatatnggaattaaaa

SEQ ID NO: 6152 - DNA, 430 bp, Arabidopsis thaliana
  unsure at all n locations
  Clone ID: LIB23-014-Q1-E1-F6
acgcgtccgtctctctctctatttccgcagacatcaattcccctttttgactaaaattccgcgacttgggctttgatccattcccagtgaatctcactgcttttctcacagaaaaaaatcactcctttttcctggattttgttttctcgactgatttggggaaaagctatggtggtctgattaatctctgtctgtctttggtgagatgggtttggatgctgttaaagctaaagggaattggaaatcnnnnnnnnnnnnnnnnnnnnnnnnnnnnnnnnnnnnnnnnnnnnnnnnnnnnnnnnnnnnnnnnnnnnnnnnnnnnnnnnnnnnnnnnnnnnnnngtggttgctgggtcaaatttaggtttatgattggttgcatacctcaaaatcagaccttgatgcgtcttcttccttctaaccatgggctc

SEQ ID NO: 6153 - DNA, 460 bp, Arabidopsis thaliana
  unsure at all n locations
  Clone ID: LIB23-014-Q1-E1-B4
tacgccngccttgtaccggccccagaattcccgaaancgacccacgcntccgcccacgcgtcangtatcgccggccgattcaataatttcgctttactctgccaaaaaagtttgttcttttgttttctgggattatccaaagagaagaaacagaggaaatcaatctcttttttagtttcagaccctaaatcctaggttttgaagttttgtttctttagtaattttgtcaggttttgtgtctggtgttgggatttttcggagcttggtttcttgaaccagctccattttctaaaaattccttctttanatccccattgttgtnantcttaaagaaaaangaagnatgacttgttgtttctcttgtttgaatcctcgaaccaagcgacataaggagtccgacattgataacgnccngangcaacctcgttancaaaacnctntaatcaatncaatggaagtt

SEQ ID NO: 6154 - DNA, 418 bp, Arabidopsis thaliana
  unsure at all n locations
  Clone ID: LIB23-013-Q1-E1-F5
ttactcgcccgttcngtacanagtcagcaaattcccgggccgacccacgcgtccaaagaactaagagctttactacagtcctactctctacacatcttctctctctctcaagagctagtcatggccaaactcataacttcttttctcttactcacaattttattcnctttcgtttgtctcactatgtcaaaagaagctgagtaccatccagaaagttatggaccaggangtctganatcataccaatgtggaggacaatgcacaaggagatgtagcaacacaaagtatcataagccatgcatgttcttctgccaaaagtgttgtgctaaatgcctttgtgtccctccaggcacgtacggcgacanacangtgtgtccttgtntacaacnactnggaagactcaacaagggtggtcnaa

SEQ ID NO: 6155 - DNA, 471 bp, Arabidopsis thaliana
  unsure at all n locations
  Clone ID: LIB23-013-Q1-E1-G10
gtaccagtcanaaattcccgggncgacccacgcgtccnaacaacaaaaaggagataaagagaagaggattcatcatcatcaatcaatccttcattttatggatctactcatatcttgattcttccttctatctctcccttttcttccatctctttttctctgggtttccccggattgagttttttaatctctgattgacagatttgaagagcgtgacaaaggaagaatcttttattaaaacaaattcttctgttttaatcttgggatggcctcggtgggcatagagcctagtgccgcggttagagaatctactggaaacgttactgatgctgatagattacccgaggagatgaaggacatgaaaattcaagatgataaagaaaatggaagctacgattgttaatggcatgtgactgagactggccatataatagtaactactataggaggaagaaatgggcaaccaaaaca

SEQ ID NO: 6156 - DNA, 447 bp, Arabidopsis thaliana
  unsure at all n locations
  Clone ID: LIB23-013-Q1-E1-G8
attcccgggncgacccacgcgtccncccacgcgtccgagcgacttaacaacaacaacaacaacatattctctgctgggtattagattcgaatttctctttttgtgatcagaaatggatcgagctccggtgaccacaggaccgttggatatgccgattatgcacgacagtgatcgatatgacttcgttaaggatattggttctggtaatttcggtgttgctcgtcttatgagagataaactcactaaagagcttgttgctgtcaagtacatcgagagaggagacaagattgatgaaaatgttcaaagggagatcattaaccacaggtcactaaggcatcctaatattgtcagatttaaagaggtcattttgacgccgactcatctggctatcataatggaatatgcttctggcggtgaactttacgagcggatttgcaatgcangacg

SEQ ID NO: 6157 - DNA, 475 bp, Arabidopsis thaliana
  unsure at all n locations
  Clone ID: LIB23-013-Q1-E1-H2
cgctgnccggtgcccggtcaaaaattaacgggtcgacgcncgcgtccgagtaatanggacattgcaatttttctaaatccggcgattaaatatgggtttcatagtcggcgttgtaatcggactcctcgtcggaatcgcaatcatcatcggctttgtcaagttggagaattctcgatccaagcttcgctctgaacttgcgaatacggtggctgcttttgcgaggatgacggtggaggattccaggaagcttttgcctcctgagttttatccttcctgggttgtcttctccnagcgtcanaagttgacttggctcaaccatcacttgacanagatctggccttatgttgatgangcagcctctgagcttataaaggcatccgtggagcctgttcttgagcaatatagacctgccattgtggcctccttancattttctaagcttactctcngtacagtggcacctcaatttacaggg

SEQ ID NO: 6158 - DNA, 471 bp, Arabidopsis thaliana
  unsure at all n locations
  Clone ID: LIB23-013-Q1-E1-H3
tacttgccnggcccggtccagaataacgggtcgacccacgcgtccggttaacttcgcagactctgttgattagtcaacacagatcagaatctgaggctttggccgagacgagagaagcagaagaagaaaatggcggagactgtacattctccgatcgttacttacgcatcgatgttatcgcttctcgccttctgtccacctttcgtcattctcctatggtacacaatggttcatcaggatggttctgttactcagacctttggcttcttttgggagaatggagttcanggacttatcaacatatggccaagacccactttgattgcttggaaaattatattttgctatggagcatttgaagctattcttcagctgcttctgcctgggtaaangagttgagggtccaatatctccagccggaaaccgaccagtttacaagggcaatggtcctggctgcttactttgtgacac

SEQ ID NO: 6159 - DNA, 467 bp, Arabidopsis thaliana
  unsure at all n locations
  Clone ID: LIB23-013-Q1-E1-H5
tgcccgtncggtaaaagtcatnaattcccgggncgacccacgcgtccgatacaatgtctactcttgttttattcctccaacttttttccatcctaccattagcacttgggttgaaccacccaaattgtgacctgaccaagactcaagaccaaggctctaccctaagaatcttccacatagacagcccttgctcccccttcaaatcatcatccccactctcatgggaagcgcgtgtgctccagacgctggctcaagaccaggcccgtctccagtacctgagcagcctcgtcgccgggagatctgtagtctccattgcctcagggcgtcaaatgttgcaaagcactacatacattgtcaaggctttgatcggtactccggctcagccgctgctcctagccatggacacgagcagtgacgtggcttggattccttgctccggctgcgttggtgtccttctaacacggcct

SEQ ID NO: 6160 - DNA, 475 bp, Arabidopsis thaliana
  unsure at all n locations
  Clone ID: LIB23-013-Q1-E1-H6
ttaattcccgcggcaggtaaaggtcannaattcccgggccgacccacgcgtccncccacgcgtccgaaaaaaatgagtcaacacaacatcttagaagctctaaatgtccgggtcgtgggtacgggtgatcggatcctgtttttggcccatggattcggtactgaccaatcagcttggcacttgatccttccttacttcactcaaaactacagagtcgtcctctatgacctagtttgcgccggcagtgtcaaccccgattacttcgatttcaatcgttacacaactctcgatccttacgtcgatgatcttctcaacatcgttgattcactcggaatccaaaactgtgcttacgttggtcactctgtttccgctatgatcggaatcatcgcttcgattcgtcggccggngcttttctccaagcttatcttgatcggattttcgcctangtttctcaacgacgangattatcatggag

SEQ ID NO: 6161 - DNA, 411 bp, Arabidopsis thaliana
  unsure at all n locations
  Clone ID: LIB23-013-Q1-E1-H7
acgcgtccggcaagacacatanatcgtaatccattttctctcaactttaggaatctcaaatctccgatttggaaatccggcgacaatggtgagagatattgaagatgagattngagacgagaagaatcctcgtcctcttgatgaagatgatatcgctctcctcaagacttatgggttagggccttactctgcacctatcaanaangtgganaaagaaattaaggatctcgccaagaagatcaacgatctatgtggtatcaaggagtctgatactggtttagctcctcccagtcaatgggatcntgtatctgataancaaatgatgcannaagagcancctctgcaggttgcganatgcacacngattataacgtccaaacactganagacgccanatacgtcataaatgtc

SEQ ID NO: 6162 - DNA, 442 bp, Arabidopsis thaliana
  unsure at all n locations
  Clone ID: LIB23-013-Q1-E1-H8
ccgggccgacccacncgtccanttgttccaagttcgtcttcctcctctcgtagcagcagtaatggctccttcaagcgtcgttagggtttactctaccgctacctctccttctccttctgaaatttccgtcaagaaagttggtactcataatggaagctttcactgcgacgaagctctcggctgtttcatgattcgcctcgtcgataaattctccggcgctgatatcgtccgttctcgtgaccctaagatattggcagaacttgatgcagtgcttgatgttggaggtgtttatgatccggagcatgaccgttatgatcatcaccagaaaggttttgaagaggtttttggacatggcttcaacactaagctcagtagtgctggtcttgtttacaagcattttggaaaggagatnatanctaaggaacttaatgtcgaacaagat

SEQ ID NO: 6163 - DNA, 443 bp, Arabidopsis thaliana
  unsure at all n locations
  Clone ID: LIB23-013-Q1-E1-H9
acgcgtccgactttttcctttatataaagttnnnnnnnnnnnnnnnnnnnnnnnnnnnnnnnnnnnnnnnnnnnnnnnnnnnnnnnnnnnnnnnnntgaggccattgagcattaaaccaacatcgttagatgtagctagacatgccacatcagtagaatcatttgggaatcaccgaccgccgatatcgccgtggcactcaccggtgccgtacctattcggtggtcttgcggcgatgttaggcctcatagccttcgctttacttatcctagcctgctcttactggcgcttgtcaacctccggtgatgactccggcgaaagagtcgacgaggaaaaagagagtcggtctggagtgaaggcggctagcgcggcgtgcgaggagaaggttcttgtcataatggccggagatgacttgccgaggtttctggccacgccggcggcgaac

SEQ ID NO: 6164 - DNA, 419 bp, Arabidopsis thaliana
  unsure at all n locations
  Clone ID: LIB23-014-Q1-E1-A11
cacgcgtccgcccangcgtccgcccacgcgtccgcccacgcgtccggcgaagcaatggaatcaatgacgccaatctcgtgccctacgactcctcgttggaaccaagacagaccntttctcactggtcgcntccatcaggaaacgagggcaagctccaagtttgctgattctaagaggtttactttagactcgtctagttctggagtagagcaggcaattggctgctatgacacaccggttcaggagcttatcgtcattgatgatctcttatctgcgttggttggaattgaagggagatatatttcaattaaaagattccatgggaaggaggatantatagctttccaagttgatccatcaatggatttggnantacaggaattggcgancannatatttcctttatgtgaataattanc

SEQ ID NO: 6165 - DNA, 407 bp, Arabidopsis thaliana
  unsure at all n locations
  Clone ID: LIB23-014-Q1-E1-A8
acgcgtccgagccaatcgaatccttttcaacccgacgggtcgtgaaattccccaaaagattcctctttctcagctcaatttccaaaagctccgacctttacgatcctctagattctcggcgccggtttctcggagtaaataatggctcagttcacgggtcgggtcgttggagactacttggtgggtcgtcaaatcgggtcgggttcgttctctgttgtttgggaagcgaggcaccgcgttgacggtactgaggttgctatcaaagagatcgccatggacaggcttaacaagaagctgcangaaagtctcatgtctgagntttttatcttgangangatcaatcatcctnacatcatccgtccgatnaacatgataantctcctgggaaaagtacattnggtggttgg

SEQ ID NO: 6166 - DNA, 519 bp, Arabidopsis thaliana
  unsure at all n locations
  Clone ID: LIB23-014-Q1-E1-B12
ttnactggccctaggcctccggaattcccgggncgacccacgcgtccgccgagctagctataagaactccggtgaagccgattgttcgatgacgaagtttcgaatttccagagaagcgggtgaggtcttcaattacggcggacgaggcgaangaggattgattactcancatcacagaagaaaaaaggcagtcctgcatgcgaagaagaggtgtgatcgcgattttttgttttatcaaattggttacaaaggagagaagatgcgtcaacagagattcggatatcgaaaaacagagattctatcatcagattcgtcaatggagatacctgtttgtcgaggtctggaagctgattttanaggtaaggangatggcgaatgaaacggggttggncntcactgagcagattantactttggaggaacnaggtattagacanggcaccggaganaaatcctttacagcatctcactccggatacacnnnttnncattgggncgtccatcccaacccgacntaat

SEQ ID NO: 6167 - DNA, 410 bp, Arabidopsis thaliana
  unsure at all n locations
  Clone ID: LIB23-014-Q1-E1-B2
acgcngcgctgtaccgggccntnacattcccggnncgacccacgcgtccantttgcttcaatcttcaacaactttctttttataaagattttgcaagttaagtgtaaacctacaaaaaccaaacatggtggttttgccacagccagtcactttagataancacatctccctaatccccacatacaaaccggttccggttctcacttcccattcaatccccgtcgtcaacctagccgatccggaagcgaaaacccgaatcgtaaaagcctgcgaggagttcgggttcttcaaggtcgtaaaccacggagtccgacccgaactcatgactcggttagagcaggaggctattggcttcntcggcttgcctcagtctcttaaaaaccgggccggtccanctgaaccgtacggtt

SEQ ID NO: 6168 - DNA, 449 bp, Arabidopsis thaliana
  unsure at all n locations
  Clone ID: LIB23-013-Q1-E1-F4
attaacgggtcgacgcncgcgtccggtgccantttttcttcctaaatcctctctctctctctccgttcccgagacaagcaaaagcttcaatctcaaatctttcagcagctacaaaaatgttcttcatctannnnnnnnnnnnnnnnnnnnnnnnnnnnnnnnnnnnnnnnnnnnnnnnnnnnnnnnnnnnncgtcatcagttgcggcgaagttcgctttcttcccgccgagtccgtcgtcttacaagctggtttacgatgaactgaccggacttcttctgatgaacccatttcctcaccgtgaaaacgttgaaatccttaagcttccgacacgtagaggaacagagatcgtggctatgtacgtcagacatccgatggctacctctactctgctttattcccatggaaacgccgccgatctggggccaagatgtntgagctcttcatcgg

SEQ ID NO: 6169 - DNA, 469 bp, Arabidopsis thaliana
  unsure at all n locations
  Clone ID: LIB23-011-Q1-E1-F4
cacctggacgtgnccgtcatnnattaaagggccnacncacgcgtccaaggacgngtggggaaaggtcaaggatctgggtctgattcagatgatgaacaagggcaaaagagtaaatcgaaatcggatgatgagattcttaattacggattgaccattgcttcgnaagggcaagagaatgtattacttgtgcttgatcaggttttacgagactacagttgtttcacagagcagagaatgtctgaaaaagccaaggagactggagaanaggtgctgggaaattcagtggtggcggacacttcgccggaggagcttaagggtgagagaaaggatgttgtggaaggtcaatgtgcggcgtattggacaacacttgcaccgaatgtcgaggattanactcacagtactgctaaaatgatagcttccgggtcangtaagctgatcagaggggatactgtggtgttnggattaactg

SEQ ID NO: 6170 - DNA, 460 bp, Arabidopsis thaliana
  unsure at all n locations
  Clone ID: LIB23-011-Q1-E1-F6
aactnccgcgggacggtaaaggtcataaattcccgggccgacccacncgtccanttctctatcgagtacaaaccgcaagtgaaacagagtaacagagacgcgtcgtcttcaacgatgctctcaacggtgacggcgacggcggtttctcgaccgattctgaaggnggaatgtacaatcaaaaggacgtttaaagtgacggcggagaagtttccgacgtttctgccgaccgatgtcgagaaaattaaagacacgtttgctctaaagctcgccgccagaatagagaggcttcctgtatctgtgagcttcagggaagatagtattatgagcagttgcgtgacaccgctgatgcggaacgagacaactcctgttgtgcttcttcacggatttgatagttcttgtttanagtggcgatacacttatcccgttgcttgaagaanccggtttagaaacatgggnattt

SEQ ID NO: 6171 - DNA, 454 bp, Arabidopsis thaliana
  unsure at all n locations
  Clone ID: LIB23-011-Q1-E1-F7
aattcccgggccgacccacncgtccancgattttcgatcgtgtttgctctaagtgcatagcttctaagagagatgagatcagccaagggattgattcttcttcttctaaagatttgttgatgtcttctagaaatgtggacacgactaagtacaagttgttgaatccaagtgatgacagattccttagagacacaatcttgtccttcatgttagctggtanagacacancaggctcancgctcacttggttcttctggcttctatgcantaaccaagaagccatgancaagattcgtcaagaaatcancacaaatctatttccaaganacaagaccgacgacggttctgtttcntatgantctgantcattcaatccccaagaggtanagaaattggtgtatttacacggcgcggtttgtgaangcctcangctctagtccagctgttcccgnta

SEQ ID NO: 6172 - DNA, 482 bp, Arabidopsis thaliana
  unsure at all n locations
  Clone ID: LIB23-011-Q1-E1-F8
aactnccgcgggacggtaaggtcataaattcccgggncgacccacncgtccanggacgcgtgggatcaacagtctccgacgcttggcgcgtaccactcaggttcatttgcacagtaagtatgccacttgcatgtctgggaactccacttccaggaggatttncactactgaggcagcacctgagaagaaaaacactgttgggtctaaagggcatgatatgcttgcaccttttactgctggatggcagagtgctgatttagatcccttggtcattgcaaagtctgagggaagttatgtgtatgatgatactgggaaaaaatatcttgactctctcgctggtttatggtgtactgccttaggaggaaatgagccaaggcttgtttctgccgctgttgaacagttgaacaccttgccgttttatcactccttttggaaccgtactactaaaccttctctggatcttgcaaagttcttttagagaa

SEQ ID NO: 6173 - DNA, 426 bp, Arabidopsis thaliana
  unsure at all n locations
  Clone ID: LIB23-011-Q1-E1-G1
gcgtccggaaagaaagagaaaaaaaatgggaggcaaaggtgtgatgatggtggcgatactttgcctttgggcactctctgcaacatctgaagcagtaacagaggctgagccaggtttgatgangaacttctacaaggacacgtgtcctcaggccgaagacatcgtccgtgaacaagtcaaactcctctacaaacgccacaagaacaccgctttctcttggctccgtaacatcttccatgactgcgccgttgagtcatgtgatgcgtcgcntttgcctgggattcgacaagaagagagctaggagagaaagaacacgacaggagcttcggacttagaaacttaagtacatcnagganattnaggaagctctccnaaaaggaatgtcctggtgttgtcncaggttcgnaattccctccttgtccccan

SEQ ID NO: 6174 - DNA, 498 bp, Arabidopsis thaliana
  unsure at all n locations
  Clone ID: LIB23-011-Q1-E1-G3
gggccgacgcccgcgtccangtacaacaacatctgttgttcttgcacaaggttttatcgctgagggtgtcaaggtggtagctgctggtgcaaaccctgttttgatcaccanaggtattgagaagacagcaaaggctttggttaccgagctcaagaaaatgtctaaggaggttgaagacagtgaacttgcagatgttgcatctgttactgcgggtaacaacgacganattggaaatatgattgctgaagcaatganccanagtgggcaggaaangtgtggtgacccttgaggaaggttaaaantgccnaanaacnacctctacgtccctagaagggaatgcaattttgacccgtnggttaataaccnctccctaacntttgttgaccanaccagncgangaaaaaattgtcccgttcnaagtttcnancaaatttgccaaagtttaccttccncgtttgnncaangaaaaatttacccaaattncaaaggggaattctt

SEQ ID NO: 6175 - DNA, 461 bp, Arabidopsis thaliana
  unsure at all n locations
  Clone ID: LIB23-011-Q1-E1-H4
ggtccgacgcncgcgtccatcttgnagcatgcttacgctgttgacgcattcagaaactgcaaacagtgtgctggaggtaaaattggaattgcacacagtccagcttggttcgaaccacaagaccttgagcatgntggaggttccattgaacgtgtgcttgatttcatcctaggatggcatttggctccaacaacttatggngattatccacaatcgatgaaggatcgtgtcggtcatagattgccaaaattcacagaagctgagaagaagttgctaaagggttctacagattacgtagggaatgaattactataccttcagtgtttgcaaaaagaaaattagccctgatcctaagantcccgagtttggnccnactgattcctcttggttgaatggggataaccaagagtgttggatggggtaccaaaattngggnaacaaggccgtttaaanggggaaaa

SEQ ID NO: 6176 - DNA, 456 bp, Arabidopsis thaliana
  unsure at all n locations
  Clone ID: LIB23-012-Q1-E1-A2
acgcgtccggttaaaaccctaaacccttaatttgagctctctgctctcctggttttagttttcctctatttcgtgctcaattcgcttgttctccagttccactctatcagtgccggcggcgatattgtccgaggataaaacatgtttgctctttccaaggttttgcggagaagtcagagtctccgcctaggagcttgcaatgctgtctactctaagctagatataccattgggagaaagaaacattgctattgaatcaaacgctttgattcatgataaacacgaagctttgcctagattttatgagctctcttggtcttcctctaccgggaagacgttcactttcctcggacgctggagctaaaactaaccggagatgacgatgacctccgaaagacaagaatgtaancttgcaactccagacgagaactagtagtgataagtgaagaaggtgang

SEQ ID NO: 6177 - DNA, 478 bp, Arabidopsis thaliana
  unsure at all n locations
  Clone ID: LIB23-012-Q1-E1-A3
atctcnacggngccacagcggtccanaanacccgggtcgacccacgcgtccgaagaaaaagtaagtatcaaaaaaacagaattttgtcttcgttcttctctgagattaaagctttctcttttgtaatggaagaatctcagggcatcaatggcgtcgatgattcagatcgtcatctcccaattctctacttaacctttttaacgatctggtctttctccgcttgttcttggacggttaacactttcaaaaatcgccactttcagacaaatagtttacaatggactcttgcttcagttccattaatcaaagccttacagctcacactatctttcctcttttggcattcatgttttcaccatcacatttgctctctatggatgtcttttggtgtatatgtgactggtgttctgtttcagacagctcatttgtgtcnttttacctanctctcaagggttattggatcactgtgaacgggtcc

SEQ ID NO: 6178 - DNA, 477 bp, Arabidopsis thaliana
  unsure at all n locations
  Clone ID: LIB23-012-Q1-E1-A6
tttctacggcngaccgtaccggaaanacttcccgggtcnacccacgcgtccganctcttgcatcatcataatcctttgcatgcgattcggcttttagcggcggtgatgctacattgagttagtacccacttgcctctcttcttctcttttattgcaattttcgacctaacccaagtgttcgaagctcgtggcatttcctcactcgaagtttgaatttggttttgtgatgggatctaaacaagtatcaaagactagaaatggtggatttagcaagttaaagactgttgagtcctctgcatcttcaacaacctcgtcttcaaaactttatcaagaggcgtctgtagatagccatagctcccctacttcttcatcggttcgaagcaagcctcagttaccanctaagcctttgcagtccanagaaaatgtcactgtcactgtgcgttttcgtccactcagtccaagggaaatccggaaang

SEQ ID NO: 6179 - DNA, 473 bp, Arabidopsis thaliana
  unsure at all n locations
  Clone ID: LIB23-012-Q1-E1-A7
gtaccggaacataaattccngggtcgacccacgcgtccgaaaacaaaaccaccattttctctctctctctcctcgccagcttctgcaattcgaaagttcttcgcatcatcttgctgtcaccactctctcgcgaatcgaatcacgattcntcaatcttcttcttctctattgcgatctctctgaattttgtagcttcacgatttcagtatctctactttcatcaccaatcgttgggggtttagggtttttgcatcgacgccatctatcgagctacggagaagcatactcatcttctattttggctaaatccgaggtcaacttaatctctacgaaatagnttttgaagtgnatgattccgatggataattattgcgtaccgaggtactagcacgaccggtttagtgttttcggcgacttcgagcatgaatgcttcntctggattcaccttactgtaattctccgacttcggtaat

SEQ ID NO: 6180 - DNA, 424 bp, Arabidopsis thaliana
  unsure at all n locations
  Clone ID: LIB23-012-Q1-E1-B10
acgcgtccggtttctgnnnnnnnnnnnnnnnnnnnnnnnnnnnnnnnnnnnnnnnnnnnnnnnnnnnnnnnnnnnnnnnnnnnnnnnnnntcattttggttattaagtaattaacttatactaatcatgggttttatcgatggaaagtgggcaccaatgatagtcttaattgtttctaacatgattgcgggaatggttaatgctttagttaagaaagttcttgatggaggcatcaatcatatggttattgctacttatcgtttgggtatatctactcttttccttcttccagtcgcttatttttgggaacggnaaacangaccaangctaactctaagcatctcatgtcagcttttcgtcagtgccctttttggggcgagcttgatgcaatatttctacttgcttggactgtccnacacgtctg

SEQ ID NO: 6181 - DNA, 487 bp, Arabidopsis thaliana
  unsure at all n locations
  Clone ID: LIB23-012-Q1-E1-B2
ttntatccggccgtaccggtccanaattcccgggnnnnnnnnnnnnnnnnnnnnnnnnnnnnnnnnnnnnnnnnnnnnnnnnnnnnnnnnnnnnnnnnnnnnnnnnnnnnnngtacacgttaccgtcggatgggtctgcctccgggaagccttggtctccctctgataggagagacttttcagctgatcggagcttacaaaacagagaaccctgagcctttcatcgacgagagagtagcccggtacggttcggttttcatgacgcatctttttggtgaaccgacgattttctcagctgacccggaaacgaaccggtttgttcttcagaacgaagggaagctttttgagtgttcttatcctgctccatttgtaaccttttggggaaacactctctgcttcttaagaaangtctttgcataaacgtatgcaactctctcaacaatgagctttgccaaatcctcaatcaattaaagaacatctcaagccn

SEQ ID NO: 6182 - DNA, 487 bp, Arabidopsis thaliana
  unsure at all n locations
  Clone ID: LIB23-011-Q1-E1-F3
ttttacgctgnccggtgcccgtcanaaattcanagggtcgacgcacgcgtccggattagagatggcgaagaggatccacctgacggaactaggctgcatcgcgtgtgaggaacttactgagctcggtgcgggtaaagaaggatggctcgtgaacaatccaaaccttttgagtgcacttgattctcactctttagccctagccaatcgatttctcatattgattgtgaattggggtgatcctgatgcgcctcgtgtcaagatcagacctgatctgtctccgattgaggctgagtcgattacggcgatcgagtggttagtgtttgatgatgtcagagtcgtcgttgcggggacttcttgtggatatctcttggtttactctgttaccggtgatctgatccataagcagattgtacatcaaagccgtatattaaaaataagagttcgaggaactaagaaagatttgatgcaagagacatcctctgangga

SEQ ID NO: 6183 - DNA, 489 bp, Arabidopsis thaliana
  unsure at all n locations
  Clone ID: LIB23-010-Q1-E2-H4
ngccgtccgaaattcaagggtcgacccacgcgtccgcccacgcgtccgcagaaaccctaacttcaacgggaactcaaaaatcagaatctccagatcgagagcttaaaaagtcgatttcaattcccctttaagattttttgcttttggaatgtagtgtgaagaagaaaccctagttttttctcacttgaattctctgccttctttagtaatgtcaagtgagcagcgagaaggttcgcaagagacgacgacgacgacggtggaaggtaacggaacaattgcaggtcagaattctcattcggcggctcccacgacattgagagctacctctacgatggtttcttgccaagagactaaggntaaaccctaacaacgagcatagacccgatagttatgaagatctgcaacttgatttcccaaactcggtataatcnagtcctgggagaaatacttgcctccgaatatgctccgtctcgaatcgtgatgagaaaa

SEQ ID NO: 6184 - DNA, 430 bp, Arabidopsis thaliana
  unsure at all n locations
  Clone ID: LIB23-010-Q1-E2-H8
acgcgtccggaanagagaggctctgataaaaaaaaaaacaaaaaaaaatgacaaaggcttattcaacacgtgtcctcacgtttctgatattgatctcgctaatggcggtgacactgaacctttttcccacggtagaggcaaagaagcggagtagagatgctcctatagtgaaaggtctctcatggaacttttaccagaaagcatgtccgaaagtcgaaaacatcatcagaaaagagctcaagaaagtcttcaagcgagatattggtttagccgctgccatccttcgtatacatttccatgattgcttcgttcagggatgtgaagcatcagtgctgctaactggatnagccagtggaccaagagaacaatcatcaatcccaaatctgacactacgacaacaaagcctttgtccgtcattaataancttcgt

SEQ ID NO: 6185 - DNA, 457 bp, Arabidopsis thaliana
  Clone ID: LIB23-010-Q1-E2-H9
acgcgtccgcggtgagctatttgagcgtatatgtagcgctggaagattcagtgaggatgaggcaagatactttttccagcagcttatctcaggagtcagctattgtcatgctatgcaaatatgccacagagatctgaagcttgaaaataccctcttagatggaagtcctgctccacgcctgaagatctgtgattttggttattccaagtcctcactgttgcactctatgcccaaatcaactgttggaactccagcatatattgcacctgaggttctttctcgcggagagtatgatggcaagatggctgatgtatggtcttgtggtgtgactctttatgtcatgctggtgggagcatacccatttgaagaccaagaggatcccaaaaacttcaaaaaaacaatacaaagaataatggctgtcaagtacaagatcccggactatgtcatatctcacaag

SEQ ID NO: 6186 - DNA, 456 bp, Arabidopsis thaliana
  unsure at all n locations
  Clone ID: LIB23-011-Q1-E1-A3
ttcnagggtcgacgcacgcgtccanttccaacggattcatcggtcgccaccatagcttcttcgctttaagctcttaccctgaacgccccggctccgacttcagctttttcctctaccaatgggcttttgccatagccgcggccggaatcactagcggttccatcgccgagcgaacgcaattcgttgcttaccttatctactctactttcttgaccggttttgtttacccgacagtctcgcactggttctggtcaagtgatggatgggctagcgcgtcccggtctgacaacaatctcttgtttggctcaggtgctattgatttcgcaggttcaggagttgttcacatggtangtggaattgccggtttatgtggagcgttagttgaaggaccaagaataggtaattttaccggtcangccngtccgtggctttacgtggtcacagtgcatncccttg

SEQ ID NO: 6187 - DNA, 446 bp, Arabidopsis thaliana
  unsure at all n locations
  Clone ID: LIB23-011-Q1-E1-A4
cgcgtccnatggcttctcactcgtcgactctcctctcttctcctactttcgctcctttctcctctcatcgtcttcattattctcccaatccctctactctcagattctcccgtccanncagaaataaacctaatctcgccttgcgatgttcagtctcaattgagaaagaagttcccgaaactgaacgaccctttactttccttagggattctgatgacgtcactccatcttcttcttcttccgtcagggctcgtttcgagactatgattagggctgctcaagacagtgtttgtgatgcaattgaagctatagaaggcggtcctaagtttaaagaagatgtttggtcgcgacctgggtggtggcggtggaatcagtcgtgtgttgcaggacgggaatgtctttgagaaagctggggttaaatgncnctgtgggtttaagggggntaa

SEQ ID NO: 6188 - DNA, 487 bp, Arabidopsis thaliana
  unsure at all n locations
  Clone ID: LIB23-011-Q1-E1-B4
tacgcttnccgtgccccgtcatangattaangggncgacgcacgcgtccnaccacgngtccgcccacgcgtccgctctggctccgaggaccagtcatcatgaaaggttatgtgggaaacgagaaagcgagtgcggagacagtagacaaagaagggtggttaaagactggtgatctctgttattttgattcggaagattttctatatattgttgatcggctaaaggagctaatcaaatacaaggcttatcaggttccaccggtagagttggagcagattcttcactcgaatccagatgtgattgatgctgcagttgttccgttccctgacgaggatgcangagagattccaatggctttcataagtgagaaaaccaggaagcaatctcaacgaagcgcaaatcattgatttcgtanctaaacaagttactccgtacaanaanggtaagacgagttgcttttataatgcaatcccaaaaaatcctgctg

SEQ ID NO: 6189 - DNA, 437 bp, Arabidopsis thaliana
  unsure at all n locations
  Clone ID: LIB23-011-Q1-E1-B6
ccgggnccgacccacacgtccanttcactaattccacatactcagagagaaatggcaaccgaaaccgtattagccacggcggtgagcaatggcaaaagcaaaggatgttgcaagtccggtccaggttacgcgacgcctctcgccgccatggccggtccacgggaaaagctcatctatgtcactgccctttactccggaacggggcgagacaaaccggactacttggcaacggtggatgtggatccaagctcacccacattttcaagcgtcattcacagactaaaaatgccatatataggagatgagcttcaccacactggttggaactcttgcagctcttgccatggtgatgcttctgctgatagacgttccttgtcttaccaggcttantttctggtcgcatctatgcantcganacagcgancgacccaaaaggg

SEQ ID NO: 6190 - DNA, 396 bp, Arabidopsis thaliana
  unsure at all n locations
  Clone ID: LIB23-011-Q1-E1-C3
acgnatccgataagaaggagctcactggattgcaaccgattgttgagaaaatgacaccgccggtgaggctagcgacttcagctgttgtattagcggcgtctttagctactggntacggccttgggctccgtttagccggctccaggaatattgcctttggtggggctgctgttgctggagccgccggtggagctgtcgtatatgcgttgaactctgctgtaccggaggtagctgctatcagtttgcataattatgttgccgaattcgaagatcctgcctctgtgacgaaagatgatgtanaaaagatcgctgataggtacggtgtcaacaaaggagacnaagcattccaaggctgagatttgtgatatttattgccggtatgtaacttccgtgcnt

SEQ ID NO: 6191 - DNA, 475 bp, Arabidopsis thaliana
  unsure at all n locations
  Clone ID: LIB23-011-Q1-E1-C5
gcnaccgtaaaggtcaccacattctcgggccgacncacncgtcnanccacncntccgcggacgcntgggaaaanatnatggaacgcaatgctagggaaatgtggtttctcactggcgtttattcttctctttagtgaccgaagttgcattgtggntggccgctttaacttgagatatcttccgagttcacaaatcattacaagtttggtgcaaaactttatcagctggattcggtatantaaaacaggagatgactcttcttcactgctaagacgctccacggaacttagtcttaggttgattcggaatggacaatctgatgctgttgagcgaatccttgtggttgtggaggcaagtttacgtggggagaaaacatttggatgttctcaagatactagtggagattggtgtcntcttcaacatctccgtggttgttgccttcntgatcaagtacaacgtgggtgcaagtggnata

SEQ ID NO: 6192 - DNA, 489 bp, Arabidopsis thaliana
  unsure at all n locations
  Clone ID: LIB23-011-Q1-E1-C8
aaacttccccgcgggncggtnaaggtcnnnaaattcccggggccgacccacncgtccaaccannnnnnnnnnnnnnnnnnnnnnnnnnnnnnnnnnnnnnnnnnnnnnnnnnnnnnnnnnnnnnnnnnnnnnnnnnnnnnnnnnnnnnnnnnnnnnnnnnnnnnnnnnagaaanaaacaaattgcacaccggtggtctcagtagacagagttttcctaaaggattcgtgtttggaaccgccacgtcagcttatcaagtcgaaggcgagactcatcaagacggtcgtggcccaagcatttgggatgccttcgtcaagattcctgggaagatcgccaagaatgccacggctgagataacagtggaccagtatcaccgttacaaggaagatgtggatttgatgaataaactgaacttcgatgcttacanattttccanttcanggtccagngatattccctgaagggaagtggtaaagtccactggnaagga

SEQ ID NO: 6193 - DNA, 463 bp, Arabidopsis thaliana
  unsure at all n locations
  Clone ID: LIB23-011-Q1-E1-D2
gtcaaaacattanaagggtcgacgcncgcgtccgaggttgaaagagctttagttccgtacaaatggcgagtaagaaggttgacggagaaggaaaagggaaagctatagcgaatacgaggatgcttcgaagcatggatcgaaagactcgangcgatactaagcgagatggttcttcttctaagctcatgaagatcgaatctccggagaagaagaaacggaagacgacgaaagcgaagaatgttggagctgcgaagaagaaggtaaanaaagaagaggtagctgtgaaaatcgagaaagangaggaggaagatgatgatgctgcagagaaagaagaanatgacgactccgataagaacaagattgtgatcgagcattgcaagacaatgcaaatcnttcaagganaggggcttatgaggtgaangaacgtctagacggaagcttttcctggcatcattggtcactg

SEQ ID NO: 6194 - DNA, 474 bp, Arabidopsis thaliana
  unsure at all n locations
  Clone ID: LIB23-011-Q1-E1-E6
gtaaaaggtcatnaaattcccgggncgacccacgcgtccanccacgcgtccggtccattaacattgtgaccattctaaaaccctaaaatttaaagaaaaaataaataaatagcctttttgaccaaaaaacccaatctatggttttgcccactatctcttcctctctcctcctatatatatgtcttatgatgagcacacatcatcatcattcacatacataagccaaatgggtgtgtggtggatagtgctggtggtggctgtcttgactcacacggcgtctgccgccgtgagagaatatcattgggaggtggagtacaagtattggtcgccggactgcaaagagggcgccgttatgaccgtcaacggcgagtttcctggtcccaccataaaagccttcgccggagacaccatcgtcgtcaatctcaccaacaaactcaccaccgaagngccttgtcatccantggcatggaaatc

SEQ ID NO: 6195 - DNA, 453 bp, Arabidopsis thaliana
  unsure at all n locations
  Clone ID: LIB23-011-Q1-E1-F2
gnccgtcaaacattaaagggtcgacgcacgcgtccgnccacgantccgtcatcatcgcagaggagacgatcttacgcgacgaatccttgagagattgagagggacaagcgagttttgacccaaggattgttgacggtctatattgaacaagtaaacaaggatgcgtaagtggatctgttgtacatgtcaaatagaanactcaaatgaacgagcaacaactgaaaagttcacagcagcaatctgatgcaaatcataagaattcaaaaccagcacctgttgcaaaacatgaggttaagaaggaagctcttcccancgaggtccctcccttgnctttggangangtcnaggnaaacgactgaaaattttggatccaangnactgattggtggaaanggtcctaagggaagagtatattatgcnacacntaatgatgggtgtggcgggtgcccngaa

SEQ ID NO: 6196 - DNA, 482 bp, Arabidopsis thaliana
  unsure at all n locations
  Clone ID: LIB23-010-Q1-E2-H2
cgtccganattcaagggtcgacccacgcgtccgcttacattctccctctattttttttttctctctctccacaagaaacgccgtcgttcattaaaaatgatggcggtgggcagatccggaggcaccatcctattgttctgcctatcattcttcgccgcggtaaccgcggagagtccataccgattctttgactggaatgtaacatacggcgacatttacccactcggtgttcgtcagcagggaatattgattaatgggcaatttccgggaccagacattcacagtgtgacaaacgacaatctcatcattaacgtacacaacagcttagacgagcctttcttaatctcatggaacggagtacaaaacagaagaaattctatgttgatggaatgtacgggnaccacgtgtccaatttcaaccgagaagcaactacacatacantttgcaagtgaaaagaccaaattggaagttccaatacttcc

SEQ ID NO: 6197 - DNA, 461 bp, Arabidopsis thaliana
  unsure at all n locations
  Clone ID: LIB23-010-Q1-E2-E7
acgcgtccgccaattttcatcttcccttttaggttggaattttgagttttatcttcccatttctggattttgtttctctctagtctattccttcaaaaccaagaacccaactttgttttatattcaaaagttgtttgctttcatcgcgtttggtgttcatcttcatctggtttgagattataataacatggaaggaatcattgtgagaagagttataccatctgataacagttgtctcttcaatgcaatcggttatgtcatggacaaggacaaaaacaaagctcctgagctcagacaggtgatagcagcagcagttgcaagcaacaaggagaaatataatgaagcatttctagggaagctcaatgaagaatattgtgcttggattctcaatccaagacaagtggggaaggtgcgattgaanctttccgatattaagcaagaataataatgggccgagaaaa

SEQ ID NO: 6198 - DNA, 479 bp, Arabidopsis thaliana
  unsure at all n locations
  Clone ID: LIB23-010-Q1-E2-E8
gtaccgaaaccgaaattccngggtcgacccacgcgtccggttcatttttttttctcatatattgattcgagttctttcttcttgaatcttgttcttcatagatctagtttttgttttttactctctagatctatagatctgttgaattcacttctttaatccatctctgtgttcttgagttcctatggtctaagtcaaactcaagttcaagatctgttgaatttggaatcttgctggtgaagttagagatgaattatttcccagatgaagtaatagagcatgtattcgactttgtaacatctcacaaagacaggaatgctatatctcttgtatgcaaatcatggtacaagattgaaagatacagtaggcaaaaggtttcaatgggaaactgtaagccaatnaatccagagaaggtggctccgaaaatcccaaggtcnaaagtcttgacnttgaaaggaaaacccaatttgcggatttca

SEQ ID NO: 6199 - DNA, 457 bp, Arabidopsis thaliana
  Clone ID: LIB23-010-Q1-E2-F1
acgcgtccgcacacagctgcaacactatcttctcagaaatggtaaccgaagctttcgaattcgtcgccgttcctttcaattccgatggctggggacctccagacgcttccgacgtttcctcctccgcctctcccaccagcgtcgccgccgctaatcttctcccgaacgttcctttcgcttccttctcccgttccgataagctcggccgtgtagctgattggactcgcaatctctctaatccatccgctcgtcctaacaccggatccaaatcagatccgtctgcagttttcgatttctccgctttcgcaatcgacgaaggcttcggtctcgcttcctccggtggtaatcccgacgaagacgcagctttccgtctcgtcgacggtaaacctccgccgcgtcctaaattcggacctaaatggcgtttcaatcctcaacaacaatcgggatcaagcttctc

SEQ ID NO: 6200 - DNA, 459 bp, Arabidopsis thaliana
  unsure at all n locations
  Clone ID: LIB23-010-Q1-E2-F12
acgcgtccggttcttcctcgctcttcgccgccttcactcgcagtcgcaggtctgcccagttgaatacattacaagggttatttttgtctgaatggaaactactcaaaaagatgagctttcgagcttcttaagtgttcttcctcctgtggatttctgttgtgtttatggttcaacattgcacccaaataaccaagataagtctaagatggtggactatatccttggagtctctgatcctataaaatggcattctgcgaatctgaaaatgaattcagatcactatgcttcatggatggttcaccttggtggagctaggctgattacaaatgttgccgataaagtaggagttggagttcacttcaatccgtttgtcaactggaacgacaggaagctcaagtatggagttgttcggatgcatgacctagtacaggacatactgggactggaagangttctact

SEQ ID NO: 6201 - DNA, 506 bp, Arabidopsis thaliana
  unsure at all n locations
  Clone ID: LIB23-010-Q1-E2-F3
aactgtctcccttggntcgtggcccgtccgganattccaaaggtcgacccacgcgtccgcccacgcgtccggttctacgcaactccataatttcaattcctctcgacgtttcacggcgaagcttcagatctacttttccccagctcagtatggagacggttgattctcggaacaaattgcattcccggttacgtttatgggaattccccgatcagtacatcatcgagccagctgatggctcaggctcttcatgtttggatattagtcgtgttgatgcttccatgaagctcatcgatcaagtcccagaaagcaattccgtgcgtgtccctaaaatccgttccatttttggtgtggttgggatgttgaagctccttgcaggatcatacttggtggttgtaactgagagtgaacgtgttggatcgtttctggggcatcctatattcaaagttacaacgcttaaggttcttccttgtgatcattcacttaaaaactcgcctgaaagaaca

SEQ ID NO: 6202 - DNA, 461 bp, Arabidopsis thaliana
  unsure at all n locations
  Clone ID: LIB23-010-Q1-E2-F9
acgcgtccggaantggtcactactgtcccttcctctcttttgtcggtaaatggagttacccgtcgtagatctgtctagttacctcgacttctccggtgatganttaggatccgatctactcgaatcatgccgacaagtgagtcggatcctaaaanaaaccggagctctcattgttaaagatcctcnatgttgcgcncaagacaacgatcgantcattgatatgatggaaaattatttcgaaaaacctgatgatttcaaacgattgcaacaaagacctaatcttcactatcaggttggtgcgacgccggagggagttgaantgccgaggagtttggttgatnaagagatgcaagatnagttcaatacaatgcctaatgaatacaaaccacatattccgaaaggaccaagatcataagtggagatatatgtggaaaattngtcccaaggccatctaacacacn

SEQ ID NO: 6203 - DNA, 484 bp, Arabidopsis thaliana
  unsure at all n locations
  Clone ID: LIB23-010-Q1-E2-G1
ctagccgtccgaaattccaaggctcgcaacgtagatcctggagaagccaaaggcatcgtgagcaaaatccgcagttttctacattaatggattgtttctgttctagagcttctcttccgtctctgtgatttctgggtagattctaggatttctatttgcatctctaacctgagagctgctaatagtccacacaactttttagtttgtgagttttcctaatttagggttaggacaaatttctgtatttttcatccaaggggataaagatgtatgctgataaattggaggctgagtctggaagcaggaaggtcgttaaggatcgtatcaatggcggttctggagacatctctactcgcgtgcgacaagtgactgggaagaggcaaaggcangacgacaaatgggagcatgatctttcagtagtgacaaacctcaactttcaaatcgcaagggttgatcctaagagatctccgttgaagctccaaaa

SEQ ID NO: 6204 - DNA, 528 bp, Arabidopsis thaliana
  unsure at all n locations
  Clone ID: LIB23-010-Q1-E2-G12
tttctggcnccgtagggtcaaaaattccgggtcgacccacgcgtccgaagagactcgttggattcgtgaagccgaaaaaaaaaaaaaaatggtaattctcagcaacgtctcgttgttctcctgctgcaacatctctcagaaaccatctctcttttctccgtcttctcgtagttctcattgtcccattcgttgctcacagtcacaggaagggaaagaagtggttaccaagtcctttgagaagtgtggtttggtcattaggagaagaggtttcaaagagaagtctatttgcacttgtctctgcttctctcttctttgttgatcctgctcttgcttttaagggtggaggtccctatggtcaaggagtcaccaaggggacaaggacttatctgggnaaagatttcagtggncaagactccttaacaaggcanggactttcaaaaacgttcaatcctnaagggcaaagccaaactttnaaggggttgcnaaaatttggttaaggtggcaaaccttccntttgatgcaaaattt

SEQ ID NO: 6205 - DNA, 487 bp, Arabidopsis thaliana
  unsure at all n locations
  Clone ID: LIB23-010-Q1-E2-G2
tggccgtccgacattcnagggtcgacccacgcgtccgcccacgcgtccgtctcatccaccacgccattcactccggcgtcactttccttgacacctccgatatctacggtcctgagaccaacgagcttctcctcagcaaggctctcaaggatggggtgagagaaaaagtggaacttgcgaccaaatatggaatcaggtatgcagaggggaaagtagagtttaagggagatcctgcttatgtaagagctgcgtgtgaggctagtttaatgcgagtagatgttgcctgcattgatctctattatcaagcatcgaattgatactcgtgtccctatcgaaatcactattggagagctgaagaagctagttgaagaaggtaaaataaagtatatcggtttgtctgaagcttcagcttcaactatcanaagagcacatgctgttcaacccgataaccgctctgcaaatagaatggtccttaagggccaaaaac

SEQ ID NO: 6206 - DNA, 497 bp, Arabidopsis thaliana
  unsure at all n locations
  Clone ID: LIB23-010-Q1-E2-G4
atgtctccttgntctgccgtccganattcaaggggatnnatcggacaaaggagattagaagagtagaaaaaacgacaagaagaaagaaacacagttgcaggagagaaagagatatggctgtccggataaacgcgatggcggtgacgtttgtggcgcacgcgctggcggtaatagcggcgattatggtactggtttggagtatcagttacagaggtggattggcctgggaagctactaacaagaatctcatcttcaatctgcatcctgttctgatgctcatcggatttataatcttgggaggagaagccatcataagttacaaatcgcttccgctggagaaaccagtgaagaagttgatccaccttatactccatgccattgctctggctcttgggatatttggcatctgtgcaacctttaaagaaccacaatgaaagccatatccctaatctctacagtctccaatcctggattggtantggagtcattctcttaag

SEQ ID NO: 6207 - DNA, 482 bp, Arabidopsis thaliana
  unsure at all n locations
  Clone ID: LIB23-010-Q1-E2-G7
taccgaaccgaaattcncgggtcgacccacgcgtccgcggacgcgtgggctttactgagaaagaaacaaaccgctccaaagtcattgcccatttctctcaatgtggatcagtcggtctccgatcctactgctgttccaacaacaagaaaatcgttgatcatggaacgaatgggagataaagacatcgttagacgtgcatttaagagttttcagaagagtttcgaccaaatgaaatctactgatgatgggcaagatacagctccaaagcaggttcttgcaaaggcaactgctgttcagaggttaggtacaactggtcagaaaaatgtcaggcttgcaaaatcagatggcacggagagaaaaggtcctaactctcaacgttcttcatctgttgtatcaaaaagcaacgggacagccgagaaacagaangaccttctaggcttggcacaaaganctgtagagangatacatttacaaggcnaaac

SEQ ID NO: 6208 - DNA, 498 bp, Arabidopsis thaliana
  unsure at all n locations
  Clone ID: LIB23-010-Q1-E2-G8
tgnccgtaccgaaaccggaattcnggncgtcgacccacgcgtccgctcaagctctcttcttctgcctccaaatctcatctcttgccagctttctccatctccagatgcttctcctcagtgttggaaggacttaagtatgcaaattcacatgagtgggtgaaacatgaaggctcagttgctacaattggtatcactgaccatgcgcaggaccatttaggagaagttgtgtttgtggagctgcctgaagcaaacagttcagtgagcaaagaaaaaagctttggagctgttgagagtgttaaggccacaagtgagattctatctccaatctctggtgaagtcattgaggttaacacaaagctcancgagtcacctggtttgatnaaactcaagcccttatgaagatgggttggatgataaanggtgaaaccgaacagccccgccggagttggnagctcctgatgggtccaaanggaatacacnaagttctgcgaaagaaaa

SEQ ID NO: 6209 - DNA, 461 bp, Arabidopsis thaliana
  unsure at all n locations
  Clone ID: LIB23-010-Q1-E2-H11
acgcgtccgctcnctttctcctctgtttcatcaaactcttcatcagtgcttcttattttcttcaaagcttcaaatttctttttttccttcttgcaatggcaaaatcgaagaaaatttctacaggtcaaatatttggttgtgagagtctccttgggtgcattttccagagctggagccctcgccgtcgaaaaccctctttaccggaaaaggatcatcgggcaaaagataacttgtcttccaagtcatcaacaaccgttacaaaccctaaaatcctcccaagaaaatccaccgatacttcttctcaaccaaagaaatctgactcccagaaaccccaacaaaagccaaaaccagatgagaatcacccgcgaaaatcatcggaatccgccagaaaatcatctgattccgcaagaaaatcgatttcgtcaggctcatcaagaacaagagagcaagagantctcact

SEQ ID NO: 6210 - DNA, 455 bp, Arabidopsis thaliana
  Clone ID: LIB23-010-Q1-E2-E5
acgcgtccggtttgatcgtattggcttataacccactaggatggaagcgagtggacattgtccggcttcctgttgtgggcggagacgtttcggtacatgactctgagggacacgaagttgagtctcaacttgttccatttactgatgaatatgtggccttaaggaaatatcatgtagaggcatacttaggtcaaagccctacacaggtgccaaagtattggcttgtgttttcagtaactgtgcctcctcttggcttcactacttacactatctccactgctaagaaaacagatggatattctagcaaatcatacgtctccaatatcctaaaaggcgaacagtcaataattaacattggtcatgggcatctgaagcttagtttttcccactgatcaagggacagcaatcaattatgttaacggcagaacctcgatgacagaaccagtcaaacaaga

SEQ ID NO: 6211 - DNA, 448 bp, Arabidopsis thaliana
  unsure at all n locations
  Clone ID: LIB23-009-Q1-E2-G8
acgcgtccgatcccaccaaagaagaaactggaggagtancgganattgctgagtcttttggtaatatggaagtgactgatgagtctcctgatcagaagccaggacaatttgaaagagacttgtcgacgagaagcaaagaattcanagagtttgatcaggactttgactctgttctcggtaaggattcgccggcgaaatttccaggtgaatcaggagttgttttcccggtgggctttggtgacgagtcaggagctgagctggaaaaagattttccgacgagaagtcatgattttgatatgacagactgaaactggaatggacacgaattctccatcaagaagccatgaatttgatccgaagactgaatctggaaacgacnagaaatcccccgaatgggccttggtanttaaatccagganctgagctggaaaaaagaanttgattcaga

SEQ ID NO: 6212 - DNA, 456 bp, Arabidopsis thaliana
  unsure at all n locations
  Clone ID: LIB23-009-Q1-E2-H12
cgngtccgaaaanaaaaaaaacatgaaagtaacatgagatctctcttattagccgtgtgcctggttcttgctttacactgcggtgaagcanccgtgtcttgcaacacggtgattgcggatctttacncttgcttatcctacgtgactcagggcggaccggtcccaaccctctgctgcaacggtctcacaacactcaagagtcaggctcaaacttctgtggaccgtcagggggtctgtcgttgcatcaaatctgctattggaggactcactctctctcctagaaccatccaaaatgctttggattgccttctaaatgtggtgtcgatctcccttacaagttcancccttccactgactgcgacagtatccaagttgagacaaagcaagaaaatccttaaagggaaagctactacaaggaactataataacctaataattaataaatganggcaattg

SEQ ID NO: 6213 - DNA, 481 bp, Arabidopsis thaliana
  unsure at all n locations
  Clone ID: LIB23-009-Q1-E2-H2
ctggtggtcacataccgggtcgncccacgcgtccgccnanncnnnnnnnnnnnnnnnnnnnnnnnnnnnnnnnnnnnnnnnnnnnnnnnnnnnnnnnnnnnnnnnnnnnnnnnnnnnnctaacaagtttccggagaggcaaccgatcggnacttcggctcagagtgacaaggactacannnagccaccacctgcgccgttgttcgancccggcganctagcttcatggtccttctgganagctgggattgctgagtttatanctacgtttttgttcctgtacatcactgttttgactgttatgggtgtgaagaggtcaccgaacatgtgtgcttccgtcggnatccaaggtatcgcttgggctttcggtggtatgatcttcgctctcgtctactgcaacgctggtatctcccggtggacacatcancccaagcngtttacgttccgtttggtccttanctanggaagccttcgctcacaac

SEQ ID NO: 6214 - DNA, 415 bp, Arabidopsis thaliana
  unsure at all n locations
  Clone ID: LIB23-009-Q1-E2-H6
tttttttttttttggagttagaatgctatgaattccaaaccagagaagattcaaatanaacagagactaaaaaggctgttcanacagtaataattcntgcacatgaacactaaaccagaacgataacaggaaacaaagatacagtcagtactcaagtagtttgagggcacctacggaaagcaagtaatactacagagggtagacgttccagtgcttaangatgaaacatcatcagtacaagcaaacgtgtttttcatcatacaccgttgtcacttncacaagtggctgcngtcagtccgcagcatacggnnaattgactttcgacaagcancatcanctttgcgcagaggagcaaggccaaccaggcagatggggacctctcaatnccacgccnttcagggngaaatctccttaa

SEQ ID NO: 6215 - DNA, 448 bp, Arabidopsis thaliana
  unsure at all n locations
  Clone ID: LIB23-010-Q1-E1-A3
acgcgtccgcaaaatgctcacgacacctccacgaacnnnnnnnnnnnnnnnnnnnnnnnnnnnnnnnnnnnnnnnnnnnnnnnnnnnnnnnnnnnnnnnnnnncaatcgaactctgtatacaactctttcctcaagtgtttctccgacaagacgaaatctccacaatcccaaatcactgacaatgtcttctctcagacaaaccctgctttctcctccgttcttcgtgcttacatccgcaatgcgaggttcaacacttcctctactcttaaacccaccatcataatcactcctcgctccgagagccacgtcagcgccgccgtcacttgctcaaaaaccctaaatttcctcctcaaaatccgaagcggcggccatgactacgatggtctctcttacatttccgacaaaccatttttcatcctcgacatgtcgaatatccgtgacgtctct

SEQ ID NO: 6216 - DNA, 441 bp, Arabidopsis thaliana
  Clone ID: LIB23-010-Q1-E1-A6
acgcgtccgctcctccttcaataatttctgcaaaccctaactttctcattcggcgctcaagtttctctccaccccttcgagatttggtgcgatgatgttgcgtgctgtttttaggagagcttccattagaggctcttcttctgcttcgggattgggaaaatcattgcaatcctctcgtgttgcagtgtctgctcaatttcattctgtttcagcaacagagacgttggtgcctcgtggaaaccatgctcatagcttccatcaccgttcttgtccagggtgtccagactgttcaaggactattatcaacggttaccaaggcacagccctgcaaagatgggtcaggcccttttcatctgatagtggggatgtcgtggaagctgttgtgccacacatgggtgaatcaatcactgatggcacctaaccgcctttctgaagaaacct

SEQ ID NO: 6217 - DNA, 446 bp, Arabidopsis thaliana
  unsure at all n locations
  Clone ID: LIB23-010-Q1-E1-A7
acgcgtccgcggacgcgtgggaaatcactcgagaattcgctattttatcaccaatcttcttgaatcctctcatccaatcgtctgattctcatctttctccgttacttgtggatcttacgcaatgtatagagtttttgcgagccgagcactgagagctaagtctctctgtgacaaatcatccacctcgcttgcttctttgactctctccagattgaatcattccataccttttgctaccgtagatgccgaggagctctctggtgctcatcctgctgaagtacagagctttgtgcagggaaagtggataggatcgtcaaatcataacacgcttctagatcctctaaatggagaaccgtttatcaaagttgcggaagtggatgaatcaagaactcaaccatttgtggacaagcttatcccantgcccgaaacaatggnctccaaaaccc

SEQ ID NO: 6218 - DNA, 441 bp, Arabidopsis thaliana
  Clone ID: LIB23-010-Q1-E1-A8
acgcgtccggttcaattcactaaaccaatgaaaatgcaagcagttcttgttatcttggttttctccggtttactttcggttaagacagcgttagcagcacgacatgtgatcggcgggagccaaggctgggaacaatccgttgattttgattcttggtcttctgatcaatctttcaaagtcggcgaccaaatcgtttttaagtattcagaactacacagcgttgtggagctaggaagtgaaacagcatacaagagttgtgacctgggaacatcagttaattccttaagctctggaaacgacgtcgttaagctttctaaaaccggtactcgttacttcgcttgtggaaccgttgggcattgcgaacaaggcatgaagattaaagtcaacgttgtctcttctgactccaaatccgcttcctctccttcaagttcaagttcgggt

SEQ ID NO: 6219 - DNA, 444 bp, Arabidopsis thaliana
  Clone ID: LIB23-010-Q1-E1-B2
acgcgtccggagctttttctctctgggtttagggttccggtaattttgcgacgacaccgagcgattcgtgcctccctccccttcctttgacttcggttctaacttgattaccagtgagaagtaggctaagatggaaatcatgtcaagagagaatgagactgctttgtcaggtcctaggccgatggaatggtctaccgtcccacacagtgcttctcaaggacctggtcccaatggcaagaaccggacctcgagcttggaagcacctatcatgttgctaagtggacatccgagtgctgtctataccatgaagttcaatcctgctggaactctgattgcatctggatcccatgacagagaaatcttcctctggagagttcacggggactgcaaaaacttcatggttttgaaaggtcacaaagaacgccatccttgatctcaatggac

SEQ ID NO: 6220 - DNA, 444 bp, Arabidopsis thaliana
  unsure at all n locations
  Clone ID: LIB23-010-Q1-E1-B4
acgcgtccgactcaatcgagttcggattgcttccccttactccgttcggcttctgtcagtaaaacctatttcaaatgtcgatgatgcgaagtttcgatctcaggaagaagaagatcagtccagttacgatcagaaaacagtatgcgaagctctcacatgttacagcaacgattggcaaaaggcgttggagtttttcaactgggtcgagagagaatccggattcagacataccaccgagacattcaatcgggtgatcgatattctgggtaagtatttcgagtttgaaatttcttgggctttgattaaccgcatgatcggaaacacggaatctgtgccgaatcacgtcacgtttcgtatagtctttaagcgttatgtgacggctcatcttgttcangaggctattgatgcgtatgataaattggatgatttcaatttgagagatga

SEQ ID NO: 6221 - DNA, 441 bp, Arabidopsis thaliana
  Clone ID: LIB23-010-Q1-E1-B8
acgcgtccgcttccttcgtgtggaacagccatggctatggagtttctgaggagcagtagaagaatattggaatcttctggatgcgcgatcgctttgatttttctgctcttcatccatggagctcactcattctatctcccaggtgttgctcctcaggatttcgagaagggtgatgagctgaaggtgaaagtgaataaattaacttccataaagactcagcttccatactcgtattactcccttcctttttgtcgccctagcaagattgtggacagtactgagaatcttggagaagtgcttcggggtgaccggattgagaatgccccatactcgtttaaaatgcgggaggcacaaatgtgcaatattctcggccgggtcactcttgatgccaagacagctaaagcgtttaaagaaaagatcgatgatgagtaccgggtcaac

SEQ ID NO: 6222 - DNA, 444 bp, Arabidopsis thaliana
  Clone ID: LIB23-010-Q1-E1-C2
acgcgtccgatgtgactgaaatattcaagcacaaatcagaacatggttcctgtcttgtttggagaagcactatgaaccaaacctgaagcccttgtgatttagagttacagagatacattaaaagggttcgggatttcacagtagcattcatagacagttcaggttagttaaacgtgcttcacaaaaagaaaaaaaacagaagtgtagttgaggtcacaccacaggtttatgctttgctcttaatcaaatatttatctttctcttttttgttatttgtcctttttaattccatttgctttattccttacttgtggggattaaatgtttgcagagaaagataattcgactgaataaatacacttttacctgtatacttgttatatatttgtgtcaccccaaagtgaaagctgcagactttgaaacacagaaattctcccaatggta

SEQ ID NO: 6223 - DNA, 445 bp, Arabidopsis thaliana
  Clone ID: LIB23-010-Q1-E1-C3
acgcgtccgggttcttgtgactcaagtactttgacacattgaaggaaattggtgcttcttcgaagtcaaactcggtgttcataccgcacggtccaggcgctgttagggacattgcttcacagatcagggatggtcttcttcagggtaactctgctgctgagtagagaaatgtctcaaagtacaaaaaggctttttcagagttttagagttgtgttactacttgctactcagtttatcttttagcggttggctctatatgggttcttaaatttcttatcgtttctctcttctaggcttgtggacttgatccattttcttgttttatgggtttgtggatagagtttgggcttgaaaaatatttgtgttattttgggttttaatgtcgttaactcgttattaatgtttaaacagtggtaaagaatttgttaacgagaaaaaaaaaaaa

SEQ ID NO: 6224 - DNA, 448 bp, Arabidopsis thaliana
  unsure at all n locations
  Clone ID: LIB23-010-Q1-E1-C5
acgcgtccgcggacgcgtgggcggacgcgtgggtttcgagaaattcgaacccatatttggagaagtcgtacccgaacgttcggatccgggttcgggtctactccggcgatgtctcttccacgtctacgcttccgattcgtataacttaacagttcatgtcactgacttcatctccggtgtctggacgacgatcctctccgtctcgcagctagacgatatgagggatactgttgggattggtggttcgtggtctgagttcgtcgattatactgttgcttccttgaaatccgacaatgtgaagcttctcttgggagaaacttcagtttcaaatggtgtcaaaactgcgcgattagtttctcagaaagccaaaggaatgcctcgcataaatgttcctttaacaaagatggtgggaatcatctgctantgaancaatgggcaaatctgtctc

SEQ ID NO: 6225 - DNA, 478 bp, Arabidopsis thaliana
  unsure at all n locations
  Clone ID: LIB23-009-Q1-E2-G6
ccgtagcgcgtcaaagaattnantngcnggtcgacgagctcactaatcggcggccgccctttttttttttttttggagttagaatgctatgaattccaaaccagagaagattcaaataaaacagagactaaaaaggctgttcaaacagtaataattcttgcacatgaacactaaaccagaacgataacaggaaacaaagatacagtcagtactcagtagtttgagggcacctacggaaagcaagtaatactacagagggtagacgttccagtgcttaatgatgaaacatcatcagtacaagcaaacgtgtttttcatcatacaccgtatcactttcacaagtggctgcantcattcccgcagcatancgagattgacttcgagaagcagcatcaacttttgcgccagaggagcaaggctaccangaaaatggggacctcccaatgccacgccttcanggagacatctcccttanaacg

SEQ ID NO: 6226 - DNA, 461 bp, Arabidopsis thaliana
  unsure at all n locations
  Clone ID: LIB23-009-Q1-E2-D11
acgcgtccggccatttggggaagaaccaangaaactgatgatcatagaggatgggttttcccggattcggataccgagctccctggagctgancctgactatcttaatggtgccaaaagtgtgaganaactcnacgagattgctancccaaactatgaagggaagtacactgttcctgttctttgggataanaagcttaagactgttgttaacaatgagagttcagagataatccggatgttcaacactgagttcaatggtattgcnaaaaccccgtcacttgacctttatccttcncatctcatagacgtaatcancgagactaacggatgggttttcaacggactnaacaacggtgtttatnaatntgggtttgcaaagnntcaagaatccctatngtgaagcacntgaaccacttacatttntgcantanatcncattcaangaagttcccggaaaac

SEQ ID NO: 6227 - DNA, 436 bp, Arabidopsis thaliana
  unsure at all n locations
  Clone ID: LIB23-009-Q1-E2-D8
acgcgtccgancgtgagaaactttgnnnnnnnnnnnnnnnnnnnnnnnnnnnnnnnnnnnnnnnnattggtttggtctccggaaacagcatcaaaggcttatatagacancgttaaatcggtnagttttttttttattttccggtgagttgtgaaggaataataacacacgcttcttctctccagttctcgaaaactcagatcttaattttgttaaagattcatggnttgttcttgtaacgatttttttcttttctttttggttcagtgtgagaatcttgaaacgccggacncggtggagctgatancggngatggcagcgggatggaacgtgaagctgatcgtgganacttggtcanaaaggagacncaanaacttcaagtantggattaagacgtnccangcagacacgccaaacgctaaacacatntgtataa

SEQ ID NO: 6228 - DNA, 462 bp, Arabidopsis thaliana
  unsure at all n locations
  Clone ID: LIB23-009-Q1-E2-E11
acgcgtccggaanagtcagcatcgttttgcttgcttgtgcgtttctctcgaactctctccatggctgttgcgctccaattcagccgattatgcgttcgaccggatactttcgtgcgggagaatcatctctctggatccggatctctccgccgccggaaagctttatcagtccggtgctcgtctggcgatgagaacgctccttcgccatcggtggtgatggactccgatttcgacgccaaggtgttccgtaagaacttgacgagaagcgataattacaatcgtaaagggttcggtcataaggaggagacactcaagctcatgaatcgagagtacaccagtgatatattggaagacactgaaaacanatgggtatacttattcttggggganatgttactgtgaaactcgctaaagcatatggtttttgctgnggtgttgaacgttgctgttcaaaattgcata

SEQ ID NO: 6229 - DNA, 498 bp, Arabidopsis thaliana
  unsure at all n locations
  Clone ID: LIB23-009-Q1-E2-E2
aactgttttcctgggcnccnacgggtccggaaaatcccgggtcgacccacgcgtccgaataatcgaaacccagcacgagaaaaatgcatgatttttgcttcactatcccgtacgggatgcttctcatcggcggaggatttatcgggtacatgaagaaaggaagtataacatctttcgccggaggtgcaggcactggattattactcattctcgctggttatatcagtctcaaagcttttgagaagaagaagaattccactattgctatggttcttcagacagtcatcgcagctgctctcacactagtcatgggacagcgttacttgctgactggaaagattatgccggctggtttggttgctgggatcagtgctctcatgacctgtttttacgtatacaagatcgctactggtggcaataaatttccagcaaaagctgaatgatggttctgctacatgcagatganactaacccgttgttgaatttgtcnataaaatt

SEQ ID NO: 6230 - DNA, 446 bp, Arabidopsis thaliana
  unsure at all n locations
  Clone ID: LIB23-009-Q1-E2-E6
acgcgtccgnaaggtgnnatcaggaantantgtantctcgcacanaagaancatngancttggtnaaagtnagaaagacaggggctanctgaacctgcatcttccccgacggttcanaagacctctgtttccggagaggatttccagctcgcgccgccgaaattgggcgtgattttcgtgatctcttcgcttctgtgttcgctttatctttaccttctctgtttccactacaatgttgacaatgagctcaagcgtccgatcctcattaacgctgggcttagcttggttggattctttgtcacactcaagttgattcctgtagctgctagatacgttctgaggcgtaatatgtttggttttgatatcaacaaaagangcactcctcaagganaagttagagtgcctgantcattgggaattgttgtcgtattgtcctcctgataatg

SEQ ID NO: 6231 - DNA, 431 bp, Arabidopsis thaliana
  unsure at all n locations
  Clone ID: LIB23-009-Q1-E2-F1
tttttttttttttggagttagaatgctatgaattccanaccagacaagattcanatanaacanagactaaaaaggctgttcaaacagtaataattcttgcacatgaacactaaaccagaacgataacaggaaacaaagatacagtcagtactcagtagtttgagggcacctacggaaagcaagtaatactacagagggtagacgttccagtgcttaatgatgaaacatcatcagtacaagcaaacgtgtttttcatcatacaccgtatcactttcacaagtggctgcagtcantccgcagcataaggagattgacttcgangaagccagcatncactttgcccaanangancaagggctatcatgaagatgggganctcctcattgctaacgcctttcaaggagacatctcctnagaaggagaaggccttt

SEQ ID NO: 6232 - DNA, 477 bp, Arabidopsis thaliana
  unsure at all n locations
  Clone ID: LIB23-009-Q1-E2-F12
acgcgtccgcaanatttacggtttcagagatcggctgattttcacatccacaagtatggcgactcaaatcagcaagaagagaaagtttgtagcggatggtgtattctacgctgaattgaatgaggttctcacaagagagctagcagaggatggttactctggtgttgaggttagggttactccaatgaggactgagattatcatcagagctactcgtactcagaatgttcttggtgagaaggggangagaattanggaattgacatctcttgtccagaanagattcaagtttccagttgacagtgttgagctctatgctgagaaaggtaacaacanaagtctctgttccattgctcaaggctgaatccnctacgttacaaaccttctcggtgggtccctgctgttcccaagggcctgttaatggtgtttttganaatttggtaatggganaattggagcctaaagggaatttaaggt

SEQ ID NO: 6233 - DNA, 457 bp, Arabidopsis thaliana
  unsure at all n locations
  Clone ID: LIB23-009-Q1-E2-F2
acgcgtccgccnacgcgtccgcggacgcgtgggcggacgcgtgggcaccgcacctattgatcccaatgccaaagaggtaacgaagcgcgtggactcaaacgagaaacattggtcgggatggaactggagaacggaaggtgacgttatggttaacggagcttttttcgtgccgtcaggtgacggagtgagcccagcgtatgccagagccaccagtgttcagcctaaagccgccgcgatcattgaccagctcacggtcaatgccggcgttttcggcgatccaagtgggagaaacggccaaggaggaagctttcccggaattacgaacggtggtgggacatcacgcgcggttacagtaaaagtggacctgccggcggtggcagcggcagtgacagttgatgatgggcttttcacattgataatccggtaacaatagccggtgccggtggctctaaaggcc

SEQ ID NO: 6234 - DNA, 492 bp, Arabidopsis thaliana
  unsure at all n locations
  Clone ID: LIB23-009-Q1-E2-F5
aactttctccgcgtcgtaccggtcaaaaattcccgggtcgacccacgcgtccgaatcccctgaaagcttataggctccgttgaacagttataacttgtgaaagttgaatccttttaaaccgacagaggaagatctcagatggcaaacaagataagtgaaactgcttccaagatggacgattatgaggtcgtggaacagatcggacgangcgcttttggttctgcttttcttgtaattcacaagtccgagagacgaaagtatgtggttaagaagattcgtttggctaaacaaacagagagatgcaagcttgctgcaatccaagagatgagtttgatatcaaagcttaagagtccttatantgtggagtacaaagattcttgggttgaaaaggattgtgtatgcattgtaactagttattgtgagggtggagacatgactcanatgataaagaaatcaagaaggantattcgcgtccgaagaaaaaccctgtan

SEQ ID NO: 6235 - DNA, 445 bp, Arabidopsis thaliana
  unsure at all n locations
  Clone ID: LIB23-009-Q1-E2-F9
acgcgtccgggatcgccatatcgttgatcaagaccagagcgtcgtcgatccggccgagtttgcagagacgagcgatgagagtttcgtangagtgtttccgagtgtagccggcgtcggtctgaggcaaantacggcggagatcttctaaggaggaggagtaagagtctgtgtttgttaggaatttgaaagtanctgtcgtgttgaaacacgcgtttacgacgcggctgttgaggagacgacgtacggcttcgaaatcgccggagcttccggctttgaagatgaggttatcgaattcgacgcaagtacnacgaccaaggtgaagcanttggattgggatttacggtggagaatgaacgtcccgagattgantgaagcagaaatctggaantgttcgcttccttaacgaatcgtcggaaatagacatcgtccgattcangtcaaccgg

SEQ ID NO: 6236 - DNA, 500 bp, Arabidopsis thaliana
  unsure at all n locations
  Clone ID: LIB23-009-Q1-E2-G11
gtcttctggcngccacggtccgaaanacccgggtcgacccacgcgtccgcaaaaaacgcggattaaagcccgcgaaacagccttggcttaacctttagaattacnacccaccaaaatacgcaaactccaagctcaaatacacagaccaattcagatttcttgataaagccgctatcttgactcctgaagacaagttgcagccagatggtaagcctgctgatccttggaagctctgtacaatgcaacaagttgaagaagtgaagtgcatcgtgagagtgcttcctatatggtttgcatcatcaatttacgacttaaccataactcaacatatggacttatcccgtcttccangcccttcagancnacngtcgcttaggctcaggangttttgtgattcccgnagccacctangtggttttcttgatgacggggaatgacagttttcatcatagtctacgaccgtgtacttgtccaaccatgagaagaattactgtctaaac

SEQ ID NO: 6237 - DNA, 454 bp, Arabidopsis thaliana
  unsure at all n locations
  Clone ID: LIB23-009-Q1-E2-G2
acgcgtccgtgatcaattgtcatccgaatgtctacgagacagattaatatctgatgaacgatatagtatggcggtgtatatgtgcaagaaatgcaagattgatgttttccccgtgtggaaagcatggggtcttgctttgttacggatggagcgctatgctcaagctcgagtcaaattcaagcaagcctttcaattaaagggggaagacattcctgatgtcattcangagataataaatacaatagaaggaggtccgcctgtggatgtgtcaattgtacgttccatgtatgaccatttggcgaaaagcgcacctacaattttggacgattctttatcagcagactcatacctaaatgttctgcatatgccatccactttccctcgttcaaaagangtcncgganatntctgggaatccggaaaaagaatagttcctgtacctgggtcagactttg

SEQ ID NO: 6238 - DNA, 438 bp, Arabidopsis thaliana
  unsure at all n locations
  Clone ID: LIB23-009-Q1-E2-G5
acgcgtccgaanngtgactgtgatcangtgaaggagctgcttgaagatgctgaaacaagtagagtcattcagtttttgatgggtttaaatgatgactttaatactatcatgagtcagattcttaacatgaagcctagacctggactgaatgaantttacaacatgcttgatcaagatgagagtcancgattggttggacatgcttcganacctactccctctccggctgcttttcagactcaaggtttgcttactgaacagaatccaatattgatggctcatggaaacttcaagaaacccactgtactcactgcaatccgtattggtcacactgttgacaagtgttacaaagttcaatggnnaccctccgggaaaatcaaagggcaaatcaanaaaagttccttgtgtacgganttncaaaatccnaacagcctccaa

SEQ ID NO: 6239 - DNA, 477 bp, Arabidopsis thaliana
  unsure at all n locations
  Clone ID: LIB23-009-Q1-E2-B9
accgggtcgacccacgcgtccgattttctgtttgcatacacttgtatatatttatattaacagtccaaaattcttcgaaattgtcccgagctttgagcatataaaaaatgtcttcgataatccatggagctggagctgctacgacgacgttatcgacgtttaattccgtcgattccaagaaactcttcgttgctccttctcgcacaaatctttcagtgaggagccagagatatatagtggctggatctgatgcgagtaagaagagctttggttctggacttagagttcgtcactctcagaaattgattccaaatgctgttgcgacnaaggaggcggatacgtctgcgagcactgggacatgaactattgcttttcgaaggctcttcaagaangtctggaacaagagatggacaagagattcacatgtaagttgttatgggtgaaagatgttggncattacggangttcctacaaagg

SEQ ID NO: 6240 - DNA, 437 bp, Arabidopsis thaliana
  Clone ID: LIB23-009-Q1-E1-F5
acgcgtccgaatcccctgaaagcttataggctccgttgaacagttataacttgtgaaagttgaatccttttaaaccgacagaggaagatctcagatggcaaacaagataagtgaaactgcttccaagatggacgattatgaggtcgtggaacagatcggacgaggcgcttttggttctgcttttcttgtaattcacaagtccgagagacgaaagtatgtggttaagaagattcgtttggctaaacaaacagagagatgcaagcttgctgcaatccaagagatgagtttgatatcaaagcttaagagtccttatattgtggagtacaaagattcttgggttgaaaaggattgtgtatgcattgtaactagttattgtgagggtggagacatgactcaaatgataaagaaatcaagaggagtattcgcgtccgaagaaa

SEQ ID NO: 6241 - DNA, 436 bp, Arabidopsis thaliana
  unsure at all n locations
  Clone ID: LIB23-009-Q1-E1-F6
acgcgtccgcccacgcgtccggtcatggtttgcctttgtgaggaaggtcgttgcttgagaaaaacccattttctaaaacccttttctacctccatcgatggctctgtagccgagcttccccgtcttgatgatcaacaacgtctctctgattcttctctgcataatacctcttctgggttttgggctgcagatcatcatttcttcctatcatggcttggaaaaatgcaagctttgtatgaacccatttggaaaaaagctggaatttttgaagcaatcaaggcatccacttacaaaatcataaaagacacgtcctcgattctctccattgccgagaaatggtgttctgaaaccaaatctttcatctttccatggggtgaagcaacaattacgttanaggatgtgatggtgcttctaaggttcnctgttttgggttccc

SEQ ID NO: 6242 - DNA, 402 bp, Arabidopsis thaliana
  unsure at all n locations
  Clone ID: LIB23-009-Q1-E1-F7
acgcgtccgcttttctcttttgtctcccctaaatttagtttctccttttaagtcagattccttcctaatcccattctttcagtcttctctttcgcccttctgagttcaacaactgtgttatctctatgaacagttcctttgatgaagaanacaaagtgaaagttgctgtctttataaccaggatttggtaagtcccattgtntcagtgggcaattcttgccgtggatctttcaaggacaaacncgangaaggcgataacaatgagcctgaagattactctaaaaccnctaccaccaacttgtcgnctaattccgaccattcancgaacgntgcagacatcantgctcaagnatctccaaagacagcaacaggaacaacaacaggaaagatcgaggtcntgtg

SEQ ID NO: 6243 - DNA, 395 bp, Arabidopsis thaliana
  unsure at all n locations
  Clone ID: LIB23-009-Q1-E1-F8
acgcgtccgaaaaataaaataaagaaaaggaacagtttattttcaaaaattaaaaactgttcttattctccacatccacatgatctctacaatctccaaacactgttttctttcacaccttacacaaaaaaaaaactgttcttttaaataattaaaaactgtttctttgtttttttattattattttgtaatattgatacaaattttttgtttttataacactaatgcatatgtttgatattctcaaaatattttaatatattttataaattaatatttaattaactctgcataacagtggcataattctagtatatatataattaaagaggtttaagaaataaggaaaatttacgtactcatcanattattttactacagacaaaattttgcca

SEQ ID NO: 6244 - DNA, 480 bp, Arabidopsis thaliana
  unsure at all n locations
  Clone ID: LIB23-009-Q1-E1-G2
ctttncccgcccgtaccggtccanaattcccggggtcgacccacgcgtccgtgatcaattgtcatccgaatgtctacgagacagattaatatctgatgaacgatatagtatggcggtgtatatgtgcaagaaatgcaagattgatgttttccccgtgtggaaagcatggggtcttgctttgttacggatggagcgctatgctcaagctcgagtcaaattcaagcaagcctttcaattaaagggggaagacattcctgatgtcattcaggagataataaatacaatagaaggaggtccgcctgtggatgtgtcaattgtacgttccatgtatgaccatttggcgaaaagcgcacctacaattttggacgattctttatcagcagactcatacctaaatgttctgcatatgccatccactttccctcgttcagagaagtcccggagatcctggaatcggaaaagaataattctgtacctggt

SEQ ID NO: 6245 - DNA, 439 bp, Arabidopsis thaliana
  unsure at all n locations
  Clone ID: LIB23-009-Q1-E1-G5
acgcgtccgaagtgtgactgtgatcaagtgaaggagctgcttgaagatgctgaaacaagtagagtcattcagtttttgatgggtttaaatgatgactttaatactatcatgagtcagattcttaacatgaagcctagacctggactgaatgaaatttacaacatgcttgatcaagatgagagtcagcgattggttggacatgcttcgaaacctactccctctccggctgcttttcagactcaaggtttgcttactgaacagaatccaatattgatggctcagggaaacttcaagaaacccaaatgtactcactgcaatcgtattggtcacactgttgacaagtgttacaaagttcatggctatcctccgggacatccaanggcaaatcaacagagttcttgtgtaggcagtacaaatctaacaaggcatccgatnagtc

SEQ ID NO: 6246 - DNA, 440 bp, Arabidopsis thaliana
  unsure at all n locations
  Clone ID: LIB23-009-Q1-E1-G8
acgcgtccgatcccaccaaagaagaaactggaggagtaccggagattgctgagtcttttggtaatatggaagtgactgatgagtctcctgatcagaagccaggacaatttgaaagagacttgtcgacgagaagcaaagaattcaaagagtttgatcaggactttgactctgttctcggtaaggattcgccggcgaaatttccaggtgaatcaggagttgttttcccggtgggctttggtgacgagtcaggagctgagctggaaaaagattttccgacgagaagtcatgattttgatatgaagactgaaactggaatggacacgaattctccatcaagaagccatgaatttgatctgaagactgaatctggaaacgacaaganttctcccgatgggctttgggtagtgaatcaaganctganctgggaaaaagaatttgtc

SEQ ID NO: 6247 - DNA, 446 bp, Arabidopsis thaliana
  unsure at all n locations
  Clone ID: LIB23-009-Q1-E1-H1
acgcgtccgcccacgcgtccgagtgcgtgcacggtgcaccacgaatccacgatccagtgagcagcagcaactccatctccggagctctagattcagataagaacaatggcgattccgatgcctactcgccagctattcatcgacggcgaatggagagaacccatcttgaagaagcgaatcccgatcgttaatccagctactgaagaggtcattgggtgatattccctgcagctacaacggaggacgtggatgttgctgtcaacgctgctcgaaagagcattatcaaggaataaanggaaaagatttgggccaaaagcacctggagctgtttcgtgctaaagtattacgttctattgctgccaaaggtaaatgaaagaaaagacggatntggaaaactcnangcgcttgantgtggtaaaccatttggtgaaacantatgggatatg

SEQ ID NO: 6248 - DNA, 442 bp, Arabidopsis thaliana
  unsure at all n locations
  Clone ID: LIB23-009-Q1-E1-H3
acgcgtccgcggacgcgtgggcggacgcgtgggttcgtcttcttcaacttccagagagagaacgtagcaaaacagggcttaccggagcagaacggaaaaacccatttcgaagctggagatgatcgtgctaaggagtacgtcagtctcttgaaatcgaacgatccaattggattcaacattgttgatgttcttgcttggggttctattggacacatcgttgcttactacatcttggctacttccagcaatggatacgacccaagcttctttggatgattcgtttcannnnnnnnnnnnnnnnnnnnnnnnnnnnnnnnnnnnnnnnnnnnnnnnnnnnnnnnnnnnnnnnnnnnncctctgtttcttccttcngttgttgttggttgttgtccaaagancttgtcccctccttttgcaaaatgttttaattccccatttanaa

SEQ ID NO: 6249 - DNA, 418 bp, Arabidopsis thaliana
  unsure at all n locations
  Clone ID: LIB23-009-Q1-E1-H5
acgcgtcngcccacgcgtccgggctacttccttcttccggcgactcgctaggtcagctccgattacattccctgtcgcatttggatctcaaagcaaatctggntctggcgctttccggttctccaccggtgcaatcncggcactttccggtggattctcctattactacttgacatccggcaacaatctggtttatctggatcaagctaaggaagagacaggaccaaaaaccgctctaaaccctgataaatggctcgagttcaagcttcaagacactgctangagttagccacaacactcagttgttcaagttctcatttgacccctcaactgagttgggtctaaatgttggcttcttgtcncctgaacaaangggctcccttaaggctanaaanggctggaaagggaaaaacgaana

SEQ ID NO: 6250 - DNA, 470 bp, Arabidopsis thaliana
  unsure at all n locations
  Clone ID: LIB23-009-Q1-E2-A11
cgggtcgacccacgcgtccgcccacaacgtccggggnattccnctcttnngtgatntcanagntctgttccgacatcantggcttttttagcgttgattggtcngctctactccgaaatcgtctgactttcacagcagcgatgttcggctcttacgtcccgttttaatcgggctctcgttcggcacctccagctttttcagtgaagatgaccgactcttttcccgacagcatacggctccatcagcggtgttggtcggattttagttttactttggccatagatgagttactctcaccttttggtctttgttttcccttcannaanttcagcaattatgtgttgggtgataacganttaagtgctangttgcctaaactgttgattntccgactcatgttgtttgaagctgggtttacaggaattaataatnatatttgcagnttaaaaattgaagagnaagaagaagat

SEQ ID NO: 6251 - DNA, 478 bp, Arabidopsis thaliana
  unsure at all n locations
  Clone ID: LIB23-009-Q1-E2-B1
tttttccgcgccccgtggtccgnaaaanaccggggtcgangcacgcgtccgcccacgcgtccgatcaattctcgcgattaagcanaaccctagatttattctactcttcgaagtcgatttcaatggaaggttcctcgtcagccatcgcgaggaagacatgggagctagagancaacattctcccagtggaaccaaccgattcagcctccgacagtatattccactacgacgacgcttcacaagccaaaatccagcaggagaagccatgggcctccgatcctaactacntcaagcgcgttcacatctcagcccttgctcttctcangatggtgngttcacgctcgctccggtgggcacaatcgagatcatgggtcntangcagggtaaanncganggtgatacaatcatcgttatggatgcttttgccttgcctgtgtgaangtactgagactacggtnaatgccagtctgatgcctat

SEQ ID NO: 6252 - DNA, 445 bp, Arabidopsis thaliana
  unsure at all n locations
  Clone ID: LIB23-009-Q1-E2-B2
acgcgtccgcccacgcgtccggaaaaactttggatcaatcaacaatggcggatctctctcttcctcccgattccctcttcctcggcttcgacagctctacccagtcaatgaaagcaactgtgttggattcgaacctgaacattatcaaaaccgaactcgttcatttcgattctgatcttcctcaatacaaaaccaaagacggggtttacagagacactactgtaaacggaagaatcgtatctccaactctcatgtgggtcgaagcatttgatctcattctccagaagctctctaacgccaatttcgatttcgccaaagttatcgctgtttcaggcaacgggcaacancaccggtagngtgtactggtcaaaagtagttctgaggtactganatnattggattcaaagagatcattganngaacaagctcgaaaagcttttcggtn

SEQ ID NO: 6253 - DNA, 446 bp, Arabidopsis thaliana
  unsure at all n locations
  Clone ID: LIB23-009-Q1-E2-B5
acgcgtccgtgtntttataggttgtgtatagtctttcttggtttcgatgtgttctttgttgttttctgcgttgcattggcttgtgttatcggcattgctgtttgctgctgcttgccttgcatcattgcagttctatacgccgtagcagaacaggaaggagcttcgaaagaagacattgaccaacttactaaattcaaattccgaaaggttggtgatactatgaaacacactgttgatgaagaacaaggacaaggagattctggaggagtgatgactgaatgtggtacagattcacccgttgaacatgctcttcctcatgaggatgcagaatgctgcatttgtctttccgcttatgaagacgagacagagctaagagaacttccttgtggccaccatttccattgcngttgtgtggataantggctttacataaatgcacttgtccc

SEQ ID NO: 6254 - DNA, 439 bp, Arabidopsis thaliana
  unsure at all n locations
  Clone ID: LIB23-009-Q1-E1-F2
acgcgtccgcccacgcgtccgcggacgcgtgggcggacgcgtgggcaccgcacctattgatcccaatgccaaagaggtaacgaagcgcgtggactcaaacgagaaacattggtcgggatggaactggagaacggaaggtgacgttatggttaacggagcttttttcgtgccgtcaggtgacggagtgagcccagcgtatgccagagccaccagtgttcagcctaaagccgccgcgatcattgaccagctcacggtcaatgccggcgttttcggcgatccaagtgggagaaacggccaaggaggaagctttcccggaattacgaacggtggtgggaccatcacgcgcggttacagtaaaagtggacctgccggcggtggcancggcagtgacagtgatgatgggcttttcacattgatattcggtaacaataacggtgcg

SEQ ID NO: 6255 - DNA, 447 bp, Arabidopsis thaliana
  unsure at all n locations
  Clone ID: LIB23-007-Q1-E1-D11
acgcgtccgaggatatctagggctaatgttgcttcttgatgagagacaagaagtgttgatgcttgtcacaaattcgttaaaacaagatcttaatcactcgaaccagtatgttgtaggacttgctctctgtgctttagggaatatttgttcagcagaaatggcccgtgatcttgcgccagaagtagaaagattaatccagtttcgtgaccctaatatccgaaagaaggcggcgctttgctctactagaataataaggaaagttccagatctagcagaaaacttcgtaaatgctgctgcttccttgcttaaagaaaagcatcatggggttcctataacangagttcaactttgttatgaattatgcacgattaatgatgaagccctagagtacttcaagaacgaaatgcacagaaggactggataaaaaactttganggatattactaa

SEQ ID NO: 6256 - DNA, 479 bp, Arabidopsis thaliana
  unsure at all n locations
  Clone ID: LIB23-007-Q1-E1-D3
ngtnccggtccaagaattcacgggtcgacccacgcgtccggttgttcccttatataaagaaactcttcctttcataccaaaaaaaaaaaaaaaatccattttcatttctcctcttaaaaaaccgccatgacnnnnnnnnnnnnnnnnnnnnnnnnnnnnnnnnnnnnnnnnnnnnnnnnaagctacgacggtggcttcatcggagccgccgatgcagaacatgacctcagagccactgatctccataatcatcgccatcgtcgccaccgtaaccaccatcgcggagaagagtttgagtactcagccatatcatgtagagcttactcagcctcattggacgagtttggcgccgtaggagacggtgtaacttcaaatacagcggcgtttcgcgacgcggtgtcacaacttaaccgtttcgcagactaaggtggctcaatggtaattggtcccgcccggacnggtgggctcaaccggaaact

SEQ ID NO: 6257 - DNA, 447 bp, Arabidopsis thaliana
  unsure at all n locations
  Clone ID: LIB23-007-Q1-E1-D4
aattcangggtcgacccacgcgtccgaggacgcgtgggcggacgcgtgggctctctctcactttcgaatatatcttagataacagagacacatactcttaagtttggtgaagaataagaagacaatgacgaaggaagtggttggtgataagagatctttctccgggaaagactatcaagacccaccacctgaacctctattcgacgctactgagcttgggaagtggtctttctacagagctctcatcgctgagttcatagccactctccttttcctctatgtcactattatgactgtcatcggttacaagagccagaccgntccagccctgaatcctgacaantgtanaggcnttgggcgtccttggtancncatgggcctttgggggcatgattttcancctcgtcnanngcaccnccggatctcnggngggaatattaacccggg

SEQ ID NO: 6258 - DNA, 440 bp, Arabidopsis thaliana
  Clone ID: LIB23-007-Q1-E1-D5
acgcgtccgcccacgcgtccggactactctcatcattgctcatcgcctttctaccattcgaaaagctgaccttgttgctgtgctacagcaaggaagtgtctctgagattggaacgcatgatgagcttttttccaagggagaaaatggagtctatgctaagctaattaaaatgcaagaagcagctcacgaaaccgccatgagcaatgcaagaaagagtagcgcaagaccgtcgagtgctagaaactcggttagctcgccaataatgactcggaattcgtcgtatggaagatcaccttattcacggagactatccgatttctcaacttctgattttagcctctccattgacgcttcgtcctaccaaaactatagaaacgaagaactggccttcaaggatcaagccaattcattctggcgactagctaaaatgaatctccaga

SEQ ID NO: 6259 - DNA, 440 bp, Arabidopsis thaliana
  unsure at all n locations
  Clone ID: LIB23-007-Q1-E1-D7
acgcgtccgcaacggtcgagagatggtgggtctggttcgagaacccttgaacgtatatgacaataatgcaatcagagtactcaacacgcgatctgagcaagtgggtcacatcgagcgtacagtagcagccgttctcgcgccgatgattgattctcacacgatcgtcgtcgagggtattgtacccaatactcgttctaactccaataggtacagaatcccttgtcaaattcatgtatttgcaaagttagaagcgtcctctactgtgaaatcgacgatttctagaggtgggttagtattgatttcggagtcagatacatcgtttgggttatctgaggctgttgtggttaaggaacagatgggaaatggagataagangagtgttgataagatttttaaacttgttgatganaatgtgaaattaatggggaaattggtaaccg

SEQ ID NO: 6260 - DNA, 463 bp, Arabidopsis thaliana
  unsure at all n locations
  Clone ID: LIB23-007-Q1-E1-E1
gtgccggtccaagaatnacggggtcgacgcacgccttcgttctcaaccgactccaaatncaaaanncaaccccccccaaccccaattccccgggtccaataactcaacgtcccaacccaaatttaacccttncgnaataaattttaacggggggaggatcaaatccgccgattctgttgtaacaagctactgtattttgggcttctcatttgatattggggaaacgaggagtagaggacgatggaaaatctgatctctctggttaacaagatacagagagcttgcacggctttaggagaccatggagactccagcgctttacctactctttgggattccttgcctgcgatngccgtcgttggtggtcagagctcaaggaagtctcagtcctggagaacatcntgggaaaaggacttttaacccgtggatntggcaatgttactccaaaggccccttgcctana

SEQ ID NO: 6261 - DNA, 443 bp, Arabidopsis thaliana
  unsure at all n locations
  Clone ID: LIB23-007-Q1-E1-E8
acgcgtccgcggaagagtattcaccangataacctaatttccaagactgagaggtttctctctcattccgtctacaagagcttgcgtgaatccattaaagctctcaaagcttgtgagtcagtctctcctttagccggatcgcttggtataacggaacagtgcatcgactctatagtctccagagcttcctcagctgatccttcactcttcggttggccagtaaacgatggcggcggaagaggaaacatctccgccaccgatctgcaacttatacccggcggcgcggcgaaatctcgaaagaaaccgagtagagattcgaacatggagctgtggtttgaagatctgacgcaactgagtcttccgatcttcaaaactgtgatcctatcaatgagatcaggagatctgagctccgatatcatagagagctgtttgatttgttacgc

SEQ ID NO: 6262 - DNA, 470 bp, Arabidopsis thaliana
  unsure at all n locations
  Clone ID: LIB23-007-Q1-E1-F11
ngcccggtccaagaataaccgggtcgacccacgcgtccggctttaatcatgcagcggcgactattgggaacaaaatgatagtagttggtggagagtctggtagtggcttgttggatgatgtacaggtgcttaactttgattcatgtacatggtccaccgcatcttcaaaagtttacttatcgccgagtagtcttcctctcatgatccctgcttggaaaggccattgcttggtctcttggggtaaaaaagtgctgttggtgggtggaaaaacagatcctagcagtgatagagtttcagtgtgggcatttgatactgattcggaatgctggtcactaatggatgcaaaaggagacttaccggtcagtcgcagcggtcacacagtggtgaaggctaattcggtattgatactattcggtggtgaagactctaagaagangaaactaaacgatctcanatgtttgatctcaaat

SEQ ID NO: 6263 - DNA, 409 bp, Arabidopsis thaliana
  unsure at all n locations
  Clone ID: LIB23-007-Q1-E1-F7
acgcgtccgggcgtattctcttcctacatttccccaagccttaccttgctcgtcaaccaaaacttcttcctccttggctaccttccgatctcctttcttaagattcaatggttccacttccttaatcccctcctctatctccatcacttcacgtggcacatcctccccgaccatcatcccacgtgctgccgcctcagaatccgactctaacgaagccctagccaacacaaccttccacggcctctgctatgtcttgaaagacaacatagacancgaacagatnatcccaacanggagccgcttgcacttccatcgaaacaagcaagaacgtgatnagattggcgctcaagctctctcnggtcaacaanacttccacaaaaanacgggttaattgagccaagganaaaaa

SEQ ID NO: 6264 - DNA, 437 bp, Arabidopsis thaliana
  unsure at all n locations
  Clone ID: LIB23-007-Q1-E1-F9
acgcgtccgaggaattctgatagannnnnnnnnnnnnnnnnnnnnnnnnnnnnnnnnnnnnnnnnggaaaggattgaagaaccctaatttgattcataagaaagacactatttttagattttgcgtttggttgattagagtaaccctaatttgttactcggatctaatcgtctactttgacttaagatgaatgatctgtaaatatttagatctaacatgtcttgagaaagtttcaattttttcttaacggtgaatttgatttcttattcttcagtatatatactcttccacaaagaagatgctcaaggtccctgaacaccaagttgctgggtcacattgctaatgatgggaanctccggtccactcgtagatgaccaangccggttcttcaaagccacttcaaggaaaattctcgtggcgaacacgaagcnaaagtt

SEQ ID NO: 6265 - DNA, 480 bp, Arabidopsis thaliana
  unsure at all n locations
  Clone ID: LIB23-007-Q1-E1-G1
ggtnncggtccagaattcangggctccattggtgagctccacctcttctccgatgaggcttttccggcgaatccggccattgatcatctgcaaatctcaggtttcttccgacgatctccatcttccactgtcacttctagcacttttattccccaatttctattgcctttaggctgtagctgctccatctcaatttctgggttttgcacgagaacccttaatccctccttttttttttgtttctcgctgaaactttcatgagctactccacctggaacctatcactttctaacacggctccaaaatattccgaggtagcttcttcccaagtacttttttcaaatctatcctgcaagatnaagtcacaaacactangactgtttctccaatgaacaacgaaagcctttcatccngttaagatgaactccgcaagctcctaaatccggattccttgaaacctcaacacataaactccaaaag

SEQ ID NO: 6266 - DNA, 432 bp, Arabidopsis thaliana
  Clone ID: LIB23-007-Q1-E1-G10
acgcgtccgatttagagcgtgtgagggagataggaagagagaaagtgagcgagagacgatcacggccgcgctgaaatccacgaccacggccgcgctgaaatccacgaccacggccgctctgaagaagaagactctctccgtctcctcccttctcctcctccgtctaagagacaaggcatccccagacgccatgatctctctcactccctcgttgtttctgaacaagacggttgttcctggatgttccacacgcctctctctgcgccagcctagaactataattactcctcctgcttccttgagagtcttttcctctctcggatctaaccaggatcccaccggcagcgttttgattgagaccactgccacttcatcctcctctctcgagacctccgccgccgacattgttcccaaatccaacgtatctggtgg

SEQ ID NO: 6267 - DNA, 441 bp, Arabidopsis thaliana
  unsure at all n locations
  Clone ID: LIB23-007-Q1-E1-G11
acgcgtccgataatattcaaatggtggaagcaggaaacatgctgatatcaatccaagtgcttcgttctgtgactaacaacttcagttcagataacattcttggatcaggaggtttcggggttgtgtataaaggcgagttgcacgatggaacgaagattgcggttaagagaatggagaatggagttattgctggtaaaggctttgcggagtttaaatcagagattgcggttttaacaaaggttaggcatcgtcatttggttacgcttcttggttattgtttggatgggaatgagaagttacttgtgtatgagtatatgcctcaagggacattgagtangcatttgtttgagtggtcagaggaaggacttaaagcctctgttgtggaaacagagattgacttaactttgggatgttgctaaaagtgttggataaccccaagga

SEQ ID NO: 6268 - DNA, 447 bp, Arabidopsis thaliana
  unsure at all n locations
  Clone ID: LIB23-007-Q1-E1-H12
tanccgggtcgacccacgcgtccgcccccacagatgaatctcaaaatgatggtagtgctgaaaaggaggaatcagacgaggttaagaaagtggaggattttgtaaccgagaagaaggaagagttgtcaaaggaagagttggggcgtcttgttgcctctcgttggacaggagagaaatctgataagccaactgaggcagacgatatccccaaagctgatgatcaggaaaaccatgagcacacgcccatcactgcacatgaagcagatgaagatgatggatttgtttcagatggtgatgaggataccagcgatgatgggaaatacagcgaccatgaacctgaagatgattcctatgaagaggagtatcgccatgattctagttcttcatacaaatctgatgcagatgatgatgtcgatttttcagagacnacctcaaatcctacttggt

SEQ ID NO: 6269 - DNA, 432 bp, Arabidopsis thaliana
  unsure at all n locations
  Clone ID: LIB23-007-Q1-E1-C7
acgcgtccgggctaaggtgctttacagtttcatgaccgggtttgtgagcaagaatcctaggagttcttacttcaattaccgggatgtcgatatcggtgtgaatgatcatggggcgaatagttacaaggaaggagaggtgtatggaaggaagtatttcggagagaatttcgatcgattagtgaagattaaaaccgcggttgatcccgggaatttcttcaggaatgaacagagtatacctaccttgaaaagtaaggcataattgatatatgatcatttaatataaagattggcttcctataatgtaatgtttagtgaancactatagaatatatggtttgggataattgtanattgtatagtttccccngttcatggaactctacaacaaaccncattgataagtgtaanccaaaattgggtttggtanaacca

SEQ ID NO: 6270 - DNA, 437 bp, Arabidopsis thaliana
  Clone ID: LIB23-007-Q1-E1-A8
acgcgtccgagcagcaattgttacgacagcaacagcagctgtattctcaggtttttgctgatcaacagcgttctcagcaacggtttggagacccatcttatggtcagttgcaggcgtctcttgatgcgcttaggctgcaaccatcaaaagatatgtcacaagtcaatcagcaggtgcaggttcctgtttcccatgaggagcgaggcatcaacttagctgatttgctcccagtaacccatgccactaatcagactgttgcttctttcgaaacccctctctgcacctgcaaaacaactatttgggtaatgttgaccctaggatggttctgcctgatcaaattgatgatacccataaaaaagagtcgaatcagaatatgaaagaacagtttctgcagactatgtgaacagcttgtactcagaaaagccgtcctttccctg

SEQ ID NO: 6271 - DNA, 492 bp, Arabidopsis thaliana
  unsure at all n locations
  Clone ID: LIB23-007-Q1-E1-B1
aacttctacgcttgcccgtnccngtcaanaaattcaagggtcgacccacgcgtccgcggacgcgtgggcctcaatnnnnnnnnnnnnnnnnnnnnnnnnnnnnnnnnnnnnnnnnnnnnnnnnnnnnnnnnnnnnnnnnnnnnnnnngacaccagggtcccaatgaccacgagaaaggggcctccaagcaggttggaaggcgggagcgtgctaaaccggatccatcgaagcaccaccacaggtctcatcttcctcattctaagaaaatcgagaccgaagaagagaggaggcttaggaagaagagggagttagagaaacaaaggcaagacgaaaaacatagacagcagatgaaaaattctcacaagtctcagatgcccaanggacacaccgangagaagaaaccgacgcccctactcancaacgacagggtcgagaatagttaaagaaaccaaacaacttcatctgcaagctcaagttccggatgagtcctga

SEQ ID NO: 6272 - DNA, 461 bp, Arabidopsis thaliana
  unsure at all n locations
  Clone ID: LIB23-007-Q1-E1-B11
tnccgggtcgacccacgcgtccgaactccaaaagcatctctctgtttcttctcctctcttcaagctttttgtttcgtctcagtcgtcgtcatcatctctgacagatctaagaacaagtttcgagattggatattgacgacaacgatatgggacttggaggtagtgaaacaatggaatgcaagtgtggtatgcctctgtgtatctgtgtagctcctcccaaatcaactgataaaccaaacccacctgctaccattgctcctgtggttcttcctcagttgaagtcagaggcttcagcaaaaagtaaaggttccacttccagcagcaatgctagatnagctctaaatgctggactagacaccccccaaagagactatgaagccagtggggaaggattaaagagaagcgattaagaatggtgacaagtgctggtgcgaaaaaacttctaaaaaaggcgttagatg

SEQ ID NO: 6273 - DNA, 478 bp, Arabidopsis thaliana
  unsure at all n locations
  Clone ID: LIB23-007-Q1-E1-B12
tttactcgncagcacggtccaagaatncccgggtcgacccacgcgtccgcttgtttcacacagtttcttgatccaaccaaaaccaatacacaaagcttctcaaactccttcacctcaaagcttcttcctttacatctgaatcgttgagttaactcggatttgttctgcatcctctgtttctgaatcgtgggccatccttattttgtctcgaattcttcaccaattgcttcgatcaagctgcattggttaaccagttgccctaaagatcagatctttgagcaaaattttgtcactgatcttctaaatccaaaccagacacagcaaaacaacctctgtagatgattcgagaaatctcaaacttacaaaaagatattataaacattcaagacagttattcgaacaaccgagtcatggacgtcggaagaaacaaccggaaaaacatgagctttcgaagttcgccgggagaaaagcaagcaag

SEQ ID NO: 6274 - DNA, 492 bp, Arabidopsis thaliana
  unsure at all n locations
  Clone ID: LIB23-007-Q1-E1-B3
naactgttacgcctcccggtnccggtccaanaattcaagggtgctgggagatgacaancctgtgtttatgattcaagaagtgtctactgaggaacctcgaggttccgtgctcagactcacattcgcctgtaactcttttctatcatggtcaactatgtcaggcgttcttgatagtgcttcgatttgttgcaagaagatacaaatctttgagaagaaggggttgactctcggggttgttcttcttctggatcaatctgggcaacatagtttgtttaaaacccgggtagaaaacaccctcaaggttgcaaccaaaaagccaaaaccgacatctgttaagctccctttcgggctttgtggctgtcaagaacagaacggtggtgtangggaacttggangtgttgaagaagagtccattcagcataataatangctaaggatagaaaacttgaataatacgattcaagatcaaggttcacttcgagttctcaattt

SEQ ID NO: 6275 - DNA, 502 bp, Arabidopsis thaliana
  unsure at all n locations
  Clone ID: LIB23-007-Q1-E1-B4
gggaactgtttaccctgcccggtgncggtccaagaattcacgggtcgacccacgcgtccgatggcttctctcctttagagcgcatcaattcagactgttgtgtgtttcccttacttgggcggagtcattgagctgggcgtcactgaattgatttcagaagaccataacctgcttcgaaacatcaaatcttgcttgatggaaatatctgcacaccaagacaacgatgacgagaagaagatggagattaagatcagtgaagagaagcatcagcttccattaggtatttctgatgaagacttgcattacaaaagaaccatttcaacagtactcaactactccgcagatagatcaggtaagaacgataagaacattcgtcatcgtcagccaaatattgttacttctgaacctggctcaagtttcttgcggtgggaagcaatgtgaagcagcaagtctcgggttttgttcagaaaaaaaagtcacaaaatgtgttgccggaagatat

SEQ ID NO: 6276 - DNA, 437 bp, Arabidopsis thaliana
  Clone ID: LIB23-007-Q1-E1-B5
acgcgtccgtccgaattgaatatttcggacccgaaacctgacccgctttgatgggctggattccgtgtccgtgctggggaaccaacgacgatgaaaacgccggcgaggtggcggatcgtgatccggtgcttctagtatctggaattggaggctctattctgcattctaagaagaagaattcaaagtctgaaattcgggtttgggtccgaatatttctagctaaccttgcctttaagcagagcctctggtctctctataatcccaaaactggttatacagagccgttggatgataatattgaagtattggtccctgatgatgaccatggactctatgcaattgacattctagatccctcttggtttgtaaagctttgtcacttgacggaggtttatcacttcacgatatgatagaaatgctggttggatgcggttata

SEQ ID NO: 6277 - DNA, 442 bp, Arabidopsis thaliana
  unsure at all n locations
  Clone ID: LIB23-007-Q1-E1-B8
acgcgtccgcccacgcgtccgctctctctctgctccatttctctcactttcttcacatctctgaagctcttcgtcacgcatctacaatggcatcgatgatgcaaccgcagatcatactgctgaaggaagggacggacacatctcagggcaaagcgcaactagtaagcaacatcaacgcttgcactgctgttggagatgtagttcgaaccacgctcgggccacgagggatggacaaactcattcacgacgataaaggatccgtcaccatttctaacgatggtgctaccatcatgaagctcctcgacattgttcatcctgctgctaagatcntcgtcgatatcgccaaatcccaagactccgangtgggtgatgggacactacagtggttcttcttgcacanantttttgaaggaagcgaaancatttattgaggatggtgttc

SEQ ID NO: 6278 - DNA, 496 bp, Arabidopsis thaliana
  unsure at all n locations
  Clone ID: LIB23-007-Q1-E1-C1
ngttaagctncccggtgccggtccaaaattaacgggtcgacgcacgcgtccgaggcttttagacgaccactcatagtaatcgttatcttcatttatataaccgccggcgtgaaaatcgccgccgcggatgagccggtgccgacgccatggccacaccagttccacgcgctaatgttcatgaattactccggcgatctctcgatgatcgacctttggtacgactggaccaacggtcgtaatttcaatatcatccaggagcagctcggtggtattacctacgaccttgaatggaacaatggtacttccttcttttacacgctcgacgagtcaaaatcgtgccgctccggtcagctcgaggttggaatactgcgaccaaactggctagatggagccaagtacttggtcaacagaacgtgagtgggtttcctctgcaatggtatggggaaaaaggtagacntttatatgggtactaatgaaagatgttgaaanccaagaa

SEQ ID NO: 6279 - DNA, 446 bp, Arabidopsis thaliana
  unsure at all n locations
  Clone ID: LIB23-007-Q1-E1-C11
acgcgtccgcgataaggaaatatctaaccagaccggcccaaggagcgggcaaaatcagaaagcatttgatcttcaaactcttgggttcttctctgattgaaaatgagcttatcatcgccaaccagtgcttgtagctcgtccagatgttactcctcgggattatcgtttccgattggatttggatcgaatcccatcaatgtgggattggtttgttacccaaaaagatacagtattgctgctcggaagttcgtagtggcttgctcctcctcctcttccgatncacttttggttaaggctgcaaaagggcaagccataagtcgtcctccagcttggatgatgaagcaagcangaaggtatatggctgtttaccaaaagctcgccaagaaacatccgtcttcanannagagatnagagaacactgatnctaatagtggaaaatctccttg

SEQ ID NO: 6280 - DNA, 434 bp, Arabidopsis thaliana
  Clone ID: LIB23-007-Q1-E1-C12
acgcgtccgctctctggagccgccacgtctcagtgatccgactacgacacctttcttcactcttcttcttgcgtcttctctgctctcgtggtctctctgttatttaattttaatcgattgagatcgcttttagctctcgtctttgaattttacgggcagaaaatgggtgaagaagctcgagcgttagatatggaggagatcagtgacaacacgacgagacgaaacgatgtcgttcatgacttgatggttgatttatacccgcttagcagctactacttcggttcaaaagaagctcttcgcgtcaaggacgagattatctctgatcgagtcatcagattgaaatccaattatgctgctcatggattgagaacttgcgttgaagctgttcttctggttgagttgttcaagcatcctcatgttttgcttcttcaata

SEQ ID NO: 6281 - DNA, 495 bp, Arabidopsis thaliana
  unsure at all n locations
  Clone ID: LIB23-007-Q1-E1-C2
aactgttacgcttccggtgccngtcnagaattcangggtcgacncacgcgtccgcacaaagaaggagctcttaaaggctatagacttaagacttgaagctattaaaaaggacttgacaacgtccatttctcatgcatcagctagcggtttcgaccctcatactgtttccgaactcaaacaatttgctgatagatttagtgcacatcatttggatgaagcatgcagtaaatatatctcactatggaagcaaaggccagacttgatcgacatgaagtactcgaatcagttggctggtgttgacaatgtcagcctccaaaaagatagcacgcgccagaagcaaaatgcggtaaacgaatcagaacatcaaattcaacagtgtgctactacaantaccaaaaggaatgaagaggagaaaactgatgacantttggatgtaaccncttctacagttaagactacccaacacacaagacgacncattgtgcaaggatagga

SEQ ID NO: 6282 - DNA, 500 bp, Arabidopsis thaliana
  unsure at all n locations
  Clone ID: LIB23-007-Q1-E1-C3
ggtnccggtccanaattcacgggtcgacccacgcgtccgttcaaagctacaaaagccataaacgaaaacattcttcttgaaatgccagttcccattgttatcaaggaagcaatacctaaatctggaaagaacagcctcggtgatgaactgtacaagatgttggctgtggaatctgcaacagtagatgaaatctttatatcgctcaatctgggaaccgaacatgcagcactcgagacagttaacaagttagaatctgctatgtttgcttggaaagaaaggattacagaacaaggcagcaatggtaaatcccctgtaagagcatcgtggtcattcgctaaagattcgttgtctgaaattgggtcgcaatgagtcactccttgaaccgagcaagaaaccgcctaagaaactcaagattaaatcccaaaacaaccctaatcctcccctcaactccgtttccttgatngctacaaaagattccaattatgaccaagggacattan

SEQ ID NO: 6283 - DNA, 492 bp, Arabidopsis thaliana
  unsure at all n locations
  Clone ID: LIB23-007-Q1-E1-A4
aactttacccgccagtaccggtcnagaattcncgggtcgacccacgcgtccgcccacgcgtccgtgagaatgctattgaacttctcaaaacaattggggctttaaatgacgtggaagagcttacaccccttggtcggcatctttgcactctacccgtggacccaaatattggaaagatgcttctgattggagctatcttccagtgcgtcaatcctgctttgacaatcgctgctgctctggcgtatcgtagcccatttgtcttaccattaaataggaaagaggaagctgatgaagccaaacgatattttgctggtgattcctgcagtgatcacattgctcttcttaaggcatatgagggatatcgggatgcaaagcgtggtggaaacgaaaaagatttttgttggcaaaactttccttcccctgtaactccaaaggatgatgggaggatatgagaaaacaatttccttgatctccaacaanatataagggttg

SEQ ID NO: 6284 - DNA, 473 bp, Arabidopsis thaliana
  unsure at all n locations
  Clone ID: LIB23-006-Q1-E1-G7
gcgntcagtacaggtcagaaattcccgggncgacccacgcgtccncccacgcgtccggtactcagcaccatcaatggaccgcccggagacgatcgccgtcaaatgcgaacccatgaccgttgactctccttctcgacctctaaagcttgtagttttagctgaccttaatttcaatcctcctgagactgatgatcttgactcatccattccaatccctactcctcctcccatcactaggttgagtaacgaggaaagtcatcaagagggaggtatattaacatgcaaggaggtggaaccaggagaagtagaagccaaaaagatcagcaaggtgggaaaatgccgctccagaagtaagattgagtcttcctctgattgtggagttgatgcagatggtgatctggctaatcaaggggtccntgcatcccgggaagaaaaaatcagtaactcaaaatgggtttgattcatgttgcaaa

SEQ ID NO: 6285 - DNA, 436 bp, Arabidopsis thaliana
  unsure at all n locations
  Clone ID: LIB23-006-Q1-E1-G8
acgcgtccngccccggctatcagatcgtcttctttatcgctcctctaattatattcatctcgagagacgagagctaaagaactacttccaaaaaaatgccgattgctgagcttgctgtaatcaaaacagtgggtgggcctctgatagcggctgctcttggagttggagcccaagtcatttacgacggcttcagaaaaggaaaagatacatctatcataaaccgtctcggccgtacaatggaaagtatcagtccggtgcgggatcgaatcggtaagctcagtaatgtggaaggtaaaccatttagggaagtccacgaaagtcttacgcgtctccttgaagatgcgaaatctattattgagaaatattggaaactcaagattggagcaagacacgtttgcaggaagtacaagtttgtatattttacatgaaaattnaa

SEQ ID NO: 6286 - DNA, 452 bp, Arabidopsis thaliana
  unsure at all n locations
  Clone ID: LIB23-006-Q1-E1-H1
cccggtcaaanataaacgggnccaggcacgcgtccnnggacncgtgggcttttttttttgtttgggccttcttatanaaagaagaactcaanagcacagagagaagatgagcgaagaacaaccacacgccaatctagcggttcccgcgtttaaaactgagaaagagcccataacgcaaacacgaaatggtcaaagtagcgtttggcgtttcggtggaagtgataaggcagcgaaagcatccaccgtaacgcttagaggtgtcatctacatgctcttcgacaactgcggcaaagacgtcaataagaccattttacccctcggccacggtgacccttccgtctaccccttgcttccgtacctgtatcgaagctgaagacgccgtcgtcgacgtccttcgctccggcaaaggcaattcttacngtcccgggagctgggaatctccccgcaagacn

SEQ ID NO: 6287 - DNA, 476 bp, Arabidopsis thaliana
  unsure at all n locations
  Clone ID: LIB23-006-Q1-E1-H11
ttttatttcgncgccacggtccaaananacccgggtcgacccacgcgtccgcccaagcgtccgcggacgcgtgggcgaactcaaagctatctctctccctctatctctgaggcacgcattttcgtctgtgattctcgagctcttttggggtttctccgagatttttggtcggttcttcacgttttgtttatggcggtgattacgtgatgaaagtcaccggaaagccgtattcgacggcgacattaccggcctttgagtcggataagaatctcttctctcacggtccanatctcagagctattcaaagagctactactgtcactaaacgtcgagctaggaacccgagtttgactcgtcagcgaagatccggtccttctggtggcagacgaaaccggccggagactcctttattgaaatgggaaagtggaggatcggatanagaagagaaaccgggttgtatnaaacgataattggaa

SEQ ID NO: 6288 - DNA, 453 bp, Arabidopsis thaliana
  unsure at all n locations
  Clone ID: LIB23-006-Q1-E1-H2
cccggccggtcaaaaataacgggncgacccacgcgtccncccacncgtccgcttggtggcctaatgggaatgaagagtggtggcctcagcttggtttaccaaatgagcaaggtcctcctccttataagaagcctcatgatttgaagaaagcttggaaagtcggtgttttaactgcggtgatcaagcatatgtcgccggatattgcgaagatccgtaagcttgtgaggcaatcaatgcttgcaggataagatgacggcgaaagagagtgctacttggcttgccattattaaccaagaagaggttgtggctcgggagctttatcccgagtcatgccctcctctttcttcttcttcatcattaggaagcgggtcgcttctcattaatgattgtagcgagtatgacgttgaaggtttcgagaaaggaacaacatggtttccatgtggaaaanccgga

SEQ ID NO: 6289 - DNA, 437 bp, Arabidopsis thaliana
  unsure at all n locations
  Clone ID: LIB23-006-Q1-E1-H5
acgcgtccnttcagcttctgagtcttctcctctctctctatctctcaagtgggctttgctttgctgtttttgtcttccttcgacgactcacttttgcagattctcataaattcttcaaagctttgagtcttttttcagattcgagggtcggttttatatatgcttcaaatctcttacccaaatcaggtatggagactctgcatccattctctcacctacctatctctgaccaccggttcgttgttcaagagatggtgagcttacacagctcgagtagcggtagctggactaaagaagagaacaagatgttcgaacgagctcttgcgatatacgctgaagactcgcctgatcgctggtttaaagttgcttccatgatccctgggaaagactgtttttgatgttatgaagcaatatagtaagcttgaagaagacgtttt

SEQ ID NO: 6290 - DNA, 410 bp, Arabidopsis thaliana
  unsure at all n locations
  Clone ID: LIB23-006-Q1-E1-H6
tttttttttttttggagttagaatgctntgaattccaanccagagaagattcanntaaaacanagactaaaaaggctgttcaaacagtaataattcttgcacatgaacactaaaccagnacgataacaggaaacaaagatacagtcagtactcagtantttgagggcacctacggaaagcaagtaanacnacagagggtngacgttccantgcttaatgatgaaacatcatcagtacaagcanacgtgtttttcatcatacaccgtatcactttcacaagtggctgcantcattccgcagcatnangagattgacntcganaagcagcatcaactttgcgcagaggagcattggctaccaggagatggggacctctcattgctacgcctttcaagagacatctccttang

SEQ ID NO: 6291 - DNA, 431 bp, Arabidopsis thaliana
  unsure at all n locations
  Clone ID: LIB23-006-Q1-E1-H9
ncgggtcgacccacgcgtccgntcanttttcttcgctctctttagattctttttttctcatatctctccttgatcctctgttttttattctgaggttgtttttcggagaaggaatcacctaaaccctttcaaatctcttcttctaccaaatatatttttttggatgaaaaaaacttctaccaaattctcagattttatttccttgagggttttgtgttttttttgcatggtctagttgatttctgaaatttaagtatatcttgtttacgataatatagaaaaaaattattggtgtttttgtgtgtttataatttatcttgggtcaatgataatagtggacgacgagtcggtgtcttagggtttactttttgtaaagaaaattttcttgttgaattattggctttttgtgaattcgattttcncctaattaa

SEQ ID NO: 6292 - DNA, 481 bp, Arabidopsis thaliana
  unsure at all n locations
  Clone ID: LIB23-007-Q1-E1-A1
agccgccagtaccggtcnagaattcacgggtcgacncacgcgtccgcccacgcgtccgcatttccatacttggccttcactaaagattaagtttttgcacttctctctttctctcgatcgctgcttcttcgtcgctcaatctcaagctccgttccgttagttcttcgtcggagagacggggtggagagaatcctgctgcaagtggtagctgtttgatacttgagtcattttgtcacagcaacatgaatatgccgctgttggatattcaaccacgaacgttgcagtttgcagttgacctgaagaagcaaacttcctgcgtggtacagctaaccaatactacccatcattatgttgcatttaaggttaaaaccacatcaccaaagaagtactgtgttcgtccaaatgttggtgttgttgcanctaaatcaacctgtgaantcactggtcantaagcaaagctttaaagaaacanctccagata

SEQ ID NO: 6293 - DNA, 480 bp, Arabidopsis thaliana
  unsure at all n locations
  Clone ID: LIB23-007-Q1-E1-A10
acttggccagncccggtccaagaataccgggtcgacccacgcgtccgcctcagtcgccctacaatggctttgcctttgtctggcacgcgccacctcacgcgcgctctcctctctaatgtcactcttatggctcctcctcggattccttcctctgttcactacggtggatctcggttaggttgttcgacccggttcttctcaattcgatgtggagctaaccggtcaggttctacttactcgccgcttaactctggctctaactttagtgatcggcctccgacggagatggctcctttgtttccgggatgcgattatgaacactggcttattgttatggataaacctggcggggaaggcgcgactaagcagcagatgattgattgttacattcaaaccctagcgaaagtcgttggaaatgaggaagaagcgaaagaaaccaatctacaatgtttcaatgtgaagaaggtatttaagggttgg

SEQ ID NO: 6294 - DNA, 487 bp, Arabidopsis thaliana
  unsure at all n locations
  Clone ID: LIB23-007-Q1-E1-A11
aacgttacttgccaggcccggtccaagaataaccgggtcgacccacgcgtccgctctctggagccgccacgtctcagtgatccgactacgacacctttcttcactcttcttcttgcgtcttctctgctctcgtggtctctctgttatttaattttaatcgattgagatcgcttttagctctcgtctttgaattttacgggcagaaaatgggtgaagaagctcgagcgttagatatggaggagatcagtgacaacacgacgagacgaaacgatgtcgttcatgacttgatggttgatttatacccgcttagcagctactacttcggttcaaaagaagctcttcgcgtcaaggacgagattatctctgatcgagtcatcagattgaaatccaattatgctgctcatggattgagaacttgcgttgaagctgttcttctggttgagttgttcaagcatcctcaagttttgcttcntcaatatagaaactc

SEQ ID NO: 6295 - DNA, 407 bp, Arabidopsis thaliana
  unsure at all n locations
  Clone ID: LIB23-007-Q1-E1-A12
acgcgtccgcaacggtttgttcgaagaacgagaagcaacaatcaagaagctaacaatgctttctgcacatcgtttatctgattcagtaacgctggtttctcttgctcctctctctcaatttcttttgtcggttttaaattcatttcattttattanaaattcgctaccgttttttttctgtcaccggagctccttcttccagatcgtgcttgatgtcccggatatgattttttagttccaaatcttgaatcttttgattggataagaaatgaggaagcttagtattaagagactccttgaaatctttctttgagcctcatcttcatcctgataatggtgaatcactcanaggaacananactgaanttgatgagaaagtgaaaganaatcttggggaattgttgaga

SEQ ID NO: 6296 - DNA, 476 bp, Arabidopsis thaliana
  unsure at all n locations
  Clone ID: LIB23-007-Q1-E1-A3
tgccggtgccggtccaagaattcangggtcgacccacgcgtccgagcagaatcttaagactgtgatgagctcgattattaaaaatatgggtagcacgcttggtgcatgtggtgatctgaacagaaatgttcttgctcctgctgcaccttatgtgaagaaagactatctctttgcacaagaaactgctgacaacattgcggctcttctttctcctcaatcagggttctattatgatatgtgggttgatggagagcagttcatgactgctgaacctccagaggtagtgaaggctcgaaatgataactcccatggaactaactttgtcgactctcctgagcccatctatggcacccagttcttgcctagaaagttcaaggtcgctgtaactgttcctacagataattccgtcgaactcctcacaatgacatggcgttgttgttgttcagatgaaaatggggaaacacagggttcaatat

SEQ ID NO: 6297 - DNA, 564 bp, Arabidopsis thaliana
  unsure at all n locations
  Clone ID: LIB23-006-Q1-E1-G4
tcangggccccggggttccanagnnatnaaaccgggggctccganncccaacgccgnttccgacccaacnacgttccgaaacaactttaaganagaaaacttaaaggaaattactcctcaattcaaagggccgaattattanaannaaaaatngggaagaagcaaaanggggaagtttgggacaagttgggctngatngcccgttagaactnacaaaagggaacgaaccttgccgacaaaattccaaaaaaccgggtgggtttggattcaactggccggctctcaattcttggggattagaaagtttgtgggagagggctatcaaacaaatgggaatagcagtgaatttgggtaacatatttgatgggagacaatgcatctcccaagttcaacctctgccaacattgtcactgatttcatgggcacttccttcctcctatgcttgctcggtggttttctcgctgactccttcctcgggccgtttcaaaaccatcggcattttctcaaccattcaagctctgggaactggtgctctaacgggtagcaaacttaacttgccaaagn

SEQ ID NO: 6298 - DNA, 491 bp, Arabidopsis thaliana
  unsure at all n locations
  Clone ID: LIB23-005-Q1-E1-D1
ctacttggccaggccncggtcanagaaatcccggggncgacccacgcgtccncagcctcttcttctaacaaaagcaaactgaaccaagaatggagtcgctgatcaagtcccagcacgctcagcaactggcgggtcacaagaatacgaccggtaaaactccgtccatggagatgataccggcgacgggacttgcgatgtcatcggacgaaagcatgatgctgaagctgattcaacaaactcactccccagatgctcgcgaagtccaagtgcgtggccttctctctctcgttgaagatattctcgatcgtgccactcttgactctgaagacaccaacgcctccatgcttccgttgcccactgaggataaactgatgcagtcaagcatgatgagcgttcttgatagtgtctcctatgctatcgattgtgttgcctgcgagatagcctataagtctctgacgggatntgattcacacnaaatcacaatgtcgtgt

SEQ ID NO: 6299 - DNA, 193 bp, Arabidopsis thaliana
  unsure at all n locations
  Clone ID: LIB23-005-Q1-E1-D12
acgcgtcnangttgacttgaggaaaaggttcttcatgagcttcatcctctctataataaacaaccatttctatagagaatccaccccatggttttaaaccgaaccggggaagactgtaccgttaatattaatatgaaattgatttctgnnnnnnnnnnnnnnnnnnnnnnnnnnnnnnnnnnnnnnnnnnnng

SEQ ID NO: 6300 - DNA, 478 bp, Arabidopsis thaliana
  unsure at all n locations
  Clone ID: LIB23-005-Q1-E1-D9
cgcgggtcaggtaaaggtatnaganttcccggcccgacccacgcgtcaaagttatggacaatctccggaaacttaatcttctctctgtctctctaaccataatctttgtctctcttaccatagccaccaacttacctttctttgaagtgaaatatcccaacaacaacccttttgggatgttactacggccgacaccgatcaagaaccaatccttgggtctaccggctcatgtcgggtcagatgagtgtcgggtttggaccaaagcatgttctgatgagattcttaggctgacttatcagccggataacgttgcgtggcttaaacgcgttaggaggacgatccatgagaacccggagctagcgtttgaggagtatgagactagtaggcttattaggtcggagctggaccgtangggtancatgtatagatatccgttagcnanaacgggtatccgggcttggatcggatncggtggacc

SEQ ID NO: 6301 - DNA, 462 bp, Arabidopsis thaliana
  unsure at all n locations
  Clone ID: LIB23-005-Q1-E1-E1
cgggncgacccacgcgtccnggcctcccaaacggtggtagcaatggcggtgttttggacaatggcgcgaaatggtttaggtcaggacttgacttaaattctggtcctggaggtcatgaaacagagggaagagacgaatcaacacttgtggcaaggcaattatcctcatctgcttccttacctttgaaggaggatcaagcaagaatgtatcaaatgtcaggtggtgttctgaagaggaaagaaccggaaggaggatgggatggatataggcagtcctcatggcaataacagtagctcagaatctcagtaggccacatgagcttttactaagagatgagagtgaatgtgatgccacaaggcttcattggctggcctgctctgtacaaatgaagcatgggtgagtcaatttgcaacttcacagtggnccaaatcttttaagaacacaaacctgactcttgggttc

SEQ ID NO: 6302 - DNA, 491 bp, Arabidopsis thaliana
  unsure at all n locations
  Clone ID: LIB23-005-Q1-E1-E2
taattggccaggccncggtcanagacaacccgggncgacccacgcgtcnncccangcgtccgattcatcgtctcttctctgctctgctttgctctagatcacaaattaaaagacttcattagtcttcctgtctccaccattaccttcttcctttttaactcagccacgacgagcagactattgttctgttttccttgtataaaaatggcgtcgatgatgtttaccgattgctcctccaccacgacgtcgcgtctcatccatttgaaccgaagcagcggtactttcctcctccgtcaatgcgtcggccaactccgtttacagaccactgcttctggccgtggctgctgcattcgctcctcttcttctcccatttcttccatttccgctgatacaaaatcagagggtggcgcaattgtaatagatggaaaggctgtggaaaaaaggattagggataaatcncaantgaatttcnagaatgaaggatcaattgg

SEQ ID NO: 6303 - DNA, 459 bp, Arabidopsis thaliana
  unsure at all n locations
  Clone ID: LIB23-005-Q1-E1-E4
acccgggncgacccacgcgtcnncccangcgtccgcccacgcgtccgaaaatcgtccattgaagtgaacagtcagcatcgttttgcttgcttgtgcgtttctctcgaactctctccatggctgttgcgctccaattcagccgattatgcgttcgaccggatactttcgtgcgggagaatcatctctctggatccggatctctccgccgccggaaagctttatcagtccggtgctcgtctggcgatgagaacgctccttcgccatcggtggtgatggactccgatttcgacgccaaggtgttccgtaagaacttgacgagaagcgataattacaatcgtaaagggttcggtcataaggaggagacactcaagctcatgaatcgagagtacaccagtgatatattggagacactgaaacaattggttaaacttaatcctgggggaaaatnttacgtgaaaa

SEQ ID NO: 6304 - DNA, 450 bp, Arabidopsis thaliana
  unsure at all n locations
  Clone ID: LIB23-005-Q1-E1-E7
aanagtacagaagcccgggccgacccacnngtcaagaagaatttggaattgtcaaggggacaatnacanccacacactcctacaccggagaccaaaggcttctanatgcatcacacanggacctaaggcgtgcaanagccgcagcactgaacatagtgcctaccagcacaggagcagccaaggcggtgtcattagtgttgccgcagctgaagggtaaacttaacggcattgcactccgtgtgccaacaccaaacgtctcagtggttgaccttgttataaacgttgagaagaanngtttgacancagaggatgtgaacgaggcctttanaaaagccgctaatggaccgatgaaangcattttacacgtttgcnatgcgcctcttgtctctgttgacttnaggtgctctgatgtctctaccaccattgactcgtcctcactanggttatggg

SEQ ID NO: 6305 - DNA, 479 bp, Arabidopsis thaliana
  unsure at all n locations
  Clone ID: LIB23-005-Q1-E1-E8
nccaggtaaaagtaaagaagtcccgggncgacccacgcgtcantcatcatccttccaatggctattacttgagaactcttctgattaaacatagcaacaacaacaactcttcttctcctctctttctcacttcaatttagcgatggctgcaactgcaatctcttctctttccttcccagctttgggtcaatcggacaagatctccaatttcgcatcttctcgtcctctcgcctccgcaattcgcatctgcacaaagttttctcgcctttctttgaattcgcgttccacttcgaaatctcttattcactgcatgtccaatgttaccgccgatgtgcctcctgtatcagagacaaagtcgaaattcctaaaagcttacaagcgacccatcccgagtatctacaacacggttttgcaggagctcattgtcaagcagcatttganaaggnanagnagacttaacggtaagatccggttttgcc

SEQ ID NO: 6306 - DNA, 439 bp, Arabidopsis thaliana
  unsure at all n locations
  Clone ID: LIB23-005-Q1-E1-E9
acncgtcngcccacgcgtccgaaaaaaaaacattttaaggtaatctcaaaaccaaaaagcctatcaatctttgtacttggatgttttgttgttgcaaggattgcagaggaaaccaacgagtttctaactttgattctctaacaggtgttttctttggagatcttgagtttggacctcagaatcaaagatatataaagatgaatgaggaagaagataaagatcaagatcgagtaacgagaggatgtagtcacactcatagctgtaaccctccaggcccagaggatgcttctcactcccacacatgcttccacgctcacactcatctcatcatctctgatcagcaagagaatgatcattctgacagtagcaacaagaaacggttatgtggtaatagagaggcagtgaggaagtacagggagaagaagaaggccccactgca

SEQ ID NO: 6307 - DNA, 480 bp, Arabidopsis thaliana
  unsure at all n locations
  Clone ID: LIB23-005-Q1-E1-F1
cttgnccaggccccggtcaaaganancccgggncgacccacgcgtccncccacgcgtccgatctctctcctccttcaataatttctgcaaaccctaactttctcattcggcgctcaagtttctctccaccccttcgagatttggtgcgatgatgttgcgtgctgtttttaggagagcttccattagaggctcttcttctgcttcgggattgggaaaatcattgcaatcctctcgtgttgcagtgtctgctcaatttcattctgtttcagcaacagagacgttggtgcctcgtggaaaccatgctcatagcttccatcancgttcttgtccanggtgtccanactgttcaaggactattatcaacggttaccaaggnacagccctgcaaagatgggtcaagggccttttcaactgataatggggangtcntggnanctgttgtgcacacatgggtgaacaatcactgatgggaccctaacc

SEQ ID NO: 6308 - DNA, 421 bp, Arabidopsis thaliana
  unsure at all n locations
  Clone ID: LIB23-005-Q1-E1-F11
acgcgtccnctgtctctatggctgctgctgtgatgggtttggttctcttgggacgtagattgtataatatgaagaagaaagctcaaaggttccatcttaaagttacgattgacgataagaaggcgtcgcgggtgatgagtcaggctgctcgactcaatgaagtgttcacagaggtaagaagggtccctgtgatccgccctgctctaccatcgcctggcgcatggccggttttgagccttagatgagaagccgttttctacaatacctagacacagtggagaatcaatcatacaatgtccatcactttatgtaccgtaagaatacaaatacatgtgtttatgtcgtacctatgcataantagtagtttaccatcttatgaaatcgcgtatgtgagtcntgtcccaaccgtgggatacactnc

SEQ ID NO: 6309 - DNA, 492 bp, Arabidopsis thaliana
  unsure at all n locations
  Clone ID: LIB23-005-Q1-E1-F2
ctacttgnccaggccccggtanagaaatcccggggccgacccacgcgtcnacggacgcgtggggaaaacttttangagatggcagctccgattcgattctttgaactgaacactggtgccaagttaccttgcgtcggtctangaacctacgcaatggtcgcgacagcgatcgaacaggcgattaagattggttacaggcatatcgactgtgcttcgatttacggaaacganaaagagattggtggtgtgttgaagaagctgataggtgatggttttgtgaagcgtgaggagttatttatcacttccaaactctggagcaatgatcatttacctgaagatgtgcctaaggcactggaaaaaacgttacaggacttacagattgactatgttgatttatatctgatacattggnctgcgagcttgaagaaggaatcactaatgccaaaactganaatgtcaaaaaaacccngtataactagcacatgggaanca

SEQ ID NO: 6310 - DNA, 471 bp, Arabidopsis thaliana
  unsure at all n locations
  Clone ID: LIB23-005-Q1-E1-F3
canacccgggccgggccacgcgtccacanaaantcanagcagatntnaanaaaatggctcangcagtgacttccatggctggcttacgtggagcatctcaggctgtccttgaaggaagtttacagatcaacggctcaaaccgtttgaacatctcangagtctcggttgggtctcagagaaccggacttgtgatcagggctcagcagaacgtgtcattaccatanagtagtcnccggtcantgattggnctcntggcggctggttnagccggtggttcattcgttaaagctgttttcgccgaagctattccgatcaangttggtggtcctccacttccttccggtggcctacctgnaacagataactcagaccaancangagacttttcattggcantgaaagatagattttacatacaaccaatgtcaccagcanaagctgcagcctanagccaaagattctgctaaanag

SEQ ID NO: 6311 - DNA, 506 bp, Arabidopsis thaliana
  unsure at all n locations
  Clone ID: LIB23-005-Q1-E1-F4
ttggtcngcccggtagaccancccgggccgacccacgcgtcnaatcgaactctaaaccacactgagatggcgaaatggtggcgaggcctgagatccgtgacggcggaggtggctgatcttccggcttcttcattcggtcgatcgattcgatgtattcatcagtatcagacgatccaggcgattccacgtgaagctacgggtcgaggagtatcggctcgggatcggacgattggtcgtattcccgccgtcgttttcccgcaatcgcttctagatactgatgcttcgaagcgaggcgtgtcgaggaagcagctattgacggcggataagaagcagatnaagtctattattgactctgttggtctcccaatcctctgttccaacactttccaagcttcaagattccgaacctggtcaanggttccntcaaccccttgttgaaaccngggtccaaataactttcccctcaaagggttcaatanangacgaaanaaaactgggaaaagaat

SEQ ID NO: 6312 - DNA, 475 bp, Arabidopsis thaliana
  unsure at all n locations
  Clone ID: LIB23-005-Q1-E1-C6
acanagtattagaatgcccgggcccgacccacgnntcaanatcannnnnnnnnnnnnnnnnnnnnnnnnnnnnnnnntgaaaaagatgagaaccntaaagactcagaccacaaggggaagaagaagagcaaatgtgtcgtcacgtacgagagttttacacacgtgcngtggaaatggtagtagcgacggagggaagacggtgatggagaagcttcttgcgttaaagagccttcttcctccaccggtgaatgtcggtggtggaganacggaggagctgtttcaagagacggcggagtatatcgtgaagcttagaacacaagtcgtggtgttgaagaaactgattgagatttacgataactcttctgatcagaaganagatgttgttttanaatgtncatttatactttctttaattcanattatgtcaggtttnctgntttttttggnannaacttataattaatatnttgtgatc

SEQ ID NO: 6313 - DNA, 489 bp, Arabidopsis thaliana
  unsure at all n locations
  Clone ID: LIB23-004-Q1-E1-H4
tncccagtgcccggtcaagaattaacgggtcgacgcacgcgtccgagagaatcaaaaatcaaaatgacttctcctactgcgactaagtatgatgtctttctgagtttcagaggagtcgacactcgtcgcaacttcatcagttttctctacaaagaattcgttcgaaggaaaattcgaactttcaaagacgacaaggagcttgagaatggccggaggatttctccggagctcaaacgcgccatcgaggagtcgaaattcgccgtcgttgttgtctctgtaaactacgctgcgtctccttggtgtctcgatgagcttgtgaagattatggatttcgaaaacaagggttccatcaccgtgatgcctatcttctacggtgtggatccgtgtcatttgaggaagcagatcggagatgtcgctgaacagtttaagaagcacgangctagagaagaagatatgagaaaattgcttcgtggaaaacaacattgacca

SEQ ID NO: 6314 - DNA, 499 bp, Arabidopsis thaliana
  unsure at all n locations
  Clone ID: LIB23-004-Q1-E1-H8
ntttaacttccagcgcccaggtaacggtcaaagaattcccgggtcgacccacgcgtccgcttgcagcttattaagcgaaccaaaacttccatccctgtttcttcaggtcatttcttgggttttgggagaatatggcacagctgatgggaaatattctgcctcctatattagtggaaagctgtgcgatgtggcagatgcatactcaagtgatgaaactgtaaagggttatgctgtttctgcactgatgaagatctacgcatttgaaattgcatctgggagaaaggtggatgttttgccggagtgccaatctttgattgaagagctattggcttcacattcaacagatcttcagcaacgtgcatatgagcttcaggctctccttgctctagatgcccgtgctgttgagactatactccctttagatgctagttgcgaagacattgaggttgacaaggatctttcatttctcaatggctatatccaacaagctatcgagagt

SEQ ID NO: 6315 - DNA, 434 bp, Arabidopsis thaliana
  unsure at all n locations
  Clone ID: LIB23-005-Q1-E1-A10
acgcgtccncgttttcaacaatggtcgaacttttgcagcagttcgaggatattggaacacatggaacaaaagtaattatatacaacttgtggcttaatgatgaaggaatctatgagctgagttttgacgacgatgatgtggatatacggctccgagatgaaaatgcccaggacgggaaacggttgcacgctaaaacattggaagtaagatctcatatttcgtaccgctatcgacattctctaagggcttacatttccatgttatatctcaaaaagttcaaaaacttcaaaattattcttcggggagtctctgtggcgcaattcaacattgctgatgaattcagacatcctgagacaataatgtacaaaccccaagcagctgcagtggattatgctgccactggaattaaagttggattcatcaaggaggcccta

SEQ ID NO: 6316 - DNA, 437 bp, Arabidopsis thaliana
  Clone ID: LIB23-005-Q1-E1-A11
acgcgtcagaaagcttcaacgaagagaaatctcttctcgtaaagatcgagctttctctattagcaccgcccaagagagatttcgtaacatgcgtctcgtggagcaatatgatactcacgatcctaaagggcactgtttagttgcattaccgtttttgatgaagagaactaaagttattgagattgttgctgcaagggacattgtttttgcgcttgcacattctggtgtttgcgcagcttttagtagagagtcgaacaaaagaatatgctttttaaatgttagtccagatgaagtcatcaggagcttgttctacaacaagaacaatgattctctcatcacagtttctgtttatgcttcagacaatttcagctctttgaaatgcaagatccactagaattgagtatattctgagaggtcagccggatgcagggtttgct

SEQ ID NO: 6317 - DNA, 404 bp, Arabidopsis thaliana
  unsure at all n locations
  Clone ID: LIB23-005-Q1-E1-A12
acgcgtcnagctttaaagggcacacacacacagtcgcgagtttctctctggtgcgctctttgtggcggctcgtcttcttcttcttcttccacgggactctctctgaatcggtgattttcgatcttcctagggtttcgatctgaaaccttgcgatctacttgaaagagagattcagaaatttccaagtaataataatgtttgcgcctgcnactcaaccgcaacagcaacatgagcagaagaagcattcagagacngtttcatcngctgaagaagatgctttgaagtggaacaccgattgcgtttactttctcgcttctcctttaacctgcaagaggggacctgaatgcgattatcgccanagtggtgtanngcncngtatnaancccgaggggaattggctaata

SEQ ID NO: 6318 - DNA, 467 bp, Arabidopsis thaliana
  unsure at all n locations
  Clone ID: LIB23-005-Q1-E1-A2
ncccgggccgacccacgcgtcnagcttagcgtgcaggagaggatcagcatgtttgaaaacaagcagaaagagaactctggagagaaaacagctgtggcaaaatctactgagctgaaaagactttcttctgatttatcatcttctgcaggcatggaaaaggttgtggtacgaagatggagtggtgctagtgacatgagcatcgatttgggaaatgacaggaaggatgatacgggtgatagtccactgtgcactccctcgtcatcttcagtgtccaaagatggaagtggtgcatcctcaaaacaatttgtcggctacaataanaaagancagaatggattgagccatgctgcgaatcctcataggaatgaggaagaatgtacttccaacaatggtggtgactggggaatggatgaagtanagtctcaaaattcaagttctactttcttaccaaagacaaagnggtggac

SEQ ID NO: 6319 - DNA, 445 bp, Arabidopsis thaliana
  unsure at all n locations
  Clone ID: LIB23-005-Q1-E1-A3
gggncgacccacgcgtccaagaggatagagagatagcgaggctaatggatcagtgactcactgagtcagattttaccgattcattgcctccattgaagcctcttttctcagattctacgcttcactgtctcttctccatgtgcgtctcctcctcctccgtttcttcagatcttgctttccggtgacggttttaatcttcttctctctggtaacacgtataaagcatggcttacctgatgtagacatgtagtgttaggctaaagactcctcttttcacttctgtcttgttgagtttgtgttggtttaaggctttaagccaaaggcgttgttggtctgacaagatggcaatggcggtgtttaaggctcctctaaaaggggaatttcatggggctagaaagatggaagggaagcatataacacatctgcttaacaacagtctacangg

SEQ ID NO: 6320 - DNA, 480 bp, Arabidopsis thaliana
  unsure at all n locations
  Clone ID: LIB23-005-Q1-E1-A4
ccacttgntccgccccggtaccagcnatcccgggncgacccacgcgtcnacttgagttgctantggaactcangaccttgatacattgcacggtcctttcacatacgaggctttgccgccaacggatataaattttgtacctttgaagcaaacanagagcttcagggctgacnaacttantgaattctacaagtctgatatnaanctgaaaaagtttctacacataatcgagaattcacccgtcttccctgttttatacgacagtaagagaactgtgctgtcattgccacctattatcantggtgcacattcagcanttaccttacagacaaagaatgtcttcattgaatgtactgcaactgatttgacgaaggccaagattgttttgaatacaatggttacaaccttctcaaaattttgtgccagaaaatttgagatggancngttgaaattacatacgacgaagggaaantcctacat

SEQ ID NO: 6321 - DNA, 440 bp, Arabidopsis thaliana
  unsure at all n locations
  Clone ID: LIB23-005-Q1-E1-A6
acgcgtcaancccacgcgtccgcgccttgacgccttctccttccgtttcttcagcctctcgccgctaattaacgccgtctctggttgctaccaccgccgtaaccctaacggcatttttaatggcgtcgtgtgatgacgatttctctctacttggagacgatcagtcaaaccctaatcaacatcaccaccaccaccaagttcttcatcacacgccctacgctcctagacgattcaacccgaaaccatcgaatcagatccttttaccgcatcaccagaggaacggcgacgaggacgacgagaacgatgtcgttgtagaagcgtcttctgctttccacggtcacggtgttaatcctttcacggcggacgaaaattcgaatccgtatgatgataataacgcagctgtagacgaaggacgaagacgaagatctcggtgccaacan

SEQ ID NO: 6322 - DNA, 467 bp, Arabidopsis thaliana
  unsure at all n locations
  Clone ID: LIB23-005-Q1-E1-A7
gaattcccggcccgacccacgcgtcaaagttgttttcaagaatggttgatccggaaaggcatangaaagtggttaacatagatgatccaaacgcagcattctttgtccagcaagggaatcctaatgttcctgttgtgacatttgccatggaaaacaccaaagccgatgttcacccgttaaagtttgagctttccttgtttgagacacaggttttggttaatacccctcaaggtatactggagatctcttcgggtttgttaggacggcataacatttataatattcttgctgctgtggctgttgggattgctgttgganctcctcttgaggatattgttagaggtgttgaggaagtcgatgcagtcccaggaangtgtgagttgattgatgaggaacaagctttgggtgttattgtggatcatgcaaaacacacctgnatggcttgncaacggctgccaaaatccaat

SEQ ID NO: 6323 - DNA, 440 bp, Arabidopsis thaliana
  unsure at all n locations
  Clone ID: LIB23-005-Q1-E1-B5
acgcgtcngcaacaacaaaaccctaaaatcaagcttcgaaaatgggagagatgatgtacaagctcttcgcttcagcgtcactactaaccctaggattgtatcatctcatctgcactttcttccatctccttaaatctccccaatcctacgccgcgaaacccttttacccttttccacgtctctcctccgtcaccggaaacaaccaccacaatcacaancgcctccaaaatctaccactgttcatcctcatactctctctattcgtcgctttccttcacgaaaccctaatctccttctactccgatcctctcgtcaaaggaagtactcctgttcaccgattctcatctctcaattccgccgccgtgttcttcctcttcctcatcatcgccatttacaatctcctctccggattaanctccgttaatccntctcccttccga

SEQ ID NO: 6324 - DNA, 490 bp, Arabidopsis thaliana
  unsure at all n locations
  Clone ID: LIB23-005-Q1-E1-C1
tactttgntcaggccccggtcanagacaacccgggccgacccacgcgtccangtttgcgtcgctctcatcccagggcgagaaagatggtgaaacggagtaaaaagagtaagagtaagagggtgaccttgaagcagaagcataaggtcctgaaaaaggtgaaggagcaccacaagaagaaggcaaaggatgctaaaaagcttggccttcaccgtaagccaagagtagagaaagacccaggtatacccaatgactggcctttcaaggaacaagagcttaaagcccttgaagttcgacgtgcccgtgctcttgaggagattgaacagaagaaagaagctcgcaaagaaagggccaaaaagaggaaacttggtttggttgatgatgaggataccaagacagaaggagagaccatagaggacttacctaaagtttcaatgttccaanataactccggaaaaggcttctaaaaggngcctanttaaaatccattga

SEQ ID NO: 6325 - DNA, 492 bp, Arabidopsis thaliana
  unsure at all n locations
  Clone ID: LIB23-005-Q1-E1-C4
ttgtcggccncggtcacagcaancccggggncgacccacgcgtcnatttttctcggccaagttttctctagctcaggtgtttgatgtgaattttttgagggaggggaatgagttcaatgagcagaagcagaagtcgaagtagaagtcgtagtcgggatcggtttcgtagtcggagtccgagagacaggagaatgagatctgaacgagtttcttaccatgatgctccttctagaagggagagggagccacgtcgtgccttcagccaaggaaatctctgcaacaactgcaagcgacctggtcactttgcaagagactgttctaatgtttccgtctgtaacaactgtggtcttccagggcacattgcagcagaatgcactgcggaatcacgttgttggaactgtagagaaccgggccacgtagcctcaaactgttcaaacgaaggaatctgccactcctgtggtaaatctggacatcgagccanaaactgctctt

SEQ ID NO: 6326 - DNA, 445 bp, Arabidopsis thaliana
  unsure at all n locations
  Clone ID: LIB23-005-Q1-E1-C5
acgcgtcangtttcctcttctctgcaactcaccggttcgccggaaaactctacgccgtcgccggattttgcaccaacgaaaacttctttaaactactttcttcattattcttctgctgagtttcaaaaactcagccatgggtaattgtatcgcctgcgtcaagtttgacccagacaactcaaaaccaaaccagaagaagaaacctccacggggacggcaacgaaacccatacgacgatcccgatggtttaagaactcacgcaccgttacgtgtgattcctatgagccatcaatctcagatcagcgacaagtacatcttaggacgagaactcggtcgcggcgaattcggaatcacgtatctttgtacagatagagagactcgtgaagctttagcttgcaaatcatcnccaggaaaagctcggaacggccgttcaagttgaaaaagt

SEQ ID NO: 6327 - DNA, 419 bp, Arabidopsis thaliana
  unsure at all n locations
  Clone ID: LIB23-004-Q1-E1-H12
agcgagatcgtgaccagtggagagaggcttgagcggaaaaagaagaaggaagagaaggctaaagaaaaggagttgaagaagcaaaaagctttggagaaagagaggctggctgaactgaaggcaaaacaggccaaagatggaactaatgtccctaaaaagagcgcaaagaagagttccaaacgggatgcgtcagaagagaatcctgaggattttgtggaccctgaaactcctcttggagagaggaaaaggctttcttcacagatggccaaacaatacagccctgctaccgtggagaaatcatggtatgcttggtgggagaaatctgacctttttaaggcggatgctaagagttccaagccaccttttgtaattgttcttcctcctccaaatgtgactggagccttgcatatggncatgcg

SEQ ID NO: 6328 - DNA, 440 bp, Arabidopsis thaliana
  unsure at all n locations
  Clone ID: LIB23-004-Q1-E1-D8
acgcgtcngctctgcgtcgttctagggtttttgttactctttgcttcgaagatgggaaaggcaaagaaacctcaaaagtttgctgtcgtgaagaagatgattagccacaaagctttgaagcattacaaggaagaggttctgaatccaaacaagaaggacctcacggaacttccgagaaacgtaccgagtgttcctgcagggcttttcttttcttacaactctacattggttcctccttaccgtgttttggtggatactaacttcatcaacttctctatccagaataagatcgatcttgagaagggaatgagagactgtctgtacgcaaattgcactccttgtatcacggantgtgtcatggctgagttagagaagttaggtcagaagtatcgtgtagctctaaggattgcgaagattctcacttcganagactaccttgt

SEQ ID NO: 6329 - DNA, 487 bp, Arabidopsis thaliana
  unsure at all n locations
  Clone ID: LIB23-004-Q1-E1-E2
ctttagtnccaggccggtcaagaataacgggtcgacccacgcgtccgagctgatagtggtgctgctacgtcgtctataccaccaaatgtctatggtagctcagtcacggctatgcctggacagcctccatatatgagttatccgtcttactacaatgctgttccccctccaacacctcctgcaccggcctcgtctactgatcattcccaaaacatgggtaacatgccatgggccaacaatccttctgtctcaacacctgatcactcacaaggtcttgttaatgcaccttgggcacctaatcctcctatgccacccactgttggctattcacagagcatggggaacgtaccctgggctcccaaacctccagtacagcctcctgcagagaatccatcctctgttggagagtctgagtatgagaagttcatggctgagatgaagtagcatgcgtgttctgatgagaaactccttagtggagangtgtgat

SEQ ID NO: 6330 - DNA, 483 bp, Arabidopsis thaliana
  unsure at all n locations
  Clone ID: LIB23-004-Q1-E1-E3
cangtgccggtcaaagaattaacgggtcgacccacgcgtccgcccacgcgtccgcccacgcgtccggtccaccgacaaggactacaaagagccacctcctgcgccactgttcgagcccggcgagctcagctcatggtctttctacagagccggaatagctgagtttatcgctactttcttgtttctctacatcactgttttgactgtaatgggagttaagagagcaccaaacatgtgtgcttctgttggaatccaaggtatcgcttgggcttttggtggcatgatctttgctcttgtctactgtactgctggaatttcaggtggacacatcaaccctgctgtaacattcggtctgttcttggctcggaagttatctctgaccaagagcagtgttctacatgattatgcaatgtcttggagccatctgtggtgccggagtcgtcaaaggtttccagccaacgccgtaccagactctcggtggtg

SEQ ID NO: 6331 - DNA, 417 bp, Arabidopsis thaliana
  unsure at all n locations
  Clone ID: LIB23-004-Q1-E1-F11
gtcgacccacccgtccgnccacgcgtccgcataaacaaaaaaaagattctctcgatcaaacttgccggcgtccatggaagatttcggccgtcaacgaccatacggagacggagggatgcagatccagccttaccacggtaatcaaggcggtgatttcaggagctatagcgcatcgtangggacgagggagaacaatatatacgatgtgaaaaaggagaaatcgatagcaagatccaagtcttggggaataacggatccggagctccagaggaagaaacgggtcgcgagttataagatgtatggtgttgaaggcaaagtcaaaggctcttttagaaccagtttcaagatggcttaagcagaagtacacacaggtcgtctatggttggtggtgattcctttttcatcttttctanaatt

SEQ ID NO: 6332 - DNA, 494 bp, Arabidopsis thaliana
  unsure at all n locations
  Clone ID: LIB23-004-Q1-E1-F4
ctttacgcttnccagtgccggtcanagaattaacgggtcgacccacgcgtccgcccacgcgtccgagcaaacttcttctctttaccctactgttgacacatccaatcccgaagctcctataaaccctagctcatcatcttctactaacaatctctatccttctctcgatatgaatgatctcgctcgtaatctcttccctgaacaaccagagacgagttctattccggtttcagctcctcccgctgcgacggaggaagtaattttgaaaatctccggcgcgattcttcatttaatcgacaaatcttacagcgtcgagctcgcttgcggtgatcttgagatcatccgtattgttcaaggagagaatgttgtcgctgttctcgctagtgtctccgatgagattcaatggccgttgactaaggatgagaactctgtcaaggtcgatgagtctcaatacttcttcacgcttcgtcctaccaanagagattcacatgatt

SEQ ID NO: 6333 - DNA, 446 bp, Arabidopsis thaliana
  unsure at all n locations
  Clone ID: LIB23-004-Q1-E1-F7
acgcgtccnnnnnnnnnnnnnnnnnnnnnnnnnnnnnnnnnnnnnnnntgggggttgatttctataaggttcttgaagttgatcgaagtgctaatgacgacgagcttaagaaagcttancgcaaactcgccatgaaatggcatcctgataagaaccctaacaacaaaaaagaagccgaagctaaattcaagcagatctctgaagcttacgatgttttgagtgatcctcagaaacgagcaatctacgagcaatacggagaagaaggtttaaaccaagccccacctcccggcgccggtggtggctatcctggaggatcagacgccggagcttctttccggttcaatcccagaagcgctgatgatatcttctccgagttctttggtttcacgaggccttcttttggtacgggaagcgactcacgcgcaggaccttctggctttaggtat

SEQ ID NO: 6334 - DNA, 439 bp, Arabidopsis thaliana
  unsure at all n locations
  Clone ID: LIB23-004-Q1-E1-G12
ttccagaggtcgacccncccgtccgaacatattaccctgggttgtgtgagccagtttctcaaggtggacttggatttgattattatgtgaatctttctgcgtcagaaatgtgggtttctctcctcgacaatgtaccggataatgaatggagcatgagcaagattgtcagtacattggtggctaacaaagagtatgcagacaagatgctcagctatgccgaaaatcacaaccaatccatatcaggagggcgttcatttgctgaaatcttattcggtggagtcgataatggttctcctggaggaaaagaattgctagacaggggaatttcactacataagatgattagactgattacttttacaagtggtggccgtgcatacctcantttcatgggaaatgaanttggacntccngagagggttgagtttccaacgcagan

SEQ ID NO: 6335 - DNA, 498 bp, Arabidopsis thaliana
  unsure at all n locations
  Clone ID: LIB23-004-Q1-E1-G2
cttttacgctggccaggcccggtcanagaatanacggggncganccacgcgtccgctcttatgctttgtttgggagttttggtacttgatgggttctggttgttgttaccggtctccttcctaacccgttgataccagtcgatgccatctccatttgcatgaatatagaagggtggactgccatgatttcgatcgggtttaacgctgcgattagtgtgagagtatcgaatgagctgggtgcaggaaacgcagcgttagccaaattctcagtgatagtcgtctccataacttcaactcttatcgggatagtgtgcatgattgttgtcttagccacaaaagacagcttcccttatcttttcacttcaagcgaagctgtggcagcagaaaccacgagaataaccgtcttgttgggcttcactgtcctcttgaacagcctccagcccgtcttgtcagggggttgcggttggagccgggtggcangctctggttgcatacgtg

SEQ ID NO: 6336 - DNA, 445 bp, Arabidopsis thaliana
  unsure at all n locations
  Clone ID: LIB23-004-Q1-E1-G5
acgcgtccgcccacgcgtccggcaagaactggcatattccattgactttccctagtgaggctgttatatcagcctacttaaatccgcaagtggatctgtcgactgagaaattctcatggggcaaacctgatctttcagtacttagaaagctatgctgggaaaagtttaattggaacggcaagaaaacagatgaactactactaccagtcttgaaggagtatgaaaagcgcgagacgcaacttcggattgaagctttctattcctttaatgaaagatttgcaaagatccgtagtaaaagaatcaacaaagctgtcaaaggaattggtggaggtctgtcgtcagatgtggccgatcatactctccaggaaggtccaagaangacgaaataaganaaaagttgctcctcatgaaactgaagatacaacacttcagacagagatcacct

SEQ ID NO: 6337 - DNA, 431 bp, Arabidopsis thaliana
  Clone ID: LIB23-004-Q1-E1-G6
atgtcgtttcttttccgtaagaacggtagtagttcacggaggaagatcaaagaaaaactccgtggtcgtcactcagatcgaggtgggaagagagaagaagatgagagatacggcggctccggctccgatttacctccaccaccgtctccttggggatttctcttcccggaggattttgtaagaatcgacgggaatctcaaagctattttccaactctagaagcttcttccagtaaatcacatctaatccttcatcatctacaataacagctttgagagttggaaaatagcgggaaaattagaaaaaaccctaaacctagaagaagaggagacaaatccggtgacggatttagaagaactggagcagatcaagacgataacgatgatggtgatgatgaagtaggagatgaatctatcgaagaagcgtttcgt

SEQ ID NO: 6338 - DNA, 448 bp, Arabidopsis thaliana
  unsure at all n locations
  Clone ID: LIB23-004-Q1-E1-G8
acgcgtccgctgaatcaaatctcctagctcttctacgcaaaatcgagtgcatcgacaatggcggaacgtggtgtcgaacgtggtggagatcgcggcgatttcggacgtggattcggtggtcgcggcggtggaagaggtggtccgagaggtcgtggtcgccgtgcaggtcgtgctccagaggaggagaaatgggtgccagtgactaagcttggtcgtctcgtaaaggaaggtaagatcacaaagattgagcagatctacctccattctctcccagtcaaggagtaccagatcatagatttactcgtcggtccttcattgaaagacgaagtgatgaaaatcatgccggttcaaaaacaaaccaganccggtcagagaacgagattcaaggccttcatcgtcgtcggagatagtaacggtcacgtcggattaggagtcaatgctccaanga

SEQ ID NO: 6339 - DNA, 442 bp, Arabidopsis thaliana
  unsure at all n locations
  Clone ID: LIB23-004-Q1-E1-G9
tgtangcctccaaaaattccaaggccaaacantctcaccttctctctcnctctctataacaaacattaatacacacaccaaaaaaaaacctgtttatgtccaaaagatctctgattcctcaattcttcttcnatagcttttggtctccattctcatctcttaatctccagtgagatcagctccaattctaactggtctctctaaataaaaaacagaaataaaaatccaacctttttcaattttcgttcaattttcccggaaaaaaaagcgatccttttgatttttcgatttctccaagtaacaattcaaaatgggtctaaagggttttgctgaaggaggaatancttcgattgttgcgggttgttcgaccaaccgcttgatnnaacaaggnccgaatgcaacttcaaggngaatcagctccgattcaaacaatctccgaaca

SEQ ID NO: 6340 - DNA, 431 bp, Arabidopsis thaliana
  unsure at all n locations
  Clone ID: LIB23-004-Q1-E1-H10
tgttnctaaaggatcagaaagctcatctggcaatctcaaaagtgctcaatcttgctagtattcttaatgagccttctctaggggaatggacttccagagctgaattatgtgacaatttacatgtgccggtgagaatcgctgttgtggggaaatatacaggcctctctgatgcttatctctctgtcttaaaggctctcttacatgcttctgtggcttgtcgcaaaaagctcgtagttgattgggttccagcttgtgatctcgaaaaagaaactgagaaagagaatccagatgcgtataaagctgcttggaagttgctaaagggtgtagatggaattcttgtacctggaggttttgggtgatagangagtggaagggaagattcttgctgcaaagtatgcacgttaaaacaaaatcccgttctccggtaattg

SEQ ID NO: 6341 - DNA, 483 bp, Arabidopsis thaliana
  unsure at all n locations
  Clone ID: LIB23-004-Q1-E1-H11
gaactttacccgccggtagcctccaaaattccaanggtcgacccacncgtccgggcgagagagagtgactttttttgtttgcctttgttaatggcttgtgtgtgagattcattgaattttttgaaaattctgacgaataaaaaccatatctaccaatcacaaaccctagatttttgttatcttcttcatccgaagattctctttgatctgtgtctccttccttctgattctcccatttcatttcattgattcttttgattcgattctattcgagctcaattttgtagatcagaacccagaatcgaatttgggataacttgaacaatatccttggtaacttgttgatctgaatttgagtgaagaagacatcgaattcaagtttggtgtgggagattttttttaatggagtgatgatgatttaaaggggaaggtaagggaacgatgactggattgggtgttccatcaagtaccaangttcctgga

SEQ ID NO: 6342 - DNA, 429 bp, Arabidopsis thaliana
  unsure at all n locations
  Clone ID: LIB23-004-Q1-E1-D7
aactngccgcgcacaggtaanggtatagaattcccggccggaacccttaagaanagtcttagcaataccgttgccgttagccaggtgagaatccttaagcgcggcgaagaaatccccaaggagacttcagatctggttgtggaaatgtcagatctgggatctactcgtcggattggaccagatccgggtttgattccgggtcagatccgtttatctggccgcaaatcgaaatcagcaccgttttacgccggtcctgtgaccatgacctcgccgcctcctagcgatgtcccgcttccagctttcttcacgaagaaggcaacanatgatcncatcatcgatccttcgcctagacatcgcctgacggtgtctgtcaccgatcatttntgattttttaannatctccgangatccaaatggttaccanagttg

SEQ ID NO: 6343 - DNA, 457 bp, Arabidopsis thaliana
  unsure at all n locations
  Clone ID: LIB23-002-Q1-E1-G5
acgcgtccgcggacgcgtgggcggggaacccggttctagtacctccgcccggtatcctccctaaggacttccgtgacccaacgactgcatggaagacatcagaaggaaaatggcggatcacgattggttccaagctcaacaaaactggaatctcactcgtgtacgacacaatcgactttaaaacatacgagaaacttgacacattgttgcaccgagttcccaacactggaatgtgggagtgtgttgacttttacccggtgtctaagactgcgggcaatgggcttgacacatcggtcaatggaccggatgtgaagcatatcgtgaaggctaacatggacgacacgaggttcgatnattatgctgtanggcacgtatttcgattcaaacggaacatggnttcccgatgatccaactatcgangttgggaatnactgccaantttaagatatgattacgg

SEQ ID NO: 6344 - DNA, 457 bp, Arabidopsis thaliana
  unsure at all n locations
  Clone ID: LIB23-002-Q1-E1-G7
acgcgtccggtcggaattggtgcttaccttgcccgactgggcatgaggtgcatacagagactaagaccaaccgatcatcttgaccggcttttctacactcaacaagctgcttggacgtgaggtctatagctctcacatgcaacttggtggcccaaaaatcatggggacaaatggtgttgttcatcttacagtctcagatgatctcgaaggtgtatcagcaattctcaactggctgagctacattcctgcgtatgtgggtggtcctcttcctgttcttgctcctttagatccaccggagagaactgtggagtatatcccaagagaactcttgtgacccacgagctgctatagctgggattaacgataatactggtaaatggcttggtgggtaaccttgataaaaatanccttgttgagactcctgaaagctggggcaaaggacngtagtgactggtaa

SEQ ID NO: 6345 - DNA, 440 bp, Arabidopsis thaliana
  unsure at all n locations
  Clone ID: LIB23-002-Q1-E1-G9
acgcgtccgcaaaacttttgatcccaaattcaacagatatctctgaatctatcgcttccaagggttttctctagcttaatctcagattcgaatcgttccatagtgatactatgccgaagaacaagggaaagggaggaaagaacaggaagagaggaaagaacgaagcagatgacgagaagagagagcttatattcaaagaagatggacaagaatacgcacaagtccttcgtatgcttggaaatggaagatgtgaagctatgtgtatcgatggaaccaagcgtctttgccatatccgtggtaagatgcataagaaggtttggattgcagcaggtgatattgtgcttgttggtttgagggattaccangatgacaaagcggatgtgatccttaagtncatgtctgatgangntaaggctcntaaaggctaaggtgaacctcca

SEQ ID NO: 6346 - DNA, 473 bp, Arabidopsis thaliana
  unsure at all n locations
  Clone ID: LIB23-002-Q1-E1-H10
cccggaaacngaatcgcgggtcgacccacgcgtccgcacagagctgacgttagcatttgtctctgaaatcccagatccgaaaacccaacaatggcgtcagagaacaacggatccagatccgattccgaatccatcaccgctcccaaagctgattccaccgtcgttgaaccgaggaagatagctctgatcaccggaatcaccggccaggacggatcatacctgacggagttccttctcggaaaaggctacgaagttcatggtctgatccgtcgatcatcgaatttcaacacccagcgaatcaaccatatctacatcgatncacacaatgtcaacaaagctctgatgaaactccactacgccgatctcaccgacgcttcctctctccgtcgttggatcgatgtgattaaaccctgacgaagtttataacctanctgctcaatctcacgtcgctgtctccctcgaagattcctgga

SEQ ID NO: 6347 - DNA, 438 bp, Arabidopsis thaliana
  unsure at all n locations
  Clone ID: LIB23-002-Q1-E1-H11
acgcgtccggaantccgatcaccgatcgatatcgacggacatgggacgcacacgtcatccaccgtagccggcgttttagtcgcaaacgcgagtctctatggcatagcaaacggcaccgcccgcggcgcggttccgtcggcgaggttagcgatgtacaaggtttgttgggcgagatccggctgtgctgacatggacatactcgccggattcgaagcagcgattcacgacggcgtagaaattatctccatctctatcggcggtccaatcgccgattactcttccgattcgatatccgtcgggtcgtttcacgcgatgaggaaaggaatcctcacggtggcgtccgccggtaacgacgggcctaactcaagaactgtaacgaaccatgaaccgtggataatgacggttgctgcaantgggaaccattgggacgttcaaaaa

SEQ ID NO: 6348 - DNA, 452 bp, Arabidopsis thaliana
  unsure at all n locations
  Clone ID: LIB23-002-Q1-E1-H12
gacccacgcgtccggggagaatcttgctttgcaaaaggctgcttttgttccgcaacctgagagtataaatgacacaagctatttcgtatcacgctttagtgaaagcagttgcagcgatactgaaactggtaacaacagtgggtcaaatccagattcaggagacgagttggatgaatgcaccaacctggagaagtttgattctccgccttattatctctcgctcattaacttttctttcaagaatttgtcacaattggcttcaatcaatcatgatgtgctattgcaaaaggatccagctaaaggaggaggagactcaccctttaaaagccatggaacgtaaagctctcctacaaccgtcaaangtggccttagtccgctgttttccctggtttgcgccctgctttgaccgtttgtaactgctgctgccaactaatgcctgaaaattgtaactc

SEQ ID NO: 6349 - DNA, 470 bp, Arabidopsis thaliana
  unsure at all n locations
  Clone ID: LIB23-002-Q1-E1-H2
acgcgtccgtgctgatgggaccctaactgagattttcattgaaagagtgttcgatgagcatgtccgccgtggtaaaatcgtggcaggcaattcccgggaaatggactttgacagtttcctcgattttgttcttgctttggagaacaaagatactccagagggtttgacgtatttattccgttgccttgatctccaagggagaggctttctcactactgctgatattcactctcttttcagagatgttcaccangaaatggatagaaggtgggaactatgaactgtgcatagaagatgttcgagacgagatctgggacatggtgaaancgtctgacccattaaagattactcccggggtgattcccttgggaangttaacaaaggnggaaaccntttccaancnatgcttaaaaanttgcntggntttctgggnnnaagnaaaanccttagaaaccttcttcaaaaanaaa

SEQ ID NO: 6350 - DNA, 477 bp, Arabidopsis thaliana
  unsure at all n locations
  Clone ID: LIB23-002-Q1-E1-H3
acgcgtccgcccacgcgtccgcgggacgcgtgggggaaantatggcttcctctatgctctccctctgccgctgtggnttacctccccggctcaagccaccatggtcgctccattcactgggtttgaaagtcatccgcttctttcccggtcacccgcaaggccaacaacgacattacttccatcacaagcaatgggggaagagttagctgcatgaaggtgtggccaccaatcggaaagaagaagtttgagactctatcttacctccctgaccttactgacgtcgaattggctaaggaagttgactaccttctccgcaacaaatgggattccttgtgttgaattcgagtttggagcacggatttgtgtaccgtnagcacnggnaacactcccnggntactaacgatgggccggtactggncaatgtggnaaccttccaatggttccggatgcaaccgaatccgctcaaatttttgaaag

SEQ ID NO: 6351 - DNA, 463 bp, Arabidopsis thaliana
  unsure at all n locations
  Clone ID: LIB23-002-Q1-E1-H4
cggcgtccgganatccaaggtcgacccacgcgtccgcccangcgtncgcccacgcgtccgctcttatccttttaccctcatcatcctccactatttacagttttgccactctgactttatgctagcttcttccggtgactggcgataacacgagagagccttcgccttctccaagcttcatactcttccgacgataaagattagaagacatgaagaacggtaaccggaaaacaacgccggaaacagagaagtctcaccggagaaagttatcagagaaagcgatgtcgtttcacggnagaggaacaacgccgttatcaaatccaggcgagcttcgaagaccgaanacgttaccggagttattctccaccggtcaaagcatcaccgttaccggagaacggtttaacttccggccacgttttgacgaaacntttacttaacgngacggtacaaagggaantttaag

SEQ ID NO: 6352 - DNA, 433 bp, Arabidopsis thaliana
  unsure at all n locations
  Clone ID: LIB23-002-Q1-E1-H5
acgcgtccgctggtccggtcgcatctgggccagaacctggtgtgcccactacaacggaaaattctcctgcctcaccggagactgcggaaaccgcctggaatgcaacggtctcggcggggcaccaccagcttctctagctcagttcgacctccaccacggtggtcaccacgacttctcctcttacggtgtctctctcgttgacggttacaatgttccgatgaccgtgactcctcacgaaggccatggtgtctgtcctgtcgttggttgtcgtgaagatctaataaaaacgtgtccggctcatcttcangtccggtcacacaagtggacacgtggtggcttgtaagantgggtgtgaggctttccatacagacnagctgttgttgtcgtggtcantanaataanccctaacacntttaaacctccagncaatcct

SEQ ID NO: 6353 - DNA, 439 bp, Arabidopsis thaliana
  unsure at all n locations
  Clone ID: LIB23-002-Q1-E1-H6
acgcgtccggagatagttgtgacagagagattcatggcggaagcttgcggagtgagaaggatgaagctgggaagccaaggccttgaggtatctgcgcaaggccttggttgcatgggcctctccgctttctacggtgctcccaagccggaaaatgaagccatcgctctcatccaccacgctattcactccggcgttactctccttgacacctccgatatctacggccctgagaccaatgaagttctcctcggaaaggctctcaaggatggggtgagagaaaaagtggaacttgcgaccaaatttggnatcagttatgcanaaggggaaaanacaaggtcataggagatctgaatatntaagggcgnctttgtnaaggcaaantttaaanagggtagtttattgccnggnttccntttccaataacaagaancggtcaaaa

SEQ ID NO: 6354 - DNA, 463 bp, Arabidopsis thaliana; identical to SEQ ID NO: 6351
  unsure at all n locations
  Clone ID: LIB23-002-Q1-E1-H8

SEQ ID NO: 6355 - DNA, 441 bp, Arabidopsis thaliana
  unsure at all n locations
  Clone ID: LIB23-002-Q1-E1-H9
acgcgtccgaaactgttttgcttctagatccgatccaatccaatcaaacaaaggatccgattgatcagaaaaaatccaccaaatttctcaagatcgaaacatataattgaagatgagcgacgtatttgaagggtacgagcgtcaatactgcgagctctcaaccaatctctctagaaaatgtcactctgcatcggttctctccaacggagaggagaagaaggggaagattgctgagatcaagtctggaatagacgaagctgatgtcttgatccggaaaatggatcttgaggcaagaagtttgcagccgagtgctaaagctgtgtgtctttctaaactaagagagtataaatccgatctgaaccaattgaagaaggaattcaaacgaatctcttccgcaaatgctaaaccgtcctccccgtgaaagantttatgggaacccgg

SEQ ID NO: 6356 - DNA, 508 bp, Arabidopsis thaliana
  unsure at all n locations
  Clone ID: LIB23-002-Q1-E1-G4
agtggtttgccttggcntagncgtccggaaatccnnggtcgacccacgcgtccgtttgtcttctttcttctccttctcacttacttaacccataagccatcaatcccaaacacaccattacaatggnnnnnnnnnnnnnnnnnnnnnnnnnnnnnnnnnnnnnnnnnnnnnnnnnnnnnnnnnnnnnnnnnnnnnnnnnnnnnnnnnnngaccaatcaccaaaagacccttacctctctctccgtcgtctcgctgaatcctcaatcgctagagctcataaactcaaacacggcacctcaataaaacccgacgaagatgctctctcctccaccaccaccgcatccgccaccgtcgtgaaatctcctctctctgctaaaagctacgggcggatactcaagtctctctnagctttnggaaaacgtcgcaaacaatcccaattcgttttcgaaaacnggaaacaattcccgtttnggggaaccttggtncctcaaagatatctccgntccgg

SEQ ID NO: 6357 - DNA, 479 bp, Arabidopsis thaliana
  unsure at all n locations
  Clone ID: LIB23-002-Q1-E1-E10
acggttcggttcccggcctaccganccggaattcncgggtcgacccacgcgtccgcgcatccatttatcatcatctccttataaatctcgaatctgccacagagagagcgtgtgacaaaatgagttcataagattccgttatcgtcttcctgattcctccaaatctccggcgaatttgcactctttacctctctttgactccgtgagattcgaggattgttagtttcttgtgatgtgtagtctttgaagcaggggatttttattgtattgaggaagaagatggggtttgagccgttggattggtattgcaagccggtgccgaatggtgtgtggactaaaactgtggattatgcgtttggtgcatacacgccttgtgctattgactcttttgtgcttggtaactcccatccggttctgttgattctgtgtccttaacgcttgtggctcatcacnaaggnttacaaagtggntaagttttg

SEQ ID NO: 6358 - DNA, 445 bp, Arabidopsis thaliana
  unsure at all n locations
  Clone ID: LIB23-002-Q1-E1-E12
acgcgtccggagacattctacagatcgcttgtcgcaacagaaaacagcaaggttaataaaatatgggaaaaattggaaggttacaagaagaagcttgcgcgagcagaagcaatattagcagcaactaataaccgtcccacgaacaaaaccggcttctgtgggctagtcggtaaacaagtagacagcattgagtattacactgagctaatcaacgagtctgtagccaaactggaaacagagcagaaagcggttcttgctgagaagcagcaaaccgcagcagtggttttcttcacaaccagggttgctgctgcatcaagcagctcagtctctgcactgccagatggttgataaatggactgtgacccgaagctcctgaaccacggnaagctcctaaggcaagaatctcaacatcaaagctcctcaacaagaataatccggcaatact

SEQ ID NO: 6359 - DNA, 484 bp, Arabidopsis thaliana
  unsure at all n locations
  Clone ID: LIB23-002-Q1-E1-E3
ntggttgccttgcctagcctccggaatccaaggtcgacccacgcgtccggtttactctctctctcncctccatcggcgacgaccaccggagatcagcgtcaccgtaccaaaacatcatttaccttcttttagatttgttgttttttaatcagttgaatcggaataaaatatcgcatcagagatgagtaacgagcttctcaccatcgatcctgtcgaccttcaattcccttttgaattgaagaagcagatctcttgttctctctatttgggtaacaagaccgataattatgtcgccttcaaggttaatttcaatttttgaattggatatatattcttttgtgtatatcttaatgttttcaagggtcaattattttttaaaggttaagacgacgaatccaaaagaagtactgcgttangcctaatactggtgttggttcanccccagattctcctccngaaagttttagtgaccatgcaagctcaa

SEQ ID NO: 6360 - DNA, 458 bp, Arabidopsis thaliana
  unsure at all n locations
  Clone ID: LIB23-002-Q1-E1-E4
acgcgtccgcccacgcgtccgttttagagagcctcgnnnnnnnnnnnnnnnnnnnnnnnnnnnnnnnnnnnnnnnnnnnnnnnnnnnnnnnnnnnnnnnnnnnnnnnnnnnnnnnnnnnnnnnnagaagaaaatttccattgttcgaaacaggagttacaatgaaacagaggaagaacagtaatctctcaatcttcgtcgtagtcttctctgttttcctcttcgggatcttcatgtacaatgaagacgtcaagtccatcgcagagtttcctttctccacctcaaaacctcacgacgtccacgacgaaagcgacaccgatnacaagagatnacaacactaccggttcaagagtcgatnaagaactcagacccaattcagggaatcgnttaaaaacgnannnccnagttcaagattccanttaaggacgtttccaaaaccagtttcaagaaggnggggtt

SEQ ID NO: 6361 - DNA, 456 bp, Arabidopsis thaliana
  unsure at all n locations
  Clone ID: LIB23-002-Q1-E1-E5
acgcgtccggcaccatcaatgaaagaaatttttttctaaagataatttcaagaaaaacaagaaacttgttttgctatccgccgccgtagctttgctcttcgtagccgccgtcgccggaatctctgccggagcttcaaaagccaacgaaaaacgaactctatccccgtcgtctcacgccgtgctaagatcctcatgcagctccacgcgttaccctgagctctgtatctctgccgtggtaactgccggcggcgtcgagctaacgtcgcaaaaagatgtcatcgaggcatcggtgaacctaacaataaccgccgtggagcacaattacttcaccgtgaagaagctgatcaagaagaggaaaggactgacgccgcgcgagaagacggcgcntcatgactgtttggagactattgatgaagacctggacgaactccaagaaacggtgggaagatntccaat

SEQ ID NO: 6362 - DNA, 452 bp, Arabidopsis thaliana
  Clone ID: LIB23-002-Q1-E1-E7
acgcgtccggtcaacggaggtggaatcattgagacttgtttctggcccgggaagtatgcattagagctaagttcagccgtctatggtaaactatggaggtttgaccaggaaggcttacccgcggatctcatcaaaagggggttggctgaggaagataagaccgcagaacatggagtacgtctgacgataccagactatccatttgcaaatgatggtctaatattgtgggatgcaattaaagaatgggtgacagactatgtgaaacattactatcctgatgaagaactgatcacatcggacgaggaactccaaggatggtggagtgaagtgcggaacataggccacggagacaagaaagacgaaccttggtggcctgtcctcaaaacacaagatgacttgattggtgtggtaactacaattgcatgggtcactcaaggtcacaatcaacttta

SEQ ID NO: 6363 - DNA, 445 bp, Arabidopsis thaliana
  unsure at all n locations
  Clone ID: LIB23-002-Q1-E1-E8
acgcgtccgaaaccatcattttctgaatctgtcaaaccaaaagagttcatggagactttgctgcagaagcttaaagactcactagccatagcacttgtccatttctatcctcttgcaggtcgtctctctactttgaaaaccgacaattcaagatctcactctgtgtttgtggattgtaataatagtcctggtgctagatttatccatgctgaatcagatctaagtgtgtcagacattcttggatccacatatgttcctttggttgttcaatctctctttgatcatcacaaagcattgaatcgtgatggttacaccatgagtctcttatcaatcaaggtaacagaactggtanatggagtgttcataggattgtcaatgaatcattcccttggaaatggaanttcctccnggaanttctcaaatccttggccgganatttcaattc

SEQ ID NO: 6364 - DNA, 444 bp, Arabidopsis thaliana
  unsure at all n locations
  Clone ID: LIB23-002-Q1-E1-F10
acgcgtccgcccacgcgtccggattctgattctgatgaatcgctgggagactgggcaaatttggaaacaatgaggagttgtcatcccatgttttttgcaaagagaatgactgaggttgcttcaaatgatcctgttgattggatggatcagccgtctgctggccttgctatccagggacttttgagtcatatcttagtggaagattattcagatatccaaaagaaacttgctgatagcaattctacaactaacggaaacaaggatgcagaaaacttagtggacaagcttgaagacaatagtaaggcaggtggtgacgaatctgagatagattcatcacaggatgaaaaagcaagaaatgtggtggcgttttacaagctggagatgataaagaattcaacttatcacaacacaaagggggattaagactgaaattnaagggtggaa

SEQ ID NO: 6365 - DNA, 495 bp, Arabidopsis thaliana
  unsure at all n locations
  Clone ID: LIB23-002-Q1-E1-F12
nggttgccttcctggcctaccgnaccggaattcccgggtcgacccacgcgtccgttccgatcaaacggcatatttttccctctcgagagagcgataatgtggaaactgaagatcgcggaaggaggtagtccatggcttagaaccaccaataatcacgtcggaagacagttttgggagttcgatccgaatctcggtactcctgaggatctcgccgccgtcgaagaagctaggaagtctttttcggataatcgattcgtgcagaaacatagcgccgatctgcttatgcgccttcagttttcaagagaaaatttgattagcccagttttacctcaagtcaaaatcgaagacactgatgatgttacagaggagatggtggaaaccacgttaaagaggggtctagatttctaatcaactatacaggcaaaacgaagggcactgggccaagtgaattaagggtgggcccaangtttccntccccccaaagaactgganaaa

SEQ ID NO: 6366 - DNA, 439 bp, Arabidopsis thaliana
  Clone ID: LIB23-002-Q1-E1-F9
acgcgtccgtgcagagccaccaccgaagattactccctttgtggaatacgaagaagagcttgaagatgatgacgatgatctctcgctttcgtcagattccgatatcgctgaagctcttgattggctagacggtaaagacgatgacgagctaattggtggtggcttttctcttcatgctcgtcgtcctaatgctcacggtggacatggttcacgccctaactctagtgctcttcagcctatttcaaataaggcccagaagcttactagtcacgttcgtgcttctcctttggagggatgggaaggaagagttaaagttgggatgtcgaattctgtgacaactgcgattcgtggaagtcttaaagatacaagaaattgggagaagtaggaatactgataaagcggaccgggcaactgttgaacaagctcctgattcaaagga

SEQ ID NO: 6367 - DNA, 190 bp, Arabidopsis thaliana
  unsure at all n locations
  Clone ID: LIB23-002-Q1-E1-G11
acgcgtccgagatcgcgagcggccgcccnnnnnnnnnnnnnnnnnnnnnnnnnnnnnnnnnnnnnnnnnnnnnnnnnnnnnnnnnnnnnaacggaaaacatattgaggatgcgaataaaagattactgcgtttgattttcnnnnnnnnnnnnnnnnnnnnnnnnnnnnnnnnnnnnnnnnnnnnnnnnng

SEQ ID NO: 6368 - DNA, 445 bp, Arabidopsis thaliana
  unsure at all n locations
  Clone ID: LIB23-002-Q1-E1-G12
acgcgtccggcttcatcatcttctttctagtctctctctctctcttcaccgcgtacacagtaacacagaccctttttccctcttactcaaggttcttctttgtcatcttgttgccgaatccacaaagaggagaataaagattcgacctttattagatattaacgactctggatttttgggtttttggagttggatccacatgggttcttatccggatggattccctggatccatggacgagttggatttcaataaggactttgatttgcctccctcctcaaaccaaaccttaggtttagctaatgggttctatttagatgacttagatttctcatccttggatnctccagaggcatatccctccnnnnnnnnnnnnnnnnnnnnnnnnnnnnnnnnnnnnntgtacaaggagatctgttaacatccntcatccgatgacgcctga

SEQ ID NO: 6369 - DNA, 393 bp, Arabidopsis thaliana
  unsure at all n locations
  Clone ID: LIB23-002-Q1-E1-G2
gtcgacccacgcgtccgatcaatttctgaaacttttagtcatcatcagctcaatttcggatctccggagttgtatttttactcctttgtcggaggtaaaatggctcagtcgtcgttggtggcggcggcggggagaagcggaagggttatcggcgattatgcggtgggtcgacaaatcgggtcggggtcgttttccgtggtttgggaagggaggcatcttgttcatggcaccgtcgttgctatcaaggagatcgctatggctcggcttaataagaagttgcaagagagtctcatgtcggagattatcatcttaaggaagattaatcatcctaacatcattcgctttatcgacatgatcnaggctcccgggaagataaatttgggggttggngta

SEQ ID NO: 6370 - DNA, 469 bp, Arabidopsis thaliana
  unsure at all n locations
  Clone ID: LIB23-002-Q1-E1-G3
gtccggaatccaaggtcgacccacgcgtccgctaattcctctcttcagcttcttgtgttgtgacgcatactcgtcgcagtcttgagatatggccgccgcagtttccaccgtcggtgccatcaacagagctccgttgagcttgaacgggtcangatcangagctgtatcagccccagcttcaaccttcttgggaaagaaagttgtaactgtgtcgagattcgcacagancaacaagaagagcaacggatnattcaangtgttggctgtgaaagaagacanacanaccgatggngacagatggagangtcttgcctacgacacttctgatgatcaacaagacatcaccaagaggcanagggtaaggttgactctgtcttccaagctcctaatgggaaacgggaactcaacaagnctgtccctaactcaatacgaatacnttaanccaagggccttaggcantacaaacttg

SEQ ID NO: 6371 - DNA, 467 bp, Arabidopsis thaliana
  unsure at all n locations
  Clone ID: LIB23-002-Q1-E1-E1
acgcgtccgcggacgcgtgggcggacgcgtgggcgaacctttcaagattgcaatgcaaaaattcacaaagaagattgtggatatgatgaaagaagaaaagctgtttgagactcaaggaggacccatcattctctcacagatagagaatgagtatggaccaatgcaatgggagatgggagcagcaggaaaggcttactcaaaatggacagctgaaatggcattgggactgtccacaggtgtcccatggattatgtgcaagcaagaggatgctccttaccctattatagacacatgcaatgggattttattgtgagggtttcaaaccaaactcagacaataagccgaagttgtggacagagaactgggactgggttggntcacnggaatttgganggtgccgataccaaattagancaatccaaagacaattgcgttcccccgtggctcgtttcaaacaagaacngggg

SEQ ID NO: 6372 - DNA, 413 bp, Arabidopsis thaliana
  unsure at all n locations
  Clone ID: LIB23-002-Q1-E1-B4
acgcgtccgcgangataataacctcaccgggcgccaccaacaccgcccattctatcaaccaaacaaaatctcgccgctaatttctctctctatggcgctttattgccgtgatacactaatcatcatcttccaaaagctcaccgtcgccgatctagcgcgtgcgagctgcgtctgtaaggtttggaattctgtagccacagaagacgatcttgttgtatctgctttcacggctccatggcggatcaaagaacttgttggaagaccagcttctgtttcgttttggagagataacggaatctggaaatttgctatttctcatcggatttgtcgtggtgatantgtgactancctcgcccgtcaaatacgccgttcaanggttatnggcataaagcgggctaaacaacatggtnacc

SEQ ID NO: 6373 - DNA, 460 bp, Arabidopsis thaliana
  unsure at all n locations
  Clone ID: LIB23-002-Q1-E1-B5
acgcgtccgcagcggcaaaaagttctgaaaatgcagtttctcgagtatcatttggtgcagatcataaaagagctgaggtgatgggtaaaccaatggagaacagagaccaggtgaggcaaacagaatcagctgagaagagtcaccgcaaggaaaatgtgaccaagagtgagaaaccaagggatcaagaaggggtaaagaagactgaagcaaaggataaagacagaaataaagagaagaaagaggaaaaaacagagtcgataaataaaactcgtcaggagaaaccaaaattgatacgagggcccaagttagaggaaagagaaaaggactctccggatttaagaaattgcaagctgcctgacgtttcacggacaagcatcaagaaccttcacaccganggaaatcctggcaaacggaangatnatatgacaaatggattccctggtatgaaaatggnaccacg

SEQ ID NO: 6374 - DNA, 460 bp, Arabidopsis thaliana
  unsure at all n locations
  Clone ID: LIB23-002-Q1-E1-B7
acgcgtccgagaagacgaagaagacgaagaagaaagagaaagtctcttagcaaacatgaccgccaccgaagctaagaatcgcaaaatcaatgtcggagatggagatgacgttgttgatatcgaaatccctgacactgctcatcaaattagcagcgattcatggtttcaggtggcgttcgttttgaccaccggtataaacagcgcgtatgtgttgggatattcaggaacaattatggttcctttaggttggattggtggtgtggttggtcttcttattgctactgcaatctctctttatgcaaacactctaatagctaagcttcatgagtttgggtggcagaagacacattcgctatagagaccttgctggattcatttacggtaaggaaggcttaacaacctacatgggggaattgcaataaggttaatcctttcangaattaaattgtgggttccatta

SEQ ID NO: 6375 - DNA, 441 bp, Arabidopsis thaliana
  unsure at all n locations
  Clone ID: LIB23-002-Q1-E1-B8
acgcgtccgagtaaacaatggcgataattccgttagcacagcttaatgagctaacgatttcttcatcttcttcttcgtttcttaccaaatcgatatcttctcattcgttgcatagtagctgcatttgcgcaagttctagaatcagtcaattccgtggcggcttctctaaacgaagaagcgattcaacaaggtctaagtcgatgcgattgaggtgttccttctctccgatggaatctgcgagaattaaggtgattggtgtcggtggtggtggtaacaatgccgttaaccggatgatttcaagcggtttacagagtgttgatttctatgcgataaacacggattcgcaagctctgttacagtcttctgctgagaacccacttcaaattggnnaactttaacncttgggcttggacnggngggaaaccggcttctgngggaaaa

SEQ ID NO: 6376 - DNA, 450 bp, Arabidopsis thaliana
  unsure at all n locations
  Clone ID: LIB23-002-Q1-E1-B9
nacaaccaaaaaaaccaacctttttttccacctaaatctttgaatatcacaatatttactatttacaatggcgccacaagaacaagcagtttctcaggtgatggagaaacagagcaacaacaacaacagtgacgtcattttccgatcaaagttaccggatatttacatcccgaaccacctatctctccacgactacatcttccaaaacatctccgaattcgccactaagccttgcctaatcaacggaccaaccggccacgtgtacacttactccgacgtccacgtcatctcccgccaaatcgccgccaattttcacaaactcggcgttaaccaaaacgacgtcgtcatgctcctcctcccaaactgtcccgaattcgtcctctctttcctcgccgcctccttccgcggcgcaaccgccaacgccgcaaaccctttcttcactccgggggn

SEQ ID NO: 6377 - DNA, 440 bp, Arabidopsis thaliana
  unsure at all n locations
  Clone ID: LIB23-002-Q1-E1-C1
acgcgtccgcaaagctccgccgccgcctagggttaccggttccggtggctttttcagcaccggaaccggatttctttgttttagtgtctctagtttcgatttcttgtgggtttaatgtgatctgaatcctattttcttctaacggtttcttttctaaattctcagatctaaatctgtaaagtctaaatcttttcctcttccggttttgttgcttgtttgtctccttcgtctgcagtttcaattctggccgttccaactatggcagaggcaggtttttttctatccttcaacgcctcagatgcaaatnccccctcaattgaagatctagatccctcctttccatccttgagaactttggnctttggggtncccgggatgttgattgaatgtcgcaanggccgtttnangggaaaggnagaagtcctgggggtttaaattnc

SEQ ID NO: 6378 - DNA, 435 bp, Arabidopsis thaliana
  Clone ID: LIB23-002-Q1-E1-C10
acgcgtccgcccacgcgtccgcggacgcgtgggattgatttgtctactccaaattcgcaagaaaacgtgaataaatttgagaaatcacagaattatttgatattttgtaaattaactaattattgatatagaagaacaaattaatacaatggactaatgtcatagagcaatttttttttgctaaacttcaggatttaactcattcttcttcttgttcaagtggttgctgattctgaaatctcttcttcaataacttaggtcttggtttcataggcttcaagtacttagattgaaatctaaccatctctttcaaaacactaatcagcttcctctctatttcttcaccgtcaggttcaatagctcctaagcaccgtgccacaacctccgccgtagttacacatcctccgaatgggtccctccttagcacaagctctg

SEQ ID NO: 6379 - DNA, 436 bp, Arabidopsis thaliana
  unsure at all n locations
  Clone ID: LIB23-002-Q1-E1-C12
acgcgtccggcacaatgatcggcatgctcattcgatttgacagtaacccaggagtaactccagaatggctaggcagtgcattgatcgctgttgctattgctactttcataagtctgtccatggtatacctgctggcctatattcatctctccggtgcaaaaaagtcgattgtcacagcattatgcattatcactgccctctctcttgctcttgtatcttctggtgttcttcctgcatttactgaggatactgcaagagcagtaaatgtagtacatgttgtggatacaagcgggcaagatcaagtggcgtttatatcactattctcaaacactcctggaaacctaaacatggaagcagagcanatcaaagaagggttcaaatgtggtananaagaataagattgattttgtcaagttttgaagctaaatacaattgt

SEQ ID NO: 6380 - DNA, 455 bp, Arabidopsis thaliana
  unsure at all n locations
  Clone ID: LIB23-002-Q1-E1-C5
acgcgtccggaaagttttcacagatccatcgtctccatgagatctctgtgaataacattacttctctttctcaaactcagactctcaataacacaaaaacccagatctttctctctcttcaccacaaaaaaaaatcgaaactttatttttgcttgatgaagagcaaaatccaccaccagcccaatggtagcaacaatggtgttgtttcaagtaacgataatggctgccgaagtgagtctccaagcccacctttatctccaaaccgccgtgtcctccgtcgtcaacggcggcaaactttactcagagcttcttctttctctctccggagaaatcttcgttacttgcttctccttcctatgatttacgcttctggggcttctcatgtgtgttggtcctttctctggtcctgtcggatgggtttatgttcccgggtcngtttaacgggggccccgaga

SEQ ID NO: 6381 - DNA, 461 bp, Arabidopsis thaliana
  unsure at all n locations
  Clone ID: LIB23-002-Q1-E1-C7
acgcgtccgggcgatgatgacgacgacgacgacaacattcttccatccactacttcctgctaacacttacaaatccggagctgtagcttcttcctttgtctcagttcctcgttcgtcgtctctccaatttcgctcacttgtgtcagattctacgtcgatttgtggtccaagtaagttcaccggaaaaaacagaagagtatcggttaccgtttccgccgccgcaacaactgaacctctcaccgtcctcgttaccggtgccggtggaagaacaggacaaattgtgtataagaaattgaaggagaggtcngagcagttcgtggcaaggggtttagtgaggacaaanggagattaaggagaagatcaatggaaaggatggaattatccattgggggatataanagaatactgcatcaaattggcnccngcngttgaaggggattgatgctttgggcaatcctaac

SEQ ID NO: 6382 - DNA, 438 bp, Arabidopsis thaliana
  Clone ID: LIB23-002-Q1-E1-D12
acgcgtccgtttcttcttcaaaagttcgaaacttttttttttccggcaatggagggactagttccggtacagagacttccaattaaagtggcttcaccttctctgtatcggtgtaacaattctgtctcaatcagacgttcaatttcaggttttgccatggacaggaagataaactttagggctccgtcgcaattctcgatccgagctcaacagtcggatttgaaggaaagcttagctgtgtcttcttcatcagtagaggataaaggaaatgttcttagaatcaaggaatgggaagtagagatgtatcaggaggaattaagctattaagtcaaggtattaggataaggagaaaaccaccaagtaaggccctttgggatactccggaccatttgagttgagaatgcataacaatgaagccgaatcccccccgtaatatcc

SEQ ID NO: 6383 - DNA, 511 bp, Arabidopsis thaliana
  unsure at all n locations
  Clone ID: LIB23-002-Q1-E1-D4
agcctccggaaatccanggtcgacccacgcgtccgcaanctcacagcaaagcctctcgttgctagagggaatcaaacaatgggtgtttgtgaagtcaaccaagtcgaaatgcttacttcaagaggtaccaaagtgaagttcaaggagaaagaagagatggaaagactgactacagggcaaggatccgtcttatcaaccaagacaagaacaagtacaatactcctaagtatcgttttgttgtccggtttaccaacanagacatagtggcacagattgtatctgcaagcattgctggtgacattgttaaagcttctgcttacgcacatgaactgcctcagtatggtctcactgttggtcctacaaactatgctgcagcttaactgtactgggcntcctttggntccccgtgttttaaaaaatnttgggaaattgggtngnccaattttnnagggnaancntttaagggccctgggngaaaaacntttccngtttagcccaaacggaattcaaa

SEQ ID NO: 6384 - DNA, 466 bp, Arabidopsis thaliana
  unsure at all n locations
  Clone ID: LIB23-002-Q1-E1-D5
acgcgtccgcggngtttttgcaaacgaacatcagtctgaatgcgatcaagatcgtcccggggaaatacagttctctcaccgatcatcagtttcgtgcgccgtatcgaattaggtgcgccgccgcttcacctgggaaaaaacggtataacatcgctctgcttcccggagacggtatcggtccagaagttatctctgttgctaagaatgtgcttcagaaagctggatctctcgaaggactggagtttgatttcaaggagatgcctgtcggaggagcagccttggatttggttggagttccattgccggaggaaactttcacggctgcaaaactatctgatgccattcttcttggagctattggangggtacaaatgggacaagaattgagaaacatcctganacctgaagatggctccggttttaaccttaagaagagattcccaaaagtcctttgcctaaatttgag

SEQ ID NO: 6385 - DNA, 459 bp, Arabidopsis thaliana
  unsure at all n locations
  Clone ID: LIB23-002-Q1-E1-D6
acgcgtccgaacactgttgctgtctcgcctgatggttcgctatgcgccagtggtgggaaagatggtgttatcttgttgtgggatttggctgaaggaaagaagctttactcgcttgaggcgggttcgattattcactcgctttgcttcagtcctaacagatactggttgtgtgctgctactgagaatagcattaggatttgggatcttgagagcaagtctgttgttgaggacttgaaggttgatctcaagtctgaggcagagaagaatgaaggtggtgttggaactggtaaccagaagaaggttatctactgcacaagcttgaactggagtgcagatggaagcacattgttcagtggttacactgatggagttgtcanggtctgggggtattggnctttacaananacacaacaaagatgaagaagaagtcacgaaatcccccggaaaaaaatttaactg

SEQ ID NO: 6386 - DNA, 470 bp, Arabidopsis thaliana
  unsure at all n locations
  Clone ID: LIB23-002-Q1-E1-B2
acgcgtccgctttatagctcctctctatcgtctcgtctctataaataaacgagaagctcacaaattccacaaaaatccactctaactatgaaacaattagggttttgaaatttacctaaatctctccgtaatcatcgatcaaaacgatgctcgagtgtcaatcaatgatggagaaattatcaccgttcgtagacgtcgcctctctggaaatcgagtctctgcgaagaatcaaacgcccgaaacgcttctctgaagaagaatcagaagaaaccgagaatacgacgaattcatcaaacgcggtattcggattccctaacttaccagaagaaccgaatcgccgatatgggattaaagcgttttgttgcanaaaccgggggttcggattaccanatgggggnaagaattccggggaanntttcnttaaaagagggggaancgggttaaacttcnttggggcggtttggttattn

SEQ ID NO: 6387 - DNA, 478 bp, Arabidopsis thaliana
  unsure at all n locations
  Clone ID: LIB23-011-Q1-E1-C2
gtcnaaaattaaagggtcgacgnacgcgtccgcccttaacttcttcttatacccttcgaccaacgaagaaccctagaaatcgattaacaagatgaatagggaaaagttgatgaagatggctaacactgtccgcactggcggaaaggggacagtaagaagaaagaagaaggctgttcacaagaccactacaaccgatgacaagaggctccagagcactcttaagagagttggagtcaattccattcccgccattgaagaagttaacatttttaaggatgatgtagtcattcagttcattaaccctaaagttcaagcttcaattgctgctaacacatgggttgtgagtggtacaccacagacgaaaaaattgcaaggacattcttcctcangattatcangccaacttggnccagataacttggacaacctgaagaagctagcaagagcaattccaganacaaagctccaagtgnagggt

SEQ ID NO: 6388 - DNA, 446 bp, Arabidopsis thaliana
  unsure at all n locations
  Clone ID: LIB23-014-Q1-E1-A4
acgcgtccgcccacgcgtccgggtgaagctagggcaacctggatggagagaacgttattatgaagagaagttctcagtagtaacccctgaagaaatggaaagagtccggaaggatgttgttttgaagtacacagaaggcctttgttgggtcatgcattactacatggaaggtgtttgctcctggcagtggttctatccttaccactatgcaccattcgcttctgatctgaaggatttgggagagatggatattaagttcgaattaggaactccttttaagcctttcaatcaacttcttggggtgttcccagctgcaagttcgcatgcacttccagagcgctacaggaccttgatgacagatcccaactctcctatcattgatttttacccaactgattttgaagtcgacatgaatgggaaacgtttttcctggcanggtaattgct

SEQ ID NO: 6389 - DNA, 467 bp, Arabidopsis thaliana
  unsure at all n locations
  Clone ID: LIB23-014-Q1-E1-E1
taccgnccaagaattcccgaaancgacccangcctccgcccacgcgtaangctctttctttatccgtacgaaaatggacggtgttaccggcggaggaacgaatatcggcgaggctgtgacggcgccaccaccgcggaatccgcatccagcgacttnacttaatgcgaactctttaccgccccctttccttagcaagacgtatgacatggtggaagatccggcgacggacgcgattgtctcatggagtccgacgaacaatagcttcattgtttgggatccaccggagttttctcgtgatcttctacctaaatacttcaaacacaacaatttctccagctttgttcgccagttaaacacctatggttttaggaaagtggatccaagatcgatgggaatttgccaatgaaggtttcttaagaggtcaaaaacatctattgaaggaagataagccggagaaaatcctgntc

SEQ ID NO: 6390 - DNA, 448 bp, Arabidopsis thaliana
  unsure at all n locations
  Clone ID: LIB23-001-Q1-E1-A10
acgcgtccgaaaaaaacgaaaatgaaaataggatctccttcttccccgattctcagcgttgtctccagctcaggctcattggatccgaaaattagtggatcacttggatctcgaatccttccggctactcaaagatcatccccatcggagaatcttctcctccataggaaaatgtcgtctaattccctgaggcatgtcgagtccatgtcccagctaccctcaggtgccggaaagatctctcaattaaacgccgtcgtgttaggagaatcccttgcatcggaggagaatgatctcgtctttcccagcaaggaattctccggccaaggctcttgtttcctcccctcaacaagtacatggaaatgcataagangtccatggatgaccctgctgcttttttggtccgatattgcgtctgagtttttactgggaagcaagaaatnggggtgac

SEQ ID NO: 6391 - DNA, 466 bp, Arabidopsis thaliana
  unsure at all n locations
  Clone ID: LIB23-001-Q1-E1-A12
cccnggtcgacccacgcgtccggacatcaattcaatttactttcgattttgtcctcttccaaaaacccttccgcttaaaccctaattcacttcgccggccatgtcgacactcgaggatggatttccggcggataagctcttcgctcaaggatactcttacacctacgacgacgtcatctttcttcctcacttcatcgatttctccacagacgctgtttctctatccacgcgccttagccggcgcgtgcctctctccataccttgcgtttcgtctccgatggatactgtttcggaatctcacatggctgctgctatggcttctcttggtggggattggaatcgtccactataactgtgggaatcgccgctcaaagcatccganttaatccgccaaagctaangtcgcntaaacatccgattgcntccgaacgccgggtgttaaagttcccgggagtatgagaattac

SEQ ID NO: 6392 - DNA, 477 bp, Arabidopsis thaliana
  unsure at all n locations
  Clone ID: LIB23-001-Q1-E1-A3
ggttggccgggcntaccgganaggaaagggtgggtcgaccgtccgcccacgcgtccgaacaaaatgaaccaaacgagacgtaagagacgacctgattcatctctctctagactcgattctctttcgccggaaatgctctttccggccaaatctccgtcgctaacttcttctcgcatcagaaacatcttcttattactcatcttttgtttcatcatctacatcatcttctcctacggcaccaatttccgccgtgaacagatttcatcaatcgctcgatcgttatctgtgttctccactcgtcgccgtcacttactcttctcgatcgccgcttctcacnactcttggctccgtcgtagctcgtacgttcgtctctggtantctcctgaatctacnngcgccgtcgtgtttctcgatcgcggtgggattgggcgtcanatntaactcttcctccgtgtgagtgtcctccaaangacgttt

SEQ ID NO: 6393 - DNA, 450 bp, Arabidopsis thaliana
  unsure at all n locations
  Clone ID: LIB23-001-Q1-E1-A4
acgcgtccgcgacagaacaagaagctgaagttggaacagagacatcctctgtttccggaaggtttttgaggaacagagatttatatctcttcttgccttttctcttaggcttctctgatcaagaatcatcaaacggagatgatgatgatgttgcttcatcgcgtgagagaatcattttagtcaacccttttacacaaggaatgattgtgctcgaaggctcatcaggaatgaatcctctgcttcgtagcttactggagtcacgtgaggaaggtcgtcctcctgcgtccaaggcttccatcgatgcgatgccgatcgttgagattgatggctgtgaaggagagtgtgtgatctgtttggaggagtggaaagtccgangagacngtgaaaggagatccgtgtaagcatangtttcacggtggatgtatagagaaatgggtaagggttcaaggg

SEQ ID NO: 6394 - DNA, 453 bp, Arabidopsis thaliana
  Clone ID: LIB23-001-Q1-E1-A5
acgcgtccgaatgggttcatggatacccaagttgctgctgctgcaacttgtgcttctgttgactaagcatgctgattcaagttctatcatcaaatatcttcctggttttgaaggccctcttcccttcgagctcgaaaccgggtttgttcctcttcatattagccttatgatgtatgactctgtgttctctaagttttggagttaaatcattaaggtacattggtgttggtgaggaagatgaagatcaaatgttctactacttcatcaaatctgagagcaatccaaaaacagaccctcgtcttctctggctaagtggaggacctggttgctcttctttcactggtcttatatatgagaacgggccacttggtttcaaggttgaggcgtacaatggaagtatccccacgttggtctctactacatattcatggacaaaggttgcgaatataatcc

SEQ ID NO: 6395 - DNA, 476 bp, Arabidopsis thaliana
  unsure at all n locations
  Clone ID: LIB23-001-Q1-E1-A7
aaaggaatccgggtcgacccacgcgtccgattcagaaaccctagagttcttcagcgagcgaactctgtctgcgatttcttgttgattctaaatggatctctcgcgagaagtcgatgactttatcaaagagacaatcgatcactctttagggcttccgatatccatggacgttctccagaaaaagctctacacggcggaagaatctcagcgtcgtctccgtgaacagtatctatctctggtttcgagattgaaagagaaagaaaaagtaatcgatctcgttagatccgaagcgagtatgaatgcccagtcgctgaagaaattcgtcgaagagaatcagaaattgggaagcgagcgcgaggatttggtgaatcagtgtaagaagtgggaaaaagaatgctttctttatcatcaagatcgtgaatcactcatggagttcgggaacgaaactgacgaaanggctaagaagaagcaagaat

SEQ ID NO: 6396 - DNA, 449 bp, Arabidopsis thaliana
  unsure at all n locations
  Clone ID: LIB23-001-Q1-E1-A8
acgcgtccgcaggcagcaaataactgtgagttagaaacagttgcttatgagttcttcacaaaggcatatcttctgtatgaagaagaaatttcagattcaaaggcacaagtaacagcactacgtttaataatagggacactccagaggatgcgtgtatttaatgttgagaacagagatactctgactcacaaggcgacagggtattctgcaagactcctaaggaagccagatcagtgtagagctgtttatgaatgtgcgcatctcttctgggctgacgaatgcgagaacctganngatggagagagggttgtgctttgcctgaagagggcacaaaggattgcaagatgctgttcaacaaatggccaacgcatcccgtggtaccaagtagcactgggtcggtgtctctatatgtcgaactgctgaacaagtatctctacntcctggagaaa

SEQ ID NO: 6397 - DNA, 475 bp, Arabidopsis thaliana
  unsure at all n locations
  Clone ID: LIB23-001-Q1-E1-B10
gttgccttgcctagnctccggaatccaggtcgacccacgcgtccgcccacgcgtccggaaaaggcttcacgcccgatttcttttttccccagaaaaaggcttcacttccgttcgttgttcttcatcggtctgcgccgcctcgcacatcgtttcacctttctcagaatctctcttcccgtcgattagtttcctcagaggttgcgatttgttgagaaccttgatttagactatgaagtctcttaatgatcttcctgcgcccaaatcaaccactaccacgtattatgatcattctaatgatgcttggttcaaaaaccgagtcactgaatccgagacggtgaaatcctccagtatcaaatttaaagtggtgcctgcttacctgaatcgtcaaggtttacgtccgaagaatccaagangattttggcgatggtgggtgctttcccgggagattcatcttcctcaagtatcctcntcctta

SEQ ID NO: 6398 - DNA, 469 bp, Arabidopsis thaliana
  unsure at all n locations
  Clone ID: LIB23-001-Q1-E1-B12
tacggctccgganatcccaggcttacncaaanagatttgaaaaagaagaaggaggaggtcaaggctttggatgatgataatggtgatgtagacgtcaagagtcgtactgatgcatcgggcagcaagaatgttaatccccgaggagaatccgtctcttcaatacaagttgtcgagaagaatgaaaaggttgtgtctttgaggaagagaagaggctttatcaactttgaggattacgaagatgaggaagatgaagaagctagtggcggtggaggccgtattaataaagggaaaaagaaagcgaaaaagagcggtggtgggttagaggaaggatcacggtgcagccgtgttaacggtagaggatggagatgttgtcagcaaacgcttgttggttattctctttgtgagcatcatctcggtaaaaggaaaggtaaggagcatgaacaagaatggtggttggtccttgccggcn

SEQ ID NO: 6399 - DNA, 455 bp, Arabidopsis thaliana
  Clone ID: LIB23-001-Q1-E1-B3
acgcgtccgcacacatcccaagaatccgccggcgtcgacaatcttcgccggagccatcgtcctcttccatcatctgcttaatcattttttgccctaacaccaaaaattatcgatctttttttttgtctactatatacctagatatataggtttttttgtccttctctttggatcatttccacgacgaaacggagaagaggggacgattttgccagccaagaaacaaagaattgttaaggaactgaagattataaccttctgaaggataatgaagtctaagaagaagcttagcttgagacaaagcaaagcttccaataggaacgttaacgaaaccaaacctcttcatcatctcttcccaaatctcaaacctccgatgtctttgctttctctccgtctcttccgccgccacaacatccaaaatctccttaccgaaccaacgttgctctaaggttaat

SEQ ID NO: 6400 - DNA, 479 bp, Arabidopsis thaliana
  unsure at all n locations
  Clone ID: LIB23-023-Q1-E1-G2
acgcgtccggttccgatcagggcagtaactccttcgactgttctgagttcgggtggagtgatcacggccctaaaacacccgagatctcttcaatgcttgtcaataacaacgaagcatcatttgttgaagaaaccaatgcagccaagaagctcaaaccaaactctgatgagtcagacgatctgatggcataccttgacaacgccttgtgggacaccccactagaagtggaagccatgcttggcgcagatgctggtgctgtgactcaggaagaggaaaacccagtggagctatggagcttagatgagatcaatttcatgctggaaggagacttttgaagtgatcgatggttccttagtttgtaaataaagctgtgttggattttgctgttgggggatggtacaagtcacacctcaaagctccaagcattggtatcctcatgaacctctcctccaataaganaagttcccctttaaattttg

SEQ ID NO: 6401 - DNA, 455 bp, Arabidopsis thaliana
  unsure at all n locations
  Clone ID: LIB23-010-Q1-E2-H5
acgcgtccgggactttctcaatccatatccctctctctgttttttctaatttgagcctctaaagtctcctcgttttgttcatgttgttgttcaagtgaagaagctcaattatgtttacaacattgttgtaatttcaaaacttcataagaatttctctgataataaagaaaaagctggagtagaactattttaaagtgtcatcatgaagagactaagcagctcagattcaatgtgtggtctaatctccacttctacagatgaacagagtccaagagggtacggaagtaattaccaatctatgcttgaaggttacgatgaagatgctacactaatcgangaatattccggnaaccaacaacacatgggtctatcggagaaagaaagagaaagaataaaaagttgancaagtcaaagctcctgagaaagaattccgaacttgagaataaacccaaact

SEQ ID NO: 6402 - DNA, 485 bp, Arabidopsis thaliana
  Clone ID: LIB23-017-Q1-E1-D7
gccgtcgtaccggacacacttcccgggtccacccacgcgtccgaaaacattgagcctaaacagatcaaagtgtggtttcagaaccgaagatgtagagagaaacaaaggaaagaggcttcacggcttcaagctgtgaatcggaagttgacggcaatgaacaagctcttgatggaggagaatgacaggttgcagaagcaagtgtcacagctggtccatgaaaacagctacttccgtcaacatactccaaatccttcactcccagctaaagacacaagctgtgaatcggtggtgacgagtggtcagcaccaattggcatctcaaaatcctcagagagatgctagtcctgcaggacttttgtccattgcagaagaaactttagcagagtttctttcaaaggcaactggaaccgctgttgagtgggttcagatgcctggaatgaagcctggtccggattccattggaatcatcgctatttctcatggttg

SEQ ID NO: 6403 - DNA, 485 bp, Arabidopsis thaliana
  unsure at all n locations
  Clone ID: LIB23-001-Q1-E1-E11
aactggttgccttgcctaggctccggaatcccnggtcgacccacgcgtccgcggacgcgtgggcggacgcgtggggaaaattcaagaaaagagtgggatattctgtcaaatggaggtatggttcaggaaatggctcatatagccaatggtcatgaacctggaaactgtgtctccttgctccgagtcaatagtggaaactcgagccagagcaacatgttgattctacaagagagctgtacagatgcatcaggatcgtatgtgatttacgcgccagtggatatagtggcgatgaatgtggttctaagcggtggagatcctgattacgtggcgttgttgccgtctgggttttgctattttaccggatggttcggttggaggaggagatgggaatcagcatcaggaaatggtttctactacttcttctgggagttgtggtggttcgcttttaacccgttgcgtttcaaattcctgttgactcngttccc

SEQ ID NO: 6404 - DNA, 441 bp, Arabidopsis thaliana
  unsure at all n locations
  Clone ID: LIB23-002-Q1-E1-D9
acgcgtccgtgancagcacaagtctgcgaagatttggattagatctgattcaggttggattgatcatcgttcggagctccgggaaacatggcggcgacgagacaattacgaactctccaatctcagcctgaaaacaaggtatgtgtcgattgcgctcagaagaatcctcaatgggcgtcggtttcgtacggaatcttcatgtgtttggaatgctccgggaaacaccgaggcttaggcgttcacatatccttcgtcagatccgtaaccatggattcatggtctgcgatccagattaagaaaatggaagctggtggtaacgaacggctcaacaaattcttcgcgcaatacggaatcgctaaggagacagatattatctccaagtacaattcgaacgctgcttctgtgtatcgtgaccggattcaagctttanctgaaggtaaa

SEQ ID NO: 6405 - DNA, 456 bp, Arabidopsis thaliana
  unsure at all n locations
  Clone ID: LIB23-016-Q1-E1-A7
gtcanaaattcccgggccgacccacgcgtccacccacgcgtccgatcagttattgggacatgaagttgaggcccagatggttcgtaacacactacctcgacgttttggggtacctggtcttccagaactgaatgcatctcaggttaatgcggtgaaaagtgtccttcagaagcccatcagcttgatccaaggtccacctggcacaggcaaaactgtgacttctgcagcaattgtgtatcacatggcaaaacagggccagggacaggttctcgtttgtgccccaagtaatgttgctgtggaccaactagctgaaaaaattagtgctactgggttaaaggttgttcgcctttgcgcaaaatcaagggaagctgtaagttctcctgtagagtatttgacccttcactaccaggtaagacatcttgacacatctgaaaagagcgaactgcataagttgca

SEQ ID NO: 6406 - DNA, 457 bp, Arabidopsis thaliana
  unsure at all n locations
  Clone ID: LIB23-002-Q1-E1-F6
acgcgtccgattttccggtgaaatcgaaaaaaaaagcgagatcttcttctctaatggcgacgaccttaagcagagatcaatatgtctacatggcgaagctcgccgagcaagccgagcgttacgaagagatggttcaattcatggaacagctcgtaagtggagctacaccggccggtgagctgaccgtagaagagaggaatcttctctcggtcgcgtataagaacgtgattggatctcttcgtgcggcatggagaatcgtgtcttcgattgagcaaaaggaagagagcaggaagaacgaagaacacgtgtcgcttgttaaggattacagatctaaagttgagactgagctttcttcgatctgttctggggattctcaggttacttgatcccaaccaaattccttanccaactggcaatnaatccaaaggtttttaactgaagatgaaaggagattatc

SEQ ID NO: 6407 - DNA, 458 bp, Arabidopsis thaliana
  unsure at all n locations
  Clone ID: LIB23-019-Q1-E1-F8
acgcgtccgtccnatttcaaaattttccggtgaaatcgaaaaaaaaaagcgagatcttcttctctaatggcgacgaccttaagcagagatcaatatgtctacatggcgaagctcgccgagcaagccgagcgttacgaagagatggttcaattcatggaacagctcgtaagtggagctacaccggccggtgagctgaccgtagaagagaggaatcttctctcggtcgcgtataagaacgtgattggatctcttcgtgcggcatggagaatcgtgtcttcgattgagcaaaaggaagagagcaggaagaacgaagaacacgtgtcgcttgttaaggattacagatctaaagttgagactgagctttcttcgatctgttctgggattctcangttacttgattcgcatctaattccttcagctactgccagtgagtctaanggtttttacctgaagatgaa

SEQ ID NO: 6408 - DNA, 482 bp, Arabidopsis thaliana
  unsure at all n locations
  Clone ID: LIB23-020-Q1-E1-A9
tccaaaaatncccgggtccacccacgcgtccggttaaatacggtccaagaaactgggacagtgattaagcaaatctattcccggtagantcggggaaatcgtgtcgtttacggtggtgcaaccagctttcgccgcaagttgagcatcggccgttttcggctgaggaagacgagacgatcgcacgtgctcacgctcagttcggtaataaatgggcgacgattgctcgtcttctcaacggtcgtacggacaacgccgtgaagaatcactggaactcgacgctcaagaggaaatgcggcggttacgaccatcggggttacgatggttcggaggatcatcggccggttaagagatcggtgagtgcgggatctccacctgttgttactgggctttacatgagcccaggaagcccaactggatctgatgtcagtgattcaagtactatcccgatattaccttcccgttgagcctttcaagcctggtgc

SEQ ID NO: 6409 - DNA, 415 bp, Arabidopsis thaliana
  unsure at all n locations
  Clone ID: LIB23-002-Q1-E1-C8
acgcgtccggcaacaaacagagaaaatgtgtggcggtgctattatttccgattatgcccctctcgtcaccaaggccaagggccgtaaactcacggctgaggaactctggtcagagctcgatgcttccgccgccgacgacttctggggtttctattccacctccaaactccatcccaccaaccaagttaacgtgaaagaggaggcagtgaagaaggagcaggcaacagagccggggaaacggaggaagaggaagaatgtttatagagggatacgtaagcgtccatggggaaaatgggcggctgagattcgagatcacgaaaaggtgttagagtttggcttggtacntcaanacggngganggaanctgcaatggnttangagtttccggcaaacaaattcgttgggaaaaanccaa

SEQ ID NO: 6410 - DNA, 447 bp, Arabidopsis thaliana
  unsure at all n locations
  Clone ID: LIB23-017-Q1-E1-C1
acgcgtccgaaagacgcgtgggcagcaacaaacagagaaaatgtgtggcggtgctattatttccgattatgcccctctcgtcaccaaggccaagggccgtaaactcacggctgaggaactctggtcagagctcgatgcttccgccgccgacgacttctggggtttctattccacctccaaactccatcccaccaaccaagttaacgtgaaagaggaggcagtgaagaaggagcaggcaacagagccggggaaacggaggaagaggaagaatgtttatagagggatacgtaagcgtccatggggaaaatgggcggctgagattcgagatccacganaaggtgttagaatttggcttggtacgttcaacacggcggaggaaactgccatggcttatgatgtttgcgggcaagcagattcgtggtgataaagccaagctcaacttccana

SEQ ID NO: 6411 - DNA, 505 bp, Arabidopsis thaliana
  unsure at all n locations
  Clone ID: LIB23-021-Q2-E1-G1
gtngttggccgccggtccgganatcangggcgngncaaanaagaaaaactaaaaaagagaaccccaaagaatcgaatatttattatttcgccccgaagattctatttctgatcatttacacccctaaaaagagtagagctttcgtgaagccaccatgtgtggaggagctataatctccgatttcatacctccgccgaggtccctccgcgtcactaacgagtttatctggccggatctgaaaaacaaagtgaaagcttcaaagaagagatcgaataagcgatccgatttcttcgatcttgacgatgatttcgaagctgatttccaagggtttaaggatgactcggcttttgactgcgaagacgatgatgatgtcttcgtcaatgttaagcctttcgtcttcaccgcaactactaagcccgtancttccgctttcgtctccactgtaggttcagcatatgccaagaaaactgtaagtccgccgaacaaactgagaaatcctctaaga

SEQ ID NO: 6412 - DNA, 459 bp, Arabidopsis thaliana
  unsure at all n locations
  Clone ID: LIB23-022-Q2-E1-H5
acgcgtccgagaaaaactaaaaaagagaaccccaaagaatcgaatatttattatttcgccccgaagattctatttctgatcatttacacccctaaaaagagtagagctttcgtgaagccaccatgtgtggaggagctataatctccgatttcatacctccgccgaggtccctccgcgtcactaacgagtttatctggccggatctgaaaaacaaagtgaaagcttcaaagaagagatcgaataagcgatccgatttcttcgatcttgacgatgatttcgaagctgatttccaagggtttaaggatgactcggcttttgactgcgaagacgatgatgatgtcttcgtcaatgttaagcctttcgtcttcaccgcaactactaagcccgtagcttccgctttcgtctccactggtagttcagcatatgccaagaaaactgtangtccgctgagcaagctga

SEQ ID NO: 6413 - DNA, 469 bp, Arabidopsis thaliana
  unsure at all n locations
  Clone ID: LIB23-021-Q2-E1-F3
acgcgtccattgatctcaatataactgctcccaaaaaagcttctctagctgatgtgggtgttgtgggggatctgagcaatgaagatgggaacaaagcatctgctgcatcgtactactcaggctggtccatgggtgcaggatccgggcttggtaaaactggcctatacagtacacagcagcagcagcaacaacaacaacaacaacaagcacctgatatctcagacgatttcttctccagcctcagtaaccaaaggtaccaatctggtggctttaagcagtgaaattgtctgtgatttggtgttgagatgaaaaggcatatcaagtttgattctacattccatactggaaatgtaagtttttttaatgggtttgttgttcttgcacttcattcatgggacaatctggtcggtgactgatgttgcattgttgttgtgggcgtttactttgggtttaaatgagaganaaaaaa

SEQ ID NO: 6414 - DNA, 425 bp, Arabidopsis thaliana
  Clone ID: LIB24-123-Q1-E1-B8
ggcgagagggaagatccagatcaagaggatagagaaccagacaaacagacaagtgacgtattcaaagagaagaaatggtttattcaagaaagcacatgagctcacggttttgtgtgatgctagggtttcgattatcatgttctctagctccaacaagcttcatgagtatatcagccctaacaccacaacgaaggagatcgtagatctgtaccaaactatttctgatgtcgatgtttgggccactcaatatgagcgaatgcaagaaaccaagaggaaactgttggagacaaatagaaatctccggactcagatcaagcagaggctaggtgagtgtttggacgagcttgacattcaggagctgcgtcgtcttgaggatgaaatggaaaacactttcaaactcgttcgcgagcgcaagttcaaatctc

SEQ ID NO: 6415 - DNA, 402 bp, Arabidopsis thaliana
  Clone ID: LIB24-029-Q1-E1-F4
caaaaacgcaggaaaacaatgtcgtttaacagctcccacctccttcctccacaagaagaccttcctctccgacacttcaccgatcaatcacagcaacctccgccgcagcgtcacttctctgaaacaccttcgcttgtcaccgccagtttcctcaacctccctaccacccttaccactgcggattccgatctcgctcctccgcaccgcaacggagacaattccgttgctgatacaaacccacgctggctctcctttcattcggagatgcaaaatactggagaagtacgttctgaagttatcgacggagtcaacgccgatggtgaaacgatactcggcgttgtaagaggtgaagattggcggagtgctagctataatgcggcgattttaagacatccgatgtac

SEQ ID NO: 6416 - DNA, 364 bp, Arabidopsis thaliana
  Clone ID: LIB24-009-Q1-E1-E10
aagagcttgagtgttcatcagcatcactctgatcaaattttaccttcctctgtttacaacaacaatggtaataatggtgttggattctacaacaattaccgttacgagacatcagggtttgtgagtagtgtactgagatctcgttaccttaaaccaacacaacaattgcttgatgaagttgttagtgtaaggaaagatttgaaattggggaataagaagatgaagaatgataaaggtcaagactttcacaatgggtctagtgataacattacagaagatgataaatctcaatcgcaggagttgtctccttcagaacgtcaggagctacagagcaagaagagcaagcttttaacaatggtggatg

SEQ ID NO: 6417 - DNA, 320 bp, Arabidopsis thaliana
  Clone ID: LIB24-017-Q1-E1-G11
cacacgcgtccgctcctccatatcttaacaatttcatagcaaaccctaaaattgagaaagagatagagagagaaagatgggtagaggaaagatcgagataaagaggatagagaacgcaaacaacagagtggtgacgttctcaaagaggaggaatggattggtgaagaaggctaaagagatcacagttctttgtgatgcaaaagttgccctcataatctttgcaagtaatggtaagatgattgattactgttgtccttccatggatcttggtgctatgttggaccaataccagaagttatctggcaagaaactatgggatg

SEQ ID NO: 6418 - DNA, 409 bp, Arabidopsis thaliana
  Clone ID: LIB24-096-Q1-E1-C8
gttatggcctgttgggagattgaacagtcgcttcaaagttttacaggggtatctcctggtgaaggcacaggagcaacaatgtctgaggatgaagatgagcaagtagagagtgatgctcatttgtttgatggaagcttagatgggttagggtttggtcctctagttcccactgagagcgagagatctttgatggaacgagtcagacaagaactcaaacatgaactcaagcagggttacaaggagaaaattgtggacataagagaggagatactgaggaagagaagagctggaaaattaccaggagacaccacctctgttctcaaatcatggtggcaatctcattctaagtggccttaccctactgaggaagataaggcgaggttggtgcaggagacgggtttgcagctca

SEQ ID NO: 6419 - DNA, 401 bp, Arabidopsis thaliana
  Clone ID: LIB24-122-Q1-E1-E1
cccacgcgtccggaagaatatggcgagagggaagatccagatcaagaggatagagaaccagacaaacagacaagtgacgtattcaaagagaagaaatggtttattcaagaaagcacatgagctcacggttttgtgtgatgctagggtttcgattatcatgttctctagctccaacaagcttcatgagtatatcagccctaacaccacaacgaaggagatcgtagatctgtaccaaactatttctgatgtcgatgtttgggccactcaatatgagcgaatgcaagaaaccaagaggaaactgttggagacaaatagaaatctccggactcagatcaagcagaggctaggtgagtgtttggacgagcttgacattcaggagctgcgtcgtcttgaggatgaaa

SEQ ID NO: 6420 - DNA, 396 bp, Arabidopsis thaliana
  Clone ID: LIB24-080-Q1-E1-B7
ctcgtttccttcttcgctcgctgttcagattttgctttgaggctttaggctccccagatctctaatcgccgcagctttaataaatggagactttcctattcacatctgagtctgtgaacgaaggacaccctgacaagctttgcgaccagatctctgatgcagtccttgatgcctgccttgagcaagaccctgatagcaaagttgcttgtgagacatgcaccaagaccaacatggtcatggttttcggtgagatcaccaccaaggctacgattgactacgagaagattgtccgtgacacttgccgttccattggattcatctctgacgatgttggtcttgatgctgacatatgcaaagtccttgttaacattgagcaacagagcccaaacattgctc

SEQ ID NO: 6421 - DNA, 415 bp, Arabidopsis thaliana
  Clone ID: LIB24-015-Q1-E1-D12
cgctgttcagattttgctttgaggctttaggctccccagatctctaatcgccgcagctttaagaaatggagactttcctattcacatctgagtctgtgaacgaaggacaccctgacaagctttgcgaccagatctctgatgcagtccttgatgcctgccttgagcaagaccctgatagcaaagttgcttgtgagacatgcaccaagaccaacatggtcatggttttcggtgagatcaccaccaaggctacgattgactacgagaagattgtccgtgacacttgccgttccattggattcatctctgacgatgttggtcttgatgctgacaaatgcaaagtccttgttaacattgaacaacagagcccagacattgctcaaggtgttcacggtcacttcacaaacgtccagaagac

SEQ ID NO: 6422 - DNA, 417 bp, Arabidopsis thaliana
  Clone ID: LIB24-047-Q1-E1-C11
atcgtttccttcttcgctcgctgttcagattttgctttgaggctttaggctccccagatctctaatcgccgcagctttaagaaatggagactttcctattcacatctgagtctgtgaacgaaggacaccctgacaagctttgcgaccagatctctgatgcagtccttgatgcctgccttgagcaagaccctgatagcaaagttgcttgtgagacatgcaccaagaccaacatggtcatggttttcggtgagatcaccaccaaggctacgattgactacgagaagattgtccgtgacacttgccgttccattggattcatctctgacgatgttggtcttgatgctgacaaatgcaaagtccttgttaacattgaacaacagagcccagacattgctcaaggtgttcacggtcacttca

SEQ ID NO: 6423 - DNA, 304 bp, Arabidopsis thaliana
  Clone ID: LIB24-137-Q1-E1-H1
tatttgttcacatctgaatccgtcaacgagggacatcccgacaagctttgtgatcagatctccgacgctatcctcgatgcttgccttgaacaagaccctgagagcaaagttgcttgtgagacttgtaccaagactaacatggtcatggtttttggagaaatcaccaccaaggctaacgttgattacgagcagattgttcgtaaaacatgccgtgagattggattcgtctctgctgacgttggtctagatgctgacaattgcaaagttctggttaacattgagcagcatagtcctgacattgcac

SEQ ID NO: 6424 - DNA, 406 bp, Arabidopsis thaliana
  Clone ID: LIB24-093-Q1-E1-H2
cccacgcgtccgcttttttgttcacatctgaatccgtcaacgagggacatcccgacaagctttgtgatcagatctccgacgctatcctcgatgcttgccttgaacaagaccctgagagcaaagttgcttgtgagacttgtaccaagactaacatggtcatggtttttggagaaatcaccaccaaggctaacgttgattacgagcagattgttcgtaaaacatgccgtgagattggattcgtctctgctgacgttggtctagatgctgacaattgcaaggttctggttaacattgagcaacagagtcctgacattgcacaaggtgttcatggtcatctcaccaagaagccagaggaggttggagctggtgaccaaggtcacatgtttgggtatgctactgatgagac

SEQ ID NO: 6425 - DNA, 420 bp, Arabidopsis thaliana
  Clone ID: LIB24-136-Q1-E1-G12
ggggaatctggtgatgttgaacgcccaccgaggaattatgaccgccatagcaggacaggtcatggtactggcatgaaacgtaatggtggaggtcgtggaaactggggcactactgaagatgatatccctccaacgtctgaggaacctaccacagaggttgagaagagccctgttgctgagaagcaaggaggtgaggatgaaacccctgaagcaaagaaagaactcactgcggaagagaaagcacagaaagaagctgaagaagctgaagccagggagatgactctagaagagtatgagaaaattctggaggagaagaagaaggctctgcaagccacaaaggttgaggaaaggaaagttgacaccaaagtgtttgagtccatgcaacagctctctaacaagaagaacaccgatgaagaaatc

SEQ ID NO: 6426 - DNA, 445 bp, Arabidopsis thaliana
  Clone ID: LIB24-073-Q1-E1-C2
aaaaaaagaaaaaacaaaatgagagagagagagagagagagagagagagaaacgaagaaaaataaagaagcacaaaaacattgtgggtctccggtgattaggatcaaattagggcaccagccttatcggaggaagaagccatgggtagaaaaaaagtcgagatcaagcgaatcgagaacaaaagtagtcgacaagtcactttctccaaacgacgcaatggtctcatcgagaaagctcgacaactttcaattctctgtgaatcttccatcgctgttctcgtcgtctccggctccggaaaactctacaagtctgcctccggtgacaacatgtcaaagatcattgatcgttacgaaatacatcatgctgatgaacttgaagccttagatcttgcagaaaaaactcggaaatatctgccactcaaagagttacaagaaatagtccaaag

SEQ ID NO: 6427 - DNA, 395 bp, Arabidopsis thaliana
  Clone ID: LIB24-122-Q1-E1-A6
cagaaagtcgagaaagctgctgctgctgttcagcctcctaaggccgctaagttcccaaccaagccggctcctccttctcaagcagtgagggagtcgaggaatgctcctcaaggaggtcgtggtgggactggtggacgtggtggattttcccgtggcaggggtaatggtggatacaaccgggacaacaggaacaatgatgctcctggaaatgagaatggattttctggaggatacaggagaccttctgaagatgctgatggagcaagccgtggtgggtctgttggtggataccgtgttggcggtggtcgtgaaggacctcgccgtggtggagttgccaacggggaatctggtgatgttgaacgcccaccgaggaattatgaccgccataacaggac

SEQ ID NO: 6428 - DNA, 383 bp, Arabidopsis thaliana
  Clone ID: LIB24-077-Q1-E1-G6
aactttttcgttaattggggagagatatactttcttttgaggatcagatcgtgacagggtttacctcaaggagagggtgacaacacgaagaagaaggttagaaaagttaaggcaaggctttgaggatgtcttttacaggaactcaacagaaatgcaaggcttgtgagaagactgtttatgctgttgagcttcactctgctgatggacttggatagcacaagtcttgcttcaaatgcactcactgcaaaagcaggcttcagctgagtagttacacatcaatggaaggtgttttgtactgtaagccacaatttgatcagctctttaatgacagtggtaatgtcaataagaactttcattcacctgcaaaatctgctgataaatca

SEQ ID NO: 6429 - DNA, 403 bp, Arabidopsis thaliana
  Clone ID: LIB24-031-Q1-E1-F8
accacgcgtccgctctctctaaccccttctctcttcagtctctctctctctagacgatctctatcttgaataaaataccgataatgacctcaaccaatccggtggtcgccgaagtaataccggcggaaacttctacagatgctacagagacgacgattgcaacgacggaagctggtgaagcaccggagaagaacgtgaggaaagcttacacaatcaccaagtctagagagagttggactgaaggagaacacgacaagtttctggaagctcttcaattgtttgatcgtgactggaaaaagatgaaagattttgttggttcaaagacagttattcagatcaggagccatgcgcagcaatactttctaaaggtccaaaaaatgggaccttagcacatgttcaaccc

SEQ ID NO: 6430 - DNA, 422 bp, Arabidopsis thaliana
  Clone ID: LIB24-090-Q1-E1-D12
cagacgcgtgggctcaaaaccaaaatcactaaagaggagaagattgctaaagtttgataaaacattccaaaatcaatggctgataggatcaaaggtccatggagtcctgaagaagacgagcagcttcgtaggcttgttgttaaatacggtccaagaaactggacagtgattagcaaatctattcccggtagatcggggaaatcgtgtcgtttacggtggtgcaaccagctttcgccgcaagttgagcatcggccgttttcggctgaggaagacgagacgatcgcacgtgctcacgctcagttcggtaataaatgggcgacgattgctcgtcttctcaacggtcgtacggacaacgccgtgaagaatcactggaactcgacgctcaagaggaaatgcggcggttacgaccatcggggttacga

SEQ ID NO: 6431 - DNA, 434 bp, Arabidopsis thaliana
  Clone ID: LIB24-092-Q1-E1-B7
agagacgaagcacaatgggtcaaggaccttccggcggattgaatcggcaaggagatcggaaaccagatggtggagagaagaaggagaagaagttcgaaccagccgcaccacctgctcgtgtagggaggaagcaacggaagcagaaaggacctgaagcggcggcgagattgccgacggtgactccttctactaaatgtaagcttcgattgctgaaattggagcgaatcaaggactatttgcttatggaggaagagttcgtagcgaatcaggagagattgaaacctcaggaagagaaagctgaggaagatagatctaaagttgatgatcttcgtggtacacctatgagtgttggcaatcttgaagagcttattgatgagaatcacgccattgtttcttcttcggttggtcctgagtactacgttggcattttgtct

SEQ ID NO: 6432 - DNA, 383 bp, Arabidopsis thaliana
  Clone ID: LIB24-048-Q1-E1-E6
aacaaacgctgtctgaatcatatttcgattctgatttttcttcatggattcgtatagccaataagttttttcaatattcaaaacaaaaaccccatcaaaataatctccggaccagtttctctttcgattcagtcggaccggaaaaacaatggcgtctgtgaaccctttcgatctcttggacgatgacgcagaggatcccagccagattgttgcgtctaagccattgaaggttgtggctccggttcagactgctaagtctggtaagatgccgactaagccgcctcctccttctcaagctgtgagggaggcaaggaacgctcctggtggaagtcgtggtgctggacgttgagggagttatgggcgtggtggacgttgtggaaaca

SEQ ID NO: 6433 - DNA, 436 bp, Arabidopsis thaliana
  Clone ID: LIB24-048-Q1-E2-E6
aacaaacgctgtctgaatcatatttcgattctgatttttcttcatggattcgtatagccaataagttttttcaatattcaaaacaaaaaccccatcaaaataatctccggaccagtttctctttcgattcagtcggaccggaaaaacaatggcgtctgtgaaccctttcgatctcttggacgatgacgcagaggatcccagccagattgttgcgtctaagccattgaaggttgtggctccggttcagactgctaagtctggtaagatgccgactaagccgcctcctccttctcaagctgtgagggaggcaatgaacgctcctggtggaggtcgtggtgctggacgtggagggagttatggtcgtggtggacgtggtggaaacaatagggattcaaggaacaatgatggtcctgccaatgaaaacggatatggtgga

SEQ ID NO: 6434 - DNA, 371 bp, Arabidopsis thaliana
  Clone ID: LIB24-010-Q1-E1-H9
ccattgataaatccctaactctttgctcttctcttcccggcgatctatctctccgattgggtattgaaatggcaactcctatggttgaagatacgtcaagcttcgaagaggatcagcttgcttccatgtccaccgaagatatcactacagctactcgtcttctcgacaacgagattcgaattctcaacgaagacgcgcaaagaacaaatctagaatgtgattcgtacaaggagaagattaaggagaatcaggagaagattatactcaacaagcagctgccttacttggatggcaacattgtcgagattttggagatgagtccagaagatgatgccgaggaaaatggtgcaaataatgatcttgactcgcaa

SEQ ID NO: 6435 - DNA, 421 bp, Arabidopsis thaliana
  Clone ID: LIB24-035-Q1-E1-F7
aagagagcgagtcacgcgccgagttttcctcacttgttctcaataaatctctctctctttcttctctatcgctttcatttttctcctccagatctcgattccaatctctctccctctctacttccttcaacagaaatggaaacgttcctatttacctctgaatccgtcaatgaaggacacccagacaagctttgtgaccagatttctgatgcgatccttgatgcttgcttagagcaagatcctgaaagcaaagtggcgtgtgagacatgcaccaagaccaacatggtgatggtgtttggtgagatcactaccgctgcgaaagttgactatgagaagattgttagatccacttgcagggagattggttttatctctgctgatgttggtcttgacgctgacaaatgcaatgttttggttaaca

SEQ ID NO: 6436 - DNA, 318 bp, Arabidopsis thaliana
  Clone ID: LIB24-010-Q1-E1-A12
gtagaaactgtagcaacatcggtgttgcacagatcgtggcggctaagtggtccaacaacccatcctccgcgttaccttcggcggcggcggctgctgctacctcgtctgcatctgcggtttcttccgccgcatctgcagccgcagcctcgtccgccgccgccgcccctgtggctgccgcgcctcccgtcgtgctgaaacccgtctatgacgaggttgtggtggcggacgacgggatcacggacatcagacgtagtgtacagctgcaggattgcagacattctttcttgacctccgatgggagcctcactgttcatgccg

SEQ ID NO: 6437 - DNA, 417 bp, Arabidopsis thaliana
  Clone ID: LIB24-051-Q1-E1-D5
aaaactgtctccgtcgccgttattatctcgtcggctaatatctcagacgagaaatcgacgccggagaaaaagcaatttagttctctttcatctaccaaaatgacatcttctctgtcacttcactcctccttcggagcttccttcgctgatctctccgaccgaggtttgatcagtaagaactctccgaccagtgtttccatttccaaggttccaacttgggagaagaagcagatctcaaatcgggactctttcaagctgaattgcgtgatggagaaaagtgtcgatggtcaagctcagtctaccgttaacaatagcagtgatagcttagatactatgaatatcaacgaagaagctagcgtcgtctacattattggtgaacttgggtaataggtttggtccctttgatgcaatgagcac

SEQ ID NO: 6438 - DNA, 282 bp, Arabidopsis thaliana
  Clone ID: LIB24-119-Q1-E1-D3
cccaggcgtccgcccacacttccgcgcactgcgtccgaggatccctgggcttaacctacactttttccatccacatcacccactcttccgccgtcagtactggaaaatcaatatggcttcagatattgatggatacgcacgtatcagccctaagagagatcacacgttttcattggaatcattcagcaacggaaaaagtactgctgaagatcgtcacaaggtgtccacagatcgcagggcatcgaacgggaaacaaatggctcgtgctaggactaagttcat

SEQ ID NO: 6439 - DNA, 449 bp, Arabidopsis thaliana
  Clone ID: LIB24-112-Q1-E1-A6
aaaaagagagagaagagaacgagagaatcattgagaaacgaaacaacaatggccgtctcatcattccagtgccctaccatcttctcctcctcctcaatctccggctttcaatgccgttctgatccagatctcgtcggttctcccgtcggtggatcatctcgccgtcgtgtccatgcctccgccgggatttcttcctcattcaccggggacgctggattatcctccaggatcttaagatttcctcctaatttcgtccgtcagctgagcattaaagcccgtagaaactgtagcaacatcggtgttgcacagatcgtggcggctaagtggtccaacaacccatcctccgcgttaccttcggcgggcgggctgctgctacctcgtctgcatctgcggtttcttccgccgcatctgcatccgcagcctcgtccgccgccgccgcccctgtggct

SEQ ID NO: 6440 - DNA, 442 bp, Arabidopsis thaliana
  Clone ID: LIB24-013-Q1-E1-F3
cccacgcgtccgcggacgcgtggggaaacgaaacaacaatggccgtctcatcattccagtgccctaccatcttctcctcctcctcaatctccggctttcaatgccgttctgatccagatctcgtcggttctcccgtcggtggatcatctcgccgtcgtgtccatgcctccgccgggatttcttcctcattcaccggggacgctggattatcctccaggatcttaagatttcctcctaatttcgtccgtcagctgagcattaaagcccgtagaaactgtagcaacatcggtgttgcacagatcgtggcggctaagtggtccaacaacccatcctccgcgttacccttcggcggcggcggctgctgctacctcgtctgcatctgcggtttcttccgccgcatctgcagccgcagccctcgtccgccgctgccggccccggtggc

SEQ ID NO: 6441 - DNA, 408 bp, Arabidopsis thaliana
  Clone ID: LIB24-123-Q1-E2-F8
ttcattatcgcgaatctgagatttcggaagattcgatcgatttgggggttttagggtttaatctcaactgctaatcaatggcgccacctccaggactttactccggtaccagcactcttgctctggttgctcgtgcttcggctttcgggttgggtctcatctacggcaacatcaagctcaaggctttaaagatagagaagaattcgcagattaaggccgaagcaaaggctcatcactaaaccaactcgtcttctccttctcaataagattatgaagccaagtgattgttatctctaaatgtagttcttttcctccttaagctatatctccctcggtgacattttttccatctttctgtttttttaatcaaagtcttctgtctgacaaagcaatcgtatacccgttttg

SEQ ID NO: 6442 - DNA, 428 bp, Arabidopsis thaliana
  Clone ID: LIB24-127-Q1-E1-E2
gggaacaataatctgtcaacctcctgaagatgattatgaccttaaactgacaactcctgtcaaagggtttgcaactattgacaatttggccctcataaatgttgaaggtactggaatggctggtgtacccggtactgcaagtgacatttttggctgtgtaaaagatgttggagctaatgtgattatgatatcacaggctagcagtgagcattctgtgtgctttgctgtgcctgagaaggaagtaaacgcagtctctgaggcattgcggtcgagatttagtgaagctttacaagcgggacgtctttctcagattgaggtgataccaaactgtagcatcttagctgcagtcggccagaaaatggctagtacacctggagttagttgtacacttttcagtgctttgggcaaagctaatattaatgtccgag

SEQ ID NO: 6443 - DNA, 421 bp, Arabidopsis thaliana
  Clone ID: LIB24-123-Q1-E1-F8
ttcattatcgcgaatctgagatttcggaagattcgatcgatttgggggttttagggtttaatctcaactgctaatcaatggcgccacctccaggactttactccggtaccagcactcttgctctggttgctcgtgcttcggctttcgggttgggtctcatctacggcaacatcaagctcaaggctttaaagataaagaagaattcgcagattaaggccgaagcaaaggctcatcactaaaccaactcttcttctccttctcaataagattatgaagccaagtgattgttatctctaaatgtagttcttttcctccttaagctatatctccctcggtgacattttttccatctttctgtttttttaatcaaaatcttctgtctgacaaagcaatcgtatacccgttttggtttaaacctgag

SEQ ID NO: 6444 - DNA, 406 bp, Arabidopsis thaliana
  Clone ID: LIB24-066-Q1-E1-C11
gggaattttcagtggtactttaagttacctcttcaacaactttgtcggcaccagaagcttcagtgaagttgtagcagaagcaaagcaagcaggtttcacagaaccagatccacgagatgatctatctggaacagatgttgccagaaaagtaacaatccttgccagagaatcaggcttaaaattggatcttgagggccttccagtccagaatcttgtgccaaagccgttacaagcttgtgcatcagcagaagagttcatggagaagcttcctcagtttgatgaagaattatccaaacaaagagaagaggctgaagcagcaggagaagtcttgagatacgtaggagttgtagatgcagtagagaaaaaaggaacagtcgagttgaaacggtacaaaaaagatcatccg

SEQ ID NO: 6445 - DNA, 380 bp, Arabidopsis thaliana
  Clone ID: LIB24-092-Q1-E1-B4
cattgccttatcattacgaattcatcaacttaatcgtttctctcaaatttagggtattctcttttctcgaaagtcatgcggttttctgaatcatctctaactggtttgagggtttcgtttggtatctggagaaacgggtttctggaaacaaggagttcatacatcgcgatcatgatctatcgatcttcatttatctataaaagcgtcaatgagattatgatggagtctaaaggtggtaaaaagaagtccagcaatagtagttccttattttacgaagctactctctgttacagcattgatgacgttagtccaaacggtggaatcaagacattcaaatcttcagttcacgcaaactgcttctacagggcatccttagtacc

SEQ ID NO: 6446 - DNA, 328 bp, Arabidopsis thaliana
  Clone ID: LIB24-131-Q1-E1-H2
attgattcatcattaccaaatcatcaacttaatcgtttctctcaaatttagggttttctcttttctcgagagtcttgcggttttctgaatcatctctatctggtttgagggtttcgtttgatatctggagaaaggggtttctggaaacaaggagttcataattcgcgatcttgatctatcgatcttcatttatatataaaagcgtgaatgagattatgatggagtcgaaaggtggtaaaaagaagtccagcagtagtagttccttattttacgaagctcccctcggttacagcattgaagacgttcgtccaaacgggtggatcaagaa

SEQ ID NO: 6447 - DNA, 387 bp, Arabidopsis thaliana
  Clone ID: LIB24-095-Q1-E1-F11
cttcatcattaccaaatcatcaacttaatcgtttctctcaaatttagggttttctcttttctcgaaagtcttgcggttttctgaatcatctctatctggtttgagggtttcgtttgatatctggagaaaggggtttctggaaacaaggagttcataattcgcgatcttgatctatcgatcttcatttatatataaaagcgtgaatgagattatgatggagtcgaaaggtggtaaaaagaagtccagcagtagtagttccttattttacgaagctcccctcggttacagcattgaagacgttcgtccaaacggtggaatcaagaaattcaaatcttctgtctactcaaactgctccaagaggccatcctgaataccagcgtgcaccga

SEQ ID NO: 6448 - DNA, 414 bp, Arabidopsis thaliana
  Clone ID: LIB24-048-Q1-E2-C3
cccacgcgtccgtgaagacgttcgtccaaacggtggaatcaagaaattcaaatcttctgtctactcaaactgctccaagaggccatcctgagtaccagcgtgcaccgatcttcataatatagttatagctttctttactttccagtttataattttcttctttcaaagctccttttctgctggttcccggatccaatcgttctctcctcctactacaagtcctgtcgctcacacaacaaggcgagatggccttatctgcaatcggtttcgaaggttacgagaaacggctcgaggtgactttctttgagccaagcatctttcaagactccaagggactgggactccgtgctcctgacaagtcccagcttgatgaaattcctacacctgctgcaatgcacgatcgtttcatctctc

SEQ ID NO: 6449 - DNA, 403 bp, Arabidopsis thaliana
  Clone ID: LIB24-136-Q1-E1-A4
tgcttcatcattaccaaatcatcaacttaatcgtttctctcaaatttagggttttctcttttctcgaaagtcttgcggttttctgaatcatctctatctggtttgagggtttcgtttgatatctggagaaaggggtttctggaaacaaggagttcataattcgcgatcttgatctatcgatcttcatttatatataaaagcgtgaatgagattatgatggagtcgaaaggtggtaaaaagaagtccagcagtagtagttccttattttacgaagctcccctcggttacagcattgaagacgttcgtccaaacggtggaatcaagaaattcaaatcttctgtctactcaaactgctccaagaggccatcctgagtaccaacgtgcaccgatcttcataatatag

SEQ ID NO: 6450 - DNA, 413 bp, Arabidopsis thaliana
  Clone ID: LIB24-006-Q1-E1-H8
aattaccaaatcatcaacttaatcgtttctctcaaatttagggttttctcttttctcgaaagtcttgcggttttctgaatcatctctatctggtttgagggtttcgtttgatatctggagaaaggggtttctggaaacaaggagttcataattcgcgatcttgatctatcgatcttcatttatatataaaagcgtgaatgagattatgatggagtcgaaaggtggtaaaaagaagtccagcagtagtagttccttattttacgaagctcccctcggttacagcattgaagacgttcgtccaaacggtggaatcaagaaattcaaatcttctgtctactcaaactgctccaagaggccatcctgagtaccagcgtgcaccgatcttcataatatagttatagctttctttactt

SEQ ID NO: 6451 - DNA, 425 bp, Arabidopsis thaliana
  Clone ID: LIB24-016-Q1-E1-F11
cttagcctacccttttttccttcctcctctccgattcttcctccgtcagtaaaagaaaatcaaaatggcttcacacattgttggatacccacgtatgggccctaagagagagctcaagtttgcattggaatctttctgggatggtaagagcactgctgaggatcttcagaaggtgtctgctgatctcaggtcatccatctggaaacagatgtctgccgctgggactaagttcatccctagcaacacctttgctcactacgaccaggttcttgacaccaccgccatgctcggtgctgttccacctaggtatggatacactggtggtgagatcggccttgatgtttacttctccatggctagaggaaatgcctctgtgcctgccatggaaatgaccaagtggttcgacaccaactaccattacatcg

SEQ ID NO: 6452 - DNA, 368 bp, Arabidopsis thaliana
  Clone ID: LIB24-132-Q1-E1-A8
caaacagagagcgagtcacgcgccgagttttcctcacttgttctcaataaatctctctctctttcttctctatcgctttcatttttctcctccagatctcgattccaatctctctccctctctacttccttcaacagaaatggaaacgttcctatttacctctgaatccgtcaatgaaggacacccagacaagctttgtgaccagatttctgatgcgatccttgatgcttgcttagagcaagatcctgaaagcaaagtggcgtgtgagacatgcaccaagaccaacatggtgatggtgtttggtgagatcactaccgctgcgaaagttgactatgagaagattgttagatccacttgcagggagattg

SEQ ID NO: 6453 - DNA, 412 bp, Arabidopsis thaliana
  unsure at all n locations
  Clone ID: LIB24-137-Q1-E1-H12
acattttgctggaagacgcagacaaagttcgagccattaccgaatatgtttcatcttctgcaattgagaacttagtcgttggatctgcatcacgtaatggcttcatgagaagattcaagacggatttgccaacaacagtgtcaaaatcagctccagatttctgcaatgtttangtcatttcaaaaggcaaaattgcttcagtacgaaatgcatcacgtcctgctccttaccaaaattcgatgcagcaatgtgaaattgacaatcatcacccacatactcctgacaaagcaccaaagtaccatgaccatcccaattctgcaggtagtacaccatctagaccgcgcaaatcagttgaagcagatagatngccgttgggtgaaaaaggaagccatatgggggacctccaagnttc

SEQ ID NO: 6454 - DNA, 419 bp, Arabidopsis thaliana
  unsure at all n locations
  Clone ID: LIB24-137-Q1-E1-H8
gtcatcttcaatttggacttccaacgccgacaccgtttaactccgatggttcccccgccgtctaatccgcagcaggttcagcagttcctctcctctgccctctcccagcgcggcccatcttcagtcccctacgaanagtccaacaagtggttgatccggcaacatctacttaacctaatctcttcttacccttccttagagcccaaaacggcatcgtttatgcacaacgatggtcgctccgtcaacctccttcaagcagatggtacgattcngatgccttttcatggagtcacctanaacatacctgtgattatctggctcctcgagtcatatcctcgtcatcctccttgcgtctangtgaatcccaaccgctgataggatcancanggcgacctcacgcacatgttactccnttctgg

SEQ ID NO: 6455 - DNA, 392 bp, Arabidopsis thaliana
  Clone ID: LIB24-048-Q1-E1-A7
actctctctctctgcctcctttcggattcaaatctcagatctagctcaaccatggcgttgctcgtcgagaagacctcaagtggccgtgaatacaaggtcaaagacatgtctcaagccgatttcggtcgtctcgaactcgagctcgccgaagttgagatgcctggactcatggcttgtcgtaccgaattcggaccttctcagccattcaaaggcgctagaatcaccggatctcttcacatgaccatccaaaccgccgtactcatcgaaaccctaactgctctcggtgctgaagtcagatggtgttcctgcaacatcttttccactcaagaccaggccggcgcagccatcgctcgtgactccgccgctgttttcgcctggaaaggtgagactct

SEQ ID NO: 6456 - DNA, 419 bp, Arabidopsis thaliana
  unsure at all n locations
  Clone ID: LIB24-016-Q1-E1-H9
cccacgcgtccgcccacgcgtccggttgtgccactggtcacccaagtttcgtgatgtcttgctctttcaccaaccaggtgattgcccagctcgagctctggaacgagaaagcaagcggaaagtacgagaagaaggtgtacgttcttcccaagcatttggatgagaaggttgcattacttcacttgggcaagcttggagccaggcttacaaagctgtcaaaggaccaatctgactacgtcagcattccaattgagggaccatacaagcctcctcactacaggtactgagagagagagagagtcgacaaagcggttcaggttcggatctacttgtggttttgtgttgggttgtggtgggagagtggnacagtttgagataatggtcttctgatgaagttgaccaaatatcagtattaataa

SEQ ID NO: 6457 - DNA, 401 bp, Arabidopsis thaliana
  Clone ID: LIB24-101-Q1-E1-F5
ctctctctgcctcctttcggattcaaatctcagatctagctcaaccatggcgttgctcgtcgagaagacctcaagtggccgtgaatacaaggtcaaagacatgtctcaagccgatttcggtcgtctcgaactcgagctcgccgaagttgagatgcctggactcatggcttgtcgtaccgaattcggaccttctcagccattcaaaggcgctagaatcaccggatctcttcacatgaccatccaaaccgccgtactcatcgaaaccctaactgctctcggtgctgaagtcagatggtgttcctgcaacatcttttccactcaagaccacgccgccgcagccatcgctcgtgactccgccgctgttttcgcctggaaaggtgagactcttcaggagtactggt

SEQ ID NO: 6458 - DNA, 439 bp, Arabidopsis thaliana
  Clone ID: LIB24-113-Q1-E1-E1
cggacgcgtgggcggacgcgtgggcgacaacttgtatggttgccgtcactcactccctgatggtctcatgagggccactgatgtcatgatcgctggaaaggttgctgttatctgtggatatggtgatgttggaaagggttgtgctgctgccatgaagactgctggtgctagagtcattgtgactgagattgatcccatctgtgcccttcaagctttgatggaaggacttcaggttcttacccttgaggatgttgtctcagaagctgatatctttgtcaccaccaccggtaacaaagacatcatcatggtcgaccacatgaggaagatgaagaacaacgctattgtgtgcaacattggtcactttgacaatgagattgacatgcttggacttgagacttaccctggtgtgaagcgtatcaccatcaagccacagactgac

SEQ ID NO: 6459 - DNA, 436 bp, Arabidopsis thaliana
  Clone ID: LIB24-079-Q1-E1-F12
ctcactctctctctctctgcctcctttcggattcaaatctcagatctagctcaaccatggcgttgctcgtcgagaagacctcaagtggccgtgaatacaaggtcaaagacatgtctcaagccgatttcggtcgtctcgaactcgagctcgccgaagttgagatgcctggactcatggcttgtcgtaccgaattcggaccttctcagccattcaaaggcgctagaatcaccggatctcttcacatgaccatccaaaccgccgtactcatcgaaaccctaactgctctcggtgctgaagtcagatggtgttcctgcaacatcttttccactcaagaccacgccgccgcagccatcgctcgtgactccgccgctgttttcgcctggaaaggtgagactcttcaggagtactggtggtgtaccgagcgtgctctaaattg

SEQ ID NO: 6460 - DNA, 442 bp, Arabidopsis thaliana
  Clone ID: LIB24-048-Q1-E2-A7
tctctctctctctgcctcctttcggattcaaatctcagatctagctcaaccatggcgttgctcgtcgagaagacctcaagtggccgtgaatacaaggtcaaagacatgtctcaagccgatttcggtcgtctcgaactcgagctcgccgaagttgagatgcctggactcatggcttgtcgtaccgaattcggaccttctcagccattcaaaggcgctagaatcaccggatctcttcacatgaccatccaaaccgccgtactcatcgaaaccctaactgctctcggtgctgaagtcagatggtgttcctgcaacatcttttccactcaagaccacgccgccgcagccatcgctcgtgactccgccgctgttttcgcctggaaaggtgagactcttcatgagtactggtggtgtaccgagcgtgctccacattggggtccaggtg

SEQ ID NO: 6461 - DNA, 426 bp, Arabidopsis thaliana
  Clone ID: LIB24-015-Q1-E1-B7
ctctgcctcctttcggattcaaatctcagatctagctcaaccatggcgttgctcgtcgagaagacctcaagtggccgtgaatacaaggtcaaagacatgtctcaagccgatttcggtcgtctcgaactcgagctcgccgaagttgagatgcctggactcatggcttgtcgtaccgaattcggaccttctcagccattcaaaggcgctagaatcaccggatctcttcacatgaccatccaaaccgccgtactcatcgaaaccctaactgctctcggtgctgaagtcagatggtgttcctgcaacatcttttccactcaagaccacgccgccgcagccatcgctcgtgactccgccgctgttttcgcctggaaaggtgagactcttcaggagtactggtggtgtaccgagcgtgctctagattggggt

SEQ ID NO: 6462 - DNA, 411 bp, Arabidopsis thaliana
  Clone ID: LIB24-064-Q1-E1-F8
aaaaaaaacagcctctcataaatcaaaaacaaccccttattcataccaatatttggtcacacgcatcagaagaccaatatctcatatttctccgaccaaaccagacccaatccgactcaaacaattgccaataaacggcttaatcagaaaaccaaacgaagaaccaaagcttggctcttttatcctctcagtacctgtagtgaacaggcttgtaaggaccttcaacgggtatgctgacatagtcagattggtccttggtaagcttggtgagtcttgcaccaagcttgcctaagtgaagtgcagctaccttctcatccaagtgtttaggcaaaacatagaccttcttctcatacttcccgcttgacttctcgttccagagctcaagctgtgcaatcacctggttggtgaatg

SEQ ID NO: 6463 - DNA, 277 bp, Arabidopsis thaliana
  Clone ID: LIB24-069-Q1-E1-B11
cttatctctctctcgctctcagcttcgttgcgaattcgcatcacagctaaaccacatggatgaagttgcacgtcgagaatacagcaagtggtcgtgaaaacaaggtcaacgacatgtctcagaccgagttcggtcggctcgaaatcaagttcgacaagcttgatatacctggaatcaaggcttggcgtacagagatctgaacatcacaggtaatcaaaagcgcgagaatcacaggatggcatcagattaacatgtacaccgtcgtacacatcagaaa

SEQ ID NO: 6464 - DNA, 421 bp, Arabidopsis thaliana
  Clone ID: LIB24-090-Q1-E1-F11
gctacaagaaggtcaagtgaagatgcaatcaagattggaggaagaagaagaagctaaagcagctctaatgagtagaatccaaaagcttacaaagctcatacttgtctctaccaagaattctattcctggatatttaggtgacacaccagctcattctcgcagcatttctgctggtaaagatgataagttagactctctgctcttggatagtgataatctggcatctccatcttcgactctctctctagcatcagatgcgcgacggtcttccagcaagtttaaggatgaaaactctccagttggtctcaacctcctgctctcttctccacaccgctgttgatcttatcaatgagactaagcttgatgatgaaatcaagtcatggttggcgtttgctgcccagaaggtcgttgaagtgaacgc

SEQ ID NO: 6465 - DNA, 408 bp, Arabidopsis thaliana
  Clone ID: LIB24-118-Q1-E1-G7
agagatgaccaagtggtttgacaccaactaccattacatcgtcccagagttgggccctgaagtgaaattttcttacgcatctcacaaggctgtcaatgagtacaacgaggccaaggctcttggtgttgagaccgtccctgtacttgttggccctgtctcttacttgcgtctttccaagcttgctaagggtgttgacaagtcatttgatcttctctcccttctccccaaaatcctcccagtttacaaggaagtcattgcagagcttaaagcacctggtgcctcctggattcagcttgatgaacctctcattgtcatggatctcgagggtcacagactccaggcttttagcggtgcctatgctgagcttgaatcaactctctctggtcagaatgttcttgtggagaccta

SEQ ID NO: 6466 - DNA, 324 bp, Arabidopsis thaliana
  Clone ID: LIB24-048-Q1-E1-A3
ccctgctgaggcatacaagaccctaacctcattgaagggtgtgactgcctttggatttgatttggttcgtggcaccaagacccttgatttggtcaaggcaggtttccctgagggaaagtacctctttgctggtgttgttgatggaaggaacatctgggccaacgactttgctgcgtccctaagcaccttgcaggcacttgaaggcattgttggtaaagacaagcttgtggtctcaacctcctgctctcttctccacaccgctgttgatcttatcaatgagactaagcttgatgatgaaatcaagtcatggttggcgtttgctgc

SEQ ID NO: 6467 - DNA, 425 bp, Arabidopsis thaliana
  Clone ID: LIB24-049-Q1-E1-F1
ctcttagcctaccctttttccttcctcctctccgattcttcctccgtcagtaaaagaaaatcaaaatggcttcacacattgttggatacccacgtatgggccctaagagagagctcaagtttgcattggaatctttctgggatggtaagagcactgctgaggatcttcagaaggtgtctgctgatctcaggtcatccatctggaaacagatgtctgccgctgggactaagttcatccctagcaacacctttgctcactacgaccaggttcttgacaccaccgccatgctcggtgctgttccacctaggtatggatacactggtggtgagatcggccttgatgtttacttctccatggctagaggaaatgcctctgtgcgtgccatgggaatgaccaagtggttcgacaccaaactaccattacat

SEQ ID NO: 6468 - DNA, 431 bp, Arabidopsis thaliana
  unsure at all n locations
  Clone ID: LIB24-137-Q1-E1-H10
tcttcttcttctagggcttccacgcgactacgcctgccaaaatcattctacaggaagcatgaagccagtcttctgtgggaactttgagtatgatgcgcgcgaaggtgacctggaacgactattcaggaaatacggcaaggttgagagggttgatatgaaagctgggtttgcttttgtatacatggaagatgaaagggatgcggaagatgccatccgagcacttgaccgctttgaatttgggcgtaagggacgcagacttcgtgttgaatggacaaagagtgaacgtggaggtgataaaagatctggtggtggttcaaggagatcctcanccagcatgagaccttccaagactctctttgtgantaactttgatgccgntgatactagggacccgggatntagagnaacnccttgaacccgtatgggggaaa

SEQ ID NO: 6469 - DNA, 438 bp, Arabidopsis thaliana
  unsure at all n locations
  Clone ID: LIB24-136-Q1-E1-A9
aacntccgaattttgttttgcattttctcttcgacgcttgataagcatttcgtttccaaaaaaaaaaaaaaatggtttctgtctccgaacttgttctctacgtacatgagaatgtctacgaaacatgcattggagtcaacatcgctaacaatgatcaagtatttgagtatgctcaaactgcatttgtcgaaaacggtgacaacgatgatgacgttatctatgattacgctccagcagcatgaatgaattttatctctattaggctaaagcgtagtgaaccaaccatgattttgtacttcgtatattaattatttaacggccctagggcttcctttatgttttgtctacttaacactttcactataaatcgtcgagcattttattctctcaaaaaaaaaaaaaaagggcggccgctcctagaaggattcaagcttacgt

SEQ ID NO: 6470 - DNA, 416 bp, Arabidopsis thaliana
  unsure at all n locations
  Clone ID: LIB24-136-Q1-E1-B12
acaatgacactgttcttgctcttgtccactctcctcctcacgacttctttagctaaagatctctgtcataaagatgacaaaactaccctcctcaagatcaagaaatccctaaacaacccttaccacctcgcctcatgggatnccaaaaccgactgttgctcttggtantgcctcgagtgcggcgacgctactgtcaaccaccgtgtcacttccctaatcatacaagacggcgagatctccggtcagatnccccctgaagtcggtgacttancgtatcttacatcccttatcttccgcaaactcactaacctcactggtcacatccaacccactatcgccaagctcaagaacctcacttttctcagactaagctggaccaatctcaccggtccggttcctgagtttctgagtcagct

SEQ ID NO: 6471 - DNA, 415 bp, Arabidopsis thaliana
  Clone ID: LIB24-136-Q1-E1-B7
gatatatctctgcttccgacttctgaaaagattagcagcaaggagccagcttttcctacaagtctatgagatattgtctccctttattcaggcctcgatcagtgaacactatggaggaagcttgagtataccatgaaaggtcttcactgaggttggactgaagtctggctggatgctataaaagaatgtatacttgcaggacaatgtggattctgaagggcatcatggtgaacgcacacggacaatacacgaagcagcttaagcaaaccaaactcgggaagatttttgggcaatagaaggctagctgctgcaaatccgcgtgtgaaatggagtctcgaaagcacttattgttgcatttgcacaatgagatatgggaagtgattcaaatctcaaagtgcagagccattaagggacc

SEQ ID NO: 6472 - DNA, 403 bp, Arabidopsis thaliana
  unsure at all n locations
  Clone ID: LIB24-136-Q1-E1-B8
tgggattcgagtttaaggaattagggtttctaatctctctctctttctctcgagatttttcttcacttagttcttgattctgattaaaagttgatcttatagttccggtaacttcgttttctgggtttaattttcgattcaatcttcatctccttgatccacagccatgactgagtattgggtaagtcaagggaacaaatggtgtgaattctgtaagatatggatacagaacaatccaacaagtattagaaaccatgaccttggtaagcgtcaccgagaatgtgttgataagaagctcactgatatgcgtgagaggagtgcagccaaagacaaagagctcaagaaaaacgaaaaactgcttcaacagatngaagctaaaagcaactcgtanctatcaaaaaga

SEQ ID NO: 6473 - DNA, 462 bp, Arabidopsis thaliana
  unsure at all n locations
  Clone ID: LIB24-136-Q1-E1-B9
aacggtccaagnattcccgggtcgacccangcgtccgcccacgcgtccgagcacatcttggggagcacctaaagccttctctaaaggtttcaatcttcagcacgttgctgatggcttgtatggaagtcatctacatgtttatagttggccaggaggtgaaataaaacaattaattgaccttggaccgactggtctcttacctttggagattagattcttgcatgatccatctaaagatacagggtttgttgggagtgccttgtcgagtaatatgataagatttttcaagaacagtgatgaaacatggagccatgaggttgttatatcggttaaaccgttgaaagtcgaaaactggatacttccagaaatgccggggctaatcaccgacttcttgatctccctcgatgaccgatttatttactttgtgaactgggctccatggagacattcgtcagtacaaca

SEQ ID NO: 6474 - DNA, 416 bp, Arabidopsis thaliana
  unsure at all n locations
  Clone ID: LIB24-136-Q1-E1-C1
cactgttctaaagcctctggttttagggtttaagccgacggaggagacggaaaaatcgccatctctggagtccaggttagaattgattcctcaaatttcaattcttcgcattacatgacccaataattccgtctacatcttcgatgatccgtggaagaaccgcgaaagtaattcccagaaatgtcatttttacgcttagtaggagttccatttctgagtctccattgatttctccgagtcgaataaaccctaaattagccggtagtttctcgttcaacatccgattattgagctatttcactgttagaaatggcttttgtcccgattgttctgtaccgagagaccctaattttgttggattgactacacaatgtcggagtantgtcaggaaggtttgtantgaaaagaatgggaat

SEQ ID NO: 6475 - DNA, 420 bp, Arabidopsis thaliana
  Clone ID: LIB24-136-Q1-E1-C11
gttcttcaacttcagctcaagaggtttgaatacgattttatgagggacacaatggtgaagattaatgatcggtatgagtttcctctccaactggatctcgacagagaagatggaagatatttatcccctgatgcagacaagagtgtccgcaatctctacaccctccacagtgtcttggttcacagtggaggagtgcatggagggcattattatgcttttattaggccaacactttcagatcagtggtataaatttgacgatgaacgggtcacgaaagaagatgtcaaaagagcactggaagagcaatatggtggtgaagaagagttaccgcagaataatcctggtttcaataatccacctttcaaattcacaaaatactcgaatgcatacatgcttgtttatattcgggaaagtgacaag

SEQ ID NO: 6476 - DNA, 399 bp, Arabidopsis thaliana
  unsure at all n locations
  Clone ID: LIB24-136-Q1-E1-C2
acgcgtccgctcgaaacttacaatagaatgattanagtcttgtgtgaatcaggttcaacgagttcatcatactccattgttgcagagatggagaggaaatggataaagccaacagctgctanctttggtttaatgattgatggtttttacaaggaggagaagtttgatgaagtgaggaaagtgatgagaatgatggatgaatttggtgttcatgttggtgtagctacatacaacattatgattcaatgtttgtgtaaaaggaanaaatctgcagaagcaaaggcgttgattgatggggttatgtcntgtacgatgagacnaaactctgtgacgtattcgcttttgattcatgggttttgcagttgaggagaatttngntgaagctatgnatttgttttg

SEQ ID NO: 6477 - DNA, 460 bp, Arabidopsis thaliana
  unsure at all n locations
  Clone ID: LIB24-136-Q1-E1-C4
ttacgccntccgtaggcctccagaaattcaagggtcgacccacncgtccggatgaaattgaccattaaccctaccataactccatacaccgcgagatactggattaaccaaatcgagatcatcgtagccgtccgatcaacaagtaccatctcttgaaatactcgaaatcctcataagtccgtccctctttgctctcactatcaaaactctgaatttcgatttcaatggagtcacgcgtgctgttacgcgccaccgcgaatgtcgttggaattccgaaattgagacgaccaatcggagcgatccaccgtcaattcagcactgcatcgtcttcctcgttctcggttaaaccaatcggaggaatcggagagggagcgaatctgatctccggtcgtcagcttcgtccaantcttcgtctcnaatcgtcngggatnaacngnnggagagaaaaggggaaattttc

SEQ ID NO: 6478 - DNA, 418 bp, Arabidopsis thaliana
  Clone ID: LIB24-136-Q1-E1-C9
gggcaaataaaaaagaaaaaacaaagagaaatattttttcaatgacaagaaagaaagtgaaacttgcttacatttccaacgattcttcaagaaaagcgactttcaaaaaaagaaagaagggtttgatgaagaaggtacacgaactctcgactctttgtggcatcactgcatgtgcgatcatctacagcccgtatgataccaaccctgaagtgtggccatcaaattccggtgtgcaaagggtggtttcagaatttaggacactcccagagatggatcaacacaaaaagatggtagatcaagagggttttctcaaacaaagaatcgcgaaagcgacagaaactttgaggagacaaagaaaggatagtagggagctagagatgactgaagtcatgttccaatgtttgattggaaacatgga

SEQ ID NO: 6479 - DNA, 413 bp, Arabidopsis thaliana
  unsure at all n locations
  Clone ID: LIB24-136-Q1-E1-D1
acgcgtccgcccacgcgtccgcccacgcgtccgcccacgcgtccgcacacacaaaaaaaaacaattttctgtctatatatatattaaggatccaaattagggagagaccaaagaggaaattaataacaatcaatccaacaacgaatggagattgaagaagcgagtcgtgaaagtggacatgttgtgtgcggatcatggattcgtcgcccgaagaaagtaaactgggttcttatcgctaaagcttccaaacgccgtggctcatctgtttcttctcctgctctcctcaacatcttctcttttgaccccattactgcttctctttcctcctctcctttggcaacacacacgcttaaggatagtgatggtgatcctgtggctgtttcagtgcaccctggtggggaataanttggttg

SEQ ID NO: 6480 - DNA, 391 bp, Arabidopsis thaliana
  unsure at all n locations
  Clone ID: LIB24-136-Q1-E1-D4
agaagaagatggtgtctgggtcagggatatgcgcgaagcgcgttgtcgtcgacgggcgacaccacatgcttggtcgtctagcttccaacactgcgaaggagttacttaacggacaggaagtggttgttgtccgatgtgaagagatttgtctctcgggaggtttggttcgacaaaagatgaagtacatgagattccttaggaaacgtatgaacactaagccttctcatggtcctattcactttcgtgctccttccaagatcttctggcgcactgttcgcgggatgattccacacaagaccaagcgtggtgctgctgcacttgctcgcttgaaggtttttgagggaatcccacctccttacgacaagattaagagaatggttattcccganag

SEQ ID NO: 6481 - DNA, 420 bp, Arabidopsis thaliana
  unsure at all n locations
  Clone ID: LIB24-136-Q1-E1-D9
aaagcactgatcgaatccataggctctcttgacaaagactcatacgtttctctcttatcaaaactcataggcgaatctaaattcgtccagaacaatccgccggagctcatccctcaagaggacctaatcgtcaaacacgtccttgactctctccgtccttatagcacagaaactggtggtggtcctctggtgatcaatcatgtcgcgtatcattcaggtagaggtaatctcatcgttgagtacccaggatctgttcccggaaagatcttgtctttcgtcggaatgcatatggacgtcgtcactgcgaatcctgatgattgggaatttgatcctttctcgctaagcatagatggtgataagcttcgtggtcgtgggacaacagattgtcntgggtcacgttgctcttgtcantgaactcat

SEQ ID NO: 6482 - DNA, 404 bp, Arabidopsis thaliana
  unsure at all n locations
  Clone ID: LIB24-136-Q1-E1-E1
taggagcacaaggaattgtaagccgtgaatgcaaggccgtggtggatcaatacggaaaaaccatgttgaattctcttctagctcaggaggatccgaagaaagtatgctcacaaattggagtctgcgcttatgatggtacacagagtgtgagtatggggatccagtcagttgtagacgatggaacatcgggtcttttaaaccaagcgatgtgcagtgcttgcgaaatggcagccgtgtggatggagagcgaattgactcagaatcaaacacaagaacgcatactcgcttatgctgctgagctatgtgaccatatagcaacccanaaccaacaatcagcaatggactgtgggaaggtttcgtcgatgcctataatcacattcccaattggtggcaaaaagccttgn

SEQ ID NO: 6483 - DNA, 410 bp, Arabidopsis thaliana
  unsure at all n locations
  Clone ID: LIB24-136-Q1-E1-A7
acgcgtccgcccacgcgtccggcgttctttctgcttcctggagatctaacgttggtgaattcggattggagccgagagattgcctataagaatcgtcctttgttcggatcttctaatttatagatttgtgttgtctgctttctcgctcaaatctatatgatctttagggagtaattttctcgatggctgttcgaatttttcgagaatagatccaaagaagctcgtgctttggtgcaactagacaggccacatcccacgttttgatttcttaggttcactgtaaagaataatcaggagagtacacagatggattaccgaccttctgatagtagtgggtacagatgatgacctgcctccatctcatcaaggtagatatcaaangaaacggcaagacctaacggggaaatnga

SEQ ID NO: 6484 - DNA, 477 bp, Arabidopsis thaliana
  unsure at all n locations
  Clone ID: LIB24-135-Q1-E1-F6
tttcngccgccaggtaacggtcaaagaattcccgggncgacccacgcgtccgatttcgttagtagaaatggcgggaaacggaaacgaaagtaccggtggagacttcagtttctcggctgcggcggcccgtgatgcgcttccgaggatcacgactgagaagggcggcaaatctccagggccggcagacgtctgccaggatgacatcgcaccgcgggtcaactttcagaccatcgacgagcttcacagtctccagaagaaacgatctgcccctaccactcctcttagagatggcagcgccagcggagtcagcggaactagtggtccgactactcctgtctccagcgagaccatgcttcaatccgtcagtgcatcgttggcttcgttgacgagaagagacaggaccgaagttaataagaggagatccgacttcggcagctaaaagtagcacacgtgccagtgactcctaagtcaacttcc

SEQ ID NO: 6485 - DNA, 417 bp, Arabidopsis thaliana
  unsure at all n locations
  Clone ID: LIB24-135-Q1-E1-F8
gggaaaagattgctgtatttctanattatgatggtactctttctccaatagttgatgatcctgatcgtgccatcatgtctgatgcaatgcgttctgcggttanagatgtcgcgagttacttcccaaccgcaataattagcggtagaagccgtgacaaggtttatcagttggtaggactaacagaactttattacgcgggtantcatggaatggacataatgacttcttctgatggtccgaattgtttcaaatccactgaccaacagggtaaggaaagtgaatctgtttcagcccgcgangagaattcataccggttatccgacgaggtttttagaacccttgttgnnaaaatgnaagatatcaaacggtgnaanaagtatnggaccaccaagttcctggtgcaatctgttanattac

SEQ ID NO: 6486 - DNA, 409 bp, Arabidopsis thaliana
  unsure at all n locations
  Clone ID: LIB24-135-Q1-E1-F9
acncgtccggaatttcttcttcatcatctctccaatatcgccgattatatataaatgactcttcgattctgtttcttcttcgtcgtcatcgccggcttagggttttctctataagcaaatcttatcttctccttttcctccgttttttctggtcagcttttgcttttagattacccttgttgcctgcgatcgatctgaaaaaagaggaactttatcttgctgacggctgttataaaaagacgtggcatttcttctctgattgtgtttatttttatgacggagaagatgaacacacttgtaatctatcagactctaactgttantgttggtgttttctaatgctgtcggcaagacactatctttaggactgctaagggaagtttagaggttacacaagttgactttttcn

SEQ ID NO: 6487 - DNA, 404 bp, Arabidopsis thaliana
  unsure at all n locations
  Clone ID: LIB24-135-Q1-E1-G10
gttgagactttgttgttggaacatcatgatcctgcaaaggctcttttgaagtatangtcagatactgatgttgagtgtttagtgattggctcttgctcttctaatttcctcacaaggaaaaaaggacaagaaatgccattaacggtgctaggagaagctccagagacatgtgagatatatgttgtttgtaaagatagaatcttaaccaaatcgacgaatcagtttaccgcagattcatcatctagtttccgtataccagaaggagctgaagcttatacagaatctttcagtcgcacacgctctgataagacagggttgtctgcttcatctataacatcttcaggcaggatgagaattggaaggcctggctctttaccgcataagtcatccgacctcccnagtgt

SEQ ID NO: 6488 - DNA, 442 bp, Arabidopsis thaliana
  unsure at all n locations
  Clone ID: LIB24-135-Q1-E1-G12
cccgnccggtagcggtcaanngtcaaggnccccgggtcgacccangcgtccgcccacgcgtccggtttaatacaaatggcggcgatagaggacagtccaacgttttcctctgtggtaactccggcggcttttgagataggcagcctccgcgacaaccgagataccggtggatccggtggaaaatgattcaacagcaccgccaaaaccggtgagaatcacctgtccaacagtcgccggaacttatcccgtcgttttattcttccatggcttttatcttcgcaactacttctactctgacgttcttaaccacatcgcttcgcatggttacattcttgtagccccacagttgtgcaaattattgccgccgggagggcaagtggaagtggacgatgctggaagtgtgataaactgggcatcggaaaacctcaaagctcanctacaa

SEQ ID NO: 6489 - DNA, 422 bp, Arabidopsis thaliana
  unsure at all n locations
  Clone ID: LIB24-135-Q1-E1-G2
gatactatcactctctcttgctccaagagataaccatgaagctcaggttcaatttgctcttgaacgtggaattcctgcgattctcgggatcatctctacgcaacgtctcccttttccttcaaatgcatttgatatggctcattgttcaagatgtcttattccctggacagaatttggtggaatctatttacttgagattcaccgtatagttcgacctggaggtttttgggttctttctggtccacctgtgaactataatagacgatggcgtggatggaacacaaccatggaagatcagaaatctgactacaacaagcttcagtcacttctaacctccatgtgtttcaaaaagtacgctcaaaaagatgacatanccgtgtgggaaaaactcccaagacaatccttgctatgacaaaatcgct

SEQ ID NO: 6490 - DNA, 433 bp, Arabidopsis thaliana
  unsure at all n locations
  Clone ID: LIB24-135-Q1-E1-G4
ccntcaacccacccgtcgggccataatcanttgatggaatgatttggacaggaagttcaaatggtatacttatgcgatgggacggaaatggtaattgcttgcaagagttcgcatacgagtcctctggtattctctgcatgttcactttttgttctcgactgtgggttggttattccaacggcactgttcaagtatgggaccttgagggaaagctgcttggtggattggtagctcatagtggacctgtaataaaaatggctatcggggctggttatttatttacccttgcaaatcatggaggtattcgtggatggaatgttacttctcctgggccccttgacaatgtactgcgggccgagttggctgggaaannnnnnnnnnnnnnnnnnnnnnnnnnnnnnnnnnnnnnnnnnnnnnnnnnnnnnnnnnnnnn

SEQ ID NO: 6491 - DNA, 400 bp, Arabidopsis thaliana
  unsure at all n locations
  Clone ID: LIB24-135-Q1-E1-G5
aacttttcatcgatcttcaaattccagaaaaaactcgatgaatcttcaagctgtttcttgtagcttcggattcctttcgagtccacttggtgtcactcccagaacttcgtttcgtcgcttcgtaatccgagcgaaaacggaaccgtcggagaaatcagtagagattatgaggaaattctccgagcaatatgctcgtcgctctgggacttacttctgtgttgataaaggagttacttcagtcgttattaagggtttggctgagcataaagattcatatggtgcaccgctttgcccttgcagacactatgatgataaagctgctgaggttggacaaggcttttggaattgtccgtgtgttccaatgagagagangaaggagtgccattgtaagcntttccga

SEQ ID NO: 6492 - DNA, 399 bp, Arabidopsis thaliana
  unsure at all n locations
  Clone ID: LIB24-135-Q1-E1-G9
caccggtgagtccgatgtgaatgcagttacttggggagtgttcccagctaaggaggttattcaaccgacgatcgtggatccagccagtttcaaagtctggaaagacgaagcgtttgagatttggtcaagaagctgggctaacttgtacccagaagatgacccttctagaaagttgctcgaggaggtgaagaacagctactatttggtaagcttagtggacaacaattacatcaatggtgatatcttctctgtctttgcttgatctccgagaaaaccaccggcgaagaggaaacattcgatttcgagatttgttttgtaccttttaaagttatttttgattcgtaataaccttactttgatgaatcaacaaaaacatcagtttgattgcaatnaaaaaaa

SEQ ID NO: 6493 - DNA, 407 bp, Arabidopsis thaliana
  unsure at all n locations
  Clone ID: LIB24-135-Q1-E1-H10
gcaggtaaaatcctaaaccgtcagagaatatctatcctcctcttaaatatcactcttatctttatcctcctaaaatcttcttaattgtatctaatctctttctcaaaaaccaaacactatctctcgattatatcacaaggagatatggggaacagtgaaatgtcagcgagtgaggttgcggcggccaagcagaagaacgtcgacgattggttaccgatcacatcttccagaaacgctaagtggtggtactctgcttttcacaatgtcaccgccatggttggtgctggtgttcttagcttgccctacgctatgtccaatctcggatggggacctggagtgacgattatggtgatgtcatggatcataacgttgtacacactgtggcaaatggtggagatgcatganaa

SEQ ID NO: 6494 - DNA, 394 bp, Arabidopsis thaliana
  unsure at all n locations
  Clone ID: LIB24-135-Q1-E1-H11
ggttcttagtccgattctcgtaccggcggtaatcacatcgagtttcttggcaacggggttcctagcttctggtagcctcggagcattggggatcgccctcctcatatggctctacaagaaagaagagtattccagagctactttgcatgcacgaggaggtaggcctgatgggcctaacaagctggcagaaagtggcaagcaatcaggaggagataatccgttgaaggaagacaagccgccagaaagagataagctgccgagaaaagacaagccatccaaggaagacaatctgctgaaaggagataagccggtcgaggaggataaattgccggctgaggaagaaaaaccgccacaaaaagataaaccggcgganggacacaaaccggcacnaaaa

SEQ ID NO: 6495 - DNA, 465 bp, Arabidopsis thaliana
  unsure at all n locations
  Clone ID: LIB24-135-Q1-E1-H4
ggtcaaagaattcacgggccgacccacgcgtccncggacgcttgggggaaatcgatggccgagagaagaaactttagctcttcttcggatccgatccgatatggattctacttttcgtgatgctactctcaaagctcctctttgggaacatgtttccaggaagctattggagttaggttacaaacgaagttcaaagaaatgcaaagagaaattcgaaaacgttcagaaatattacaaacgtactaaagaaactcgcggtggtcgtcatgatggtaaagcttacaagttcttctctcagcttgaagctctcaacactactcctccttctcatcctcacgctnnnnnnnnnnnnnnnnnnnnnnnnnnnnnnnnnnnnnnnnnngatggtcatgagctcggaacaatcatcattacatcatcatcaagatnggcaaaaggcagagattctagcgcttataaacctga

SEQ ID NO: 6496 - DNA, 414 bp, Arabidopsis thaliana
  unsure at all n locations
  Clone ID: LIB24-135-Q1-E1-H7
tgaagtatttatgaacgtgctgagctcaccaatttcactttccaaaatgatattctcaaaccgttcgttattatcatgcggaatactcaaagtcagaccataaggagcctaattgttgactgcatcgttcagatgataaaatctaaagttggaagtatcaaatcgggatggaggagtgtttttatgatatttacagcagctgcagatgacgaagttgaatcgatagttgaaaaatcatttgagaatgttgagcaagttattctggaacactttgaccaggtgataggtgactgcttcatggattgtgtcaattgtctcatcaggtttgccaataacaaagcttcaagaccggataagcctgaaagctatttgcccttctcagaatatgtganggattggnctggcagaagggaa

SEQ ID NO: 6497 - DNA, 421 bp, Arabidopsis thaliana
  unsure at all n locations
  Clone ID: LIB24-135-Q1-E1-H8
tggngaaagangaattttgcttggtgcngttcacggcatcntggagtctctgtttacaagatacaccganaatgggatgaggtgaagacctggcttacaagaacacngtacaatgcatcacaggaacaatttcaaggactatctctacccanggaatgttggctgtgtanaactccttgtctgaagaangtaaaanagattttgngactgcatacancgcatccttctatccttgtanggagattctctatgaatgttacgatgatgtacaaagtggcaacgaaatccggtagtgttgtccatagccggtcgtcgcttctannanaaggaaggcttgccagcattccctatgggaaatattgancagacaagaatgtggaaangtgggtnaacgcgtcanggaattccaanacctgctggt

SEQ ID NO: 6498 - DNA, 362 bp, Arabidopsis thaliana
  Clone ID: LIB24-136-Q1-E1-A6
agatgatccacttgaagatgagatgcagcgggcttggttctgaatggggaaaggttactgttcttggaacctcaggactctcgggatcttacgtggagcaaagggcctaaaacaaaaagagaagatctagaattacgtgcgaagcttgttatgttgttattgcgttattttgtcttagcacataataaaggtcaatctgaccaaaagacatatcaggtgagtctgttcattgtttcctccaaatgaagctttaaaatttagagcttaacaccaattgaaaaataaactcacatgaatttgtgttcatttgttactgtttccttttatgagagatcttttgtttataaaaaaaaaaaaaaagg

SEQ ID NO: 6499 - DNA, 433 bp, Arabidopsis thaliana
  unsure at all n locations
  Clone ID: LIB24-135-Q1-E1-F5
acgcgtccgctaagagatgggatatgaaggagggagaggagaaagttgtgtttggtggcggaagagatgaggtggatgggtttggaatcaggggagaggtgaaatctaatgaatgggatgtgtcaaagccatggaatttgaaagaggaagaggagggagttgtgtttgatactggtggtgaagtgccgtttagctttgagaatagcttggaaatggcggaggaagagcgtgtgaagaaggagttgattgagaaggaagagaangagcttcttgaggttatcaagggtcctgatcgagcatttggagaccttattgctaagtcaggtataacagatgaaatgctagatagtttaatagccttgaaagatttccaaggggtcgaaggattacctcctctgactgaagattgaaaaaccgcgtccttgaaaaaaat

SEQ ID NO: 6500 - DNA, 481 bp, Arabidopsis thaliana
  unsure at all n locations
  Clone ID: LIB24-135-Q1-E1-C8
aaactttcacgccggccaggtaacggtcanagaattcccgggncgacccacgcgtcnnggcggccaccggatttcacacgctctctgccgtcggattattcaacggagagaagcacaagcacccccttggagtaaccctacccccggcacgccgattctccgcttctgtcaccgtttttagctcgaggcttgtggactacgagcagccattcgttaagagcttctggaactacctcgaggcggctaaggatttcatcagaccggaagacaacggcccatctcgctggttctctcccctcgaaagaagcaaggatccatgtgacggtgccccgctccttctcttcctacctggtatcgacggaaatggactcgggctaataaggcagcaccagaaacttggacaagatgtttgatatctggtgcttgcacataccagcgagcaatcgctccttccttcacagattcaagtcgccatggttga

SEQ ID NO: 6501 - DNA, 405 bp, Arabidopsis thaliana
  unsure at all n locations
  Clone ID: LIB24-135-Q1-E1-D10
acncgtccggttttttttgagaatttgttcatttttttttctcatatattgattcgagttctttcttcttgaatcttgttcttcatagatctagtttttgttttttactctctagatctanagatctgttgaattcacttctttaatccatctctgtgttcttgagttccgatggtcnaagtcaaactcaagttcaagatctgttgaatttggaatcntgctggtgaagttagagatganttatttcccagatgaagtaatagagcatgtattcgacnttgtaacatctcacaaagacaggaangcnatatctcttgtatgcaaatcatggtanaagattgaaagatacagtangcaaanggttttcattggganactgttangccattaatccanagaagttgc

SEQ ID NO: 6502 - DNA, 411 bp, Arabidopsis thaliana
  unsure at all n locations
  Clone ID: LIB24-135-Q1-E1-D12
acncgtccgtaagaacagaggatttttctcggccaagttttctctagctcaggtgtttgatgtgaattttttgagggaggggaatgagttcaatgagcagaagcagaagtcgaagtagaagtcgtagtcgggatcggtttcgtagtcggagtccgagagacaggagaatgagatctgaacgagtttcttaccatgatgctccttctagaagggagagggagccacgtcgtgccttcagccaaggaaatctctgcaacaactgcaagcgacctggtcactttgcaagagactgttctaatgtttccgtctgtaacaactgtggtcttccagggcacattgcagcagaatgcactgcggaatcacgttgttggnactgtagagaaccggggccacgtancctcaaactggtca

SEQ ID NO: 6503 - DNA, 394 bp, Arabidopsis thaliana
  unsure at all n locations
  Clone ID: LIB24-135-Q1-E1-D2
acgcgtgggtcgcgactatgctctctgcaaagatggttctacttttggcttaaagagcaatgttttcgagtctttgccatggcgggtttcattaaacgcaaaggcaacgtattttttcattctcaagccttagctgctgtctactccaagttgcagagaagtaattgcacgcttgctgagggattcatggagaagtgttctagcattcgtcaagttattgatgaagatataaattcagttgatacatctaaagtggaagaaggtacgagcaagtgatgctggaattaaaaattcantgatccctgaatcctctatgaatgtcttgagactccttagacgtcaaggtttcgatgcataccttgttggtggatgtgtaagggganttaataccgga

SEQ ID NO: 6504 - DNA, 418 bp, Arabidopsis thaliana
  unsure at all n locations
  Clone ID: LIB24-135-Q1-E1-D7
acgcgtccgcccacgcgtccgcccacgcgtccgcggacgcgtgggtttttttcctctgatcatcatcgaaccctagtttcgtcttttgggtacgtttgatttcgcctctccactttgtcaatttcgagtttttgtggtttgggtttttttcccgatttagcctaacagataaagtttcgagttttgtttctcttaatcatcgtagatactaaccgaatcatcatggagaagaactccttcaagctttctaatcctctggagatgagaatggctgagtctactcgtatcagagcgaaataccctgaaagagttcccgtgattgtggaaaaagctggacagagtgatgttcctgacattgacaagaagaagtatcntgtaccaactgatctaaccaattgggcaaatttgtgtacgttgg

SEQ ID NO: 6505 - DNA, 473 bp, Arabidopsis thaliana
  unsure at all n locations
  Clone ID: LIB24-135-Q1-E1-E1
acgcttccangtgccgtcaagaattaacgggtcgacgcncgcgtcnggcanaagaaggatagaactattgatcgtcgcanangactcatcatagccatggatactgcanttgggatggagtatttgcacggaaagaacattgttcatttcgatttgaagtgtgagaatcttcttgtgaacatgagagatcctcagcgtcctatatgcaagattggngatttggggttatcganggtgaaananangactctantatcaggaggtgttcgtgggactttgccatggatggcacctgagctcttgagtgggaaaagcaacatggtctctgaaaanatcgatgtttactcctttgggattgtaatgtgggaactactcactggtgaagaancatacgcagacatncattgtgcttccaaaattggaggtacattgaaaaccgcattggtccannaaatcccncagtggggttgatc

SEQ ID NO: 6506 - DNA, 419 bp, Arabidopsis thaliana
  unsure at all n locations
  Clone ID: LIB24-135-Q1-E1-E2
tttgcaaaatcattaactaatctctgttttgatgactagataacttggatgtaggattattatacctaaattctttctttccatgcatttatgtcggttttgacatctttgttctcttagtttaaaagatatcaatattagttatcttctattctttgaacatttgtgtccatctcatgaagttcaggaagcgtaggcaannnnnnnnnnnnnnnnnnnnnnnnnnnnnnnnnnnnnnnnnnnnnnnnnnnnnnnnnnnnnnaaactcatatcaaatttgaatcttatcatcaaattgagagtaatcaacgacaccactgcaatcttgcatatacattgttcttgtgtattccacccgtttctttaatcttcaatgtaccgtaattgagtgtcnttttgggttgtaacctgtaaggtga

SEQ ID NO: 6507 - DNA, 472 bp, Arabidopsis thaliana
  unsure at all n locations
  Clone ID: LIB24-135-Q1-E1-E3
agtgccggtcaagaattaacgggtcgancacgcgtccagcaggaaacttccttggattcgcaaagcttttcttccttttatattcttcattttgatgcgaatatagagagagtccataaaagaaacagtaatggacgaatatattgatttccgaccattgaaggtacacagagcacaagacttcaatgactaaatacaccaaaaagtcatcggaaaaactttccgggtggtaaagtcattgaaaaaggttagtatttgttatactgatcctgacgcaacagattcatcaagtgacgaagacgaagaagatttcttgtttcctcgccggagagtcaaaagattcgttaacgagatcactgttgagcctagctgtaacaacgtcgtcaccggagtttcgatgaaagatagaaagagactctcntcttcctccgatgaaactcaatcctccggnggtcnagtcgtcaaacgtcct

SEQ ID NO: 6508 - DNA, 471 bp, Arabidopsis thaliana
  unsure at all n locations
  Clone ID: LIB24-135-Q1-E1-E4
taagctgcagggccggtcangaatancgggcttaaccaaancaccatggaatctccctaaatttcctcacctactcacttccaatttcaacctgctcgattcttcccctcttcttcgcaaaagccctagttttgatcatcgcacttcactctcctccgcatgagaaatcgagaaatccgctcgacgtagtagatagataaaaccacaaagttaggtttttttcaattgggtatggaacctcgtgttgggaacaagtttcgccttggccgcaaaattgggagcggctctttcggagagatttacctcggaactgatgttcagactaacgaagaagttgctattaagcttgaaagtgtgaagactgcgcatccgcaattgtcatatgaagtcgaggatatatagagttcttcagggtggaactggggattccaaatatgaaatggtatggttgttgagggggactacaatgtc

SEQ ID NO: 6509 - DNA, 415 bp, Arabidopsis thaliana
  Clone ID: LIB24-135-Q1-E1-E6
gggattttttcgaaagaaattgatgagaagaatgattccaacatcgttttcaagtaagtttcaaggagtactaagtatgaatgcgttgagatgttatgtatcagagtttatctcaaccttcttcttcgtcctcgcagccgttggttctgtcatgtcttcaaggaaattgatggctggtgatgtgtctggtccgtttggtgttttaataccggcgattgctaatgcgttggcgttatcatcgtcagtttacatctcttggaacgtctctggtgggtcatgtgaatccagcggttacgtttgcgatggctgttgctggtcggattagcgttccaaccgctatgttttattggacttctcagatgattgcctctgttaagggcttgccttggttcctaaaggtaaaccgtcaatggaa

SEQ ID NO: 6510 - DNA, 394 bp, Arabidopsis thaliana
  unsure at all n locations
  Clone ID: LIB24-135-Q1-E1-E9
tagaaaaaaaatgttggtgttagcattattttccatttacttcttancaatagaagctgtccggaatgaatcatttcctgcgctattagcttttggagattcaatggtcgatactggtancngnagttacctcctgactctaatgaaaggaaattactggccatatgggtggaatttcgactcaaaantaccgaccggaagatttggaaacggaagagttttctccgatgtaattgctgaaggtttggggatcaaangaattgtaccaagcttatcgtaagttatacattgctccaagcgaccttaaaacgggtgtttcttttgcatcaagtggtgcaggagtcgaccctgtnacatcnaaattgctgnnanttttatcgccagntgaccaagt

SEQ ID NO: 6511 - DNA, 472 bp, Arabidopsis thaliana
  unsure at all n locations
  Clone ID: LIB24-135-Q1-E1-F2
cgttacgctngcaggtgccggtcaaagaattancggggtcgacncacgcgtcnncccacgcgtccgcccacgcgtccgcccacgcgtccgcccacgcgtccgcccacgcgtccgcccacgcgtccgcagttctctgcacctttttctttcccctgttttttgatcctcaatcaccaaaccctagcttgttcttctgttgattatttcgaaaagggggtttgtttgttttctgggaatcagcaaaaatcacgaaatggttggtttaatatttcaatcgggataaaatcgatcgaaaatgagtcagccttctgtgattcttgctacggctagctatgatcacaccatccgattctgggaaagccgaaactgggtcgctgttaccgtaccattcangtatcctgattcgcatgttaaatangcttgagatanccccaggataagcattatctagctgcaagcttggaantcctca

SEQ ID NO: 6512 - DNA, 481 bp, Arabidopsis thaliana
  unsure at all n locations
  Clone ID: LIB24-135-Q1-E1-F3
ctgttacgcttccagtgccggtcnaagaattaacgggtcganncncgcgtccncgttgctagaggaatcaaacaatggtgtttgtgaagtccaccaagtcgaatgcttacttcaagaggtaccaagtgaagttcaggagaagaagagatggaaagactgactacagggcaaggatccgtcttatcaaccaagacaagaacaagtacaatactcctaagtatcgttttgttgtccggtttaccaacaaagacatagtggcacagattgtatctgcaagcattgctggtgacattgttaaagcttctgcttacgcacatgaactgcctcagtatggtctcactgttggtcttacaaactatgctgcagcttactgtactgggccttcttttggctcgccgtgttttaaagatgttggaaatggatgacgagtatganggaaaccttnanggccactgggagaaaacttttccgttganccaac

SEQ ID NO: 6513 - DNA, 448 bp, Arabidopsis thaliana
  unsure at all n locations
  Clone ID: LIB24-135-Q1-E1-F4
tancgggccgacccacccttcnnctttngtnatngggttggtnattggatgggcanggaaaccaagatgggttncttctncnaataancgacaagtcaaattacaatgttctgctccaagatcttttgatttgtctttaccatcttcttctcctagttctgttgttacttctcctttgaagggttttggatcagctccttgcttaaaggctcttgtttgtgatacatggactatggctttaagacaacagagacaaacagtnnnnnnnnnnnnnnnnnnnnnnnnnnnnnnnnnnnnngaacaacatttggatttggtttcaagaagtgaagaaaacaaaggagagattgcctaatactgtaacagagttagatttgagacatcttgtgcaattggttgagaggaaagatggtggtcaagcctggattcagaagaatgggattcgttt

SEQ ID NO: 6514 - DNA, 416 bp, Arabidopsis thaliana
  unsure at all n locations
  Clone ID: LIB24-135-Q1-E1-C7
tccttgacgagattggtgtggcttacgatgagcaagacacctacgttgtggttaagcacgcggctctgttcacatcaaccatcatgagcaagcttttggctcgtcctaatgtgaagctcttcaacgctgtggctgctgaggatttgattgtgaaaggaaacagagttggtggtgtggtgactaactgggctcttgtggctcagaaccaccacacacaatcgtgtatggaccctaatgttatggaagcgaagattgtggttagctcttgtggtcatgatggtccttttggagctactggtgttaagangttgaagagtattgggatgattgatcatgttcctgggatgaaagctttggacatgaacactgctgangacgctattgtgaaggtgaccagagaaggttgtncctggtaa

SEQ ID NO: 6515 - DNA, 403 bp, Arabidopsis thaliana
  unsure at all n locations
  Clone ID: LIB24-134-Q1-E1-A9
ccgcccacgcgtccgaagaaattgcaaaaagaagaagaagatatgagttctcgaattttatcctccgattcggacgacgttgatgaagaaaacccgaaaactcacgagaatggtccaattggaggaaagactcaaaatttagggcaaagcaagggaggtgatagtgataatgttgtaaagactaatacttgtttcgtgtgtgatgggaaagacaattgggttttggtatgttacggagaggaatgtantatagctantcatcagagttgtgcatctgatgaacctgatttcgatgaatttggaaatttctattgtccttattgttggtataagcgtgtagttgtcaagtgtttggagttacggaaaaanncttatgctgactgacaagtccaaggaagggatn

SEQ ID NO: 6516 - DNA, 465 bp, Arabidopsis thaliana
  unsure at all n locations
  Clone ID: LIB24-134-Q1-E1-B10
ctttttacgccgnccggtaccggtcaaagaattcncgggncgacccacgcgtccgctcaccaaacaactctcatcaatataaagagaagagagtggtanagttatatattacacacataaacttanatatantagtgttatattcttgattaagtaatanagatgaaaggtggaagcatggataaaattaagccgactattggcgataatttcactgcaatttgggtatgcaggcatgtacatcatcaccatggtctcgttcaaacatggcatggaccattgggttcttgctacataccgtcatgtcgtagccacggttgtcatggctccctttgctctcangttcgagaggaaaattaggcccaagatgacactatncaatattctggaggcttcttgctcntggaatattanaagcccctcatggntcagaaatttgtnccanctaaggattganaaacccct

SEQ ID NO: 6517 - DNA, 514 bp, Arabidopsis thaliana
  unsure at all n locations
  Clone ID: LIB24-134-Q1-E1-B2
ggnaacttttacttgggccggccacgggtcaaaacaatcccggggncgacccacgcgtccnataantttcttcctccttccccctttcaagaaaaccaagcggancaatccttcntcaaccgggtttatgggtgacttcnggaggggattaagcaagcgttgattcttgggttatatcgccaagggtttcaacgttgattcatggttgctttctgataccttctctcacgacaacgatttgctcgcaagagctctccataccaccgtcacaagcccctcatactctcactccttcctctgctttcttcgattcctccgctgtttctcacccttcttccactaacacactctcctctaacgtcccgggngcttctgattcanaaatcaacggcggaagagctaaacnggaaaagttaactgccntcttaacgacnggtnaagccgccaaagccgccggcgctcgtgctttcaaggaaaatctcaagactactttcaaaaacgggngggttccgtc

SEQ ID NO: 6518 - DNA, 481 bp, Arabidopsis thaliana
  unsure at all n locations
  Clone ID: LIB24-134-Q1-E1-B3
tactttgncccggcccgggtcaaagncaacccgggncgncccacgcgtccnagagaagaaaggttttgcatttgcaacctttctcaaattgggttctgtgcatttccttgcactttggntaataggaactaaatctctttctctggttcatcaatggcggatcaaacgaagaagagatacgttacaagcgaggatttgaaaaaacacaacaaacctggagatttatggatttcgattcaaggtaaagtttacgacgtttccgattgggttaaatctcatcccggaggcgaagcagcgattctcaatctcgccggccaagacgtcaccgacgcgttcatcgcttaccatcccggaaccgcatggcaccacttagaaaagcttcacaatggctatcacgtgagagaccaccacgtgtcagacgtctcacgtgactaccgtcgtttagccgccgagttctccaaacgcggcctcttcgacaaaa

SEQ ID NO: 6519 - DNA, 460 bp, Arabidopsis thaliana
  unsure at all n locations
  Clone ID: LIB24-134-Q1-E1-B5
gtcanagaattcccgggccgacccacgcgtccncccacgcgtccggcggatttagatggtgatggaaccatcgatttccctgagttcttgtgcgtaatggctaagaatcaaggtcatgatcaagcgccgcgtcacactaaaaaaacaatggcggataagctcactgacgatcagattacagagtacagggaatctttcaggttattcgacaagaatggtgatggttccattacgaaaaaggagctccgtaccgtgatgttttccctcggtaaaaaccggacaaaagctgatcttcaggacatgatgaacgaagtggatttagatggtgatggaaccatcgatttccctgagttcttgtacctaatggctaagaatcaaggtcatgatcaagcgccgcgtcacactaaaaaaacaatggtgggattatcagctcactgacgatcagatcttagaattcagg

SEQ ID NO: 6520 - DNA, 467 bp, Arabidopsis thaliana
  unsure at all n locations
  Clone ID: LIB24-134-Q1-E1-B6
aattcccgggncgacccacgcgtccncccacgcgtccgatggcaccatcaatgaaagaaattttttctaaagataatttcaagaaaaacaagaaacttgttttgctatccgccgccgtagctttgctcttcgtagccgccgtcgccggaatctctgccggagcttcaaaagccaacgaaaaacgaactctatcnccgtcgtctcacgccgtgctaagatcctcatgcagctccacgcgttaccctgagctctgtatctctgccgtggtaactgccggcggcgtcgagctaacgtcgcaaaaagatgtcatcgaggcatcggtgaacctaacaataaccgcccgtggagcacaattactttcaccgtgaaagaanctgatcaagaagangaaagggactgacgccgcgcgagaaagacggngncttcaatgaacggtttgganactattgattgagaaccctgggacg

SEQ ID NO: 6521 - DNA, 477 bp, Arabidopsis thaliana
  unsure at all n locations
  Clone ID: LIB24-134-Q1-E1-B8
aggtaccnagtcaaagaattcccgggncgacccacgcgtccncggacgcgtggggcttacgaacaagaaaaaaagaagaatctttagccacctttgagatcaaaagatgaacatcgctcacactatcttcggcgttttcggaaatgcaactgctctgtttcttttcttggctccttcgataacattcaagagaatcatcaagaacaaatccactgaacaattctctggtatcccttatccaatgactctcctcaactgtctcctctctgcttggtatggacttccctttgtgtcaaaagacaacacacttgtgaagcacaatcaatggcacaggagcagtgatcgaaacagtctacgtgttaatctttcttttctacgcaccaaagaanggagaaaattaagatctttggtatcctctccttgcgttttgggctgtattcgcaacagtagctctcgtctctctcctttgctcctcaa

SEQ ID NO: 6522 - DNA, 448 bp, Arabidopsis thaliana
  unsure at all n locations
  Clone ID: LIB24-134-Q1-E1-B9
cacgggncgacccacgcgtccgctccattcataattttgactccactttccaaaaaaaacaaaaaaaaatagatactaatataaaaaattctcaaatctaaaatttcagatttcagaaatcgccatggcttcagtgactctaggttcatggattgttgtnnnnnnnnnnnnnnnnnnnnnnnnnnnnnnnnnnnnnnnnnnnnnnnnnnnnnnnnnnngtcctataactcttactaaacccatctcctttcgatnaaaacgcaccgtttcatcatcttcttcaatcgtttcttcttccgttgttacaaaagaagacaatctacgccaatctgaaccatcctctttcgatttcatgtcgtacatcatcaccaaagccgaattagtcaacaaagctttagaatcaagctggttcctctccggtgangccactcaagattcaangaagggg

SEQ ID NO: 6523 - DNA, 464 bp, Arabidopsis thaliana
  unsure at all n locations
  Clone ID: LIB24-134-Q1-E1-C3
cggtcaaagcanacccgggncgacccacgnnnnnnnnnnnnnnnnnnnnnnnnnnnnnnnnnnnnnnnnnnaaaagctgaacacaaagatctattctttcactaacacattaccagtttctgcatttgtattanatccttttctaaaacttttaaccattctttctccattcccagttcttagaaagagtcaagagcaatgaggaagcttttcttgttagggtttatagttgcaggactggttcttgggaatgaggcaaatgggtatttagagttcaatgtcactgaattagatcgcantgaggatttaagagtttggtttcgccaaattcagttccaatttcaatcnannaatggttggtctcacacttaacagaggagctggttctaaangagctgtttgtttggatggtacattgnctgggatatcacttacatccgtggacatggatctggagccaaata

SEQ ID NO: 6524 - DNA, 487 bp, Arabidopsis thaliana
  unsure at all n locations
  Clone ID: LIB24-134-Q1-E1-C4
tcattggccgncccggtcaaacnaccnggnccgaccnacgcgtccngaaagaaaagccncnattttncncaaggcaancncncnctcnctgcctcanctcataaacccattacaccaaaacctcatcgtanagagagaaacacaccaaccattgttacactctaagagaagagaagagagaaggaaaaatggacggtgtatcaccaaagtttgtgttgccggagacattcgacggcgtgaggatggagatcacaggccaactaggcatgatctgggagcttgtaaaagcaccaatgattgtccctcttcttcaattagctgtttacatctgtttgcttatgtctgtcatgcttttatggtgagagggtttacatgggaatcgtcatcgtcctcngtcaaaactcttctggaaaaaaccaagacaaacgttacaagttcgaagcccantcacgaatgatgaagaacttgggtagctccaantttcccc

SEQ ID NO: 6525 - DNA, 432 bp, Arabidopsis thaliana
  unsure at all n locations
  Clone ID: LIB24-134-Q1-E1-D1
acgcgtccgcggaattgtttttgcagaaagtctctcatctgaactcagaaaatctccgagttcgtatatcttcnccgtttgagcaatggngttggtcatgcacacatacaagggaaacanaggtgccaataaggcacttattgctgcagagtatgcgggtgtgaagatcgaggagtccgcanactttcagatgggcgtcactaacaagtcacctgagttccttaagatgaaccctattggnaangttcctgtgcttgagactcctgaaggtcccatatttgagaagcatgccattgcccgatatgtganccgtangaatggtgacaactcctttgaatggatcctcccttattggaatacgctcacattnaccantgggntcgaatttcnccncattgggagattganngctaacatgtttaaagtggtttg

SEQ ID NO: 6526 - DNA, 414 bp, Arabidopsis thaliana
  Clone ID: LIB24-134-Q1-E1-D10
ctgttcatcaaagaaaacgaaacccatttctcaaaatccaaaattttcaaaaactcaaaactcatcatgggtttcatttcttcttcatcaccagtagaagagtctcattaccatacacacaagatcttccttttctccaactacatccttctcggcgctgcttcaagttgtatcttcctcacactctctctccgtctaatcccttccatctgcggattcctcctcatcctcctccacgccaccacaatcgccgccgcagtctcaggctgcgctgctgcatcttgcggaagaaaccgttggtacgccgctcacatggttgcaactgtgctcactgctatattccaaggctctgtctctgttctcatcttcaccaacacgtctaaattcctccggaagtcctaaatcctaaggtgg

SEQ ID NO: 6527 - DNA, 433 bp, Arabidopsis thaliana
  unsure at all n locations
  Clone ID: LIB24-134-Q1-E1-D2
acgcgtccggagaaagtgatgttcaacttcttatctcttaatccttcatttgctctgtcacacattgaagcctattttcggttgcagtttgttaagttttcatgggaagcgttgtctttggagtgttctgaagttgactttaatcctgaaagaagaaggatatgcttttactgaagttatcatgggaagcactttttgtggagtttacaggagtgtctatgccgttgcagtattcgaggatcgctttgatctgccagtcgttccttgttacctttttcgcttttgcaagttctttcttacttgccttgcttttctctcgttcatgtantacttgatgcaaagtcttgaaactttcccgatattggaccaaactccttttcattcatgccntttaaggactactaagttatggaactccccctgatgtagaang

SEQ ID NO: 6528 - DNA, 468 bp, Arabidopsis thaliana
  unsure at all n locations
  Clone ID: LIB24-134-Q1-E1-D3
cccgggtcaaganatcccggggncgacccacgcgtccngctcggcattgacattgttatcgagggaacaggagtgtttgttgatgggccaggagcagggaagcatatccaagccggagcctcgaaagttatcatcactgcaccagccaaaggtgctgatatccctacctatgttatgggagtcaatgagcaagactatggtcacgatgtcgctaacattattagcaatgcatcttgcaccaccaactgtttggcaccttttgctaaagtcttggatgaagaatttggaattgtcaaggggacaatgacaaccacacactcctacaccggagaccaaaggcttctagatgcatcacacagggacctaangcttcaagaaccgcaacactgaacatantgcccaacaacacaaggagcaaccaaaggcgtgtcattaatggttgccccaactgaanggtaaacttaacgg

SEQ ID NO: 6529 - DNA, 438 bp, Arabidopsis thaliana
  unsure at all n locations
  Clone ID: LIB24-134-Q1-E1-A8
acgcgtccggtttgtttctttgctctgaggtatcttcgtttganacaaggcgaaatcgatcntcttcttcntcgtcttcanccccttgcgttttccatctccatcgtcngcngaaaccatttgatcgatctctcangttacttagaagggcacaagaagccgatgggatcagattggaccaaagacatgggaaggctcgagtganagttggaagagtttggcgtcatgctcatgatggatctcatcacnttgttgaatggaatgtnagcatcagtcttctcnctcactgtctctcttcttaacgtcttgatgataactctgatattgtcgccacagataccattanaaacactgtttatgtgaaagccaaggaatgtggagatcggctctccggtgggaggaanttgccatacntattggggaaaacacttttgccnc

SEQ ID NO: 6530 - DNA, 393 bp, Arabidopsis thaliana
  unsure at all n locations
  Clone ID: LIB24-133-Q1-E1-G5
ctcctctctattgagcctctcttgaggttagccggtgagctttctcttgacgttaaggctgtgaggtacactcgtggaagtttcctctgtcctggaggacaaccattccctcaccgcaacttctctgaagaagtctctgttcttgatggtcactttgctaancttggtttaagcagtgttgcctacttgatgggcaatgacgatgaaaccaatgaaatggcatgtttactctgcttcttctgccaacagcaacaacaagaacaatgtctanacgcttgagatgtgtatgactggtctagacaaagacaaggcatctgtcttctacaagaacgagtcaagctctgctggttctatgactgataactctggcatcagaaaggatactgcctcant

SEQ ID NO: 6531 - DNA, 445 bp, Arabidopsis thaliana
  unsure at all n locations
  Clone ID: LIB24-133-Q1-E1-H11
ggtcgaccnacccgtccgaatatttntctctactcaantcactcanactcnnaaaagcggtagcaatgtcagccaccgccgccgccncntcctcgatcgccgttgccaccaactctctcangaacgtgactctgtcttccagatcgccccttccatcagccatctccgtggctttcccttcccgtggacgcaatactcttcagcgacgcctcgttctcgtttcctgcagtactggagacggatctaagcctacgattctcgtggcggagaagctcggtgacgctggtattaagcttttggaggatgtcgcgaatgtcgactgttcgtataacatgactcctgaggagctcaacattaagatcncgctctgtgacgccttgatcgtgaggagtgggactaaggttggccgtgaggtgttcgaatcgtctcacgggacggctcaaag

SEQ ID NO: 6532 - DNA, 455 bp, Arabidopsis thaliana
  unsure at all n locations
  Clone ID: LIB24-133-Q1-E1-H2
aaantccagggtcgacccacncntcaggntaaggatgataacggtaagcgaagtttcctcntacccttccttcntcttcaaacttccgcgtctctgtcccgtctcaatcacaaatcatccntcgagattgcgaaagctcttctctttacaaagggaagcttcttctctgtttcgacaaagaccangaggaacacttgtaaagccaaatcatggaatctcggtcttgttatcaactctagaagctctgaggcttcggtttttgatccgttggggatcaatccagatgaaacttctggtttaagtagcatttgggaaanctttgtgaagtcntttgtcaccatcatttgaaagctcttccggtaacaagcgaagataaagccgtcntccnggtagaagcgtggcagctgctatttgaagacagttccattgattttggagaattcttcaaagggcca

SEQ ID NO: 6533 - DNA, 421 bp, Arabidopsis thaliana
  unsure at all n locations
  Clone ID: LIB24-133-Q1-E1-H3
atacacaagccgtgaaggtgcagagaangctgcgcaagagctctccaacaggctagtcatcaacggtcagaggctaaaactcacatggggaagacccaaacctgatcaagatggtgcaaaccaacagggcggtgtggctcatagtgggttactacctcgagccgttatatctcagcagcacaatcaacccccaccaatgcagcagtactatatgcacccaccaccagctaaccaagacaaaccttattacccatcaatggacccacagagaatgggtgcagtcatttcaacccaagaggctggtggttcaagcactgagaacaacggagcttcatcttcttcctacatgatgcctccacaccaagtcataccancaccaccatatggatatatgccatcgccttancaagcagcagtatcc

SEQ ID NO: 6534 - DNA, 468 bp, Arabidopsis thaliana
  unsure at all n locations
  Clone ID: LIB24-133-Q1-E1-H4
acgccgtcagcatgccatgtaacggtccagggtncacggnnccatccngtcttgngacagtctgtttcgtctccggtggcttttcatagccttggtgaagctgtagctacagtttcaaaagcttctcaatctactagtgctgctattgtgcttgcttcaagtgtttctgatgaatctaagcttagttctgtatcagctttagcttcaggcatagtacttggtttatttgaagatggtaggtataagtctgaatcaaagaaaccatctttgaaagctgttgatattattggatttggaactggggctgaggtagaaaagaagctgaagtatgctgaagatgtttcttacggtgtaattttcgggagagagctcattaattctcctgccaatgtgcttactcctgctgtactagctgaggaagcagcaaaggtggcttctacgtacagtgatgtcttcactgcaaacatc

SEQ ID NO: 6535 - DNA, 410 bp, Arabidopsis thaliana
  unsure at all n locations
  Clone ID: LIB24-133-Q1-E1-H5
gggcggacgcgtgggcggtggtggacatccgttagatggaaaaatgggcggcggaggtggcggtcccaacggtaataaaggaggtggcggagtccanatgaacggaggtcccaacggtgnnnnnnnnnnnnnnnnnnnnnnnnnnnnnnnnnnnnnnnnnnnnnnnnnnnnnnncctcccgccaggtttccggccaatgggaggcggtggtggtggagggggaggacctcanagcatgagtatgccaatgggcggtgcaatgggtggtccaatgggaagtctaccacaaatgggtggtggtcccggtccaatgagtaataatatgcaggcggttcaaggattacccgcaatgggtccangangtggtggtggcggtggcccatccgcanaagcaccaccagggatatttc

SEQ ID NO: 6536 - DNA, 417 bp, Arabidopsis thaliana
  unsure at all n locations
  Clone ID: LIB24-133-Q1-E1-H6
gacttcaacaatgtaacttatatcaaggttgaatacgaaaaggacggaaaattcgaaattcgtgaacacgggactaatcgcgggcagctaaaagagttttcagtggattatccgaatgaatatatcacagccgttggtggaagctacgacactgttttcggttacggatcagcgttgatnaagtcattactcttcaaaacctcttatggaangaacctctccaatccttggtcacacgacattactanggaatccagctgggaaagaattcatgctcgagtccaaatatggaggaaagcttcttggtttccatgngacgttctggtgaagctcntgatgccantggacctcacttctttgctgtgaactcttctcttaagcacnttaaanccgcaaaggtgggaatggagggaantg

SEQ ID NO: 6537 - DNA, 415 bp, Arabidopsis thaliana
  Clone ID: LIB24-133-Q1-E1-H7
caaactcttgggttcttctctgattgaaaatgagcttatcatcgccaaccagtgcttgtagctcgtccagatgttactcctcgggattatcgtttccgattggatttggatcgaatcccatcaatgtgggattggtttgttacccaaaaagatacagtattgctgctcggaagttcgtagtggcttgctcctcctcctcttccgatccacttttggttaaggctgcaaaagggcaagccataagtcgtcctccagcttggatgatgaggcaagcaggaaggtatatggctgtttaccaaaagctcgccaagaaacatccgtccttcagagagagatcagagaacactgatctaatagtggaaatctctttgcaagccttggcaaagcattcaagaccagacggtgtcatcaattt

SEQ ID NO: 6538 - DNA, 415 bp, Arabidopsis thaliana
  Clone ID: LIB24-133-Q1-E1-H8
caatcgtcaatcgttgaatccgattcgatttgcctctcttccggcgtagcttcgacggtggcaatggcggctccgggatcggttcagaaaggagatgaagagtggcgtgcgattctttcacctgaacagtttcggattcttcgtcaaaagggcactgaatatccaggaacaggggaatatgtcaacttcgacaaggaaggagtttacggttgtgtaggatgcaatgctcctctttataaatccaccacaaagttcaacgctggttgtggctggccagctttctttgaaggaatccccggtgccattacccgaacgacagacccagatgggagaagaatagaagatcaactgtgcaacatgtggtggacatcttgggtcatgttttcaaaggagaaggtttcgctactccaaccgg

SEQ ID NO: 6539 - DNA, 480 bp, Arabidopsis thaliana
  unsure at all n locations
  Clone ID: LIB24-133-Q1-E1-H9
ctgtttacgcctgcccggtaccgntccaaaattcccnggtcgacccacgcgtccggatttcgaaatggaggaaggtcgtgacgacgagtattgtagtttttctaattccggcgatcgcgacggtggattgagcggttgttttttcttggatcatgttggccaagttttgctttctcgaaatcatgatggtttgtcctggaaatgtttggattcttcagattgtgagggaacaacttgtttgggaattataatttgcgagaattccgaaactgagatcaaattctctgatatttatgctgtggagtttgttagctatggcttggtgcatagtccaaagttaggacttagacatgccaaagaatgtttccgggaacgcttgttaaatactcaagagatgtatcggttcactgtccacggatttcaaagttcaccaaaagagccttgtctttgggaaccttgctgcattcacttttggacata

SEQ ID NO: 6540 - DNA, 424 bp, Arabidopsis thaliana
  unsure at all n locations
  Clone ID: LIB24-134-Q1-E1-A1
acgcgtgggcggacgcgtggggtcgtctaaggacaagaaactatcgaagccaacangtggtcgtactggtggtatccgtacactttccgatctgaaccgaagatcagaacctgattccgatagtgactccgatggacctcaagaatacttcaccggtggcgaaaaaagtggtatgcttgttcaagatcctacaaaagaaccaaaacacgatgatgttgatgaagatatttaatcaagcaagacagctaggagctgtggaaggacctcttgagcatccttcgagttctagaagctttacaggaacaggaagattgctttctgggagaaagtgtgcaacggctcttcaacagcctgagcctgtgattcacaatattaattttccgggncnaatggattcactgtagatgatggnccctttgaggga

SEQ ID NO: 6541 - DNA, 471 bp, Arabidopsis thaliana
  unsure at all n locations
  Clone ID: LIB24-134-Q1-E1-A10
cttttacgccgcccngtaccggtcaaagaattcccgggtcgacccacgcgtccncccacgcgtccgcttctgcttaccagatcgaaggcggcagaggtcgtggacttaacgtttgggatggcttcactcaccgatacccagagaaaggtggagccgatttgggcaatggagacactacttgtgactcataccggacttggcagaaagatctagacgtgatggaagagcttggagttaaaggctacagattctcctttgcgtggtcaagaatccttccaaaaggaaagaggagtanggggaatcaacgaanatggtattaactactacagcggtctcatagatggcctgatcgcaaggaacataacgcctttcgttacactctttcactgggaccttcctcaatcattgcaagatgaatatgaaggtttcctggacagaacgatnattgaccaattccaaggattacncggt

SEQ ID NO: 6542 - DNA, 464 bp, Arabidopsis thaliana
  unsure at all n locations
  Clone ID: LIB24-134-Q1-E1-A12
gttaccttccagtnccggtccaagaattaacgggtcgacccacgcgtccnatctgaagcactgtcaatgtcatcaccaccgaagtagagttgactccactcaacagaaactgaaactggnaagtttgagacttttaagatgtcagaaacagaatttaaagtgttgcttgagacattcacatttcctgctgattctgctcccttcaagagttgtcatgcctcnaccatagttgaggttgttaaagatcatttcttggctgcgtatttcngaggcaccagggaaggagcacctgatgtcaaaatctggttgcagcatttcaaggatggtcaatgggattcaccggttattgttgatgaagagccaggagttccaatgtataacccctgtcttgttcaaacttccatctcatganctccttantgttccacaaaatcnggcaggngggtcaaaaaatgggaagtngg

SEQ ID NO: 6543 - DNA, 463 bp, Arabidopsis thaliana
  unsure at all n locations
  Clone ID: LIB24-134-Q1-E1-A7
agtacangtcaaagaattcccgggncgacccacgcgtccnattttgcctcggtgtctgtcccaactctcaagaggctaaggtttagctggcaagagcgagatgagtttccaaagagtgtgttgttagatactccgaatcttgtatacttgaagtttactgatactgttgcaggcaagtatccgaaagtgaatttggattcccttgttgaagctcatatcgatcttcgcttgttgaagcctctattgataaattaccatcaaggttatggggaaaatgatatggttggcaatgctacagattttataatgcgtatatgcaatgtgaagactctttatctatctgccaacactcttcaggtacttacttacagttgtgatgctataccaatattcaacaacctgactcatttaaccatcgagagtaatccgagagtangatggcagtcagtaccgggcttgctca

SEQ ID NO: 6544 - DNA, 416 bp, Arabidopsis thaliana
  Clone ID: LIB24-133-Q1-E1-G4
acgcgtgggtgcaaatcagctctatgaactttgtgaagctgtaggaccggagccaactaggacggatctggtgcctgcatatgctcgtctactttgtgataatgaggcagaagttcggatagcagctgctggaaaagttaccaagttttgtcgcattttaaaccctgaactcgctatccagcacattcttccctgtgtaaaggaattatcatcagactcttctcagcacgtcagatctgcattggcatcagttataatgggaatggctccagtcttgggtaaggatgcaacaattgagcatcttcttccaatctttctttctctattgaaagacgaatttcctgatgtacgcttaaacattatcagcaaacttgaccaagtgaaccaggttattgggattgatctactatcacaat

SEQ ID NO: 6545 - DNA, 450 bp, Arabidopsis thaliana
  unsure at all n locations
  Clone ID: LIB24-133-Q1-E1-E4
cggtagccgtccaaaattcaagggtcgaccnacgcgtccgnccacgcntccgtttcccctgaaaccgtnnnnnnnnnnnnnnnnnnnnnnnnnnnnnnnnnnnnnnnnnnaagacaagaacttgatgttcatgtcttgaaacntaacaaagtattgatctttccttttaagtaaanaatttgggggttacacaacttcgtctagatggagcaaganaaaagcttggatccacaactatggcatgcttgtgcaggatcaatggttcaaatcccttcactgaattcaacggttttttacttcgctcaaggccacacagagcangntcacgcgcctcctgattttcacgcgccgcgcgttccacntcttatnngctgtcgtgtcgtcnccgtgaaagttcctcgccgacgctganacanacgaaagtttttgctaaaaattacgcntttgcca

SEQ ID NO: 6546 - DNA, 421 bp, Arabidopsis thaliana
  unsure at all n locations
  Clone ID: LIB24-133-Q1-E1-E5
ctctcaatttcattcttaaaccctagttcttcgattttttccgatctacgacaatggcggacgctgaaacctttgctttccaagctgagatcaaccagttgctttccctcatcatcaataccttttactctaacaaggagatcttcctccgtgaactcatcagtaactcttctgatgctttggacaagattagattcgagtccttgacggacaagagcaagctcgatggtcagcctgagctcttcattcacatcattcccgacaagactaataacaccttgaccattattgatagtggtantgggcatgaccaaangctganttggtcaanaaaccttgggnacaantgcaagatctgggaaccaaaggaattcatgggaagcactggctgctgggagctgaaggttagcatgattggtca

SEQ ID NO: 6547 - DNA, 426 bp, Arabidopsis thaliana
  unsure at all n locations
  Clone ID: LIB24-133-Q1-E1-E9
ctcaaaaactggacccctcttaattagatctctaatttgttttctttcttctccaaaatttgacaaagaaaagaattgatcttttgagagggttccagttttttttctctttcgtcttctccattcttgtttgtagaaaaaaacccattttttatttggatttttcatttgattttcccgggaaagttgtaatttttangttttttgagggagattgaaaaagttcgataaaaatgtggggagccgccgcagaaccagcagattcttattacctgattcgtcctgagtgcactgatgtccccaataccaaattcaangatcaaacctgggtaaaactcnaagtgtaagaaaatggcaagctgcatttanaacagaaggattccttgatattgggaagactctaaagtcgaatccaacganggggga

SEQ ID NO: 6548 - DNA, 423 bp, Arabidopsis thaliana
  unsure at all n locations
  Clone ID: LIB24-133-Q1-E1-F1
gagatttgatgagacgacccatttccatcttctttttttctcaccactcaagcaagaggtgaagaaggactaatagagaagatggaaatgggtcgtcgagatttgatgagacgtggaacaaccaatcgattttccaataaacaacaatctggatctgggttttctacaaaatctaagaaaggaatgctgaagaaacttggttttgctgatgagaaactgaaacangagatgagctacgatactcttccttctccaagatttaagaaaacgaggtttctaagaagaaatctaagcttccaaaaaagaatttgaaagacactaatggtgtggatcatgcctctgtaccacggaaagcttcgttcagccatgaagaagcgggatcctgaatctgtttctaagctatcctcctgtttcaaaagagac

SEQ ID NO: 6549 - DNA, 418 bp, Arabidopsis thaliana
  unsure at all n locations
  Clone ID: LIB24-133-Q1-E1-F10
acgcgtccgggcacaatttccctgcgacgcacccaacctccgtctctctctctctcagatcggcggccatctccgtcgagtaattgaaatctctctcagccgttggattcgaattccgccgcatcttcatatacctcgtttcaatcctgcggaaccctagttgctctgaattgtggtttgctactgtgataagttcttcagtggtagattaggaagcaccaccaatggagattgtgtaagacatattcattacagctctcttttaaggattatggggtctgtttgctgtgtggctgcaaaggacagaaatgttcccagtggagctattgataattcagtgtgttcaccatcgtggagttttcgacgggacaacaagaggcgtgtagctgatgagattaaagattcatcnaatcataat

SEQ ID NO: 6550 - DNA, 422 bp, Arabidopsis thaliana
  unsure at all n locations
  Clone ID: LIB24-133-Q1-E1-F2
cctgngcacatttcagtagataatccgtggcccaacgggatggccacacggggagttctgggagctcgggtcccatcttcttaccgtactccanagagctccaggaaagcatggttgtggtgaacgccatcgggaaattgaacttcacattgtccccagcatcatagtagcctccggtcaagtccacctgcaactcataccgtgttattcagatggatttactatgcttttactacttgactatgggtatacagttttagggtcttacgtgagcaagatgagccatcaagagaggccagagctagacctccatgagagttgttggtcactagggaggcgaccaagaccgctgaccttggaaaaagagtaatgactttgagagtgcttctctgtaattgggacttgcatangtattctccagt

SEQ ID NO: 6551 - DNA, 420 bp, Arabidopsis thaliana
  unsure at all n locations
  Clone ID: LIB24-133-Q1-E1-F4
cgaattccatnaggtagaacagtataagaaatcatggatccagctgaaatgagatatttggaagaagangatggtccgttgatgaagacaatcaaangtagtatcactggttttggtgctgggactattnacggaaccattttagccacatngaaagatgttccaagagtggananaaatgtggctcttccaggacttattagaacactgaacatgatgggaacccatgggctgacttttgctgcnatangangtgtttacatcggtgttgaacagctggttcanaattttaagatccaagacagatttttacaatggtgctattggtggttttgtcgctggagcttctgtgcttggctatangancaagggngcatccccacagcgatagctgcagtgcaaacactaacctgttanctc

SEQ ID NO: 6552 - DNA, 420 bp, Arabidopsis thaliana
  unsure at all n locations
  Clone ID: LIB24-133-Q1-E1-F5
ggacctttcatcntgaatcttgattgtgatcattacataaataacagcaaagccttaagagaagcaatgtgcttcctgatggacccaaacctcgggaagcaagtttgttatgttcagttcccacaaagatttgatggtatcgataagaacgatagatatgctaatcgtaataccgtgttctttgacattaacttgagaggtttagatgggattcaaggacctgtatatgtcggaactggatgtgttttcaacatgaacagcattatacggttatgaacctccaataattagtagatcacangaagccaagtcttttatctaaagctctgtggtgggatcannnaaagaaagaattccaangctaagaaagagtcggacaanaaggaaatcaggcangcatactgactcaactgtncctgt

SEQ ID NO: 6553 - DNA, 410 bp, Arabidopsis thaliana
  unsure at all n locations
  Clone ID: LIB24-133-Q1-E1-F7
agtttataatcatctttgtctgtccgatgtttctctggccttgttgggactgtttgttttctgttgtgtgcgtgagaaggttactaaaaagctggggccaacgatatggcctgtgttcggaattactccagagttcttctttcacaggaatgatgtttatggttgggctacaagatgtttgaaaaaatgtcgaggtacctttctctataacggaatctggcttggtgggtcgtatggagctgtgacttgtgtccctgcgaacgttgaatacatgctcaagactaacttcaagaacttcccaaaaggtgcgtttttcaaagaacggttcaatgatctgctcgaggatggtatcttcaatgctgatgctgagtcttggaaggagcaacgacggatnatcattaccgaaatgc

SEQ ID NO: 6554 - DNA, 412 bp, Arabidopsis thaliana
  Clone ID: LIB24-133-Q1-E1-F8
acgcgtccgcggaattttcccaaaagaaaaacagagaatgatgaagctgcaagggggacttctccagtggagtcgtagcagcttaatcccgtcgatttatacgccaatcaacaaaacccaattctctatcgccgcctgtgtcatcgagcggaaccaccagcttacggcgaaggagagacggcagctccggaacgagcggcgggagagtaaattggggtatagctggcgagaagaagttgaagaaaagttgattaagaaaccaaaaaaacggtatgcaacgtggacggaggagctgaatttggatactttggctgagtcgggtccgcaatggtgggcggttagggtttcgagacttcgtggtcatgagactgctcaaatcttagctcgagctctggctcgtcaattccctgaa

SEQ ID NO: 6555 - DNA, 483 bp, Arabidopsis thaliana
  unsure at all n locations
  Clone ID: LIB24-133-Q1-E1-F9
ctgttacgcctgccaggtacccgtccanaattcccngggtcgacccacgcgtccggtgaagtttgatttatttacgacgagataagttaaaaaaaaaatggtcggtatggatttgttcaaatgtgtaatgatgataatggtgttggttgtctcttgtggtgaagctgtttctggagctaagttcgatgagctttatcggtcaagctgggctatggatcattgtgtcaacgaaggcgaagtcacaaaactcaagcttgacaattactctggagctgggtttgaatcaagaagcaaatacttgtttggtaaagtctctatccagattaagcttgttgagggtgattcagcaggaacagtcactgctttctacatgtcttcagatggtccgaaccacaacgaattcgattttgagttcttagggaacactaccgggcgagccttacatagtccagaccaaatatctacgtgaacggagttggaaac

SEQ ID NO: 6556 - DNA, 418 bp, Arabidopsis thaliana
  Clone ID: LIB24-133-Q1-E1-G1
aacttttatcatcggctatagagttccattggaagactatctctttgaagcatctgatggcagacgttacttgaactttacctttgggtgcccgctcgtcgaaactattgttaacaagttgactatcaaagtcgtgcttcctgaaggatcaaaggacccttctgctgttttgccctttacagtcaatcaagagttgcaggtcaaatactcataccttgacattgtgggaagaaccgtggttgtgttgcaaaaagataacgtagttcccactcacaacgtacccttccaggtgtactatacattcaaaccaatatacatgctagcggaaccattcatgcttgtatcggctttcttcttaatatttgtggcttcgcttgcgtatgtacacatcgatttcaatatccgtcaggaagtagaa

SEQ ID NO: 6557 - DNA, 424 bp, Arabidopsis thaliana
  unsure at all n locations
  Clone ID: LIB24-133-Q1-E1-G10
atcatcttctttctctttcggaacaaaaatgacgtctcctctctcacatctcctaaaccttgatctatcaggacaccacagaaaatcatcgctgantacatatggntcngtggctctggaatggatattagaagcaaagccangacattaccaggaccagtaagtaatccaacaaagcttccaaaatggaactacgatggatctagcaccgatcaagctgccggagatgatagtgaagtcattctttatcctcaggcaatatttaaggacccattcaggaaggggaacaacattctggtgatgtgtgatgcttacagaccggccggagatccaattccgaccaacaataggcacaaggccgtaaaaatcttcgatnatcccaatgtgaangctgaagagccttgggtttgggatagagcaagaa

SEQ ID NO: 6558 - DNA, 420 bp, Arabidopsis thaliana
  unsure at all n locations
  Clone ID: LIB24-133-Q1-E1-G11
ttttttcatttgagcttctctctgataaggtcacttcctctgacccttttatctaagctcaacgctgcaactctcgccgtcggttacttccccattttccttccttcttccgattcaaagactcaatttttattctccggcgttgaggattcatctcctaaaaatctctgctttatcttttgatttgagctgatttggagaggagaagaagatagatagataggtaattcggattgatatctcgaaaaatggctcagattcagcatcagggtcaaaatgccaatggtggtgtagctgttcccggtnnnnnnnnnnnnnnnnnnnnnnnnnnnnnnnnnnnnnnnnnnnnnnnnnnnnnnnnnnnnnnnnnnnnnnnnnnnnnnnntttatatgtcggtgatctgggatgcgaccgtgacg

SEQ ID NO: 6559 - DNA, 419 bp, Arabidopsis thaliana
  Clone ID: LIB24-133-Q1-E1-G3
acgcgtggggtgctgctttgttaagtaaacccgagctaattcatgatattttggcaacacttaagaggaacttagacgtaccggttacttgcaagattcgtctattaaaatcaccagcagatactgttgaattggctaggagaatcgagaaacttggtgtaccagctcttgctgtacatgggaggaaaattgcagacaggccaagagatcctgctaaatgggatgagattgcagatgtggtggcagcattatccattcccgtcattgcaaatggcgatgttttagaatatgatgatttttctcgcattaaaaccgcaacaggcgctgcatcagttatggttgcaaagaggagctatgtggaatgcttcaattttctctccaaaaggaaaatcacactggggaagatgtgaaaaagaata

SEQ ID NO: 6560 - DNA, 420 bp, Arabidopsis thaliana
  Clone ID: LIB24-133-Q1-E1-E11
tttctaccgtcgccggagattttgtcgtgtaatcacctccatggctgaagcgggatcggtttacgtcgatgtagctggggaatcgaagtcggagcatgttactgggaagtggttttcggtgccggagctccgactgcgtgaccaccggttcatagttcctcttgattattccaaaagttctcccaaaattaccgtctttgctcgagagatcgttgcggttgggaaagaggagcaagcaatgccgtatttattgtatttgcaaggtggtccaggatttgaaggtccaaggcctagtgaagctagtggatggattcaaagagcttgtgaagagtttcgagtggtcttactcgatcaacgaggaacaggcttgtccactcctttaacatgttcctctatgcttcaattcaaatcagcaaagga

SEQ ID NO: 6561 - DNA, 493 bp, Arabidopsis thaliana
  unsure at all n locations
  Clone ID: LIB24-131-Q1-E1-F4
ctgtttcgcctgccctaacggtccgganaatcccgggtcgacccacgcgtccggcanaactcagggtgtangcatatgtnaaaatggatttactggaatcgactgttccactgctatttgcgatgaacaatgcagcctacatggaggagtgtgtgataatggggtttgcgagttccgttgctctgattatgcaggctacacatgtcagaacagctctaaactagttacaagtttattggtgtgcaaagatgtattgganaaagacatgtcagggcaacattgtgctccaagagagcctagcattcttcancagcttgaggaggttgtggtaatgcccaactacaataggctgtttccgggcggggctcgggaagttatttaacattttcggtaacagttattgtgatgaagcacctaaacanactaagcctgttggntatcnatccagangtgttganatcnattggcnangacacgactancgaggtttgcc

SEQ ID NO: 6562 - DNA, 479 bp, Arabidopsis thaliana
  unsure at all n locations
  Clone ID: LIB24-131-Q1-E1-G3
acgcgtccgcccaaatctgacgcttctctctctctttctggtatctgcgtttgattcggagaagaaaaaaaaaaaaaaaaggcaaagagagagcttcaatggagttagcttctttccttggtagagctctgtttgtttccgtatttcttctctccgcatggcaagagttcaatgattttggtgaanatggtggccgatcagctaaatctttgaaaccaaaattcaatgcctttgtaaaccatgtgacaactcacactggccagcaattgccaccagtcgatatgaagattcttgttgctgctgctatagccttgaaggggtactggggggactaantgtttggnctttggnaagctcattggggaacttaactcttgcttctgcatcaaggccgttnncaaccccaaantctgtaatgntttctacaacnanngatgtttganaagaanagggaattcgggcaaactaattttcaaana

SEQ ID NO: 6563 - DNA, 464 bp, Arabidopsis thaliana
  unsure at all n locations
  Clone ID: LIB24-131-Q1-E1-G4
cgtccgcaatatttatggtacccatgtccttttggaagcttgtaaagtcactggccagatcaggaggttcatccatgtgagtactgatgaggtctatggagagactgatgaggatgcttcagtgggtaatcacgaggcttctcagttgctcccaactaatccatactccgccactaaagctggagctgagatgcttgtcatggcatatggtagatcatatgggttgccggttataacaactcgcgggaacaatgtttatggtcctaaccagtttcctgaaaagttgattcctaagttcatcctcttggccatgaatgggaagcctctcccaatccacggagatggatttaatgtgagnagttatctccactgcgaagatgttgctgangcatttgaggttgttcctcacnaaagggggaaagttancnattnctaggagtatnggggacaacgaanagcaaacg

SEQ ID NO: 6564 - DNA, 469 bp, Arabidopsis thaliana
  unsure at all n locations
  Clone ID: LIB24-131-Q1-E1-G6
acgcgtccgcccacgcgtccgcggacgcgtgggcgggtgagaagaacgcgaataagtgatcggattaggaggctgcaagagcttgttcctaacatggataagcaaaccaacactgcagacatgttggaagaagctgtggagtatgtgaaggctcttcaaagccagatccaggaattgacagagcagcagaagagatgcaaatgcaaacctaaagaagaacaataatgtatcctttaggatttgatatatctgtattttatttttgtactatctaaaaatggtgatgatctgttcgaaaattcgaaacatgatcttatatattgaactagaaaanatagatatatatgaattttagctgtaaaatttttgtacaataaggagaaaaagatttaagaagagtcaataaaaagatgatgtttacangannaananaaaaaagggcggncgctctaaaggattcaagcttacg

SEQ ID NO: 6565 - DNA, 403 bp, Arabidopsis thaliana
  unsure at all n locations
  Clone ID: LIB24-131-Q1-E1-G7
acgcgtccgcacaaactgcttatcactacaactttccacaaaacgacgtcgtcgaagaatgcttcaactttttcatggatgaagaagacctttcctcttcttcttctcaccacaaccatcacaancacaacantcctaatacttactactctcctttcactactcncacccaataccatcccgccacatcatcaaccccttcctccaccgncgcanccgcagctttagcctcgccttagtcctcctccgggcaccataangacccttccgcgttctccatacctcaaactcctccgtccttcgacttctcagncaatgccaagtgggcaanactcggtccttcntgaagcggcacgtgncttctccgggcaaaagacactgcacggtgcgcaanaaatcccta

SEQ ID NO: 6566 - DNA, 466 bp, Arabidopsis thaliana
  unsure at all n locations
  Clone ID: LIB24-131-Q1-E1-G8
acgcgtccggtgactcanaacgtcctgtgcatccttcacctccttctccaccagaggaaactctcccacctcccaagccaagtccagatcccttaccttctaattcgtcttcaccaccaanattgcttccaccatcgtcagttgtatccccgccttcgcctcctcgaaaatctgtgtcaggtcctgataatccatctccaaacaaccccactcctgtgacagataattccagcagttctggtattagtanagcggctgttgtgggtgtaagtattggagtggcccttgtgctgcttactctcattggagttgttgtctgttgcttaaagaaacgganaaagaggctctcaancattggtggtggctatgttatgccaacacctanggnatcctcctccccaagatcagattcagcgcttctgaagacgcagtcatccgcacctccnagtgggaaatcgttctagca

SEQ ID NO: 6567 - DNA, 421 bp, Arabidopsis thaliana
  unsure at all n locations
  Clone ID: LIB24-131-Q1-E1-G9
ttttgtcttcaactacagctccagagaagtttcttcgtcgtctcgtctctccttgaaaacctccggcgacgaagaaaactgggtttcacgtttccggtcgaaatctctcagtttggtgttctctggagctcttgctctcggtttatctctatcaggcgtggggtttgcagatgcaaaagttggtgttaacaaaccagaattgcttcctaaagagttcacttctgttatagatgttgctgatttcctctctaatggtcaggaagaagagaattgctcaagaaatcgctaatcttgagaaagatacaggattcaagttgagagtcttggctcaaaactatcccgttacccctgggactagcaatcaaaagatttctgggnaggtggatgaatancacaaattgggtttggccgctgancccga

SEQ ID NO: 6568 - DNA, 437 bp, Arabidopsis thaliana
  unsure at all n locations
  Clone ID: LIB24-131-Q1-E1-H10
acgcgtccgcgaagcaacctccatggattagttgcttgtggtggtgaggatggtgctgtggaattttttgatatgagaatgaaatcatctgctgctagaattaacgcggtcacacatggtggtgatgctgctgcggaggttactgctatagagtttgatgacagtgaaggtcttcaagtagctgtcgggagtancgcgggaaaggtattcatatacgacttgcgtacttcaactcccataagagtgaaggatcacatgtacgagagcccaattttgaatattaagtggcaacggactcttaatactcaacancctaagttgattactancgacaaacacattgttacaatatgggatccaaacaccgggaganggtatgaccaagcantgaaccgactcanggaggaatnacnagcatttgtgtggttccggtggna

SEQ ID NO: 6569 - DNA, 451 bp, Arabidopsis thaliana
  unsure at all n locations
  Clone ID: LIB24-131-Q1-E1-H6
gggcggacgcgtggggtgaaacatggggaaggaagttatggtgagcgattacggtgacgacgacggagaagacgccggcggcggcgatgaatataggattccggaatgggaaattggtttacccaacggagatgatttgactccgttatctcaatatctagtcccgtcgattctcgcgttagctttcagcatgatcccagaacgaagccgtacaattcacgacgtcaatcgcgcgtcgcaaatcacgctctcttcgttgagaagcagtaccaatgcttcgtctgtgatggaggaggtcgtggatcgagttgaatcgagtgttccaggatcagatccgaagaaacagaagaaatcggatggtggtgaagcaacggcggtggaggattccacggcggaggaangagactccgggcctgaagacgcntctggggaaagacatcgaaacgaaccg

SEQ ID NO: 6570 - DNA, 468 bp, Arabidopsis thaliana
  unsure at all n locations
  Clone ID: LIB24-131-Q1-E1-H7
acgcgtccggtacctgaaggcttaacattagccaaaccagctgcatcgatcggtattgtgcagttggattgcgtcttctctcatcttctccttcctgctcgtcttctcattaccacccatcttctggtctcggaagccatctcccccttagacgacccaagagccaagtggttcgtgtcaaggtagatgaaaatgtagccgagacagagccaccgaaatggtgggagaggaatgctccaaacatggtcgatattcattctactgaagagttcttgagcgctttaagcggtgcgggtgaaagattagttattgtagagttttatggaacttggtgtgcttcttgcagagcattgttcccaangctttgcaangacagcggtgggacatccccgataatagtgttccttaaagttaaactttggatgagnaataaaccgatgtgcaaggaattttgaacngtgagaagtg

SEQ ID NO: 6571 - DNA, 438 bp, Arabidopsis thaliana
  unsure at all n locations
  Clone ID: LIB24-132-Q1-E1-A10
acgcgtccgatcgtgattttgcatacccatcaggtttcagaaaaactgaaataatggtgtataagcgcaagtcaatggagaagaaaaaggaaggcatgggttctactattgatcaaaacctgagctttaagaatattatgaaagatgttgcactctttggttcttcgcatatgacatggaaggataagaaagcactggaggataagaaagtgactgcacttggtggaaaggcacaaaagatgcataagctaccgctgagtgtagctcgagtgcagatgaagaaacagaaagatagagaagagaagatgttagaacagaatgtgattcttggcagatttgggtgggggtggaagtngcagtaggaaaccccgcagagagaaagcctacgccagaagagagagtattgaagtcaactggnaggggattttcaaaggccgg

SEQ ID NO: 6572 - DNA, 412 bp, Arabidopsis thaliana
  unsure at all n locations
  Clone ID: LIB24-132-Q1-E1-A11
atattcacgattgtgttcccgtgaaacggaatgctttatcgtcgttgggaggatactcggatggagatggaatatcgatattcgagtctcgagatatttggattgatcattgtacgttagagaaatgttacgatgggcttattgatgcggtgaatggatccacggatataacgatttcgaatagttacatgttgaatcataatgaagtcatgcttttgggccatagtgatgagtattccggtgatcgggatatgcgagttacgatcgcgtttaactattttggtgaaggacttgtccaaagaatgccaaggtgtaggcatggatattttcacatagtgaataacatttatagagactggaagatgtgtgctattggtggaagtgctaatccaacgatctttagcnaaggaaa

SEQ ID NO: 6573 - DNA, 496 bp, Arabidopsis thaliana
  unsure at all n locations
  Clone ID: LIB24-132-Q1-E1-A3
cgcnggaattcccaggtcgacccacgcgtccgaaaaaaatgaaatgatattttcagttgtacgctcttctcttccttatatcttccgcttcacttcacaccaaaatcaccacctctcacaaaccctagttcctcctctctctcatttctcggagatattcaccagagcaataaccatggacgctaaagaaacctctgccaccgatttgaaaagaccgagagaagaggatgataacggcggcgccgctaccatggagacggagaacggagatcagaanaaggaacctgcttgtttctccactgttattcctgggtggttctctgaaatgagtcntatgtggccaggagaggcacactcattganggttgagaaagttttgtttcaagggaaatcagattatcanggatggttattgttttccagtctgcaacanntgcgaaaanttttgggtttgggntggagnagtcccaanctacgggggagagatnaatgtgcc

SEQ ID NO: 6574 - DNA, 478 bp, Arabidopsis thaliana
  Clone ID: LIB24-132-Q1-E1-A5
acgcgtccgaataaccatgtgtgctccgcagccctccaacgagtttccgctgatttttcgcaaggatggtaagacatgtgtgttttgggatgtggaggattacccaatcccagctgatctccatcctcgttcgatccggcggagaatcgtaaaggatgtgaagaaatatggttgtgatgcggaggtgtcgattcatgcttatgctaatgataatacggtctcggtaacaatgaggcgtcaattttcggctgctggaatcaaattggaagtgttcacccaagcaggggataaatatgcgagacattgttccttgtatggtgacattatgctgtggtcactggaaaatcctccaccatcaaatattattgtcatcgcaaaaataatcgatgacgacttggctgatcgtattgggatgtttgactaacgtctggtcataagggcttcccaaatcccaagttaagccaaaatgggtaaaacg

SEQ ID NO: 6575 - DNA, 430 bp, Arabidopsis thaliana
  unsure at all n locations
  Clone ID: LIB24-131-Q1-E1-F3
caacaaaaaattaaggttcttttttgcnnnnnnnnnnnnnnnnnnnnnnnnnnnnnnnnnnnnnnnnnnnnnnnnnnnnnnnnnnnnnnnnnnntctctgtcttgcttcttctttacccttttcttgtttccaatcaaatcctctaaagtttcgttctttgttctaagttttctgaaggagtgatatttgtttgtggtgtggttagagaaatgaatcggagacagcaagtgaaacgtagagtaggtaaatatgaagttggcagaacaattggagaacgaacgtttgcnaaagttaagtttgctaganactcctgaaactggagancctgttgctctcangaatcttgataaaagaganagntcctcaagcatnaagagggctgaacagattaggnangagngatcgncnaccaggaagttgntagaacat

SEQ ID NO: 6576 - DNA, 471 bp, Arabidopsis thaliana
  unsure at all n locations
  Clone ID: LIB24-131-Q1-E1-B5
acgcgtccgcttagatcagtctcaaagggggaaaaaaaacttaaaagaaacattaagaggcaacacaaatcacacaaaagatcaaattgaagcctaagaagaangcaaaaagtgagaagcaatggctaccatgttgaaggtctctcttgtattgtcattgttaggttttctggtgatcgctgtcgtgactccatcggcggcgaacccattcaggaagagcgtagttctcggagggaagtcaggcgttccaaacattcggaccaacagggaaattcaacaacttggaangtactgcgtggancaattcantcaacaagcacagaacgagcaaggaannatangatccattgcgaanacagacacggcaaatttcgaatccattgcaatttaccgangtagtgtcctgcctcagaaacaggtcctcgctggactcanantacgtanctaaanggattgaaggtcactcanccc

SEQ ID NO: 6577 - DNA, 418 bp, Arabidopsis thaliana
  unsure at all n locations
  Clone ID: LIB24-131-Q1-E1-B8
aaatccattacttctccaccctctttagccttagggaagtcaggaggaggaggagttatcagaagttcactatgtaacttaatgatgccaagcaaagttaacttccctagacaaagaactcaaactctaaaggttagccagaagaaactcaagagagctactagtggtggtcttggtgttacatgcagtggtggtgataagattctcgtagcgaatcgaggtgaaattgcagttcgtgttatcagaactgcncatgaaatggggattccttgtgttgctgtgtattctactatagataaagatgctcttcatgttaaattagctgatgaagctgtttgtattggngaagctcctaagtanccagtcgtatttggtgattccganngttcngtctccggctattatccgtggatgttca

SEQ ID NO: 6578 - DNA, 437 bp, Arabidopsis thaliana
  unsure at all n locations
  Clone ID: LIB24-131-Q1-E1-C11
acgcgtccgtttgccttgcttgcttgcccagaaagtcgccgagaaagttaaaagtagaacggcggaggaaaaaaaaacgaagaggaagaggagagatggagtcgcagaagaagatagctcatgagatcggaggtatgaagaacgatgctcttcgctttggtcttcacggcgttaagagcgatatccttagatctcatcctctcgaaacggcttacgaatctgggaagcaatcacaagaagaaatgaagaggagagtgatcacgcatacttatggagctgctcttcctttgaagatggatcttgatagacaaatcctttctcggtttcagagacctcctggaccaattccttcatcaatgcttggccttgaagtctacacaggagctctagataattttggttttgagggattactttgaatgattctcgccaatccn

SEQ ID NO: 6579 - DNA, 482 bp, Arabidopsis thaliana
  unsure at all n locations
  Clone ID: LIB24-131-Q1-E1-C9
tgttaccctgctngtaccggnccagaattcccgaggtcgacccacgcgtccgcccacgcgtccgcgcatttcaagttgttcaacttcttcgtcgtcgtcttcttcctttgctccgtcgtcgagatctcgtcgaacctcaaatctcaaatctcctgtaaccagatcgtctaattatccgatctgcgtttcgaatctcagatcgaagatgccggtggctgcttccgccatctattttctgaatctccgtggcgatgtactcataaatcgcacctaccgagatgacgtcgggggaaacatggtggatgcatttcgtacgcatataatgcagacgaaagagttagggaattgtcctgtgcgtcagattgggtggctgctcctttgtttatatgcgaatcagcaatgtctacatcgtcattgttgtcagtagcaatgctaatgttgcntgtggattcaaatttgntgttgaaggcgtaaccttggtc

SEQ ID NO: 6580 - DNA, 493 bp, Arabidopsis thaliana
  unsure at all n locations
  Clone ID: LIB24-131-Q1-E1-D12
ctgttacgcctgcnggtaccggtccagaattcccgaggtcgacccacgcgtccgagttacagatagagtcagcacagcctgtcttctcgtgattctctcccagatatacaggcctagcttggttttcctgtcattgctggctttagatatcgctagtcactggctgcaaatgtacagtaccttcctatcagggaagaccagccataaggatgtgaaagatagcacgagctgggctctttanactctattatggaaaccggatgttcatgggttattgctgtgtttcctgcgaggttctttatataatccttcttctcatagcaacgaaccanaccgaaaacttgatgaacgtggtagtgaaatcattggntgcagatttcaccgctctctttactcttggctttgagcatatttggttggtccatcanngcagatcancaatntgattcanatgaaaaacggctgcanatgtttggtgtcctgttgggcaaaa

SEQ ID NO: 6581 - DNA, 416 bp, Arabidopsis thaliana
  unsure at all n locations
  Clone ID: LIB24-131-Q1-E1-D3
cctctttcnaatcggagttactttaatccccttgaaccatgtcaaagagaaagactanagagccaaaggtcgatgttgtgactcttggnccatctgttcgtgagggagagcaagttttcggtgttgtccacatctttgcttcattcaacnacactttcattcatgttactgatttgtctggtcgtgaaactcctgtccgtatcaccggtggaatgancgtganagctgatacagatgagtcctcaccttangcagctatgcttgcancacaggatgttgctcancgatgcantgaacttggtatcantgccatgcatgtgaagctccgtgccacaaggtggnanacagnacatngacaacnttggtcctggangcacagtcngcccttagaagcccttgctcgttccgggcatnca

SEQ ID NO: 6582 - DNA, 462 bp, Arabidopsis thaliana
  unsure at all n locations
  Clone ID: LIB24-131-Q1-E1-D5
acgcgtccgtgccaacagaagtctggcacaggatatctctctgcttttccttccagttttttcgaccgctttgaagctataacacctgtttgggctccttactacaccattcacaagattttagctggtctgattatttctatggccgtgttcgtaatgtgataaggaagtacagtgttgaacgacattggcaatcactaaacgaagagactggtggcatgaatgatgttctttatcagctatacagcatcactggagattccaagtatttgctgctcgcacatctctttgacaagccttgctttctcggagtcctcgcaattcaggccgatgatattagtggattccacgctaatacacatattcccatcgtcgttggattccancaacggtatgaaatcactgggtgatctactccataaggaaatccccgatgttccnttatggacatttttaatgcct

SEQ ID NO: 6583 - DNA, 397 bp, Arabidopsis thaliana
  unsure at all n locations
  Clone ID: LIB24-131-Q1-E1-D6
agactcctttcagattcttacttgcagctatgggtaaagagaagtttcacattaacattgtggtcattggtcatgttgattctggaaaatcgaccacaactggtcacttgatctataagcttggtggtattgacangcgtgtcatcganaggttcgagaaggaggctgctgagatgaacaagaggtccttcaagtacgcatgggtgttggncaaacttaaggccgagcgtgagcgtggtattaccatcgatattgctctatggaagttcngagaccaccacgtactactngcacagtcattgntncnccaggacatcgtgatttcatcaagaacntgagtactggtacctcncaaggctgattgggntgtncntaacagttgaggtcgaccactggg

SEQ ID NO: 6584 - DNA, 461 bp, Arabidopsis thaliana
  unsure at all n locations
  Clone ID: LIB24-131-Q1-E1-D7
acgcgtccgaaaatctaagttgagaaaaagagagatctctaatttaaccggaattaatattctccgaccgaagttattatgttgcaggctcatgtcgaagaaacagagattgtctgaagaagatggagaggtagagattgagttagacttaggtctatctctaaatggaagatttggtgttgacccacttgcgaaaacaaggcttatgaggtctacgtcggttcttgatttggtggtcaacgataggtcagggctgagtaggacttgttcgttacccgtggagacggaggaagagtggaggaagaggaangagttgcagagtttgaggaggcttgaggctaanagaaagagatcagagaagcagaggaaacataaaagcttgtggtggtgaagagaaggttgtggaagaaggatctattggttcntctggtagtggttcctctggtttgtctgaagttgat

SEQ ID NO: 6585 - DNA, 458 bp, Arabidopsis thaliana
  unsure at all n locations
  Clone ID: LIB24-131-Q1-E1-E4
acgcgtccgtacnaaacccactttctcaatttcgatctcgacccagaagcttcatcatcattccagtaaattcttgaatttgggtttcagaatccgatgcgaatccggggatgtttcgtcgccattgcggaccaaggcggtgtctttgtcgtcggagatggaggattcgtcgtccttgaagaagagtttgatggagttagaagggaagaagagtgagccttacccaggaggaatgccgaagatgggtccattcacagggagagatccgaatgtgaagaaacctgcttggttgagacagaaggcaccacaaggcgaaagggttcaaggaggtgaaagagtcnctttcncgtctcaatctcaanactgtntggtgaagaagctcagtgtcctaatatcgggnaagtgtttggaatggaagtnggtgaatggtgtagcaanctgcaaccaatcaagggntc

SEQ ID NO: 6586 - DNA, 435 bp, Arabidopsis thaliana
  unsure at all n locations
  Clone ID: LIB24-131-Q1-E1-E5
attgaatcagaacaatgagaatgggggtggtgaggcagctaatgtcagtgtcgataacaaagaggagatagagagagaaacaaaagaaagcagcctacatcttgaaagccatccagcccataaggacaatgtgagagaagccccccataactctagacctttagttgagggacctgggaaagacaactcagaaagagagggtggagagctacaagatgatggtgctgttcataaatctcgaaatgttgatgtgggtgatgccctaatcagccaatcgccaaaagatttgaaattgcttcgagataaggtgaaggctaaacgagagaaagctaagaagttgctangtgaaaagaacgangaaaaaggattttgatggatgaggatgatttgattgaanagagaactggaagatgtgcaactagctgttgaggatga

SEQ ID NO: 6587 - DNA, 468 bp, Arabidopsis thaliana
  unsure at all n locations
  Clone ID: LIB24-131-Q1-E1-E6
acgcgtccgccatatctcacgcttaattacagtattgccactcattaaaaccgtaccatcttaaccaaagcgataacccgtaccaccggttcagctatggaggatttattggaggagaggctaactcggactgactctgtcgggaataaacgagtcagagacgggttagacctcgactcgccggacgtgaagcggttaagagatgatttgttcgatgactcggggcttgacccagtgagtcaagatcttgactcggtgatgaagagtttcgagaatgagttatcgacaacgacggcggcgctaagctccggtgaaactcagccggatcttggataccttttcgaagcttctgatgacgagctgggtttgccaccgccgcttacgccaccgcaaacgcttcttcctccgttcgtgtgangaaacggtgacggaattggtacgaacctcgtcggattcatcagangggtt

SEQ ID NO: 6588 - DNA, 468 bp, Arabidopsis thaliana
  unsure at all n locations
  Clone ID: LIB24-131-Q1-E1-F1
acgcgtccgatgataatcctcaagccaaggattatctttagaagtcaaccatgcctaccttccgagactccggatgggattaaagaactacgggaaaaggacttggtcagtgtccgtggtgacggaaaaggcgagagaaaacctcatgagagaatttatgactacgatgtttacaacgatttgggagatccacgtaaaacagaacgagttaggccagttctaggtgttccagagacgccttacccaagacgctgcangaccggccggcctctcgtttcaaaagatccaccgtgtgagagcagaggaaaggagaaggaagaattttatgttccanganatgaagttttcgaggaaatcaagagnagataccttcagagcagggagatttaaaggctctcttccacaatcttgtaccatctattgcagcagcattgtcanacnttagacattcccttcacatgcttctcc

SEQ ID NO: 6589 - DNA, 422 bp, Arabidopsis thaliana
  Clone ID: LIB24-131-Q1-E1-F10
ttcagtgttataaaaaggcgaagtgaagctaatttagatgcttctgatcatcttgccagcagcacaaagaagttaccaagactctaattccgatctgtatagtattccttattcagagatatatcgacctttcctcaagaaagcttctgaattcttgcagaaagctggggacttggtcagttcgccaagtttgaagaagctactgcacagcaaagctgaagccttcctttcaaatgagtattatgaagtcagacatcgcatggatggacttggattcaaagttagatattaccattggtccatatgagacgtacgaggatgaaatctttgggtataaggctacatttgaaaccttcatcggtattcgagatgataaaagccacaagctggatctgaaactctttggggacaatctaaagcta

SEQ ID NO: 6590 - DNA, 501 bp, Arabidopsis thaliana
  unsure at all n locations
  Clone ID: LIB24-131-Q1-E1-B4
taccggtccggaatcccgggtcgacccacgcgtccgaactcccggcggtactggaggtgttaaaaccatcggtaattatgctgcagtcttgaaggctcagtcgattgcgaaagctaaagggtattctgatgttttataccttgattgccttcacaaaagatatcttgaggaggtttcatcgtgcaatattttcattgtgaaggataatgtgatatctactcctgaaattaaaggaaccatcttgcctggaattacccggaagagtatcatcgaagtanctcgtagccaaggtttcaaggtggaggaacgaaatgtgacaagttgatgaattggtagaagcagacgaggttttctgcacangaaccgccgttgtttnaaccccggttggaagnatcancttacaanaagccaanaggttttcctaanggggaagatggcntttggaacagtctcganacaactctaacacntcccttgacgaaccctgcaagtggggtctga

SEQ ID NO: 6591 - DNA, 459 bp, Arabidopsis thaliana
  unsure at all n locations
  Clone ID: LIB24-130-Q1-E1-G1
acgcgtccggttgatggtaggttcattgctaagcctgtgactgtttggcgtgcgttaagtcggatgtgggaacttgtggctgaggatcgttgggttatcttcgctgcgttttccactcttatagtagccgcgctttcagagataactattccgcattttttaacagcttcgatcttctcggcacaaagtggtgatatcgctgtgtttcatcgaaatgtcaagctcttggttacgttatgtgttacttcaggcatttgcagtggcatacgaggatgcttctttgggattgctaacatgatacttgtgaaacgaatgagggaaacactatactccactcttctcttccaaggatatatcatttttcgactctcaaactgttggtgacttaacaagcanacttggctcagactgtcagcaagtctcgagggtcatcgggnaatgatcggacatgatanttcg

SEQ ID NO: 6592 - DNA, 490 bp, Arabidopsis thaliana
  unsure at all n locations
  Clone ID: LIB24-130-Q1-E1-G2
gtacacgtancggtccggaattcaagggtcgacccacgcgtccgctttttgtctatgagagcatccgaccggattttggaatcttcagtcactctaactaagaacttacggagccgagaagaagaagataaggtgtcaagctgtgcactgatccaggctatggccaaggcatgccaagtttctgggacacttgactctggcttgaccgagtctgaggtgccttatgagtctgaaacccactttactgaagaacaagaactagagcagcttataaatgggcacttgtgctgtaanatttatccattttctggggaagcacacnggtctgatgaagacaganagattatactacctggctcttttaacccattacatgaaggtcatctcaagctgttanaagttgctatgagtgtttgtgggggcggctacccaatgttntaaatatcccgagtaaaatgccgacaaggcagcgcttacacttgcacagntt

SEQ ID NO: 6593 - DNA, 435 bp, Arabidopsis thaliana
  unsure at all n locations
  Clone ID: LIB24-130-Q1-E1-G3
ggattgggatcacaaagagaagcaaagcaatcagatacttgaaagtctctttagtgacttaagtgtcagaagttttctctctcttaactctctcaaatcttttagagagaaaaaactttgaatcttgttcatatcttttgctaatccgattaacatcggatctctttagatttcgttttatgttttaagctttctgactatttttcagatctatctcaaacttcntgtcggtttttcttctatactttgtttcgatttgtagtttttttgtaaagccttttgcctgttcttcaaatcaacacttctaggttgttgaagtgtnaaatcattgtggtttgatgggtctttgttagctgtgtacttgattcttccgnccaantgttggtnnaatnccncgctgcccatatgggattanattgagcgattgntcacttt

SEQ ID NO: 6594 - DNA, 450 bp, Arabidopsis thaliana
  unsure at all n locations
  Clone ID: LIB24-130-Q1-E1-G4
acgngttcgntcntctggctccgacgatgacgaagtagccgccgccgacgaatcaccagtctccgacggagaggctgctcccgtagaagatgattacgaggacgaagaagatgaggaaaaagctgaaatcagcaaacgtgagaaagccagacttaaagagatgcagaagttgaagaagcagaagattcaagagatgctggagtcgcagaatgcttccattgacgcggatatgaacaataagggaaaagggagactgaagtatcttctgcagcaaactgagttatttgcccactttgctaaaagtgatggatcttcttctcagaagaaggcagaaggaaggggacgtcatgcttccaaantaactgaagaggaggaagacgangagtatctaaanggaagaagangatggcttaactggatctgggnaacacacgggttactcacacagnc

SEQ ID NO: 6595 - DNA, 383 bp, Arabidopsis thaliana
  unsure at all n locations
  Clone ID: LIB24-130-Q1-E1-G6
aaaaaaaaaaaatccaaattcaacactctcacacttcgatatctccgccttcattctcctcagagccaactgtcctgagatttcgatttcgatttctccgatctctcttcctccgtcgccggcgaaaccatgtctcagtctattcaattctccactccttcacacactcctcaccttctccatctccctcactcacaattcaaccgtcctctctcctctatctccttccgtcgcttccctctaacaaccatcaaatacacttccatcagagcctcctcgtcatcancnccttcaccggatctcgattcancggtcctcatcatcatccncgnaagtacttcgctcacctaacggtantggtgctgtgaagtcggangagagat

SEQ ID NO: 6596 - DNA, 446 bp, Arabidopsis thaliana
  unsure at all n locations
  Clone ID: LIB24-130-Q1-E1-G7
acgcgtccgcttcagcaaaactcgtctctcttgcactccaaaaagcaaccatgtctgcttttgtcggcaaatacgcagatgagctgataaagacggctaagtacattgccacaccgggaaagggcattttggcagcagacgagagcacgggaactattgggaaacgattcgccagcatcaatgttgagaacattgagtccaaccgccaagctctccgtgagctcctcttcacgtcccctggcactttcccttgcctctccggtgttatcctcttcgaggaaaccctctaccagaaaaccacggatggcaaacccttcgttgagctcctcatggaaaacggagttatccctggaatcaaagtgggacaaggggtgtggttgatctagcaggaaccaatggcgagaccactactcagggtctagattcacttggtgcacgttggcang

SEQ ID NO: 6597 - DNA, 459 bp, Arabidopsis thaliana
  unsure at all n locations
  Clone ID: LIB24-130-Q1-E1-G8
acgcgtccgcccacgcgtccgacgaagcttatcaagtcagtcacaacttactcttgtcgcatgcttacgctgttgacgcattcagaaactgcaaacagtgtgctggaggtaaaattggaattgcacacagtccagcttggttcgaaccacaagaccttgagcatgttggaggttccattgaacgtgtgcttgatttcatcctaggatggcatttggctccaacaacttatggagattatccacaatcgatgaaggatcgtgtcggtcatagattgccaaaattcacagaagctgagaagaagttgctaaagggttctacagattacgtaggaatgaattactatacttcagtgtttgcaaaaagaaattagccctgatcctaagagtccgagttggacgactgattctcctgttgaattgggaataacaagantngttggatgggntacaaaaattggg

SEQ ID NO: 6598 - DNA, 448 bp, Arabidopsis thaliana
  unsure at all n locations
  Clone ID: LIB24-130-Q1-E1-H2
ggggtgaagtttgatttatttagagagataagttaaaaaaaaaatggtcggtatggatttgttcaaatgtgtaatgatgataatggtgttggttgtctcttgtggtgaagctgtttctggagctaagttcgatgagctttatcggtcaagctgggctatggatcattgtgtcaacgaaggcgaagtcacaaaactcaagcttgacaattactctggagctgggtttgaatcaagaagcaaatacttgtttggtaaagtctctatccagattaagcttgttgagggtgattcagcaggaacagtcactgctttctacatgtcttcagatggtccgaaccacaacgaattcgattttgagttcttanggaacactaccgggcgagccttacatagtccagaccaatatcctacgtgaacggagtttggnaacagagaacaangactcaac

SEQ ID NO: 6599 - DNA, 453 bp, Arabidopsis thaliana
  unsure at all n locations
  Clone ID: LIB24-131-Q1-E1-A10
gtgatatggatggtacactgcttaacagtaaaagtcaagatttcggaggcaaatgcaaaagctttaaaagaagcccttctgaggggacttaaagtagtcatagctacggggaagtcccgcccaggtgcgatcagaatcttgaagacggctgatctaactggatccgatggcattatctcagagtcctctccaggcgttttcgttcagggattacttgtctatggtagacaagggaaagaagtgtatcgaggaaacttagaccgagatgtctgcagagagacctgtctttattctttggagcatcgaattcntctcattgcattcagccaggatcgctgcttgacattgtttgaccaccctcttgtcgactctcttcacacaatctacaagtgagccaaagggcgnnattatntcaatcgggttggtcaacnggatagcctgaancctgacaat

SEQ ID NO: 6600 - DNA, 489 bp, Arabidopsis thaliana
  unsure at all n locations
  Clone ID: LIB24-131-Q1-E1-A11
ctgttacgcctgccttgtaccggcccganaattcncgggtcgacccacgcgtccgcaacaacggtcatttgcgaatttcgaacaactctttcaataaaagcaacaaaaagatcgaaactttacagtcgtaggaaggaaaaaaatggtgagaaagcgaagagttgtagtggggatcacaccagatccatgtgagacannnnnnnnnnnnnnnnnnnnnnnnnnnnnnnnnnnnnnnnnnnnnnnnnnnnnnnnnnnnnnnnnnacacctctcagaggtatattttgtctcaaaacacgacaagatatgaagattttcgaagagaaagaggattgctttatcctcgatttcgatcccaacgattcatttgatgcacgaaagctctccgatagccctgcatctgaatgtgacgacgacgtggcgattgtccatgagaaagggcaagtggcttgtagggattttccacatccaaggnatctcctgccttgaaa

SEQ ID NO: 6601 - DNA, 448 bp, Arabidopsis thaliana
  unsure at all n locations
  Clone ID: LIB24-131-Q1-E1-A12
acgcgtccgnccacgcgtccgtcttcctcgaactctcttcttctttctctcttactttgtgtttgctctgttttgctctcttaacacaacacaaaaaatgtccatcgttgttggccaagcttaccaacatcttcccaagcaagtaagccaaaatcctgacgtgggtggatggagtttcttgcaatatttctctgagccaaaaggcattgtccagaacagagaagacgacacaaagaaaacagcttatgtctacccgatcgagaagcgttccgtagctaaactgagccttgagatgtgcacaagagagcctcgggaccgagaatgggaattgatagtggagacgagatgtccgttacttgcgcnttgaagcaaccaatatttcaaaagagtccctcgtcttacnacgaaaacctcaaaaaggaaactaagcttcatgaaccgttgngga

SEQ ID NO: 6602 - DNA, 464 bp, Arabidopsis thaliana
  unsure at all n locations
  Clone ID: LIB24-131-Q1-E1-A8
acgcgtccgcccacgcgtccgattcgatttttcgcctgaacctgcggatttttcgattcttcaaattcatttatctccacaggagatgactgtgtctctgttggagatgggatgaagaaccttcttgtcgaaagagttacatgcggtccgggacatggaatcagtattggaagtcttggaaggtacagccacgaggaaaacgttagtggcatcaagatcatcaactgcactctccaagagactgacaatggtctaaggatcaagacatggncttctgctgcttgtaccacaaccgcctccgatatccatttcgagaacatcctcctcaagaacgtcagcaaccccatcctcatcgancaagagtactgcccatggaaccaatgcancaaagcagnnancatcaacgatcaaagttgggcaacagttagcttcangnagattaagaggaacatnaaggaaacaga

SEQ ID NO: 6603 - DNA, 444 bp, Arabidopsis thaliana
  unsure at all n locations
  Clone ID: LIB24-131-Q1-E1-A9
acgcgtccgcccacgcgtccgcccacgcgtccgcccacgcgtccggccagattttaaggttcctgtcatgtctgattgcgaaatcgcttttttcttcttcctgagttcctttttttctccgatgaaattttaaccgtgatgatgatgatcataatgaaacagatatgagcaagaaaaatctagcgattctgttgcgtgctagaatgagatccaacaatccctccaaattttccctctctcaatttcctaaggaaattcaatctaatcctcaagagaatcattctagagatcacattgtgcaaaattctaatgattttggtaccactggaagggtttatgatgttgttcgagaagacaatgcactcagcnatctcagctnntaaaactgggngtagtagacattactccttaatgattttcaagnangggttacttaaccctttc

SEQ ID NO: 6604 - DNA, 417 bp, Arabidopsis thaliana
  unsure at all n locations
  Clone ID: LIB24-131-Q1-E1-B10
tgttaaacatcangtttgatgggctctcatgggtgtgtgtttcacaagattttacccgaatgaatgtatggcaaaagatcttgagggacctcaaacccaaagaggaagaaaagaaaatcatggagatgacacaagatacactccaaggtgaactaattcgattgttggaaacgtctaagtcattaattgtcctcgatgacatatgggaaaaagaagattgggaactaatcaagccaatatttccaccgaccaaaggttggaaagtgttgcttacttctcgaaatgagagtgtccccatgcgtagnaaatacatcatatatcaactttaacccagaatgcctaaccactgaaagacagttgggcacnttttcagaggatngcacttccnatgaaaagatgcaagnctgaaatttaaga

SEQ ID NO: 6605 - DNA, 368 bp, Arabidopsis thaliana
  unsure at all n locations
  Clone ID: LIB24-130-Q1-E1-F9
tttggtagtgtcgaagcaatcattcctcgggctctcctttctaactgcattcctagaaaatattaccctaaaggcctttgtcttggcatcctcgtcctcttcagcaggaactcatctgtcttggaagaattattaccatgtctgcttttgtcagcaaatacgaagatgagctgatcaagacggccaagtacattgcaacgccgggaaggggcattttggcggcagatgagagcacagaaaccattgggaaacgattcgccggaatcaatgttgagaacactgagtccaaccgccaagcttaccgtgagctcctcttcacttcccctggcagttacccttgcctctctggtgttatacncttcgaggaa

SEQ ID NO: 6606 - DNA, 437 bp, Arabidopsis thaliana
  unsure at all n locations
  Clone ID: LIB24-128-Q1-E1-F7
acgcgtccgggaaaaagcttgaagcgtcgtgactcgtgaagcttcttcatctttagtccaccgaacataaatggctcagcaagtactcggctgcacgagccgccccatccgcgtttctcttcaccggtgttctgttattaccaccagtgacactatcagaaggaagaatctccgattcgttagaaacccgagattgtcgttttctcttcaatcttcaactagaaattatcgtctgccttcgattaattgctcgacggtgaatggagcagtaacggaaactgcggaatattacgaaggagaaggagataacgtttcacttgctgagaaaatccgggcaatgtattgatttcctccggacgattttaccaaggtgggaagctggtggagtttctccgatgaagttgatggtangttcattgctaaacctgtgactgttt

SEQ ID NO: 6607 - DNA, 389 bp, Arabidopsis thaliana
  unsure at all n locations
  Clone ID: LIB24-128-Q1-E1-F9
aatcaaaccggttcagtttccaaatggataatctactctgcgaagaatcttggcccgcgagtcctttaaccccggagcctttaccaaacttccgtcaccgttctcacgacaatgacgtcgtgaagatgtatccagagatagacgcagcgacgatggaggaagccattgctatggacttagagaaagaattatgttttaacaatcatggagacaagtttgttgagtttttcgtctcaaagaagttaaccgattataggttccatgcgtttcaatggctaatccagactcggagtcggctaaatctttcatatgaaacggtattttccgccgctaattgttttgatcggttcgtcnacatgacttgctgtgacgaatggcgaattggatgg

SEQ ID NO: 6608 - DNA, 413 bp, Arabidopsis thaliana
  unsure at all n locations
  Clone ID: LIB24-128-Q1-E1-G1
tttanccgaggtctcgtcaaaagcatgctgcggaaaaacccagaagttcggccatctgcctcagatttacttagacatccacatcttcagccttatgttctggatgtcaagcttaggctcaataatcttagacgcaaaacattaccgcctgagttgccgagttccaagaggattatgaanaaagctcatttttctgaaccagctgtcacttgtccagcctttggagaacgacaacatagggtctctctggaatgacagagctctgaatccannaagctgaggaagacactgcatcttctantnaatgtattagtcgcangaatttcagatttatcngattgagaagcaacagtaanaggaacattgagtnngtaaagcaaatttccttcaaggtgcaatgtaangggtcctca

SEQ ID NO: 6609 - DNA, 411 bp, Arabidopsis thaliana
  unsure at all n locations
  Clone ID: LIB24-128-Q1-E1-G10
tgatgatgttgaccttttcggngaggagaccgancaggaaaagaaagctgctgaanagagagcagcttctgtcaaggcatctacaaagaagaaggaatctggaaagtcctcagttttgattgatatcaaaccgtgggatgatnagactgacatgaagaagcttgaggaagctgtgaagtccattcagatggaaggtttgttttggggagcatcaaagcttgtcccagttggttatggtatcaagaanttgcagattttgtgcaccattgttgacgaccttgtctctantgacancatgatcnaacgagcanctcacngttgaacccgatcaatgaatatgtcnaannctgtgacattggttgccntcaacaagatatgaaggatggngaaaagcttcaaggaatgtnctgt

SEQ ID NO: 6610 - DNA, 423 bp, Arabidopsis thaliana
  Clone ID: LIB24-128-Q1-E1-G2
cgacgatatcgagatcgatccaaccaactctgcagctaacatctctaaggtttgattttccgatgatgagggtgatggagcctccgcctatcgaggaggcagctttggccccagtatcggtcttctgggacataaaatcgtttccggttcccgatggctatgatgctcgactggtgggtccgtgtatcaaacggaatttgaggaagttaggctacacaggtcctatcaccatcactgccgttggcgtactatcagaggtccctcgtgacatccttaaagcagtgtattccactgggaatctctcttaaggaggtcattaaaagtccgacaaacatgtatgctcttttccttgagtcctctcttcttcgtactccacctccagctaatatgatggtcatatccccgtccaacatcctaaattcc

SEQ ID NO: 6611 - DNA, 437 bp, Arabidopsis thaliana
  unsure at all n locations
  Clone ID: LIB24-128-Q1-E1-G5
acgcgtccggactgaggcaaatgcattggttagaagtgttgaagaaaaatctcttgaagttgaggcaaagctgcgtgctgttgatgcaaaacttgctgaagttagtagaaagagttcagatgtggagaggaaggcaaaggaagtggaagctcgggaaagttctcttcaaagggagcggttttcctacattgctgaacgagaagcagacgaggcaactttgtcaaagcagagggaggacttgcgtgaatgggaaagaaagttgcaagaaggagaagaaagagttgctaaatctcaaatgattgtaaaacagagagaagatagggcaaatgaaagcgataagattatcaagcaaaagggaaaagaactggaagaggcacaaaagaagattgatgctgctaacctcgctgttgaagaaactaagaagacgatgntcagtt

SEQ ID NO: 6612 - DNA, 433 bp, Arabidopsis thaliana
  unsure at all n locations
  Clone ID: LIB24-128-Q1-E1-G7
acgcgtccgatacaattcgtcgatatgtgtgatcccactagagacgatggctccagccgaagcagagtggtgagtactatgcaaaagagggcgtattttcagagacaatggccgttggtcgatgtcgtaagagcgtcagtcgttgtgattgtgcacnttttgtgtctcttggcgccgtttaacttcaaatgggaagctttacggttcggtttggtgctcttcgcgttgactacactcagcatcacattctcattccataggaacttgtctcaccgtagcttcaagataccaaaatggctcgaatatccttgggcttattctgctgttttcgctcttcagggtgatccaatgggattgggtgagcatacanaaggttccatcaccagttcacagattcggaccgcgacccacatagccctaangaaggattatt

SEQ ID NO: 6613 - DNA, 408 bp, Arabidopsis thaliana
  unsure at all n locations
  Clone ID: LIB24-128-Q1-E1-G8
tatcccacaggactacaggcacatggaaggcgctggggtcaacacttacatgctaatcaacaaagctggaaaagctcactatgtgaaattccactggaagccgacttgtgggatcaaatgcctgtcggatgaggaagctatcagagttggaggagccaatcacagccatgccaccaaagatctctatgactcgatcgcagccgggaactatccgcagtggaatctcttcgttcaggtgatggatcctgcccatgaagacaaatttgacttcgatccgcttgatgtcacaaagatctggcctgaagatatcttgcctttacaacctgttggtcgcttggtcttgaacaaaaacatcgacaacttctttaatgagaacganncagattgcattctgtcctgctcntggtg

SEQ ID NO: 6614 - DNA, 427 bp, Arabidopsis thaliana
  unsure at all n locations
  Clone ID: LIB24-128-Q1-E1-H1
aaacgctcctcacacaacgggtttaggagtgatggggtctctcgttcgtgaatgggttgggtttcagcaatttccagcagctacccaggaaaagctgattgaattcttcggaaaattgaagcaaaaggatatgaactcaatgacagttcttgttctgggtaaaggcggtgtcggaaaatcatccactgtcaattctcttatcggcgaacaagtcgtccgtgtcagtcctttccaagctgaaggattgagaccaagtgatggtttcaaagaacaatgggagggttcactancaacattattgacanccctgggacttgtgggnagctggggtatgtcantcancaagctctcgagttaatcaaanggtttcttgtgaaacanncacaatagatgtcntgcctcnnatgttgatcgtttggganggtgt

SEQ ID NO: 6615 - DNA, 475 bp, Arabidopsis thaliana
  unsure at all n locations
  Clone ID: LIB24-128-Q1-E1-H2
ctgttcacgcctgcnggtancggtccagaattcccggntccatcagcccacgcgtccgcaagagttgaatattgaggttcctactgagattcagtgtatcggaatacctgcggttatggaacgtaagagcgttgtattgggttcgcataccgggttctggcaagactcttgcttacttgttgcctattgttcagctgatgagagaagatgaagcaaaccttggtaaaaaaacaaagcctagacgtcccaggactgttgttctttgtcctacaagagaactatctgagcaggtttaccgtgtggcgaagtccataagtcatcacgcgaggtttagatctatattggntagtggtggttctcggataaagaccccaaggaggattctttgaacaatgcaatagatatggttgttgggaacccctggtaggattcttcagcatatcgaagaagggaaacatggtgtatgggagatatc

SEQ ID NO: 6616 - DNA, 384 bp, Arabidopsis thaliana
  unsure at all n locations
  Clone ID: LIB24-128-Q1-E1-H3
aggtgtcctaagatgagctcaacgagaacagaaatctcgtgtcgaacaagaggatggacaacacggaggaaacaagaggcttatttcagttcagacgaatcagatcaggaagcttgtgaatcatttgggttactcttttttcctctctaggctctttgatgttgaggttcgagctgagattggttctgatgaggttattgaggaaagtcagagccttgcctangagcgattcatttgcactctggggactgatgctccactgaatgtgacattcataagagcgcctccaggtgctttgttgaaagttgatatccctcttgtgttcattggagatgatgtttctcctggattgaagaanggagcatctctgantacgattaacag

SEQ ID NO: 6617 - DNA, 426 bp, Arabidopsis thaliana
  unsure at all n locations
  Clone ID: LIB24-128-Q1-E1-H5
agagagaagaagaagcacctctcatggcgaaccagcttcttcaccatcttccgattccttttcctctccaccgtcacttctacctcctaaacgccgccgttttatagcttctcctcccgaaaatgctaaacccacattcctcaaatctctcaccgacgcttttttagattcttgtagaggaagagaatatttttaaggaggttgttttcgatggagcattacgaggttcttgagcaaattgggaaaggttcttttgggtcangctcttcttgtgaggcataaacatgagaagaanctttatgttttgaaggaaaattcggttagctangcagactggtagaacantgaaggtctgctcatcangagatggnattgntcgcaanngataaggaatccatttattgtgggaatagcnaagattcctgg

SEQ ID NO: 6618 - DNA, 429 bp, Arabidopsis thaliana
  unsure at all n locations
  Clone ID: LIB24-129-Q1-E1-A8
gaaactccccaagccgctgttctgctatcggattagacttcctacagaaaaggagctcgagatgaagatctcaaaggaagtgaangaaaacccggttctatgangtcngactttattaaaagcttacaagtcatatctgcagaagttgattatatttgaaaagcagtcagtatataaccaanttgccaatcggtgcctttgtacattgctggaagcagttcctcacttcaactaccgtgataacctgttaattgctgttgtcagaaatatcagctccccagatgaagtcgtaaaggagacncngttgctccnactatcaggtatcttttctcaaatgaaggggaaacatggttggttgagnctgaccgttgcaagctgtacggcctganttgcctgatcatgtcnaagctcanaaactggccaaacttc

SEQ ID NO: 6619 - DNA, 432 bp, Arabidopsis thaliana
  unsure at all n locations
  Clone ID: LIB24-129-Q1-E1-B5
acgcgtccgtgtatttcaagtttcatgagcgtttgccaccacaacattgtcttttcgggttaatttcntcttcttcntccttttcttactaaattctcttagggttttagtcatacttaatggcttccaattcggagaaaaatcctcttctttcagatgaggaaacccaaatcgacggaggagaataagagttctaagccggaatcagcttctgggaattcaacttcatcaagctatgcctggcttgaatttcaatgcttttganttctctaaanaagggctaagnattctcaanngatcctagcatcagaggaaatngcngagcaaatangctnaagatctgncgnttaaacaaatgggctgaggcancttcangagatctatccnnacncctggncaagaaaaggtgggttcccctaactttgattccnc

SEQ ID NO: 6620 - DNA, 440 bp, Arabidopsis thaliana
  unsure at all n locations
  Clone ID: LIB24-129-Q1-E1-B6
acgcgtccgcccacgcgtccgctgttcttctccatcttcgattttacctattattgatacgagaagtgggaatttgcgatgcacatttcaagtctcaggtttcttgtgggattcagagagatgataatggacgccgtgtttggcggaggagaacattgacgangaaggacgatatgttgcgttacaaaatgcaaagagttccatttgtggnagaacaagtaaggaagataagagaanttgggaaggtaatgacaatggacataggagcagnttcttttgagggaagacaatcgggtttgaatttgtcaatagcgtagcaagctgaagcaacagagtacgtggacaagaacanagacgaatatgggaggttccaaaaaaagccatctttcatgttctaaagcaacccgtntngaacgatctcnggctttgaatcgccctgg

SEQ ID NO: 6621 - DNA, 418 bp, Arabidopsis thaliana
  Clone ID: LIB24-128-Q1-E1-F6
acgcgtccggagaagcagaagcttgaagaatctctgtaatctaaaaaatgggaaaggtccacggttcattggctcgtgccggtaaggtgagaggtcagacacctaaagtggctaagcaggacaagaagaagaagcctcgtggtcgtgctcataagcgtctgcaacacaaccgccgtttcgtcaccgccgttgttggttttggcaagaagagaggaccaaactcatcagagaagtagatagaagaaggttttacccttttcagattttatgggatgtttttgatattgtgtcattagttggtccaaactcatcgatatcaaagtggtttaaccttggttatctacaaatcagtggatgttgtgtcaattttcttgtcaatttgatttttgtttctcctcagattaaacttaaagttctg

SEQ ID NO: 6622 - DNA, 399 bp, Arabidopsis thaliana
  unsure at all n locations
  Clone ID: LIB24-128-Q1-E1-C7
acgcgtccgcccacgcgtccgattttcttagaaaaaaaattatgggattttgcttctccaaatttggcaaatcacaaacacatgagatnccaatctcttcctcttccgattcaagccctcctcatcactaccaacctctccctaaaccaactgtttctcaaggtcaanccagtaatcnnnnnnnnnnnnnnnnnnnnnnnnnnnnnnnnnnnnnnnnnnnnnnnnnnnnnnnnnnnnnnggttcacangatcggtccantcctaaaccgaccaatgatcgatctctcagctctctacgacctccacnncagaactcggccgtggccaaattcggaatcacttacaaatgcatgggncaaatccaacggtcgagaatacgcctgcaanatcccatctcag

SEQ ID NO: 6623 - DNA, 440 bp, Arabidopsis thaliana
  Clone ID: LIB24-128-Q1-E1-C9
acgcgtccgaattgatctgatccgagtctttcaagcggggagagaaagagagagattcgttagtacattgatctaatggcgtcgaattcggaagcgggaggatcggcggattacgaaacattgatgtcgacatcggacgttgagctattgaagagggcgtggcgtaacgagaaggcggcgccggagattcttcagtacgaaggagctcttgtcgatagagccaaagaacagatcgaattagtggaagaaacaattgaagattatgtggaaaatggcatagatcctctggtggtgtctctatatcagatggatttggacagagcccagtttctactcagatcatatctcagagttaggcttctcaagatagagaagtttatgttccacaacctcaactcaagaagaagctgaaaggcgactttctgagcaagaaaaagtgt

SEQ ID NO: 6624 - DNA, 488 bp, Arabidopsis thaliana
  unsure at all n locations
  Clone ID: LIB24-128-Q1-E1-D1
aactgttacgccttccggtagccgtccnaaattcaagggtcgacccacgcgtccgcccacgcgtccgaaataattgagttttttttttaattagaaacaaatggggttgagtggtgttcttcatgtggaggttgaggttaagtctccggctgaaaagttctgggtagcccttggccgacggcatcaatctcttccccaaagctttccctaacgactacaaaaccatccaagttctagccggcnatggcaacgctcctggctccattcncctcattacttatggagaaggatctccactggtgaagatatcggcngagangatcgaagcagtggatttgggagaacaaaagcatgtcgtncagcatcattggcggagaaatgttgggagtactacaaaancttcaaaggaaccatcaccgttatccctaaggatggtggtancttctgaaatggtctggtgagtttgaaaaaaccgcccatgagattta

SEQ ID NO: 6625 - DNA, 415 bp, Arabidopsis thaliana
  unsure at all n locations
  Clone ID: LIB24-128-Q1-E1-D10
acgcgtccgggacaatcctcaagttgatctagagaaagtgaaacgtggcttgagaaaagtacataatcccgtagttgagaactctatccaacctcaactggttccacagattgcagttgaaaagccaaatggtagtttagaagaatctgtgaatgcctttgatgaagagaaagaagatgaagtggctgagacagtggtgcaacaacctgaagagttgatacaaactcatacaccattggggaccaatgaatctcttgattccacattggtcaaccaaatcgaagagagtgaagaaaatgtaatggccgaggaaaaggaggatgtaaaagaagagaggactcccaaacaaaaccataaggagaattcagctggggaaggagaatcanaantccgggaaaaaggctcntcggttact

SEQ ID NO: 6626 - DNA, 459 bp, Arabidopsis thaliana
  unsure at all n locations
  Clone ID: LIB24-128-Q1-E1-D2
acgccttctgtagcctccnaaattccaaaggtcgacccacncgtccgcngacgcntggggtcagaatctaatggacccagnaagcctaacagctttccacatcctttaatccaanaaattgattcagaacttccatttgtgcagcctgcgcttcaactgacacacagaatatttggttcttgccctccaatgcaaanttttgacccancaaagttgctcacggactctgggaagctgcaganacttgatatattattgaagcggcttcganctggaaatcacagggtgcgcctgtttgcacagatgacaaaggatgctgaacattctccaggattatatganctatagaaagtacaagtanctcaggcttgatggatcctccaccatcatggntcgccganatatggtnagggattttcagcatatgagcganatttttgtaggcctgctgaacancac

SEQ ID NO: 6627 - DNA, 440 bp, Arabidopsis thaliana
  unsure at all n locations
  Clone ID: LIB24-128-Q1-E1-D5
acgcgtccgnaaatctctgtttccctctctttatctcctttgttgcgtactgattctctaagccgtgacggtgtgccagtgtctgtccttgtcttattatcactgccgcagttcctattcgtgcccgccaactgttcgtcaaattgcctgaaccaattcttccgacaatcctaaaagtttggattttggtgattctaaaaactagggttttattcaaattactcaagaatggctactactgcgaatggaaactctaagaaaagagatggtgggtctatcgtcgcttgcccctcgcaaaatcaacgtgcagaaaattctcagaggctcgaagcaccaagaagctcgaatctcttcactccattgtgtctgagcgtttgaacaaggactttcgatcaaagaggaataagaggagaaggaccaattcttacaataatcaacct

SEQ ID NO: 6628 - DNA, 419 bp, Arabidopsis thaliana
  unsure at all n locations
  Clone ID: LIB24-128-Q1-E1-E1
gaagatcaccgtcgtttattctcgacgagcgacgangctcgaattcacctccaatggnggatacaacacgaggtccttttcaaaaccctgattccatctccgcttattaccaaactcacgcggngcatcacggtgtcattacangcgactggctagcccaagctcaagccgccgttggcggngtctcangcgangcccagcatgacttatccgtaactgatctcgggaacgagaagtcgtttaatgtaattgnngagttcagtaattggaggaanacaaccggatctggctgaagccgtcgcggctatacgagctttggctgctgttattcgtgcgagcgaancgagcaccatgatggagcttgaaattgagctcaaaaaggcttctgatacactcaagtcgtgggacaaaacgtcgat

SEQ ID NO: 6629 - DNA, 443 bp, Arabidopsis thaliana
  unsure at all n locations
  Clone ID: LIB24-128-Q1-E1-E10
acgcgtccgcccacgcgtccgaaacataaaaaatattaaacaaaaagaacaaaaaaaatggcaaaactttcattagcattaggtctattgctactattagcattaantgaggtctacgaagtgcaagggtcgttcttattgaggcattacatgaggaaatttcccagaaggtccagagactttcggccattcgcttgcagaggtatgttgaagttcgtggacgttttggagcttaagtgtccattaaagccacaatacaagagcttcttcggaaacctaaggtcttacatgaacttcataaactcggcatccgggtcgaaaaactttgatgccgagctaaaagggaaagcccagggcctcttctcagcnaggtctgcaatnagtgggcaanaggcgccgcaatcggctganttcctagcanaggttantggatacgattgcct

SEQ ID NO: 6630 - DNA, 479 bp, Arabidopsis thaliana
  unsure at all n locations
  Clone ID: LIB24-128-Q1-E1-E3
ttacgccttcnggtagccgtccnaaattcnagggtctctttcctcaatcggagtgagcgcaaaaaatcaaaaattcgccgagagcacaaaccctaatggcttctctctcaatggcttccgttaacgttagcttctgtcatcctttacgctcttcttctccaaaggtctcacttcgcagttccgttcatttcgcgacgagtctttcctcaagtcactccatttctgggcttcgcgctgttttgcctctgaagatttctacagttgcttcccccaattctcaaaagcttcattcttttaccgttttcgctcataagggctacaagatgaagacccacaaggcctcagcgaagcggttcaagagtgacgggtagagggaagattgtgaggaggagatctggaaagcagcatttgttagctaagaagaacaacaagaggaaattacgtctatcgaaaatgacggaagtgaaccggagcgacta

SEQ ID NO: 6631 - DNA, 420 bp, Arabidopsis thaliana
  unsure at all n locations
  Clone ID: LIB24-128-Q1-E1-E6
ttctctataaaacataagagagtctaaacactgtggtagaaaaaaatatagacttttagatatgtgtagtaaaataacattagtgttaactttattttccagttatttcatatcaacagatgctgtgaatggatcatttcctgcgcttttggcttttggagattcaattctcgatactggcaacaacaattttctcctgacttttatgaaaggaaatatctggccatatggaaggagtttcagcatgagaagggcgacaggaagatttggaaatgggaagagttttctctgatataagttgctgaaggtttagggatcaagaagattttaccagcttatcgtaagttgttcaattctccaagtgaccttagaactggtgtttgcttcgcatcangtgggtgcaggagttgaccctgttac

SEQ ID NO: 6632 - DNA, 413 bp, Arabidopsis thaliana
  unsure at all n locations
  Clone ID: LIB24-128-Q1-E1-E8
gggttcacatttttatacaatatcacattttcactgaatcttcctctgcgtctctcaggaggaagaagatcattcagttgaagcanacatttanagggttttgttgagaggcaatggaagggggagaagagtttcaagaagaagaagtgtggtcagttttgagagaaagtgaaactcaaggtcctgaaatgaaaatgtccaaaagtaacaatctcttctcagcctcttcctcatcttctgcgaggtacattcctaaaggcaacgaggtctctggaggggcaaaacagtcatctgctccaatgaatattcctgactggtccaaggtttatgggtattcaaagaanaacacangcagccacttgcattcatgggccattgacgatgatgatgaaggctcaatgggttcctccaca

SEQ ID NO: 6633 - DNA, 486 bp, Arabidopsis thaliana
  unsure at all n locations
  Clone ID: LIB24-128-Q1-E1-E9
cttntacgccgcccggtaccggtccaaaattcccgggtcgacccacgcgtccggttttgtggaggaacccacataacaaacacccgcgaagccaaagcatttgctcttctatcggaggagggaattgctaaaggtattcgtagggtaactgctgtgactactgaatgtgcttttgatgcattgaatgcggcgtccttacttgaaagagaagtagaggatgcctccagagcggagggaagtgcattggaaaagaaagtttctgctttgaaaagccgagtagatgcagcaattatcccagcagctaaaaaggcagatattaggactaagattgcttcgcttcagaatgaagtaagaaaagctcagaagaaaatagcggaacaaaacctgaaaaaatctgtcaaattagcaacagaggcagctgagtccgcagcatcagatgggaagactttctgcataatccaactgggatgttgggtccntgatgca

SEQ ID NO: 6634 - DNA, 480 bp, Arabidopsis thaliana
  unsure at all n locations
  Clone ID: LIB24-128-Q1-E1-F10
actgttgacgcctgccaggtaccgagtccagaattcccgggtcgacccacgcgtccgctgatgattactagtgacaagacaatcgatgctcgtggcgctaacgtgcacatcgcatatggtgctggtatcacgatgcagtacgtgcacaatatcatcatccatgggcttcacgtccaccacatcgtgaaaagcagtggtggtttgataagagattcgattaaccactttgggcatagaggagaggctgatggagatggtatctctatctttggggcaacaaacatttggcttgaccacatttctatgtctaaatgccaagatggacttatcgacgctataatgggttccaccgcaatcaccatctctaactctcatttcacccaccacaacgatgtgatgttgcttgggtgcacaaaacancaacatggatgacaagaaagatgcaagtcacagtggcttacaaccatttcggaaaaggac

SEQ ID NO: 6635 - DNA, 440 bp, Arabidopsis thaliana
  unsure at all n locations
  Clone ID: LIB24-128-Q1-E1-F4
tcgacccacncgtccgggcgaaaaagaacccgtcgccgtcgaatcagccggcttgcccaacggcctagtaagtcatggtaactccaagacacggcgcgtatacgaaacagctcgatctctgcataccggtgctgtgaaagatcttctctctctcggggtctgtgagagatgtattttccgattggtatccgtcgaggcttttgattccgatatttcatcagtctcgacttcaactctgcgcagctggctcaaatccggtgatgatgaaactagtgcatcggaatctagctgttccacaatctgcattgtttgtttaggtatattgcagttcgttttttccgatgtcaaaaaagagctggtgaaatcggattctagtagtgattacgttgcaagggataacggacttggtgaagcangatctcatgagttcgaatagcttt

SEQ ID NO: 6636 - DNA, 419 bp, Arabidopsis thaliana
  Clone ID: LIB24-128-Q1-E1-C6
cgatcactttacttaatcgtcttcatcgttattagtcttgttaaagcttcgaaaagcgatgatgggttttgttcagcgccttcgattgttgaatcggatgagaagacgaaccccatttattggaaagccacgaatccaacactctctccttcacacctccaagacttgcctggtttcacacgaagtgtatacaaacgagatcatgcgttaataacaccggaaagtcatgtatacagccctttacctgactggacaaacacattaggggcgtatttgatcacaccggcaacgggttcccattttgtcatgtacttggcgaaaatgaaagaaatgtcaagttcaggtttgcctccacaagacatagagcgtcttatattcgtggtcgagggtgctgtgacactcactaacacatccaagtt

SEQ ID NO: 6637 - DNA, 430 bp, Arabidopsis thaliana
  unsure at all n locations
  Clone ID: LIB24-128-Q1-E1-A5
cgagcaagaggctttcatcagtaattcgtcgtcggagctccagaacgagttggtatccgacgccggcgatggtattgaagcaatcgctaatcgtctgagcaaatggattgtagcagctctgtttggatccgttctgcttctacgacatgatggtgcagctttgtgggctgtgattggatcggtttcaaattccgtgctctcagtagctttgaaacgtatacttaaccaagagagacctgttgctactctccgttctgatcctgggatgccttcttctcatgcccaatccatttctttcatctctgtgttttctgtcttctccgttatggagtggcttggaaccaatgtactcccgcctgttccntaagcggcttcatcctcgcaattgggttcttatttcacgtggttaaagggtttctcanaaagcctt

SEQ ID NO: 6638 - DNA, 433 bp, Arabidopsis thaliana
  unsure at all n locations
  Clone ID: LIB24-128-Q1-E1-A6
acgcgtccgcttatccaggataacgataacaacactctctctctcactgcaagagcgcgaaacagagtaaggctcactttgttttagctttctcctctacttcgataatgccgtttgctccttccttgttgtcatcgtcttcctcagtctctcaatttcttcccagattccccaacgcgactagattcaatgtaactccacggagcagagccgccaccgtcgtcgcggcatccgtcaccgacctagccggggtcgacagtacaacaatcgccgtactcggtggaggatccgtagcagcactcgcggcgatggtttccttaacggatccggagaggaggcggaaattgcaggcggaggaagttggcggaggcgataaggaggttgtgagggagtatttcaatagcacggggntcgagaagtggaaggaagatnt

SEQ ID NO: 6639 - DNA, 420 bp, Arabidopsis thaliana
  unsure at all n locations
  Clone ID: LIB24-128-Q1-E1-A8
acgcgtccggttcaattagggtttcaatctctctgctctgcttgtcatcaccaccaccaccaccaccgtcgtcgtctctctgtatctctccggcgggttctctctctacttcccccggaggattaaaagatggaccagtcttttattttgatattccgttagcttgttcagttattgtagaagctgtaccgtcaagacttttaatatctcaaatggatgatggtgggcatcgtgagaatggtcggcataaagcagcagttcagggccagtggttgatgcagcatcagccgtcgatgaaacaagtgatgtcgataatagcagagcgcgatgcagcgattcaggagagaaatctggcgatatcangagaaaaaagcagcagtagctgaaagggacatggcgtttcttcagagggacaccgcc

SEQ ID NO: 6640 - DNA, 424 bp, Arabidopsis thaliana
  unsure at all n locations
  Clone ID: LIB24-128-Q1-E1-B11
acgcgtccgctgaatcaaatctcctagctcttctacgcaaaatcgagtgcatcgacaatggcggaacgtggtgtcgaacgtggtggagatcgcggcgatttcggacgtggattcggtggtcgcggcggtggaagaggtggtccgagaggtcgtggtcgccgtgcaggtcgtgctccagaggaggagaaatgggtgccagtgactaancttggtcgtctcgtaaaggaaggtaagatcacaaagattgagcagatctacctccattctctcccagtcaaggagtaccaagatcatagatttactcgtcggtccttcattgaaagacnaagtgatgaaaatcatgccggttcaaaaacaaaccaggagccggtcagagaacgangattcaaggccttnancgtcntccggngaatagtaaagggtc

SEQ ID NO: 6641 - DNA, 417 bp, Arabidopsis thaliana
  unsure at all n locations
  Clone ID: LIB24-128-Q1-E1-B2
aagcnatgttatctccgattgagaatgagagatccgaaattccttcccctgagaagctgaagttantggaggagccatccgacgatgaatctaagttctctaattatgattcggacgattgggaaactttgtcagatgatcttcgactgttagatgaagattggggcaagagcgggggttttgatgtggacttctcnaaantgcgtcacagatttggtcncggagctgttcatctcgacnacnacaatatggttagcgagcctcatgagaccaacagngatttgctcaanaggttgtccaacatggctatcnccttctacancgacaagacggggataaaantggaacttgtcaaggttttganagcaaattttcacccatctgctgcaatcacactctacatcacggtttganagc

SEQ ID NO: 6642 - DNA, 472 bp, Arabidopsis thaliana
  unsure at all n locations
  Clone ID: LIB24-128-Q1-E1-B3
cggtagccgtccaaaaattcaagggtcnacccacnccgtccgaactagcnttctacaccggtcctacattgggtggtctattgaacgcaacgtgtggaaacgcgactgaattgataatcgcgattcttgctttgaccaataacaaagtcgcagtggtgaaatattcgctgctaggttcgattttgtcgaaccttttattggttctagggacttcactcttctgtggaggaatcgctaatatccgaagggaacagcggttcgaccggaaacaagccgatgtgaacttcttcttacttctactgggtttcttgtgtcacttgctgccattgttggtgggatacttgaaaaacggagaggcttcggctgctgttttgtccgacatgcaactgagtatatcgcgaggcttcagtattgttatgttgatcagctacattgcatatcttgttttccaactgtggactcaccgccaatt

SEQ ID NO: 6643 - DNA, 478 bp, Arabidopsis thaliana
  unsure at all n locations
  Clone ID: LIB24-128-Q1-E1-B4
tgttagcctnccgtagccgtccaaaattcaagggtcgaccnacgcgtccgcaagacgcatgggtcttccccagatcctcctctctcttcttcactcttttaacggacacttttcactgatctattcactcactcaaatcgccgccggagctaaatcaatcaacaatgacgtcgacctacacgagattcgataccgtatttctcttttctaggttcgccggcgctaagtattcgccgttattgccgtctccgtcgtttactttatctacttccggcattcatatcagaaccaaaccgaattctcgttttcactcgattatagcatcctcctcatcttcatctgtagtcgccggaactgatagcattgagattaaatcgttgccgacgaagcctattgaaggacaaaagactggaactagcggactccggaagaaggtgaaagttttcatggnnagataattatttaagccaactgggnt

SEQ ID NO: 6644 - DNA, 424 bp, Arabidopsis thaliana
  Clone ID: LIB24-128-Q1-E1-B5
acgcgtccgaaaaaaactgagtcgagatttggtgacgtgatgaatcatttggtgataatctctgtgttcttgagctcagtattgttgttatatagaggagaatctggaatcacaagtagttttattcgatctgaatggcctgcggttgatataccacttgatcatcatgttttcaaagtcccaaaaggatataatgcaccacaacaagtacacataactcaaggtgattatgatggtaaagctgttatcatctcttgggttacacctgatgaacctggttctagccaagtacattacggtgcggttcaggggaaatatgagtttgttgctcaagggacttaccataactacacgttttacaagtataagtctggctttattcatcactgccttgtctctgaccttgagcatgatacaaaatact

SEQ ID NO: 6645 - DNA, 420 bp, Arabidopsis thaliana
  unsure at all n locations
  Clone ID: LIB24-128-Q1-E1-B6
acgcgtccgcgaaaagacagnnnnnnnnnnnnnnnnnnnnnnnnnnnnnnnnnnnnnnnnnnnnnnnnnnnnnnnnnnnnnncgtgatgagggcgttgaattcgcggctagttctgatcgacatcaacagctcctggcaagcttcgcgccggttaanctcagccaccgcaaccgctttttcancngattcctcttcctcattccgtcggacacgtggtgcgcgtcagagaatcgcttcatcgaaatccccggcgtcgtcaccgtctccngttcggagaccatctgatggattcagtttcgatgttcggtcaccgtcatctgattcatcgatctcatcacggaagtcacgacgaagggnccgcctaaggggggnnctngacgctttcntagaanttcccccccgggganaagaggaaggga

SEQ ID NO: 6646 - DNA, 439 bp, Arabidopsis thaliana
  unsure at all n locations
  Clone ID: LIB24-128-Q1-E1-B7
acgcgtccgccccaaatcacatcttcaagaaccctaataaattcccagagattcctctcatttaatcacttcagattcgaaaaaagttctctctttttcccaaaaaaaactttctcatacaatggactctactaccacacctccttctctccgttcgaatactagatccgctttgcgtctagctcgaaacaacaaaactctcgtaaaatctcacattccatctctcgatttggttttattgtctccgaagaacaacaacggtactccttacccatcacctgtttctctcagttcaccatcttctcctgttactcttcgtgagattctccttttatctccttcccctcttcgtaaatcgagaacccgtttaagcaatcggttcgatatggaagctgcggaggctgctgtgacggnacgacgggagtaagacgaaaggggn

SEQ ID NO: 6647 - DNA, 413 bp, Arabidopsis thaliana
  Clone ID: LIB24-128-Q1-E1-B8
gggtttcattttatctctctctctttttcttctatccaaaacaccatttttgagatcagagcttctagcagcgtaaaaaatgcagacgaggtatatggagaggactaatagtatgagagagaagagaaaattggaggaagatgataatcagcagcagcagcaacagcctgagcgtaaaaggccagctcttgcaagtgtaattgtggaagccttgaagatggatagtttacagaggctttgttcttctttggaaccgattcttcgccgagtggtaagtgaagaggtggagcgggcattggcaaagcttggccctgcaagacttagtgaaaggtcgtctccaaaacgaattgaaggtatcggtggaaggaatttgcagctacaattcaggtctagattgtctgttcctttgttta

SEQ ID NO: 6648 - DNA, 415 bp, Arabidopsis thaliana
  unsure at all n locations
  Clone ID: LIB24-128-Q1-E1-C10
tgctttctggtacggcggnnatgtcganaanttcgatccancngactgagactctacgantcactcacgctcggtcacgaatcttccggcagagatatcggagaactatccctctttggaaattaacaatcanttcgagatcttctgatacatctaanaaggnagaactctctgtanaaatatcaattccncctcaagttgatcaatcaagacctgaaggtttgagattcgatcgtttacaacctccggagccagagtttggtcatgaanatagatttgagtttggtaaattcgtagctagagaagctatgcttgatgaaagaatattggactgcancttggcttcgtgcagaagagtcactgggaagatcgctccaatgannagatatgttgataactacangaggaaattttg

SEQ ID NO: 6649 - DNA, 437 bp, Arabidopsis thaliana
  unsure at all n locations
  Clone ID: LIB24-128-Q1-E1-C11
acgcgtccggttcgttcttgcacacgccgaatcctgctgcgtataaaaaacagcatcctgtagaagctaagcctgctactgatcctcagtgttctaaaaagccaattgaaaataacactgaggagaagaaacttcctgatgttaatctctcaaaggtggttaaaggacatactgacatatcggctgcaccaagagtcgcttctactggactaagggatagtagaagtgtagagggatacattccaaaccatgtgggatatgagcctgttgtgcagagaaagggtccaggattcccttcttttactgaaggaggccattctactcagttgcttcagaaatatggatctgatgataataacagtttccacaatggtaaggatgcagatgacgttttaagagagtcgtctcctgggtttgatgttcntgtggataatgag

SEQ ID NO: 6650 - DNA, 480 bp, Arabidopsis thaliana
  Clone ID: LIB24-128-Q1-E1-C5
aacgttccgccgccggtaacggtccaaaattcccgggtcgacccacgcgtccgaaggacactgcccgataccagtattaccaaggcttactatgcctggtcatcgcattgatccaccttgtggaagggttagtttgatctctggaccacaacatcttgttgctgatttggaaacttgctccctacatctgaaacatttagctgctgctgcaaaagatgcagttgccgaaggtggttctgttcctggttgtagggctagattatggcgcagaataagggagttcaatgcttgtatcccgtatacaggtgtgcccgctaatagtgaagtccctgaggtgactttgatggcattaattacaatgctaccatcaactccaaatctccctgtagacgcccctcctttgccacctccttcacccaaagcagcaagcaactgtcattggctttgttacatgtttgcgtaggttattgtcatccaaga

SEQ ID NO: 6651 - DNA, 494 bp, Arabidopsis thaliana
  unsure at all n locations
  Clone ID: LIB24-128-Q1-E1-A3
acgccgtncagcatggcctgtaacgagtccaaanntncacgggnccntccggcaaagcaaaattcgaagagacacaaaaaaaccttcgtttgtgtctcagaatttacaaagttttgagtcagtagagaaatggcgggaatcgtgacagagccgtggtcagtagctgagaacggaaacccaagcataacggcgaaaggatcgagcagagaactaagacttggaagaaccgctcacaacatgtcttcttcttctttgaggaaaaaatcagacctccgagtgattcaagaaggttccatacaaaggtcttaaagattttctctctaatctccaagaagtcattctcggaacaaagcttgccattctttttccggccattcctgccgccattatttgcacctattgtggcgtcaagtcagccttgggatatttgggacttagcttgctagggactggacacctttggctgangcgagtcaagctttttggcagaatan

SEQ ID NO: 6652 - DNA, 499 bp, Arabidopsis thaliana
  unsure at all n locations
  Clone ID: LIB24-126-Q1-E1-F1
ctgttacccttccngtagccgtccganaattcaagggtcgacccacgcgtccgcggacgcntgggaaacacataaaagagagatttaatacaaaaganagagaaaaaaganagatatggcaggactcatcaacaagatcngagacgcactccacattggaggaggcaacanggaangtgagcacaagaaggaanaggaacacaagaaacacgttgacgagcacaagagtggtgagcacaaagaangtattgttgacaagatcaaagacaagatccacggtggtgaaggtaaaagccacgacngagaaggcaaaagccacgacggtgagaanaaaaagaacaangacaagaaggagaagaaacatcatgatgatggtcaccacagcagcagcagtgacagcgacagcgattaaggtgangaactgaggangatcgcttgaagtaaacangtctggttctggctaatattaaataatgttgccgnaaggtcctaccacctt

SEQ ID NO: 6653 - DNA, 495 bp, Arabidopsis thaliana
  Clone ID: LIB24-126-Q1-E1-F12
ctgtttacgcctgccggtaccggtccgagaattcccgggtcgacccacgcgtccgcggacgcgtgggcggacgcgtggggaaatatccaagctttttactcgtaggcctgctttgcagagagccaatgttgctcagttagagtttaagttaagccttcttaagccactgggaatcacgtcttcagaccttgtgaagattcttaactgtcgtcctaggttctttagttgccgtcttgtccttgatgaaaggatcaactacttcatggagattttggggtcaaaagaggtgttgcgcagagtcattatccggaatccgtcactcatgttgtatgacctcgatgacaagatcaaacccgcgatagaatactacaaagggttgggctttagccaacaggatcttgtcgcaatgttgatatcgcgacccacgttgattccaagaacaaactttaacaatgagaagttgaatacattgaagaaaactggaagtccacaaga

SEQ ID NO: 6654 - DNA, 455 bp, Arabidopsis thaliana
  unsure at all n locations
  Clone ID: LIB24-126-Q1-E1-F3
acgccgtgggcnggacgccgtggggcttccancaacttgacccacaccganaagaaacnngagaangangaaganactttttttcctggggcattccccnagttttcttttttcttccctctgtaacactttttttgtgggtatctcccctaaaaagaaaactttatttttgntcttagnaaatctgcttttaaattttanaaaaatgggaaantgtttgatgggatgaaacaacgttgagaaaatggttaaanaataagaagtantgaataaagaatacangagataagatcgtaaagtaaanatagttttgagaagagatgagttagagaaactcattctttttcaagctaaatgccaatggtnacgtcgacgggcaanggagaaacaacttnggcttcttttggtgactttctaagggagttagaagctgacagatttgccggaaaanccgg

SEQ ID NO: 6655 - DNA, 450 bp, Arabidopsis thaliana
  unsure at all n locations
  Clone ID: LIB24-126-Q1-E1-F5
acgcgtccgggagtatattatgaccctcctgaggaggataaatatgcgttcaaacatcctcgtccaaagaaacccacatcgctgcgtatatatgaatcacatgttggaatgagtagtacggaaccaaagataaatacatatgccaactttagagatgatgtacttccccgtataaaaaagctaggctataatgctgtgcagataatggccattcaagagcatgcctactatgccagctttgggtatcatgtgacaaattttttcgcacctagcagccgctttggaacacctgatgaccttaaatctttgatagacaaagctcatgagctaggtctggttgttctgatggatattgtgcacagccatgcatcaaaanacacactggatgggcctggacatgtttgatggtactgatgggtcaatatttccactccgggattgcctgggtaa

SEQ ID NO: 6656 - DNA, 488 bp, Arabidopsis thaliana
  unsure at all n locations
  Clone ID: LIB24-126-Q1-E1-F8
aacgttacgtccgccgccggtaaggtccagaatcccgggtcgacccacgcgtccggaaggattcaaatattctgtanagaatatagatctccgaggcaaaagctcagttaacgcagaatggatggcttacattggaggcttcgttaatctaattactctaaatctttcagattgccagagaatcaacagttccaccctctggcctatcacaggattaacaagtttgacagagttggacctttcaagatgtttcaaggttacggatgctggtatgaagcacctccaatctgttgtaaatctgaaaaagttgtggatttcacagacaggtgtcactgaagttggaatttctcttcttgcttcacttaaaaaattgtctcttttggatttgggcggcttacctgtaactgatcaagaacttgatttctctccaggcactgacaaagctagagtaccttgacatccgggggaaacaacgttaccaancaaag

SEQ ID NO: 6657 - DNA, 416 bp, Arabidopsis thaliana
  unsure at all n locations
  Clone ID: LIB24-126-Q1-E1-G1
caacaaagcgtgaatctctctttctctctctatctctctatctccgagatcgcatcaccggaaatctccttctacggtggtggtggtgacagttgaccagagatggcggcggagaatgagagaaaatctccttcagcagtctccgatatgggagcttgggcaatgaatgtgataagctccgttggaatcatcatggcgaataaacaacttatgtcctcttctggattcgcatttagtttcgctacaactctcaccggtttccacttcgctttaaccgcattggtcggtatggtatcaaacgctaccggattctctgcttcgaagcatgtacctatgtgggaagcttatttggttctccattgtcgctaatgtctctattgctgctatgaacttcagtctcatgcncaattccgttg

SEQ ID NO: 6658 - DNA, 411 bp, Arabidopsis thaliana
  unsure at all n locations
  Clone ID: LIB24-126-Q1-E1-G10
gtgtggaaggtgacaagacactttatcctgtgttattgtccaatggaaacctcatttctcaaggagatatagagggtggtcgacactatgccttatgggaggatccattcangaaaccgtgctatctatttgctttggtggctggacagctagtgagcagagatgatacatttaccacacgctctggtaggcaggtttccctgaaaatctggactcctgcagaagatctaccaaagactgcccatgccatgtattccctaaaagcggccatgaagtgggatgaggatgtgttcgggcttgagtatgacctggatctcttcaacattgttgctgttccagattttaacatgggagccatggnaaacaagagtttgaatatttttaantccaagcttgtcctaagcatcctcn

SEQ ID NO: 6659 - DNA, 499 bp, Arabidopsis thaliana
  unsure at all n locations
  Clone ID: LIB24-126-Q1-E1-G3
tgttacgcctnccgtagccgtccnaaattcaagggtcgacccacgcgtccgcggacgcgtggggttttgatcccacattcctaaagctccagaaattgatcaaaatgggagaagctggtcaatccagagacggngaatctgtcacgcctcttgttggcggtggtaatggggacaatgcggttgcaccacaagtgtttaattctttaccagctcttaatgaagctgcttcttatataactcaagcaacgtcttacttaaggagctgtttttctgactattcagtagaatatggtggcaaggatactatttcccacccccatgagttgttacgatcaacttccggagttgacgggaattccccagtgaagtgtatgcatttcgcctggtgaaaggttttcaacttcntcagaaggcatctacatctgatgccaacagcccgtcgagggaatcctacagagantctgccacaggnaacaaatggcaataatggccttccaaa

SEQ ID NO: 6660 - DNA, 449 bp, Arabidopsis thaliana
  unsure at all n locations
  Clone ID: LIB24-126-Q1-E1-G7
acgcgtccgcccacgcgtccgaagaaactgagaagataaccataatctttgttgataaggacggagaggaaattcctgttaaagtaccaattggaatgtcagtgctcgaagctgctcatgaaaatgatatagaccttgaaggggcttgtgaggcttctctagcgtgttcaacgtgtcatgtgattgtgatggatactgaatactataacaaacttgaagaaccaacagatgaagagaatgatatgcttgatcttgcttttgggctcacagaaacgtcacgactcggatgccaagtcattgcaagaccagagctagatggtgtgcgcttggctattccttcagcaacaaggaatttcgcggttgacgggtttgttccaaaacctcattaatttcccgcagagantcntcgacttgaggcattaatgatcaaagagctgnatcaagtttcc

SEQ ID NO: 6661 - DNA, 490 bp, Arabidopsis thaliana
  unsure at all n locations
  Clone ID: LIB24-126-Q1-E1-H11
ctgttaccctgccggtaccggtccanaattcccgggtcgacccacgcgtccggaccaatgttggtggtgctggagatgttcattcggttgcggttaaaggttctagaacaaggtggcaacaaatgtcaagaaactggggacagaactggcaaagcaacaatctcttaaacggtcaagcattgtcatttaaggtgactgctagtgatggtcgtaccgtcgtctctaacaacattgctccagctagttggtcctttggacaaaccttcaccggccgtcaattccgttaaaattgagtcaagttcggttttatatagttttagggtttgtgtagtagttggttgaggaaagagtagagaaagagagagggtttaaggctttttagggtttttaagtggagagccttgaaacttcttctttgactcttgagggttaaaatggagaaaagagcttgttttataagggctccttttaagtcatgttaaggattang

SEQ ID NO: 6662 - DNA, 456 bp, Arabidopsis thaliana
  unsure at all n locations
  Clone ID: LIB24-126-Q1-E1-H3
acgcgtccgtttgatttaacccatacacacatctctctgttccacgattctcttcctcagcctccacgtcgtctctaaactcagcaaaaaccaatgtcgacggtgagaaaaatcactcttaagagttcggatggcgaaaacttcgaaattgacgaagcggtggcgctagagtcacanaccatcaaacatatgattgaagatgactgtaccgataatggtatccctctccctaatgtcacaagcaagatcctttcgaaggtgattgagtactgtaagagacatgtcgaagctgctgagaaatccgaaaccacggccgatgctgctgctgctactactaccaccaccgtcgcgtcgggttctagtgatgaagatctcaagacttgggattctgagtttatcaaagttgatnaagggcactctcctcgatcttaancctgggctgccaactancttgaa

SEQ ID NO: 6663 - DNA, 496 bp, Arabidopsis thaliana
  unsure at all n locations
  Clone ID: LIB24-126-Q1-E1-H4
gccggtaacggtccagaattcccgggtcgacccacgcgtccganccgcccacgcgtccgcccacgcgtccgcggacgcgtgggacacaacttccaacgatcacacacaaatggcgatgacgtcagcagctaccggatttattctcacggccaacgtcccggcggcaataggcggtggttcttcaaagagcaccaccattgtgtctttcttgccgatgagaancttcggttcaaggctagtagtcagagcggcggaagatacacctccggcaaccgcctcgtcggatagttcttccaccaccgctgctgctgctccggcgaaagttccggccgctaaggctaaacctcctccaattggcccaaangagaggatccaaggtcaagattctaanggnaaagaatcatactgggtacaanaacgttggattcngttgttggccgttgattaaggancccnangaccggtatcccggtgggggncccggttccccccaagg

SEQ ID NO: 6664 - DNA, 433 bp, Arabidopsis thaliana
  unsure at all n locations
  Clone ID: LIB24-127-Q1-E1-A10
tanattcgccgttctccatcggtaaaacgcagctgacgagctacatnattcnctgagatcngcgttacgccgggtgtggnancagaatttangttaatcggntctcaattatggacgaanaggcagcaaaacctagagactccaccgtgaatcagcaacatcaatactattacggaacgtttcaaggcgttgcgaattttcctactcctactccaccaccgcantttatgcaaccacagcatccgattactacgtttcctgggacatgcttaccanaatctccaaggtcatggtggtggtgtgaattatgctcaaggattcccagttgttgttcctgattatacagtggttgaagtgaagaccaatgatagagcatggaanttccttgttgtggcttgggcatggggctggtttctgtttancaaggggcttc

SEQ ID NO: 6665 - DNA, 448 bp, Arabidopsis thaliana
  unsure at all n locations
  Clone ID: LIB24-126-Q1-E1-E8
acgcgtccgtgaaaatggtgcgcagcttcagaagagtacattgggtgggcaatggcaaggtaaagatgcgtcctttatgcgttctaatgatcatggtaacagagaagttggtagaaattgggatactagtggtcttgaaggcacagctcttaagatggttgagggtgatcgcaactctaagaactggtggagaaagcttgaaatggtacgcgaggttatagttgggagtgttgagagggaggaacgattgaaggcgctcatatactctgcaatttatttgaagtggataaacacaggtcagattccttgttttgaagatggagggcatcaccgtccaaacaggcatgccgagatttccaagacttatattccgtgagttggagcacatttgcagtaagaaagatgctactccagaagaaatnccttgttgccccggnaaatccaaccc

SEQ ID NO: 6666 - DNA, 490 bp, Arabidopsis thaliana
  unsure at all n locations
  Clone ID: LIB24-126-Q1-E1-D1
tgttacccttcnggtagccgtccgangaattccagggctgtgactttcaatggaaaatcatataacttgcctgcatggtccgtaagcatcttgccggattgcaaaaatgtagctttcaataccgcaaagataaattctgcaactgagtctaccgcatttgctcgtcaatcattaaagcccgatggtggttcgtctgcggagttaggttcacaatggagttacattaaagaacctattggaatttccaaagctgatgcattcttgaaacctggattgctagagcaagattaacacaacagctgataaaagcgattacttgtggtactcactaaggacggatataaaaggcgatgagactttccttgacgagggatctaaagccgtccttcacattgaatctcttggtcaagtggtctatgcttttataaatggaaaacttgcangaagcggacatggcaaacagaagatttccttgggatatancgaatta

SEQ ID NO: 6667 - DNA, 450 bp, Arabidopsis thaliana
  unsure at all n locations
  Clone ID: LIB24-126-Q1-E1-D12
acgcgtccgaaagaaaggaactccatggacagaggaanaacacaggatgttcttattaggtttacagaagctgggtaaaggtgattggagaggtatctcaagaaactatgtgaccactaggacacctacacaagttgctagccatgctcagaagtatttcatcagacaatccaatgtctctcgtcgcaaaagacgttctagtctctttgatatggttcctgatgaggttgganatattcccatggatttgcaagaaccagaggaagataatattcctgtggaaactgaaatgcaaggtgctgactctattcatcagacacttgctcctagctcacttcacgcaccgtcaatcttggaaatcgaagaatgtgaatcaatggactccacaagctctaccaacgggggaaccaancgcanctgccgctgcctgcttcttcgtcctccaagaat

SEQ ID NO: 6668 - DNA, 421 bp, Arabidopsis thaliana
  unsure at all n locations
  Clone ID: LIB24-126-Q1-E1-D2
ttatacactccccctgctggttctgggtttatctcaggattttcttcattctcacgtagatctacattcnatatgagtctcccaanacagattgttccttttggnccgagttcatatttgtcggnacaagcaagagttgttgaagaccatacaatgtcacaagttattttacangcagtatcaaatngagggggtactggtctactgttaatggtgacaggggcaagtcatgttgagtatggttcaanaggaacaggtttgccagcaaggatctcaaggaagtttccaaagannnaccaagttgttgtattacttgaccctgaaagacagttcttgcgaagaganggcgaaactccanttgctgatttcntgtggtattccgctgcaagaccctgcagtagaaaactgctttgaccgtcng

SEQ ID NO: 6669 - DNA, 419 bp, Arabidopsis thaliana
  unsure at all n locations
  Clone ID: LIB24-126-Q1-E1-D6
ggggtttctctgttacttgannnnnnnnnnnnnnnnnnnnnnnnnnnnnnnnnnnnnnnnnnnnnnnnnnnnnnnnnnnnnnnnttcccaaatcggtacgttcatcttcctgcttctgtgagcccggagatcgatcggatttttttgtattttgtatatttgttgtagatctaaatgcttttgttcagttttgttggattgttttgctgatctggtttttgtattatttggataacagatcattaacgatcgtgagactggaagatcaaggggattcggattcgtcaccttcaaggatgagaaagccatgaaggatgcgattgagggaatgaacggacaagatccgatggccgtagcatcactgttaacgaagctcagtcacgaagaanccgtggcgcngaaggccaccgtngaagttg

SEQ ID NO: 6670 - DNA, 448 bp, Arabidopsis thaliana
  unsure at all n locations
  Clone ID: LIB24-126-Q1-E1-D9
acgcgtccgcnnnnnnnnnnnnnnnnnnnnnnnnnnnnnnnnnnnnnnnnnnncaagaaaatcacaaatttcccaagaaaacactcacatatatgatgctatatatagaaagatagtctcatctaattctctctctccctcggattcgttagatgtgatcattttttcttgatttttgatcagattcttgcgtatagctgtatatatacaccaagatacactcatcatcgtcatatatagattatgtgcagcgtctctgagcttcttgacatggaaaacttccaaggagacttaaccgacgtcgtacgaggaatcggaggccacgtgttatcaccggagactcctccctcgaacatctggcctcttcctctgtcacatccaacaccatcaacgtcaggatcttaacatanaccccttcggagatcctttgtgagcatggacgattcac

SEQ ID NO: 6671 - DNA, 441 bp, Arabidopsis thaliana
  unsure at all n locations
  Clone ID: LIB24-126-Q1-E1-E1
acgcntgggcggacgcgtgggcttccagaaggatgaaatgattgatatcattggtgtgaccaagggtaagggttatgaaggtgttgttactcgttggggtgttacccgtcttcctcgtaagactcacagaggtctgcgtaaggttgcttgtattggtgcgtggcatcctgctagagtgtcctacactgttgctagggctggtcagaacggttaccatcaccgtactgagcttaacaagaagatttacaggttgggtaaggttggtactgaggcacacacagccatgactgaatatgacaggactganaaggatgtgactccaatgggaggcttcccacactacggtattgtgaaggatgactacttgatgattaanggggtgctgtgttggtcccaagaagnanantttgtaactcctcaaaacagtcaactnctcaatca

SEQ ID NO: 6672 - DNA, 494 bp, Arabidopsis thaliana
  unsure at all n locations
  Clone ID: LIB24-126-Q1-E1-E10
ctgttaccctgccggtaccggtccagaattcccgggtcgacccacgcgtccgaccggatctcgaaatcggagaattagccaaacgatggacgccgacggaatattccgcagcatcttcgagggttgtatctccggccttgattccgccatcgaacggcgtccttaccacaaaaactgcggatgtgctcttcacgataaatcaagtggcgctgggaaaaatcaaaatcagcgatggccgccgtcttgtcgccgccacggaagctcagagagcatctcgttcccgatcnnaaggtcttggancgaangcaacatcanggctatgaatctcttctcctcatcgtcgtcttcttctaatctccaatcgctttcttcgncttcttcgctctcaaatcnggcatcaagatttaccggtgngataatgctncgactgnggaaccgatcaggatctantaanngacctacnatggacgattgatgaangtgaagatgattga

SEQ ID NO: 6673 - DNA, 501 bp, Arabidopsis thaliana
  unsure at all n locations
  Clone ID: LIB24-126-Q1-E1-E2
aatgttacccttccgtagccgtccnaaattcnanggtcgacccacncgtccgccgaaaggaagtagccgcgtttcttgattctcccattgtcgaagacgaagaangcgaagaaagagaagaggaagaagaaggaggtatcgtttcaaatgccaactttacgtttgagtttgatccatacatgatgagcaaagccgaatcantgaacaaagctctagaagaagcaattccagtcggagagccactcaagattcatgaagccatgcgatacgcgattcttgcggctggaaaacgtgttaggccaatactctgccttgcttcttgcgagctagtaggtggccaagaaaatgcggcaatgcccgccgcttgtgcggttgacgatgatccacacgatgtctctaatcaaagacgatttgccttgtatggacaacgacgatttgcgtcgtggaaagcccacgacgcacaaagtctaccgnnaaaggagttgcaatccccccgggggg

SEQ ID NO: 6674 - DNA, 534 bp, Arabidopsis thaliana
  unsure at all n locations
  Clone ID: LIB24-126-Q1-E1-E3
ngccgtccaaaattcaagggtcgacgnacgcgtccggttggcggctaaacatttccgggtgggccacgtttaaccctngccgttacctttcggtgtcgtaactccggtgggtaaacatcaactctcctccgttggtaatttctcctactgggaattgctcaagctttcttgggtcccgtcgaccgcttggtttccctccttagctttgccnacccgggtggcgaagccaantccaagcggttcggtctctctgccggaagtcnggatcattaaaaagctctcgtcttcgaagatcgtgatgacnttcggggctcgtcnacaccggtctacgccacagccgttggaccccaagaacgggtaantctcggaacaatcgcaccaaatcgccatangtttcatcgttgggaactaaacatcctccgccgggtgggaagctttcagcgggagcttccatgaaacccagccgttgctttcgggancaagccggtcgtaaagctgggacgttgggaccaancaacggggtttaactggggg

SEQ ID NO: 6675 - DNA, 503 bp, Arabidopsis thaliana
  unsure at all n locations
  Clone ID: LIB24-126-Q1-E1-E4
actgttacgccttccngtagccgtccnaaattccagggtcgacccacgcgtccgggaacgatgaattctcgtagtaacaacacaagcactttggttcatcctggaccatctagtcagccttgtggtgtggaaagaaacttatctgtccagcatcttgattcttcagccgcaaaccaagcaactgagaagtttgtctcccaaatgtccttcatggaaaatgtgagatcttcggcacagcatgatcagaggaaaatggtgagagaggaagaagattttgcagttccagtatatattaactcaagaagatctcagtctcatggcaagaaccaagagtggtattgagaaggaaaaacacaccccaatggtggcacctagctctcatcactccattcgatttcaagaagtgaatcagacaggctcaaagcaaaacgtatgtttggctacttgttcaaaacctgaagttaaggatnaaggtcaaggcnaatgcaangtccaggtggctt

SEQ ID NO: 6676 - DNA, 420 bp, Arabidopsis thaliana
  Clone ID: LIB24-126-Q1-E1-E5
aaacaaacgtactcaaatggctctttcttcaccttcaagaatcctctgttttgctcttgccttatccgctgcttctctctccctctctttcgcttcttcccacgattactccatcgttggatactcccccgaggatttggaatctcatgacaaactcatagaactcttcgaaaactggatctcaaattttgagaaagcttatgaaaccgttgaagagaagtttcttaggttcgaagttttcaaggataatctaaagcacatcgatgagactaacaagaaagggaaaagctactggctcgggctcaacgagtttgcggatttgagccatgaggagttcaagaaaatgtatttagggctcaagactgatatagtgaagacgcgatgaaagaaagatcttacgcagagttcgcttacaaggga

SEQ ID NO: 6677 - DNA, 497 bp, Arabidopsis thaliana
  unsure at all n locations
  Clone ID: LIB24-126-Q1-E1-E6
aactgttacgccggccggtancggtccaaaattcccgggtcgacccacgcgtccgcccacgcgtccggaaaacttttgatttcgagagtgcttcggagcagaagaacgagcaaagctagggtttccatctatcaaatccagctacaatcgaacctattcatcgaaattagggttttttttttggtcccttaatttttcccttctagtagcttctgatccttcgatttccatggcggatgggtactggaaccagcagcgacagcaacatcatcctcctggtggtcctatgaaacgtccccgttccgatttcgaagctccatcatcaacaatgactatanggcacggtggtggttattatccgcgagatgaggatctcgatgttcccgatactagaactatcggttcagcttacgatcgctatctccanagcgtgcaatcagganaangtggttcctgtttccatgggaagattaggaagaagangaagaggaaggaag

SEQ ID NO: 6678 - DNA, 443 bp, Arabidopsis thaliana
  unsure at all n locations
  Clone ID: LIB24-126-Q1-E1-E7
acgcgtccgtcttatttcattgcacccgctctcgccttctgcaactcttatggaacggggctcacagactggagcctagcatcaacctatggaaagatcggtcttttcataatcgcttccgttgtaggaagtgatggtggtgtcattgcgggtttagctgcctgtggtgttatgatgtcaatcgtctccaccgcagctgatctcatgcaagacttcaaaacaggttacctcactttatcatctgcaaagtccatgtttgtaagccagctcgtgggaaccgcaatgggctgtgtaatcgctccactcacattctggctgttctggactgcctttgacattggagatccaatggtccgtacaaagcaccttacgcagtgattttccgtgaaatggcgattctcggaattgaaggctttgctgaaattgccaaancctggtttggc

SEQ ID NO: 6679 - DNA, 433 bp, Arabidopsis thaliana
  unsure at all n locations
  Clone ID: LIB24-126-Q1-E1-C9
gggtgctgtttctgctctccagcaggttttcgatgctagttcatattcccagctggttagagacaaatacgagtgctatccggaaaatggtggtggaaaccagagccctatagccacagggatggttcatcaagttccttcattcgggtcggattcggactggatggagccatcaatgcatttatgccattcaagaacgttaaagcctcatgcttatgatcaggtttacaatgcttttgacctactacgaaccgaaccatctgtccagaaaatggtagtatcattgtcgtctgacaaagcagtttgggaggcggtgatgaacaacgatgtggtgcgaagagattagggacttgtacaacaatggcataagtcaagatgaggaaaattcagaangacaccctanggagaataacgcacaacnggatttcataaa

SEQ ID NO: 6680 - DNA, 488 bp, Arabidopsis thaliana
  unsure at all n locations
  Clone ID: LIB24-126-Q1-E1-A7
cngcnggccggtaacggtccaanaattcccgggtcgacccacgcgtccgnccacgcgtccgcccacgcgtccgaacatttctctggctcagaatcgacgccatggaaatgtaaagaagaaacaaagacgagctctcaaatccagcagcaatggcttttcttctttctaatctatcatctccgtcaatccatcttcaaaccggaaaatacccaaaccttaaacccattttcagtcaatctctatcgtcttcgtcttctgttagctacgaatttgtagaagagaatctatctacactctctctattgagcatccagtctcctcctcttaaagacacgcaagttcagacaagacacagttcgcaagataagcataataaccacgacagagatgaattctatatcaatcttggtgtcgctgtccgtacacttcgtgaagatttgcctttgctcttcactagaagatnttaatttcgaaatccanaagggatg

SEQ ID NO: 6681 - DNA, 491 bp, Arabidopsis thaliana
  unsure at all n locations
  Clone ID: LIB24-126-Q1-E1-B3
ttagcctccgtagcngtccanaattcacgggtcgacccacgcgtccgcggacgcgtgggcggacgcgtgggctcgaggtggtatcgaaagggtgggtgaangatcggaaatggaaagaagtgatgggtgcattcagtttccgacancgatcacaagtgcatcgtttgtcttgaggaagtattatctcaaagtttccttttcagctggaacatgtgtattancttgaaaaancggtgtcctcactccaatcaacagatgaancattgnacagccttgccaatgaatctccaaaccctgaggaangtattgatgaaccacaagttgggtatgaggttcaaggattcattgatgggaagtttgatagcggctatctggtgacgatganattgggttctcaagagctgaaangtgtcctttaacacattcctcaaacgccaagtcagtctcaacaaaccatgggaacaccttnagccattggttnaatcctccaa

SEQ ID NO: 6682 - DNA, 431 bp, Arabidopsis thaliana
  unsure at all n locations
  Clone ID: LIB24-126-Q1-E1-B5
acgcgtccgggagagtgaaggaacatcatgggaagcagcacgggcgatcttgtgacacgtatccaatcagctcaccgtttcgatcacgatgccttgtttcgttttgccgccgacaacgtctctggctttccgaccaacccttcccaattcaaagtctcacagttcggacatgggcagtcgaatccaacgtttctgatagaggttggctcagggagttccttgaaacgatacgttttgaggaagaagcctcctggcaagcttcttcaatctgctcatgctgttgatcgagagtttcaggtgcttcgggctttaggtgaacatacacaggttcctgttcctaaagtcttctgcttatgcactgaccctgctgtcattgggactgctttttacattatggagtttatggaaggacgtaatttcantggattcaa

SEQ ID NO: 6683 - DNA, 408 bp, Arabidopsis thaliana
  unsure at all n locations
  Clone ID: LIB24-126-Q1-E1-B6
gatcaataaaaagtcaacaactgaagatcatgttgtggtcaacatcccagtttctttctcanacagagagcagaaagaaccaaaatcaggtccgatggcttcagccttggagatcacacagattccatgcaagctctgtgaccataaactggtgtatgggacaacacgcaggtctgtagcgtacagaccagctatgttgtcaatggtggcgattgctgcggtttgcgtctgtgtggcacttctgtttaagagttgcccggaagtgctctatgtgtttcaaccgttcaggtgggagttattggactatggaacaagctgagtgtaagtctactttgaaagatcttctaagatatatatatgaatgttacttatataaaacccatagaggtgtgatttccaatatgttac

SEQ ID NO: 6684 - DNA, 400 bp, Arabidopsis thaliana
  unsure at all n locations
  Clone ID: LIB24-126-Q1-E1-B7
acaaagaactggatgaggtttcatgtcctgtttgcatggatcacccacataatgctgttctactgctgtgcagctctcatgacaaaggttgcaggtcctacatctgtgataccagttaccgacattccaattgccttgaccggtttaagaaattgcattctgaatccgcaaatgaccctactcccgaggcgaacttggcttcaagggaacataataacgaatctctatacgagcatggtacagccagtcgaagcagttttcaccgtgagtctggaaaccgaggctcttcttgggattccgaatcactgaggaggaggaggagagttgaggaagaagttgagtcagaagatatcacaaatttgaaatgtcctctatgccggggtactgttttaggatgggn

SEQ ID NO: 6685 - DNA, 496 bp, Arabidopsis thaliana
  unsure at all n locations
  Clone ID: LIB24-126-Q1-E1-B8
aacttttccgccgnccggtncaaagtccaaaaattcccgggtccacccacgcgtccgcttggttaaagacctctagcttcacggtcaaacatcataaaccttttgccgccgtcactaataggaattaactgatctcgtcaatggcggaggtggaggagattgcgcacgaggagcagaatatcgagaagagggagaagaagaaaggtaaacacgagaagccgaagccatgggatgatgacccaaacatcgaccgttggacaatcgagaagtttgatccggcatggaaccccactggtatgactgaaaccagcacgttctcaacactctttcctcaatacagagagaagtatcttcaggagtgttggcctagagttgaatctgctcttaaggagtacggtgtcncctgcaagctcaacttggttgaaggttctatgactgtttcgacgacnagggaagacnaganatncatacatcatttgtcaaaacnaagggattt

SEQ ID NO: 6686 - DNA, 409 bp, Arabidopsis thaliana
  unsure at all n locations
  Clone ID: LIB24-126-Q1-E1-C10
ttctccganacctctctatctatatctcttcgacgctgcaaattagccttaagcttctttctcctttaaacttttcgattattattccatttcctatctttttgtttcccccaaatcttttcacggaagcaaagaatacaattccaaaccctaatcccgatcatccgtctttcctctccggtttcaaaatatgagtaatcagaagaagaggaattttcagatagaggcgtttaagcatcgagtcgttgtggatcccaaatacgctgataaaacttggcagattcttgagcgtgcgatccatcagatttacaatcaagatgctagcggtctcaagtttccgangaactttacagaaatgggtacaacatggtcctgcacaaagtttggtgagaagctatatancggggtt

SEQ ID NO: 6687 - DNA, 452 bp, Arabidopsis thaliana
  unsure at all n locations
  Clone ID: LIB24-126-Q1-E1-C12
acgcgtccgagttagcctgacattcttggttctgcttctggttttcttctgctggcttcttcaggtaagtgagtaacttctacgatcaactcttatgtagtgagtgtttttacttctttttgttctgagcctcttagtagtgaccgcagccaatatatttatttttgtaatttaaaaactcactattacaggcaaattagtaaagttggcgaatcaacgcccctgaaagatttctgttttagtttctggtagagctagtaatgttgtttgattcgtaatttctttcctttatgtgtgatactgtagatagattagatggatcaaatcgttaatgtggatgaagtttcaagagctgggctaaacangccctccctaagatgtactatgatttctacaatggangancaagaggattaacacactcctcnaatggaaaaatgtccaagncttcc

SEQ ID NO: 6688 - DNA, 501 bp, Arabidopsis thaliana
  unsure at all n locations
  Clone ID: LIB24-126-Q1-E1-C2
ctgttacgcttccgtgcccgtccnaaattcaangggtcgacccacgcgtccgaagacaatgctcatcaggactacaagcagttgctgatgttgctgcttccattagagctggttattacgacattggtattggtgctggagtggaatcaatgtcaactgatcatattcctggaggcggctttcatggctctaatccaagagcacaggatttcccaaaagcccgtgattgtttgcttccaatgggaattacttctgaaaacgttgcagaaaggttcggtgtcacaagagaagangcaagatatggctgcggtggagtctcacaaacgcgctgcagctgcaatcgcgtctggtaaactcaaggatgaaatcattcctgttgctactaagattgtggaccctgagactaaagcagagaangcaatcgtcgtatctgttgatgacngtgtacgtccaaactcaaacatggnagantttggaaangcnggaaaacggtctttaaca

SEQ ID NO: 6689 - DNA, 484 bp, Arabidopsis thaliana
  unsure at all n locations
  Clone ID: LIB24-126-Q1-E1-C3
ctgttacgccttccggtagccgtccanaattcaagggtcgacccacgcgtccgcatggatcataacgttgtacacactgtggcaaatggtggagatgcatgagattgttccagggaagaggcttgataggtatcacgagctaggtcaacacgcttttggtgaaaagcttgggcctatggatcgtcgtgccgcagcagcttatcgtggaggtcggtgttgacatcgtttatatggtcacaggaggagcatccctcaagaaagtccatcaactagtctgtcccgattgcaaagagatcagaactacgttttggatcatgatctttgcttccgtccactttgttatctctcaccttcccaatttcaactctatctccatcatctcacttgccgcggctgttatgtccttaacttactcaactattgcttgggctgcatccgtgcacaaaggggtacatccagatgtggactactctcctaanagcat

SEQ ID NO: 6690 - DNA, 551 bp, Arabidopsis thaliana
  unsure at all n locations
  Clone ID: LIB24-126-Q1-E1-C4
acgnttagccttccgtggccgtcnaaantcaagggtcgaccgacgcgtccgctcaagatnacaaaaccctaatttcgaatctttatncttcaaaatgggctttctgtaacaaaactccggtggggctaattgagacagaacattcctcctaacgggaaatgtttcgggttacgtccaatgctcgggatntctccgggttgaatgtctaccaaagcttttcaatcggaggtcnctcaagggggaaaacgatgacgcatccttaagggaatgcctttgctcacttccggtgacgttgttgatgcnnaaagttatcgttgataagaanagacacggaaagatnaaagggggtttgggatttgtcaaacttcaatgatgaagggtgctgcaaactgctngccatatcacgaagatggaccggaaaaggaactgaatggtccgtcacatccgaagttgaatcctggctaatggataagaaccaaagtgctccaccgggccttaaaggaagtgggtgggtgngaataaaattngnnggaaggttggagggctaccgg

SEQ ID NO: 6691 - DNA, 485 bp, Arabidopsis thaliana
  unsure at all n locations
  Clone ID: LIB24-126-Q1-E1-C7
ccgccgnccggtaacggtccaaaattcccgggtcgacccacgcgtccgnaacatttgaagctcatcatacttcttgtggctttctctttacacctcttcattgctttcatatctctactttcattcatatccaacaaaaaatatcaatgatgtcttttgtcgcaaacttggccatcaagagatttgaccatgcttccaccgtgtatgttgaagatgtggtagatagttctcgagtggcatatagtgagaatggtggtgatgacgatgacagtggctatgattatgctcctgctgcgtgattgtttcctattagtatatgattgtaatttaggaggaaacaaaaagacagagatgataaggtaatttanatatctagctaggccatgtatgtactaaatagtttggtgagtcttcttatagatgaacaaacatggtttccatagatgtntacttgtgggattgatantgtcccctaaattttggaa

SEQ ID NO: 6692 - DNA, 394 bp, Arabidopsis thaliana
  unsure at all n locations
  Clone ID: LIB24-126-Q1-E1-C8
taantcacntgttgttgtctttcttttttcaaaccttggaagcaaggaattcttttttgatgattnaatcganagcttcttcctccaaacaaacatcaatggcggtttatcctaacgttaatggcgataanaancactggtggttcactcacagaaagcttgttganaagtatataaaggatgcaacaactttaatggcaagtgaggaggcaaacgacgtcgcttcagctcttcanttactagacgcagccttanctatctccccgcgtttggaaactgcgttagagctcaaggctanatntctcctcttcctccgtcgtttcaaggatgtcgccgatatgcttcaggattatatccccaatcttaaactcgacgacgaacggattcgcntcat

SEQ ID NO: 6693 - DNA, 447 bp, Arabidopsis thaliana
  unsure at all n locations
  Clone ID: LIB24-126-Q1-E1-A6
acgcgtccgatcggagacaagtgtgatggagtcatcggtcagttgacggaagattggggagagactctgttctcagctttgagcaaagctggagggaaagctttcagtaacatggccgttggttataacaacgttgatgttgaagctgccaataagtatggaattgctgtcggtaacactccgggagtgttgactgagacgacggctgaactagctgcttctctttccttggctgctgcaagaagaattgttgaagccgacgaattcatgagaggtggcttgtacgagggatggcttcctcatctgtttgtggggaacttacttaaaggacagactgttggagttattgggagctggacgtattgggatctgcttatgctagaatgatggtggaagggttcaagatgaatttgatcnacnttgatcttaccaatccantcctcctga

SEQ ID NO: 6694 - DNA, 430 bp, Arabidopsis thaliana
  unsure at all n locations
  Clone ID: LIB24-124-Q1-E1-A1
acgcgtccggagatatgatattattaagtagtantataagcctctcaagaccagtttcttctcaaagcttctctccacctgctgccacttcaacaaggagatctcattcctctgtcacagtcaagtgctgctgttcttccagaaggttgttgaagaatcctgagttaaaatgttccttggagaatctctttgaaatccaggctttgaggaagtgttttgtttcagggtttgcagctattttgcttctctctcaggcaggccagggtatancgttggatctctcatctggttatcagaacatttgccaactagggagtgctgctgctgtgggagaaaacaagctgactccntccatctgatggtgactcggaatcaatgatgatgatgattatnanaggcatgactgctangaactttgnccccgttaggt

SEQ ID NO: 6695 - DNA, 479 bp, Arabidopsis thaliana
  unsure at all n locations
  Clone ID: LIB24-124-Q1-E1-A4
gttaccttgccggccggtcgaaattacgggtcacccncgcgtcngtgtttaggtgcttttaaacccngctatcaatcacacacagaaggatcntccagtgactatttatnaaaagtgaattgcatgtcattgactggaatcccgcaggctaattttcgctcatacaagctacacaatcgagacagttgaagctgaacggatatcagttgatcatgttgcacatcttaaaccatctgacggaggctcagcagcaacccagttggctgctcatcttactggtatacatagtgccatcaagatgcttaatagcagaatcagagtgctttaccaaaatcttgctgcaatgcagaaaggtgataaatcttgtgacaactcagttctgagacaagtatctagcctgctaagaagattgcctgccatggaatcagagagatttcaagataatttcctggatggagtacaacgacaaattactaatt

SEQ ID NO: 6696 - DNA, 437 bp, Arabidopsis thaliana
  unsure at all n locations
  Clone ID: LIB24-124-Q1-E1-A6
acgcgtccgcactttgatcccaagcaccttgtgggcacaagtcaacactctcttcgtcaaacaagggaccacgctggaccgaaaaattggatccaacttccagatccccgcggcttcattgggaagctttgttacgctctccatgcttctctctgtgcccatgtacgaccaatcctttgttcccttcatgcgcaagaaaaccggaaaccctagagggattactttactccaaagactaggggtagggtttgcgatacaaattgttgcaatcgcgattgcttcggctgtggaggtcaagaggatgcgcgtgataaaggaatttcacataactagtccgacacaagttgtgcctatgagcattttcnggttgctccctcaagtactcctcntcnaggcattggggatgtgtttaacgcaattggnttgcttgagttttt

SEQ ID NO: 6697 - DNA, 414 bp, Arabidopsis thaliana
  unsure at all n locations
  Clone ID: LIB24-124-Q1-E1-B1
tgatagtaaagttgagaaaaaattggnagaatctgaaactcaagaggagatagtgaagaaccataagtgtaactcgggttctaaagataacagtctcatttctgagcaaaagcaggaggagaacgataaagagtgtcctgcaagcatggcaaagacttttgtggttcaagagatgtatgatgcaaaaatggttaatgttgtcgaaggattgaagctatacgacaaaatgcttgacgcaaacgaagtttctcaactcgtttctcttgtaaccaatctgagacttgctggaagaagaggtcaacttcaaagtgaggcatatgtgggttataaacggccaaatagaggacatggacgtgagatgatccaactcggtcttcctatangctgatacgccgcctgatgatnatagtatca

SEQ ID NO: 6698 - DNA, 481 bp, Arabidopsis thaliana
  unsure at all n locations
  Clone ID: LIB24-124-Q1-E1-B7
ttgcccctgccggtaccaagtccnanaattcccgggtcgacccacgcgtccggagaagaagaaagtggggaatgtgagaaaggttagtgttgaaggaagtaatagttatggtaatgggagagtttctcaaagagtaaagaaacctgaggggtttggtaggcgaaaggagattaaggaagatgtgaagttaaatgaaagatatgattgtgaacattgtgggaggagaaagaaaagttctgagttggagagtgaatctcggcgtggttctaaattggttactggtgagtatattggaaaaagttataggggggatgaagaaagagaagttcggccaagaaggagaaagagttcgagttgttcatcgtattattcccttgcttcttcaggggagtttgagagtgatactgaagatcaggaggaggatgtagagatttatcgcgaaaacgtgagaagttcagaagaagaangttgttgatcagtc

SEQ ID NO: 6699 - DNA, 494 bp, Arabidopsis thaliana
  unsure at all n locations
  Clone ID: LIB24-124-Q1-E1-C4
gtttacgcttgcccgtgccgggtccnaaaattancgggtcnacccacgccgtcggtatcttcttccccttgactttggaagcctgctattccccctgtagnaacaataagcatggaagnanggaagctccaggacacgttttccangcgacaaggattaaagaagattatgcaaactgatgaggaagttggcaaaatagcaatggcagtccctcttcttgtttctaaagctttggagctgtttttacaagacttgtgtaatcacacgtatgatgtaactctaagccgaggtgctaaaactgtcaacgcctttcatttgaagcagtgtgtgcaagcgactaatgtctttgattttctaagagacactgtcgctaaagttcctgatttgggtggctcagacactgaagaccaatcagctaccanaagaaggaaagttgttgatggaagtagttgcaacgatgaagatatgataaaagaccactcaaatgcatgagg

SEQ ID NO: 6700 - DNA, 486 bp, Arabidopsis thaliana
  unsure at all n locations
  Clone ID: LIB24-124-Q1-E1-C7
actgtttacncctgcccggtaccnagtccanaaattcccgggtcgacccacgcgtccggtttttcagcttcaaaccctccttgcactctccgcttccctccgttacctttacttctctattgcttagctcgaaaaatggcatcttcagccgcccaaatccacgttctcggcggaattggattcgcttcttcttcttcttccaatagaaatctcaatggtaaaggcggtacctttatgccgagaagtgccttcttcggtacaagaaccggtcctttctccacacccacttctgcttttctcanaatgggcaccagaantggcggcggcgcttctagatacgcggttggtccggttcgtgtggttaacgangaaggttgttggaattgatttgggtacgactaactctgcagtagcngctatggaaggangtaagcctacgattgtgactaacgctgaaggtcagaggacaacgcccttctgttgtgg

SEQ ID NO: 6701 - DNA, 481 bp, Arabidopsis thaliana
  unsure at all n locations
  Clone ID: LIB24-124-Q1-E1-D3
ctgttacgcttgccgtgccggtccgaaaattaacgggtcgacncacgcgtccgtgatangtttcagacgacacccattattgtaaatctgctgctggagtctttttttgtctgaatcttcttcttgttgagacactgtttcttcttggtctgtgatttttgttttgttctcattaggacgttctttattccggttcagatttactggatcgtcattttctctttgaaattgtatttttttgttccttttctggtatgttgtgaaagctatgagattgctgtaagaatccaagactgaccaacatgtttcccctgtgctcggccacaagctgccgttaccattctcagattttatttcctggcaattggcgaggctgttcttccttcaggagagagttgattcacagatacagttcaggtgacaatgccttctttgggtatctctaatggaacacgcctgcagaagagtttcgtacctcaag

SEQ ID NO: 6702 - DNA, 431 bp, Arabidopsis thaliana
  unsure at all n locations
  Clone ID: LIB24-124-Q1-E1-D4
ggtttgantcaagaagcaaatacttgtttggtaaagtctctatccagattaagcttgttgagggtgattcagcangaacagtcactgctttctacatgtcttcagatggtccgaaccacaangaattcgattttgagttctnagggaacactaccggcgagccntacagantccatgaccaatatctacgctgaacggagttggaaacanagaacaaagactcaaccnttggttcgatgccaccactgagtttcacacttactcaatcctctggagtaaacgcagtgttgtnttcatggtagactaaacaccgattcnagttcangaanaatcttgaangagaaaggtatcccatttgctnaagatcaagcaatgggtgttnacaagcnccanttggaangcaggttgattgggctacacaaggaggtctt

SEQ ID NO: 6703 - DNA, 485 bp, Arabidopsis thaliana
  unsure at all n locations
  Clone ID: LIB24-124-Q1-E1-E1
gtttgccggggnccggtccgaaaattaangggtcgacgcacgcgtccgctcttcataaaccccnnnnnnnnnnnnnnnnnnnnnnnnnnnnnnnnnnnnnnnnnnnnnnnnnnnnnnntaactatggntcttctctttctctttttctctcttctcctctcttacctctttttcaagatctggaaactcatagactcaaagcaagacaaagattgctacattttagactaccaatgtcataaaccaaccgacgatcgaatggtgagcactcaattcagtggngagatcatttatcgaaaccaaaaccttggtttaaccgaatacaagttccttctcaaagccatagtaagctcagggattggngaacaaacctacgctccaaganttgtctttgaaggtcgagaagagcgtccttcgttacaagatggggatctccgagatggaangagttctacgtggacaagcatcggaaaactcccnggaga

SEQ ID NO: 6704 - DNA, 455 bp, Arabidopsis thaliana
  unsure at all n locations
  Clone ID: LIB24-124-Q1-E1-E2
accttgccgtgccggtccgaaataacgggtcgacncacgcgtccgtgtacgtcgaggattacgaagctttccagcctaatcgtgcctatgtctttggttatgaaccacattcggtgctaccgattggagttgttgctctttgtgatctcacagggtttatgccnattcctaacattaaagttcttgcaagtagtgctatattctacactccctttctaaggcatatatggacatggttagggctcaccgctgcttctaggaanaatttcacttcccttttggattctggctacagttgtgttcttgtacctggtgggtgtgcaggagacttttcanatgcancatgatgctgagaatgtcttcctttcaagganaanangatttgtgcgcananccatgggaacagggggagccctctgggttccagtaatctgctttggtcaagggnacgcctg

SEQ ID NO: 6705 - DNA, 468 bp, Arabidopsis thaliana
  unsure at all n locations
  Clone ID: LIB24-124-Q1-E1-E4
acgttgcccgtgccggtccnaaattaacgggtcnacccacgcgtccgggcattgggacagatataaggagtcttttcactgctcctagtgcgtctgcattgcagaaagcccttggatttggagatgtctctcttttgaatcccattcttgtgcactgcaggacttctgcaaagcccttttatgcgattatccacagggttacagggagcatcatcatcgactttgaacccgtgaagccttatgaagtccccatgacagctgctggtgccttacaatcatacaagctcgctgccaaagcaatcactaggctgcaatctttacccagcggggagtatggaaaggctttgtgatanaatggttcaagacgtttttgaacnccacngggtatgacatggtgatggcttataagtttcatgaagatgatcacngtgaggttgtcccccnangttacaaaaacctggggctgna

SEQ ID NO: 6706 - DNA, 439 bp, Arabidopsis thaliana
  unsure at all n locations
  Clone ID: LIB24-123-Q1-E2-H5
acgcgtccggtcaaaaatggcgaaccgtcgaattctctgtatctcttgaatttcccagagattaatttgaatcttcatcatcttcttctctctggattcgccgagaaaccttcttcctctgcttctctcgtcgatattctcttccttcccgcttaagccttcggctagatatcaatggaaaggtcgtatagcaatgcaagaatggccaacagtttcacgttctggaatgattgtgttgaagccagaggatttagaanaaatgtggatggatcctgcggtcagtgctgaatggattgatgttggagagactaaaggccagaaggttcacctctcaanggatcctgatggtcagccttatcttacacagaccgagatgagggctgtttctgatataactgtccggaggcattttggattccatcttggattcggnaatgat

SEQ ID NO: 6707 - DNA, 435 bp, Arabidopsis thaliana
  unsure at all n locations
  Clone ID: LIB24-123-Q1-E2-C10
cattcatcttcttttgagtattacatccaacgaaacgtctctttcnttctctctgataggcaacaatggcgcagaggaagatgattgtgtttcccaccaagaatgaattgtccgaagcaatggctgagtacactgccaatctctccgccaagttcatcanngagaaaggccttttcaccgttgttctctccggcggtgacctaatcgattggctctgcaagttggtgcaacctccttatattgattcaatcgaatggccanaatggcacgtcttttgggtcgatgagagggtttgtgcatgggaagatccatacagtaactacaaactcgccatggagggttttctctcnaangttccgattccggataagaacatctaatcaatcgacaangcacttgggcggctgatggtaaacgccgagcaantgcggcgaa

SEQ ID NO: 6708 - DNA, 470 bp, Arabidopsis thaliana
  unsure at all n locations
  Clone ID: LIB24-123-Q1-E2-C12
cgngtccggcctcccgggtcgacnaacgcgtccggggaaaagaaatgtgggcgattacgagagtgataagccggcgagttcatggaacaagttttattactattccaaaactctcaggtttctctattgtatctcggggnacaggttgangtagagtatgcaagatggaancaagttcaatttttcatcagagtttctgagaattcatagtccagctgctgatggnaaagtcagatcaatcggtggtgaaaaggtgatatctggaaggcggtatgtaggaatcatgtctncanaacccggttggaanctacggggtaangttagtgtttgatgacttgcatanaacaggggatatatccatgggattaggttctacgagcttgggagcaataanttttgggtcttannnaggaanctatantcnaggactccttcaannngcagtantcctcaagcccgttgaaccctcc

SEQ ID NO: 6709 - DNA, 464 bp, Arabidopsis thaliana
  unsure at all n locations
  Clone ID: LIB24-123-Q1-E2-C4
acgcgtccgcttcgttgcttagtaagaaagtagaaagtttctgagaatctcgggcacgaattgaatcagataattcgctagaatcggtttaacgctttaaaggcaatcgctttgcattctcatgaattctcttatactcggtgctgctagaaggttcgtggggttgcatttgagagtttcagtgaaccttttgcaaaatgaatctttctcttcgtattcgttctcttctgctagtgctgctgatgtgagccctaaaggggagacctttaaatcctcgtccttccttgattcactgcgtttagctacaaaactcactgacaaggggaaattctgattccgttctggatctctcaagaagttatgggttcactgattctcaagatctccaagcatcaatcaggaagtgattccaaggagtgcntanaagacnnttgatgcgaacaatccccttgggttaaaagcct

SEQ ID NO: 6710 - DNA, 420 bp, Arabidopsis thaliana
  unsure at all n locations
  Clone ID: LIB24-123-Q1-E2-C5
acgcgtccggacttgtggtagttaccgtcaaggaagctgtcacgcccatcactcctatgacgctttcaacaaactttgtgttgggcagaactggtgttctgtaactgtagcaccggagatgtttggtggagatccgtgtccaaatgtgatgaagaaactcgcggtggaagccgtttgtgcttaaatgaaagcagacgcancagcaatcaaaagactgtaaaggtggttacttacgcattcttacaggtttctgatggtattagtatgttttatgaagacaacagaagaagttggtatttttctagctccttattttatcacggtggaaagttgtacaangggacgcancacgccgttcancaatttgcaagagttgtgatttatntgttaataanctttgggaaggggtttgttnttgta

SEQ ID NO: 6711 - DNA, 458 bp, Arabidopsis thaliana
  Clone ID: LIB24-123-Q1-E2-D4
acgcgtccgattctttggtaactttcgcttactctctccccattctctctcgaagagagcctcgccggagtttgtttttcttcttgtttcgcggccaaaaccgcctttgtgtaaagctaccttgttattttcctccgttaaccatctggtataggttgctgctggactctttagatggcagactctcggaatggtaatgcccgagcccctcctagtggagtgcctccaaaagctgggaatacttattccatagatgttaaaaactttatctcacgtgcaagagcattgtatgaacactgggaagaagcacagtgcagacttatggggatctgccgacgctcttgcattgcaacccctcctggcttctgatgatctgcgttacctgaaaacctcagcgttgaataatttgggctccctggggtaatgaagttccaagatacaaattaagggttttaaca

SEQ ID NO: 6712 - DNA, 485 bp, Arabidopsis thaliana
  unsure at all n locations
  Clone ID: LIB24-123-Q1-E2-D5
gttacgcctggcccgtaccgagtccggaaattcccgggtcgacccacgcgtccggtacaatactgcaactgtcggagtggtaggagatggattcatggctcgtgatctaacgttccagaacacggcgggaccagacgctcaccaagcggtggcgtttagatccgacagcgatttttctctgatcgagaattgcgagttccttgggaaccaagacactctctatgcccatggtcttcgtcagttctacaaaaactgtcgtatccaaggaaatgttgactttatctttgggaattcagctgctgtcttccaagactgtgaaatcctaatcgcaccgcgtcaaattaaccctgaaaanggcgagaaaaacgcagtcactgcccaaggaaggattgacncgtcncangtccacggggtttccgtgttccttgaacngtttgattaacggaacangangagtacatgangcctgtttaaagctancccta

SEQ ID NO: 6713 - DNA, 480 bp, Arabidopsis thaliana
  unsure at all n locations
  Clone ID: LIB24-123-Q1-E2-E2
tccggaattcccaaggtcgacccacgcgtccgcatttcgatttttttccggtgaaaagggaggagaaacatggttgtacgtatcagactgtcgagatttggatgcaaaaatcggccattttttagggttatggctgctgatagcagatctccaagagacgggaagcatcttgaggtcttaggttacttcaatcctttgccaggccaggacggtggtaagaggatgggtctcaagttcgatcgaattaagtactggttatctgttggtgctcagccatcagacccggttcaacgtctcctattcagatccggtttacttcctcctcctccaatggtggctatgggacgtaangggtggagcacgaagacacacgcccagttgatccgatgactggtccgctatgtggatgcaagagaataaagcagttaatgccaaatgataaccaagncctaagggaagaaggatacaagaagccaaaga

SEQ ID NO: 6714 - DNA, 427 bp, Arabidopsis thaliana
  unsure at all n locations
  Clone ID: LIB24-123-Q1-E2-E4
gggcgtcactcgtcacatgagaggaacaacaagaaaagtcaaaacgttgaagctttctcgaataacgcnnnnnnnnnnnnnnnnnnnnnnnnnnnnnnnnnnnnnnnnnnnnnnnnnnnnnnnnnnnnnnnnnnnnnnnnnnnngaccagattcaaaattgcgtagcgtactaattcaatatagagagaagttagatcaaaagaagaacacgaaactctgactgtgtctctctttctcttcgtgtgtttctatatttatatataanaagacaagatctctggtctggaattagaagaatcttatttggggttttttcttaggattaagctctaatggcangatcangtacagngagcggacttnagnaggaganntctacttgggcagttngctggttgtttgctttgtcctactctgtatttcnga

SEQ ID NO: 6715 - DNA, 458 bp, Arabidopsis thaliana
  unsure at all n locations
  Clone ID: LIB24-123-Q1-E2-E6
acgcgtccgctcgtctcctaatctgtacggttcttatttcgaaagggtaaaaaccaaaagcgacgcaaagggcaaaatcggaaaaagtgttttatttatggccgccgttagtagttcgtcggagaccggagactgcggcgttacgggaaagagagatgagatcatgttgttcggagttagagtcgtggttgatccgatgagaaagtgtgtgagtttgaacaatctctctgattatgaaaagtcttctccggaggatgagatccctaagatagtcaccgccggagctggagatggtgaagataanaacgaaacggatgcgacngtgattgtcgctgacggttacgcctccgccaatgacgctgtccaagatttccgtcntcttccggcggggangaaacgangggttccatgggacngagaancgaancanaaagaggntcgtggantggggttgccaa

SEQ ID NO: 6716 - DNA, 455 bp, Arabidopsis thaliana
  unsure at all n locations
  Clone ID: LIB24-123-Q1-E2-F2
acgcgtccgggattattgtgtactagagggttcttttagcttctaggaacatgtctggtggaactccagttggtggtggtgggtacattaggcaaagacatagccaaggttatgcttctggtggtgatgatcttgaggatgatgcttgctctaggccacagcctttttctttaagagaatcctagaagtaaaacctgggttgagattttggagaatgtgctttggattgcatctgctgtcttcattgtctattttggagacaggcactctaatatgatacatattctcttaccgtgatgctcgggatcaaaaggatgcctttgtatttcgggatgttgggaatagctgtgaacattataatcataatctacganagcatgttatcttgggggcaaggagaangnttgatgagaaatgggaactgntggagtacccctgtgggcctanatggggct

SEQ ID NO: 6717 - DNA, 506 bp, Arabidopsis thaliana
  unsure at all n locations
  Clone ID: LIB24-123-Q1-E2-F4
gttacgccttgccgtagncgtccggaaattccanggtcgacccacgcgtccgcggacgcgtgggcggacgcgtgggaatgcatttccctccattctcttacgctttctctcactctcgtcaatggcgaccaccgcatcttcatctctcccccgtaattactccttcacaactccgcgaccttcatcattcatccgaggaccgccattagctagaacgctgcctctctatctccgccgtaaccgtcgagtagctctcacttaccgattggaccagaattcgaagcagagaagtggtggaaacgtaagatgcgaggcgacggaggtatcttcttcttcttctgtatccacacctggaangaattgggtgccggtggtgcccgttatcggcgcttccgaaaggtgaacggcgagtggttaatnaaagacgaatgagacgatattgttggcctttggtannaagnaangatgttttttgcaattngngaatcgtttcacaagcctgaang

SEQ ID NO: 6718 - DNA, 410 bp, Arabidopsis thaliana
  unsure at all n locations
  Clone ID: LIB24-123-Q1-E2-F5
tttgggcctgaatttgcggttcttgatgttgatggagaggaaccccatacaggcatcattgcgtctatctctaatgagaaccaggcatttatttcctgtgtcgacgatgagaggcttgagtttgaagatggtgacctagttgttttctcagaagttgagggtatgacagaattgaatgatgggaaaccaaggaagataaaaagtacacggccatattcattcacccttgatgacgacactactaactatggaacatatgtgaanggtggtattgtcactcaagtgaaacagccaaagttactgaatttcaagccattgagggaagcgcttaangatccangggattttcnatttagtgatttctctaantttgatcgggccncnactccttcacttagcattccaggcaa

SEQ ID NO: 6719 - DNA, 500 bp, Arabidopsis thaliana
  unsure at all n locations
  Clone ID: LIB24-123-Q1-E2-G7
actgttaccctggcccgtaccgntccgaaaattcccgggtcgacccacgcgtccggcncgaaacagagtaaggctcactttgttttagctttctcctctacttcgataatgccgtttgctccttccttgttgtcatcgtcttcctcagtctctcaatttcttcccagattccccaacgcgactagattcaatgtaactccacggagcagagccgccaccgtcgtcgcggcatccgtcaccgacctagccggggtcgacagtacaacaatcgccgtactcggtggaggatccgtagcagcactcgcggcgatggtttccttaacggatccgganaggaggcggaaattgcaggcggaggaagttggcggaggcgataaggaggttgtganggagtatttcaatagcacggggttccaagaggtggaggaagatctacggtnaagaccgatgaaagtgaatccgagtacagaagggatattccactcggtcatgctaangac

SEQ ID NO: 6720 - DNA, 454 bp, Arabidopsis thaliana
  unsure at all n locations
  Clone ID: LIB24-123-Q1-E2-C1
acgcgtccggtttcgagaatggcctaatgtcctctcactcttgggtggtctgattgtgatcaaaacactgattataaccgcaatcggtccccgagttggcctcacaatacaagaaagcgtaagagttggctttcttctttcccagggaggagaatttgcatttgttgtgttctctctagccaacaggctaggagtgcttccaaatgagctgaacaaactgctcattatcgtagttgttttgtctatggcattaacaccttatcttaaccaacttggaaggaaaagccgccgattttcttgatgagagacttgatcccgggagagaaaatacgtgaagatgtnaacttccaatgttaagtgaatcaattgtnaacattggntttggacaaatggggtcanggttctgggccaaatttttgtcaacgcccaattgggtctcaagataagtgnttct

SEQ ID NO: 6721 - DNA, 486 bp, Arabidopsis thaliana
  unsure at all n locations
  Clone ID: LIB24-123-Q1-E1-F2
ctgttacgcctgcnggtaccggcccgaaaattcccgangtcgacccacgcgtccgggattattgtgtactaagagggttcttttagcttctaggaacatgtctggtggaactccagttggtggtggtgggtacattaggcaaagacatagccaaggttatgcttctggtggtgatgatcttgaggatgatgcttgctctaggccacagcctttttctttagagaatcctagaagtaaaacctgggttgagattttggagaatgtgctttggattgcatctgctgtcttcattgtctattttggagacaggcactctaatatgatacatattctcttacgtgatgctcggatcaaaaggatgcctttgtatttcgggatgttgggaatagctgtgaacattataatcataatctacgaaagcatgttatcttggagcatgagaaggtttgatgagaaatggggaactgtggaagtatccctgtggnc

SEQ ID NO: 6722 - DNA, 433 bp, Arabidopsis thaliana
  Clone ID: LIB24-123-Q1-E1-F5
acgcgtccggattttgggcctgaatttgcggttcttgatgttgatggagaggaaccccatacaggcatcattgcgtctatctctaatgagaaccaggcatttatttcctgtgtcgacgatgagaggcttgagtttgaagatggtgacctagttgttttctcagaagttgagggtatgacagaattgaatgatgggaaaccaaggaagataaaaagtacacggccatattcattcacccttgatgaggacactactaactatggaacatatgtgaagggtggtattgtcactcaagtgaaacagccaaagttactgaatttcaagccattgagggaagcgcttaaggatccaggggattttctatttagtgatttctctaagtttgatcggcctccactccttcacttaacattccaagcacttgatcatttta

SEQ ID NO: 6723 - DNA, 487 bp, Arabidopsis thaliana
  unsure at all n locations
  Clone ID: LIB24-123-Q1-E1-G1
actgttaccctgncgtaccgccccaaaattcccangtcnacccacgcgtccggtgaagtatcacgactttgatttatttctgtatatctaagatgcaggcggtatcagttgatgaaaccaaaaacacggtggtgctacgggcggagcacaagaatgaagaaggccggaaatctgttgataagttcgaagtgaagacacgtaatccggagacgatcaagagcgttgagcggaagcttatggagaaaggtgttcaacggatggatcgtcatccttccgatgggattcctctcaggcgaccaccatcgaagtcaggtcacggcgggaaagtacacgtgggaaggacctgatcggatggaggattacgaagatgcagccggatccaccggcgatggatgaangagattctaattacgacgangaacagggtgaagaagattggtgatgacgtggccgttgaaccttttgaaaggaaaaggtnaaggtgggc

SEQ ID NO: 6724 - DNA, 419 bp, Arabidopsis thaliana
  unsure at all n locations
  Clone ID: LIB24-123-Q1-E1-G7
cgaaacagagtaaggctcactttgttttagctttctcctctacttcgataatgccgtttgctccttccttgttgtcatcgtcttcctcagtctctcaatttcttcccagattccccaacgcgactagattcaatgtaactccacggagcagagccgccaccgtcgtcgcggcatccgtcaccgacctagccggggtcgacagtacaacaatcgccgtactcggtggaggatccgtagcagcactcgcggcgatggtttccttaacggatccggagaggaggcggaaattgcangcggaggaagttggcggaggcgataaggaggttgtgagggagtatttcaatagcacggggttcgagaggtggaggaagatctacggtgagactgatgaagtgaatcgagtacagaaggatattcga

SEQ ID NO: 6725 - DNA, 437 bp, Arabidopsis thaliana
  unsure at all n locations
  Clone ID: LIB24-123-Q1-E1-H1
aaagagncgtaaagctatgttgaagcttgggatgaaaccaatcactggtgttagccgtgtcaccgtcaaaaagagcaagaatatcttgtttgtgatatcaaaacctgatgtgttcaagagtccagcttcagatacatatgtgatctttggtgaggccaagatagaggatttgagctcgcagctgcagagtcaagccgcagagcagttcaaggctcccaacctcagcaacgtgatttcacagggagaaacatcgaagtgctgcaactgcagctgctgttcaagatgatgatgatgaagaggtanacgaagagggagtaganccaaangacatcgaacttgtgatgaccccaagcanggatgtctaaagccaaagggcagttaaaggcgcctcaaacctcgcctaatgggagatatagtctctgcccatcaagggagct

SEQ ID NO: 6726 - DNA, 482 bp, Arabidopsis thaliana
  unsure at all n locations
  Clone ID: LIB24-123-Q1-E1-H3
ctgttaccctgccggtaccggtccnaaattcccgggtcgacccacgcgtccgcncacgcgtccgcccacgcgtccgcaaaaatctacgtgtgaagttagttctattaggagactctggtgttggtaaaagttgtattgtccttcgatttgtacgtggtcagtttgacgctacatctaaggtaactgttggagcctcgttcttgtcccaaactatagcattgcaagactctaccacagtgaagtttgaaatatgggatacagcaggacaggagaggtattctgctcttgcaccactatactaccgtggagctggagttgctgttattgtgtatgatataacaagccctgaatcgttcaagaaagcacagtattgggttaaggaactgcaaaagcatggaagcccagatattgttatggctccggttggtaacaaaagctgatctacatgaaaaaagagaagtacctactgaggatggaatggg

SEQ ID NO: 6727 - DNA, 428 bp, Arabidopsis thaliana
  unsure at all n locations
  Clone ID: LIB24-123-Q1-E1-H5
aaaaatggngaancgtcnaattctcngtatctcttgaatttcccagagattaatttgaatcttcatcatcttcttctctctggattcgccgagaaaccttcttcctctgcttctctcgtcgatattctcttccttcccgcttaagccttcggctagatatcaatggaaaggtcgtatagcaatgcaagaatggccaacagtttcacgttctggaatgattgtgttgagccagaggatttatnaagaaatgtggatggatcctgcggtcagtgctgaatggattgangttgganagactaaangccagaaggttcacctctcaagggatcctgatggtcaagccttatcttacacaagaccganatgaaggctgtttctgatataactgtccggganggaattttgaantccaatccttgggattccgg

SEQ ID NO: 6728 - DNA, 399 bp, Arabidopsis thaliana
  unsure at all n locations
  Clone ID: LIB24-123-Q1-E1-H6
attcttctggagaggacagttttatggagagcaagatgatttcagacgcttctcgtattttagccnanctggactanagttgcttcttcagtccggcaagaaaacccgacatcatacattgtcatgactggcaaacagcttttgttgcgcngctgtattgggatctgtatgctccaaagggattacattctgnangaanatgctttanatgtcanaattttgagtatcaaagtaccgcgtctgcttcanaattgggatcttgcgggcttgatgttaaccagntaaatagaccagacatgaatgcacgatnactccgtctggagatanagtcaatccngttaanggcgctataattttctcaaacattgtaacancccgttgtcccctacttaagcacaa

SEQ ID NO: 6729 - DNA, 407 bp, Arabidopsis thaliana
  unsure at all n locations
  Clone ID: LIB24-123-Q1-E2-A4
ctggaggtttgtacacttacaaatgctggttcttgctctagtgtaacaaggtatgagtctggtggtggtggtactcaaggctatgttagagaaggttacaatcagcctgtgactggttatgttgacaatgatgcggtgattgctcagttttatcaagacgaattgtctagagttgctcgagccgaagcatcggggatcaatagtcttagtcctacttctgttgttgcacaagactggcctcatcctcatcaaggacaggaaaatcaaggggaagccattgatattactcaggaaagtgatattcttcataatcataacggtaacatggaagataagaatgttgcaaggataagatttgaaggagggcaaagttcccatctcgtgatgatgactcaatttggtccngt

SEQ ID NO: 6730 - DNA, 500 bp, Arabidopsis thaliana
  unsure at all n locations
  Clone ID: LIB24-123-Q1-E2-A7
gtgttnccctggcccgtaccgatccgnaaattcccgggtcgacccacgcgtccgctgaatctgagctatctctggatcagcttgggatccgccacgtcacttctgacagccgccggagatgaacctcacgtgaccgttcttcagatcggatcttctgtgtgtaaccgtcgaggaggacnnnnnnnnnnnnnnnnnnnnnnnnnnnnnnnnnnnnnnnnnnnnnnnnnnnnnnnnngaaacactctaatggcgacaatgagcaaagctcaaaggaccaaacccacttctggatctcagcgtcttgttctgttctgtatagttgtgttctcattcctcctcctcttctcttcggtgatctccaccgggcaaattgggattgccttatcanacaaaccctaancgacnatttcggtgtggtctcctcgtggnaaggagagagcantccgtttgtcngagaagtacntgtantngggaaanagnattgaagtggccctggcana

SEQ ID NO: 6731 - DNA, 444 bp, Arabidopsis thaliana
  unsure at all n locations
  Clone ID: LIB24-123-Q1-E2-B12
gncttacgcctgcaaaaaccggtccnganttcccgggtcgaccnacgcgtccgcccacgcgtccgctcaaaccctaaaataaattaaacgagttctacgtaagaaggagagagagaagaatgggtcgccaaaacattgtcgtcgtggttgccctcgtcttcatggccatcattggccttgccgcagctgcctcctctccatctccttcagcgtctccctccaaagctccagctgcctccaaaaccgatcatgtcgaggctccagtcaccgatgaccaaatcggaaccaccgatgacgatgcagctcctactcctggtgacggtgacgttgcagtggctggtcctctaggaagtgactcctcgtacgacaatgcgcctacaggctctgctgattctgccaaaagcggtgcggcagctcttgggcntctctgcggtcgtccgntgg

SEQ ID NO: 6732 - DNA, 496 bp, Arabidopsis thaliana
  unsure at all n locations
  Clone ID: LIB24-123-Q1-E2-B3
acccttgccgtagccgtccggaatccagggtcgacccacgcgtccgcggcgtttcactcgcaagactgactcgaaaacaccatcccagcctctggtatcccgtcgctctgcaaactatcaaccgtctctttggcagcacgaatatctcctctcgctcggtaatacatatgtgaaagaggacaacgtcgagagagttacgttattgaagcaggaagtgagtaaaatgctcaatgaaacggaaggtttactcgaacagctagagctcatcgacactttacaaaggcttggagtttcttaccattttgaacaagaaatcaagaagacactaacgaatgtgcatgttaaaaatgtgcgagcacacaaaaaccggatagatcgaaaccgatggggagatttatacgacgancgcccctttgagttccgactcctaaaggcaacatggtttcagtatcgcacaagatgtttttgaccggnaatatttggagttgatttggat

SEQ ID NO: 6733 - DNA, 498 bp, Arabidopsis thaliana
  unsure at all n locations
  Clone ID: LIB24-123-Q1-E2-B6
ctgttacgcctggccgtaccgagtccgnaaattcccgggtcgacccacgcgtccggttatgggtcgatgtgttgaangaaaacgttggagcatggcttagcaccaaaatcatggacggattacttgtatctaaccgttggaggtacactctccaatgcaggaatcagtggtcaagcttttcaccatggtcctcaaattantaacgtccttgagctcgacgttgtaactgggaaaggagaggtgatgagatgctcagaagaagagaacacaaggctattccatggagttcttggtggattaggtcaatttgggatcatcactcgagcacgaatctctctcgaaccagctccccaaagggttgagatggatacgggtattgtattcgagcttcaaagtgtttacggaggaccaagagtacttaatctcaaatgcatgggcaattaaagtttgattacgtgnaagggttttgtganntgnggacgaaaggacncgtcaaca

SEQ ID NO: 6734 - DNA, 384 bp, Arabidopsis thaliana
  unsure at all n locations
  Clone ID: LIB24-123-Q1-E1-E7
tgcgataatgagagaacggattattacattcgtttcgctgcttcttgtagctttgctttcgtttcccagtgttagctactgtgacgaccaaacgatcctgtatgaatcgtttgacgagccttttgatggtcgctgggtcgtttcagagaaagctgaataccaaggtgtgtggaagcacgagaagagtgaagggcatgatgattatggacttctagtgagtgagaaagctaagaagtacggaatagttaaagagcttgatgttgatgagcctctaaaccttaacgaaggaactgttgttcttcantacgaagctcgtttccaagaanggcttgagtgtggtggtgcttacttaaagtatcttcgtcctcaagaagctggatnggt

SEQ ID NO: 6735 - DNA, 416 bp, Arabidopsis thaliana
  unsure at all n locations
  Clone ID: LIB24-122-Q1-E1-A1
acgcgtccgtgaagctctggagagccaagtgaagaccaaggtgtccatcaaggtgattttcagttcttttaatctcttagtcagcgtaattgggtagaagaaaatatccagttcgtgaattgggtggaagacgattaagagtttctaaactatcttgctctattcggttatcgttaagagtttctgtgagtaatgggttgaagctggatatcaaataatttagtgttaaaaagttcaacttgatagtaagatgtggattcagttatctgcctgataaggttattaagatttgctagcacaggaaatactaacactgtcatggattcaatcaagttcatantttctttggatgtcatatatgaataataggttgcanattcccaatccnagangttaaagtgtcaaccttaaganta

SEQ ID NO: 6736 - DNA, 416 bp, Arabidopsis thaliana
  unsure at all n locations
  Clone ID: LIB24-122-Q1-E1-A10
taagtgatgaacagagaaagactgtcctccatcattcatgtcctggagctggagcctgtggtggcatgtacacagcgaatacaatggcttctgctatcgaagcaatgggaatgtcccttccttacagttcttcaatacctgctgaagacccattgaagttggacgagtgtcgcttagcaggaaaatatcttctagaattgctaaagatggacttaaaaccccgtgacattatcactccaaaatcacttcgtaatgcaatggtttccgtcatggcccttgggggatcgacaaatgcagtattgcatctaattgctattgcaaggtctgttggtttggagttgactcttgacgattttcagaaagttagcgatgcggttccatttctagcagatcntaaacccagtgggaagtatgtt

SEQ ID NO: 6737 - DNA, 410 bp, Arabidopsis thaliana
  unsure at all n locations
  Clone ID: LIB24-122-Q1-E1-A11
tcngggtccacgtccgaagccaacaaaantatatccatagaagcttcatcgaaatggngaatcaagcagctgctgcagcattcttccttttcgctttagccgtcttctccaacttggagctctcagcttcttcacttgtcagtggcaagatctcttgccttgactgccaccgcgatttcgacttctcaggcattaaggtcctccttaaatgcgacggagagaagaaacaaataaccgcggtggcagctgcagacggatctttccggtcagtgcttccaacggctgacaaaaaaggctccataaattgtcntgcaaagctcttgggangccctgangcanctctatgctcacananacaacntgggtctcctgaattggtcaaatcnaaancacgattccaangttttaaa

SEQ ID NO: 6738 - DNA, 410 bp, Arabidopsis thaliana
  unsure at all n locations
  Clone ID: LIB24-122-Q1-E1-A2
acgcgtccgagcaatttcactcttccgagaacaaccctagattccgatgatgaggggtctcgtttccggcgccaagatgctatcatcaaccccatcgtcgatggcgacaagcatcgccactggtagaagaagctacagtctgattccgatggttattgagcactcatcgcgaggagagagagcttacgacatcttctctcgtttgctcaaggagcgtattatctgcatcaacggtcccattaatgacgacacatctcacgtcgtcgtcgctcagcttctttacctcgagtctgagaatccttcgaagccgatccatatgtatctcaattcccctggcggccatgtcaccgccggtcttgcaatttatgatactatgcagtacattcgttctcctattaanacaatttgtt

SEQ ID NO: 6739 - DNA, 405 bp, Arabidopsis thaliana
  unsure at all n locations
  Clone ID: LIB24-122-Q1-E1-A4
agactagattcgatgtgttggtgaagaagatctcgactttgttcaaaattccaatttcgttcgcctcaaagatcattctctcatcttctcgactttgatgcgattgattaaatatggtggatacggttattcccggagatatggcttgtttggatgcagatttgttgcagcttcaggaaatgtcttcctttgttctcaattctaaacctggattcactcagaagctcttcgaccagtggctttctcttcccgaagctcagcgacaggttggatcattgcttaaggatgctgtagctggagctcctatcaatgttactgggaagtgcatcgggttctaattctgccactataccatctatgtttcctgcggggaagcgctcctcctctttcaacaagaantttgtg

SEQ ID NO: 6740 - DNA, 393 bp, Arabidopsis thaliana
  unsure at all n locations
  Clone ID: LIB24-122-Q1-E1-A9
acgcgtccgcccacgcgtccgcggacgcgtgggcggcgtcaacgggcattgaccttgtcgcagattttcctctctagtctccgtcttctattaccagatcgagctttgttcttcgagcttctcatctctttgttcaatctcaaaggtttttgangtatcagcaaagatgggtgacaatcttatggacaaagttaccgcatttggtgagcgcctgaagatcggaggttcggaagtgagcaacaagatcagtgctggtgtgaagctcaaatgagctttaaagtgaanggaacnttttcaaggtccaaacccaactgataaaatagtccgaagatgctactactgagaatctagaaggaacctgactgggatattgaatttgggnaatttgtgata

SEQ ID NO: 6741 - DNA, 394 bp, Arabidopsis thaliana
  unsure at all n locations
  Clone ID: LIB24-122-Q1-E1-B2
cacatcggaaagctacatctttttcgttttttgtggtggcgatttctattctccggctgaaacctaccttcaggattcagcctttctcaggttttcagttggattcagatagcagcttgtacttcttctagataatcggcgacacatatggatgattgggaggccgnggactttcaaccacttccctcaaaagttgaactgaaaagtaactgggatgatgaggatgtggatgagaatganatcaacgactcntgggaggaggaagatgtatctgctccgccacctatagtaaagcctgcttctgagaaggctccaaagaaaccangcagtagaaagctgttgaaaagaaggttaaanctgttgaagctccnaanaggaacatccaggggaagaa

SEQ ID NO: 6742 - DNA, 476 bp, Arabidopsis thaliana
  unsure at all n locations
  Clone ID: LIB24-122-Q1-E1-B3
ngttgccaggcccggtcaaacaaccgggtcgnnccacgcgtccgatggaaatcgtcggcggatggtttagactttagagataacagaagaagacctcatctttagagtccggagcgaaattaatggcggccatagctcgtcttccactaactcattctcttccctccatcttcaatccttcatccttcctctctcagtctctctcttttcctacttatctccatcgctctccctttcgctccttctcctccgtctctccaatcctctgcacctcccatcgcgattcgagatcgccggggagtgattctaatgcgtcgattgttggggatnttctggattatcttaatgaatcctggacacagtttcaacgccactgctgaggcgaaagnagacaagcttttggctgctgggtttgatcccccagtgaaaaacgaaagactgggaatcctgaaacctgggtggggcgttacntcctt

SEQ ID NO: 6743 - DNA, 453 bp, Arabidopsis thaliana
  unsure at all n locations
  Clone ID: LIB24-122-Q1-E1-B4
ggtcanaatatcccgggccgacccacgcgtccaantttctctctctngcttctacgcttcttcttgtggcgtagattgttatagagagggaaaccaaaanagggaatctcaaaagctcgagttcacagatttgacccgagtctttaatccaatctgctggttcgttttccacattcaaactcgactcttgaatatcaaatcagaagtctttgctatggctgctaccgctgctgcttctgttgtccgttacgcacctgaggatcatactcttcccaagccctggaaaggccttatcgatgatagaactggttacttgtacttttggaatcctgagaccaatgttactcangtacgagaaaccaaccccctctctacctcctaagttttctcccgccgtttctgttanctcttccgttcangttcaanaaactgaagcctaagntcctcccaagg

SEQ ID NO: 6744 - DNA, 405 bp, Arabidopsis thaliana
  unsure at all n locations
  Clone ID: LIB24-122-Q1-E1-B5
gggcgcagaagttgatctcaacaagtgtgagccttggcaacttcccgggagagctaagatgggagagaaagaatggtacttctttagcctccgtgaccggaagtatccgacgggactgagaactaacagagcaactgaggctggttactggaaagctaccggaaaagacagagagatctttagttcaaagacttgtgcacttgttgggatgaagaagactcttgtcttttacaaaggaagagctccgaaaggagagaagagtaattgggttatgcatgaatatcgtcttgaaggcaaattctcttaccatttcatctcaagaagctccaaggatgaatgggtgatctctagggttttccaagaaaaccactttagctagcaccgggagccgtctccgaangaaga

SEQ ID NO: 6745 - DNA, 465 bp, Arabidopsis thaliana
  unsure at all n locations
  Clone ID: LIB24-122-Q1-E1-C10
tacttgccnggccggtccaaaataacgggtcganccncgcgtccgaagctncacttctcagaagaaagtaagatctgcgaatctctctcactctcacaaatggcaacgcttttaggtttctctcagactaagtttcaccattgcggcgtctggatttctacgccgccgtgctcatcttcntccacggtagtctcaatggtgggcttgaatcggantgattcgaaaaagctccgttcagatttcctcggccagattggttacgaagatcggagacaagtaaganacagttactgtagaagctcattagctgtgaaaatgtcgtgggacggtcctcttgcttccgtcaagttgatcatccaaggaaaaaacctcgagttatcagagncanntaancagcatgttgaagagaacctngggcaaatctgttnagaaagacaggtnagtntgtgagagaacgttngaagt

SEQ ID NO: 6746 - DNA, 415 bp, Arabidopsis thaliana
  unsure at all n locations
  Clone ID: LIB24-122-Q1-E1-C12
aatgttagtgttgcagagccaccaatgtctcttctctcttcctttaccaggatccgtcccggtataatccgattatccgccgtaaaagaaatcgccgatgtggcggaggtggaagaagatggtccaattgagcttcctacgtcgtccacgtctccgttttcgtctactaactccattttcgccacttccgatgatcctactcctctccaattggccaccagtgtgcttcttaccggtgccatcactgtcttcctcatccgctccgttcgacggcgcgctaaacgcgccaaagagctgacatttagatctactggagctaagaaatcgttgaaagaagaagcaatggataatctaaaagcgttaagttcaactccgatagaaggtggtaattcaactccatcggcggntcaagcgt

SEQ ID NO: 6747 - DNA, 421 bp, Arabidopsis thaliana
  unsure at all n locations
  Clone ID: LIB24-122-Q1-E1-C3
angcgtccgcccacgcgtccgcccacgcgtccggaaaaaatcactaaacatgaagaatctggtcatatttgccttcttgttcttaagcatcactactgtaatcaatggtggaataacaagtaaatttgtccgccaagctttaccatcgatcgaaatgtctctcgacactttcccttctcctggtggctacaacactcctgaacaggttcatctgactcaaggagaccatgatggacgtggcatgattgtctcgtgggtcacaccgttgaatctcgctggttctaacgttgttacctactggatcgctactaatggtagtgacgtaaagccagcgaaaaanagagctcatgcctccactaaatcttacagattctatgactatagttcaagatttctccatcacgccacaattaaagggacc

SEQ ID NO: 6748 - DNA, 422 bp, Arabidopsis thaliana
  unsure at all n locations
  Clone ID: LIB24-122-Q1-E1-C7
acgcgtccgcccacgcgtccggtccacaatcatcagcttttccaagtcctgcaccttcgtaccacggaagtccagtctcatcatccttcccgagtccatctcgctatgacggaaacccttcttcataccttcttcttccgttcctacacaacatcgcttcttcgattcctgctaaccttccacctcttagaatatccaacagtgcgcctgtgactcctccgttgtcatctcctacttctcgtggttcgaagcggaaacttacttcagaagcaattaccaaatggcgggtctttacacgttttgagacatccgcttttcgctanctctgctccatctagtcnnacncgtcgtgctggtcaccaaacgccgaggtacaatnccnggantggtgatgaagtccnagggaggattngattggaagg

SEQ ID NO: 6749 - DNA, 414 bp, Arabidopsis thaliana
  unsure at all n locations
  Clone ID: LIB24-121-Q1-E1-H9
acgcgtccgcttgtatggtaacatcatggntcttcttacaccgatggggacaaagaaacaagagtggtccaaagacttggcctttggttggagcagcgatcgaacagttaactaattttgatcgaatgcatgattggctcgttgagtatctttataactcaagaacagtagtggttccaatgccattcactacttatacatacatagctgatcccatcaacgttgaatatgtcctgaaaacaaacttctccanttaccccaagggagagacttatcattcttatatggaagtattgttgggagatgggattttcaattctgatgganagctttggaggaaacagagaaaaaccgcgagtttcgaatttgcttccaagaatcttagagattttaagtactgtantgtttaaaaga

SEQ ID NO: 6750 - DNA, 438 bp, Arabidopsis thaliana
  unsure at all n locations
  Clone ID: LIB24-121-Q1-E1-F8
acgcgtccggaagctagcaaaacaacactaaacctgaaacaaacgtaaatccgccgcaacaacccagttttttccgacggcgtacaagcttcctccgccgtaacgccgtcgtttaataccaagaagcttgattaggtttccgtagtgtgtgatttttttaaggttctgaacactgatgtcaaacccattgaaagagtcaagagaggatattgcaaattctactcctcacatgagggataatgagtatgttcggctagttgtggctcatgaagcctccccagctgaaaccgtgttgtctctatcgcaatcagaggtgcagagtaagaaatttatgtggtggttaaaagctttggggaatatgtgcagttgctctcttgcttacgcntgttttcggaaaatgggggagttccgtttgtgtttcaaaaggttcttattcca

SEQ ID NO: 6751 - DNA, 413 bp, Arabidopsis thaliana
  Clone ID: LIB24-121-Q1-E1-F9
atgcatagaagaaggtcgagccagtggcatcatgtgtgcttataaccgagtcaacggcattccttcttgcgctgacccgaatcttttgactcgaaccgctcgtggtcaatgggctttccgcggatacattacttcagattgtgacgcagtctcaatcatctacgatgctcaaggctacgctaaaagccctgaagacgctgttgctgatgtcctcaaagctggcatggacgtaaactgtggatcatacttacaaaaacacaccaaatcagctcttcaacagaagaaagtgtctgaaacagacattgacagagctctactcaatcttttctctgttaggattcgtctcggtctctttaacggcgatccaaccaaattaccttacggaaacattaagtcctaacgaagtttgttca

SEQ ID NO: 6752 - DNA, 411 bp, Arabidopsis thaliana
  Clone ID: LIB24-121-Q1-E1-G10
cgagactgtagagtgaagtttgatttatttagagagataagttaaaaaaaaaatggtcggtatggatttgttcaaatgtgtaatgatgataatggtgttggttgtctcttgtggtgaagctgtttctggagctaagttcgatgagctttatcggtcaagctgggctatggatcattgtgtcaacgaaggcgaagtcacaaaactcaagcttgacaattactctggagctgggtttgaatcaagaagcaaatacttgtttggtaaagtctctatccagattaagcttgttgagggtgattcagcaggaacagtcactgctttctacatgtcttcagatggtccgaaccacaacgaattcgattttgagttcttagggaacactaccggcgagccttacatagtccaaaccaa

SEQ ID NO: 6753 - DNA, 396 bp, Arabidopsis thaliana
  unsure at all n locations
  Clone ID: LIB24-121-Q1-E1-G11
ttggnaaagaaagaaagagagagaacaaagcttcttcatcaatggagaagcatggatgtgagatcgaagctttagatattgattanancatctttgtaaggaagattaatgttaatccctttggaatctttaggcggaaaccgcggccggaagctgaccagccggtaaagacagaggaanagtcattgaagctagaggatgaaaccggtaacaaagtcaagcatgtnctaaaaggagtgacttgcagagccaaaccatgggagattcttgctattgttggcccaagtggtgcagggaagtcgtctttgcttgaaattctagctgctagactcatccctcaaaccgggtcggtttatgtcaacaagagaccggtggatanagccaatttcaagaaaa

SEQ ID NO: 6754 - DNA, 505 bp, Arabidopsis thaliana
  unsure at all n locations
  Clone ID: LIB24-121-Q1-E1-G3
ntgttacgcctgccgtacgcntccgaaaattccanggtcgacccacgcgtccgaaacaagttccgggtgttttgaaagaaccccgacaatggcgtggaacgtgttcaagttctgcacagcacttcgcgccttgggttcgatcatgatcttaattgttatcgggatcatcggattcacatactacgccgttgtcgtcgttaattacggacctgctctactgatcggtggtgtcgattcattactatctgttctcgtcttagcgttcttccactttctgcttataatgctactgtggagttatttctctgttgttgtgacggaccctggtggtgttccaacgggttggaggccagaattagacatagagaaaaccaagggaaaccaagctttgattgggagaaaccttcggttggagaatcccccgtcctcaatgggtgttaagaataattggtagaaaagtgcaatcaatattaaancggcctcgttcccaacaaattggtcaagt

SEQ ID NO: 6755 - DNA, 448 bp, Arabidopsis thaliana
  unsure at all n locations
  Clone ID: LIB24-121-Q1-E1-G4
ccgnaagagacaaaagaaaannacgggaatattccggcgaagattgagactctcaatatccaatggagaantattcccggcggtctattctcctttccacggtggtcgccgccgtgttattctctttaattccggtttcaatctctattcccttcatactctttcacggaattggagataaatgttctggtggagttagtaacttcacgcaactcctaaccaacctctctggctctcctggctattgcttagaaataggaaatggagaaaaggactcatggttcatgccactaanaaaagcanacaagtgtagcgtgtgagaaaagtgaaagcgatgaaaagtgttaaagtcaaggggtacaacattgttgcaanagtccccaaggnaacttaagtttgctaagaggactaatcnaattctggcgaaaatggctcctcccggntaaaa

SEQ ID NO: 6756 - DNA, 455 bp, Arabidopsis thaliana
  unsure at all n locations
  Clone ID: LIB24-121-Q1-E1-G5
acgcgtccgnaacaactctctcctgtaaacgaaacaaagaaatggctggacaaaagcaagagcttcccgtctccggcgaacctttagccgtcgagagtccnnnnnnnnnnnnnnnnnnnnnnnnnnnnnnnnnnnnnnnnnnnnnnnnnnnnnnnnnnnnnnnnnnnnnngtgcctcaagaggtcactaatggtgtannnnnnnnnnnnnnnnnnnnnnnnnnnnnnnnnnnnnnnnnnnnnnnnnnnnnnnnnnnnnnnnnnnnnnnnnnnnncgatgtcccggagaagaagcttgaagctgaggatttagganaaaggagagagtgaacaacaagaagggttgttgtgactggggaaangtttggaagaagcanagtacgcaagcttttgaaagacttttgcctgaatccaattttgccggagaatgttttagattgttgtaagactttcgag

SEQ ID NO: 6757 - DNA, 438 bp, Arabidopsis thaliana
  unsure at all n locations
  Clone ID: LIB24-121-Q1-E1-G6
acgcgtccgnncaattaaatcttcaaatcgaaaagtttccgaagaaaaattcaggttcctttagaaaatgtcaggtcgtggaaagggaggcaaaggtttgggcaaaggtggagccaaacgtcataggaaggttctgagagacaacatccaaggaatcactaaaccggcgattcggagattggctcgtagaggtggtgttaaacgtattagtggtttgatctacgaggagacacgtggcgttctcaagatctttttggaaaatgttatccgtgacgccgttacttacactgagcacgctcggaggaagacggtgactgctatggatgttgtttatgctcttaagagacaaggaagaactctctatggattcggtggttgaggattttaagtgttttaagagtgttgtctacgatttgctttagtgatttcattttggga

SEQ ID NO: 6758 - DNA, 486 bp, Arabidopsis thaliana
  unsure at all n locations
  Clone ID: LIB24-121-Q1-E1-G7
gccgnccggtaacggtccanaaattcccgggtcgacccacgcgtccgnccacgcgtccgcattttctagctgtgttccttttctcagcaactctctcatcttgcctcgtagtctcggcttcgctcgtggaagggaaagtctcttgtttcgactgtcccaatgattatgattattcaggaatcacggtcggagttagctgtagccacacaaacacgcggttcactgtaanaactgacaagaagggtgacttcatatcggaacttccctcaaagatcgaatcaaactgtgaagcagaactccaaggcagcgtcaagcaactttatgcttccaagaataacgttaagtcgaagattgttaagcttggcggtgacaaatatggtctctcttccaaagttgttcttcntgaaatcatgtccaagaagcttcggatctttaagttccgtccaangaccgttgatttaccaagttcctcccgangtggggggc

SEQ ID NO: 6759 - DNA, 413 bp, Arabidopsis thaliana
  Clone ID: LIB24-121-Q1-E1-H10
tcattcgattattataggaggaaaccatggagctaaggaaatctcaagtggccatgcctgttttcttggcaataatgagtctaatggtgagtcaagtggtcttcgccgagaaagattcaggttcaatgtcccctcatgatcgggcattagcagaaatgcaagcccttaaagcttcattggttcggcgaaatctaccggctttggtatctcctcctcctacccctcctcaggccgtacccggtccgcgcgtgtaccaagtgatatcatatggtgccgatcccacagggaaattggatagcacggatgcaatattaaaagctatggaagaagcatttgatggtccaaatcatggagttttgatgcaaggtataaatgatctcggaggagcaagaattgatcttcaaggtggaagc

SEQ ID NO: 6760 - DNA, 491 bp, Arabidopsis thaliana
  unsure at all n locations
  Clone ID: LIB24-121-Q1-E1-H3
cgttaacttncgtagcctccnaaantccaaggtcnaccncccgtccgcacacgcancnggattcgttggancttgatcccnccgtggaaatgggtggtttccggtttcacaagtatcaggtggttgggagagccctcccgacagagaacgatgagcaccctaagatctacaggatgaagctttggggtagaaatgaagtatgcgccaagtccaagttctggtacttcatgaggaaactgaagaaggtgaagaaaagcaacggacagatgcttgccatcaatgagattttcgagaagaacccaacgaccatcaagaactacggggatctggttgcgttatcanagccgaactgggtancacaacatgtacaaaggagtaccgtgacacaacactcaatggtgggantggagcaaatgtncactggagatggcttctccgtcaagagagtgaggttcccttgcattcagatnatcaagactgcgactgtccct

SEQ ID NO: 6761 - DNA, 460 bp, Arabidopsis thaliana
  unsure at all n locations
  Clone ID: LIB24-121-Q1-E1-H4
cgggtccanccacaatcaagaaccacgcgnntcncncgaattcgtctttgaagaggaagagaagagaagaggcgagggagatatggattgggacaacgtagcagctgaggatgtgattgaggcgcttagagaagttgaatggtcgacgcctcctcgttcgtttggcgagttcttctctagattcgcgttccctcgctctttctctaaatggaagagccgtctcaaatgcaatctctactactataggacgaattactttatcttggtgattttcgttctggggtcctgcgcttgttacnagacctcctgggctccttgtggggtgctgctccaaaaagctttaaagtaaagcnttcccttaaacgacagtttttgcaagctaagntttaatgaggaaagtttaatnagaaaccgattangggaattcctcccccaacannatggctgcaaaaaaatgagn

SEQ ID NO: 6762 - DNA, 438 bp, Arabidopsis thaliana
  unsure at all n locations
  Clone ID: LIB24-121-Q1-E1-H6
acgcgtccggttgattctgctgctatagtcaagtctcttcctggtttagaaggccgtcttcctttcgaactcgaaaccgggtttgtaaaatgtacattggtattggagaggaagaggacatacaattgttctactatttcatcaaatctgagaacaatccaaaagaagaccctcttcttctatggttagatggaggacctggatgttcttctctcggtggccttctttttgagaacggaccggtggctttgaagtctgcggtttacaatggaagtaatccttctttgttctccactacatattcatggacaaagatggcaaacataatatacttggatcagccagttggatctggtttctccttactcaagaactccaattgggaaaatctagtgacacaagtgaagttnagangatccaagangtttccttcaaaag

SEQ ID NO: 6763 - DNA, 440 bp, Arabidopsis thaliana
  unsure at all n locations
  Clone ID: LIB24-121-Q1-E1-H8
acgcgtccgcccacgcgtccgcccacgcgtccggtctgattgcgnnnnnnnnnnnnnnnnnnnnnnnnnnnnnnnnnnnnnnnnnnnnnnnnnnnnnnnnntcatcaatggtgacggacgatagcaactcctctggacgaatcaagtcnnnnnnnnnnnnnnnnnnnnnnnnnnnnnnnnnnnnnnnnnnnnnnnnnnnnnnnnnnnnnnnnnnnnnnntgagcttaaaaggaaaattcaaggagaaagagttaggtctattaaagagaaatttgaggctaatagaaagaaagtggatgctcatgtttctcccttttcatctgctgcatcgagccgagctaccgcagaggataatgggaaatagcaatatgctttcttcgagaatgagaatgccactctgcaagttaaatggtttttctcatggtgtggggagataaaga

SEQ ID NO: 6764 - DNA, 468 bp, Arabidopsis thaliana
  unsure at all n locations
  Clone ID: LIB24-121-Q1-E1-F4
ctgtttacgcctgnccgtacgcctccaaaaattccaaggtccacccacccgtccgggagcagcctgagcaggaggaanaanacgaagaanaagaggagcagctactaccatggttctcaagacggagctttgtcgtttcagtggacagaanatttacccaggaagaggaattangtttatccgatctgattctcaggttttcttgtttcttaactcaaaatgtaagaggtacttccataacaagttgaagccatccaagcttgcatggactgccatgtacagaaangcaacacangaaggatgcagcacaagaggctgtgaanagaangagacgttccaccaagaagccatactcaangtccatngttggtgctaccntggaaagtaattcaaaanganagagagctgagaaagcctgaagttcgttgatgcanccaagggaagctgccctgcgttgagattaangga

SEQ ID NO: 6765 - DNA, 413 bp, Arabidopsis thaliana
  unsure at all n locations
  Clone ID: LIB24-121-Q1-E1-D10
gnnnnnnnnnnnnnnnnnnnnnnnnnnnnnnnnnnnnnnnnnnnnnnnnnnnnnnnnnnnnnnnnnnnaagacaagaacttgatgttcatgtcttgaaacttaacaaagtattgatctttccttttaagtaaagaatttgggggttacacaacttcgtctagatggagcaagagaaaagcttggatccacaactatggcatgcttgtgcaggatcaatggttcaaatcccttcactgaattcaacggttttttacttcgctcaaggccacacagagcacgctcacgcgcctcctgattttcacgcgccgcgcgttccacctcttatcctctgtcgtgtcgtctccgtgaagttcctcgccgacgctgaaacagacgaagtttttgctaaaattacgcttttgccacttccggg

SEQ ID NO: 6766 - DNA, 389 bp, Arabidopsis thaliana
  unsure at all n locations
  Clone ID: LIB24-121-Q1-E1-D12
gtctctattattctctaatctcttcttcgccgacgacttctctcaccaaggcgacgttttgatcaggcgatgatgagtatcccaatggagttaatgtctatcagaaaccctaattccaccttgctctatagagctcactctcgtccgcctgtgaagctctgtgctccacctcgttctctcctccctagccgacgccatttcagtgctcctcgagctgttgtttcgtatccaggaatacgtttcggctttacctcgccggaagtcttgcttaatcgatccgtcgttgctttcgctgcatcccacgaggattcgggagaatcaggtgttgaggtggggaaggagaagaatgatatagatgtttgaagatgatacatctaaaggaagcnatg

SEQ ID NO: 6767 - DNA, 478 bp, Arabidopsis thaliana
  unsure at all n locations
  Clone ID: LIB24-121-Q1-E1-D4
tngtcgtagcctcgaaattccnagggtcnaccgacccgtcggntcaaatanaaccatcaatggttaacggacgaagaganaantantctggtgtcaccggcgccagtggctgcatcggctcgtggctggtccatcagctcctcctccgcggctactccgtccacgccaccgtgaaaaacctccaggatgagaaagagacgaaacatctagaaggtctcgaaggtgcagccacacgcctccatctattcgagatggatctcctacaatacgacaccgtttccgccgccatcaatggttgctccggcgtattccacctcgcatcaccttgtatcgtcgatgaaagttcangattcccangaagcaactacttgaccccggcggttaaangaaccatnaatgttctgaacgggcgggcaaaaagaaagccaagttgttaaggagagttgtttggtgacgtcttcgatatccggcgattnac

SEQ ID NO: 6768 - DNA, 449 bp, Arabidopsis thaliana
  unsure at all n locations
  Clone ID: LIB24-121-Q1-E1-D7
acgcgtccgnccacgcgtccgcccacgcgtccgctgggtttttccttactctctaagaaaaaccactactttggtnnnnnnnnnnnnnnnnnnnnnnnnnnnnnnnnnnnnnnnnnnnnnnnnnnnnnnnnnnnnnnnnnnnnnnnnnnnnnnnnnnnnnnnnnnnnnnnnnnnnnnnnnnnnnnnnnnnnnnnnnnnnnnnnnnnnnnnnnnnnnnnnnnnnnnnnnnnnnnnnnnnnnnnnnnnnnnnnnnnnnnnnnnnnnnnnnnnnnnnnnnnnnnnnnnnnnnnnnnnnnnnnnnnnnnnnnnnnnnnnnnnnnnnnnnnnnnnnnnnnnnnnnnnnnnnnnnnnnnnnnnnnnnnnnnnnnnnnnnnnnnnnnnnnnnnnnnnnnnnnnnnnnnnnnnnnnnnnnnnnnnnnnnnnnnnnnnnnnnnnnnnnnnnnnnnnnt

SEQ ID NO: 6769 - DNA, 471 bp, Arabidopsis thaliana
  unsure at all n locations
  Clone ID: LIB24-121-Q1-E1-D9
ttcnaccccgggacgtaccnagtccatgaaattcccgggtccgacccacgcgtccgaccacgcgtccggtcggatccaaggagattcgtataatcacaaccgtgcgatgaatctgtggaagatgggagggtttttgactaacagctacagtcctaagaagtttcgatctaggcanaaaaagctttgctttggtccaactactatgcctgattgtgtcgttgtgtttgattctganaggaagagctctgtgatacttnaggcatcgaagcntcagattccggttgttgcaattgtggacccgaatgtgccattggagttctttganaagattacgtatcctgtgccanctcntgattcggtcaagtttgtgtatttgttctgtaatgtgatcaccangtgctttttggcagaacanatgaagttggggatcanagaanggagcaatgaagatttgatgaatgatttagnctg

SEQ ID NO: 6770 - DNA, 500 bp, Arabidopsis thaliana
  unsure at all n locations
  Clone ID: LIB24-121-Q1-E1-E3
actgttacgcctttccgtaggcctccnaaattcnanggtcgacccacgcgtccggttttctgtatcactgaacatgatgaggaaaaagtgaaatctgttgtccgaacaatcttcaccctgctaatgtctgctgacgccgatacaacaaagaaaattgtatccaaattaaaacgccgactgcatatggagagtcaggaacgccaattgacagacaaggaacggctggttttgaagctagagaagcaatatccaaatgatattggagtgatatctgcattcttcttcaactatgtgaagctcaatcctggcgaagccttgtatcttggtgcaaacgagccccacgcatacttattcggtgagtgccttgangtcatggcgacttcagacaatgtactacgaagctgggctcaattncaaagcctcctggatattcaaacacnttggttcaatgctccccttaaaaactggggatatcccggaaatcctgaagggaacaagga

SEQ ID NO: 6771 - DNA, 490 bp, Arabidopsis thaliana
  unsure at all n locations
  Clone ID: LIB24-121-Q1-E1-E7
ntacgccggccggtaacggtccaaaaattcccgggcngagaagcttctagcgtctagtgatcttcaaggagcaaagacatttgcgatccgcgcatgcgaagctgacccgacccgagcagaagctgcagactacatcctcgcaatctgcgacattcttctcgccggagagactcgtttaggtgattccaacttgccagactggtacgccgttctccgactcggtcgtttagctcaaaaccctgaacacgtcgcgactcagtaccgtagactcgctcttctcctcaatccttccgttaatcgtctcccattcgccgatcgagctcttaaaatcgtctccgatgcttggttcgttctctctgattcgttcaagaaatcattctacgancgagaaattgcaaacttaagtcaactcggtcaatctgggattccatcctcaaacccaatcgcatcaaaatttccaagtgggaacctaacagtagcaccgccgtat

SEQ ID NO: 6772 - DNA, 474 bp, Arabidopsis thaliana
  unsure at all n locations
  Clone ID: LIB24-121-Q1-E1-E8
attcccggggngcgatcttcaaccgaagagaacgagtatgtgcgatcttccaccgaagctggtangggagaagatcctcacgaggattccgataacatctctgagagcggtgcgatccacttgcaaattatggaacgctttaaccaaagatcgggttctgggtaaagcagcggcgcagtttttggggtttatgacgatggattcaaaggtctgttcagttagattccatctccgtcgcagcaaggaggaagaagaagacacgatggatctatctataaagcaggtagatttgcttaatcaagtcgagatatctagagtgtatcactgcgacggcttgttgttancgtggctaanggacaactcgaangggtccntggtttgggaancccttaatttgggggcaanacaaagatgggattcagaacccangaancangaatccaaccattaggaagacaggccaatgctccttgg

SEQ ID NO: 6773 - DNA, 413 bp, Arabidopsis thaliana
  Clone ID: LIB24-121-Q1-E1-E9
ttctccacgccatttccagaattttcaggtgttcgtgaaaagatgaattttaagaatgtcaaagttcccaaaggtcctggtggtggtgttatagctgcggtggttattggggggctcagtctttacggtgctacgcacactctctacaatgtcgatggaggtcatcgagccattgtctttaaccggcttgttggtatcaaagacaaggtctaccctgagggtactcaccttatgattccatggttcgaaaggccaatcatctatgacgttcgtgcaaagccttatctagttgagagcacatctgggagccgtgatctccagatggttaagattgggcttcgggttctcacccgtcctatggctgaccaattaccaagaggtataccggtcccttggtgagaattaccgccgag

SEQ ID NO: 6774 - DNA, 507 bp, Arabidopsis thaliana
  unsure at all n locations
  Clone ID: LIB24-121-Q1-E1-F1
actgttacgccttcgtagcctccnaaattccaaggtcgacccacncgtccgcatcaagngccgggttctcgggtcggatcttctaagtctagctanggataatggctactgtcactactcatgcctcggcctcgattttccgaccttgtacttcaaagccaagattcctcaccggttcttccggtatgttgaaccgcgacttgtcgtttacatcgatcggttcatcggccaaaacgtcgtcgttcaangttgaagctaagaaaggagaatggttgcccggtttggcatcgcctgattatctcaccggcagtcttgccggtgacaatgggtttgacccgttgggtcnagcagangattcaagagaacttgaaatggtttctccaagcaaganctgtcaaacggaccaatngggctaagccccggtgtccnctgggaangccttttgcccggaaagttttcaaccaaagattggnaatcaataaatgttccctgaantggtaacgaatg

SEQ ID NO: 6775 - DNA, 472 bp, Arabidopsis thaliana
  unsure at all n locations
  Clone ID: LIB24-121-Q1-E1-F11
acttttgccccgnccggtaccnagtccanaaattcccgggccaaaaccaancacacgaaacaaaaatctaaatttctttcttggtctgctttcaatatggctcctctacctatttcttcgattagagttgggaaaatagatgatgttcaagaactcataaaatccaaaccaaacaaagttccagagagattcattagagaagagtatgagagaggagtcgttgtgtcgtctcttaagactcatcatcttcatcatcagattcctgttattgatctctctaagctctctaaacccgacaatgatgattttttctttgagattcttaagctctcacaagcttgtgaagactggggatttttccaggttataaatcatgggatagaagtggaggttgtggaagatatagaggaagtggcttcagagttctttgatatgccattggaggagaagaagaagtatccaatggagccaa

SEQ ID NO: 6776 - DNA, 412 bp, Arabidopsis thaliana
  Clone ID: LIB24-121-Q1-E1-F12
agatcaaccatcttttcaagaagaagaagctgctaaagttccttatgttggtgataaggaacctctgtctagtttagctgcagagtatcaatcagggagtcccattttgctggagaagattaagatactggacagtcaatatatcggaatccggcgaacaagaggagatggaaattgcttcttccgaagttttatgttctcttaccttgagcatatattggaatcacaagatcgtgctgaagtcgatcgtatcaaggtcaatgttgagaaatgtagaaagactctgcaaaacttaggttatacagattttacatttgaggacttctttgcgttgttccttgagcaactagatgacattctccaaggaactgaagagtctataagctacgatgagctggttaacagaagtaga

SEQ ID NO: 6777 - DNA, 493 bp, Arabidopsis thaliana
  unsure at all n locations
  Clone ID: LIB24-121-Q1-E1-F3
acgcctgtccgtacgcctccgaaaattcccanggtcgacccacgcgtccgcncacgcgtccgaataattgagtttttttttaattagaaacaaatggggttgagtggtgttcttcatgtggaggttgaggttaagtctccggctgaaaagttctgggtagcccttggcgacggcatcaatctcttccccaaagctttccctaacgactacaaaaccatccaagttctagccggcgatggcaacgctcctggctccattcgcctcattacttatggagaaggatctccactggtgaagatatcggcggagaaggatcgaagcagtggatttgggagaacaaaagcatgtcgtacagcatcattggcggagaaatgtttggagtactacaaaaccttcaaagggaccaacaacgttaaccccaanggatgtgggaancctcctgaaatggtccggtgaatttgagaagaacgcccatgagatngatgattcacat

SEQ ID NO: 6778 - DNA, 488 bp, Arabidopsis thaliana
  unsure at all n locations
  Clone ID: LIB24-121-Q1-E1-C2
acgcctccnaaattccaaggtcgacccacgcgtccgcggacgcgngggctcttacccataaaaagttttcacctttaattcttgtcctccgcttttccattttactcttcttgtatgtttctgtcttcttactcaacttttgcttcaggcttcgtctcttttgcaatttttgagttagccaagtgctcaagggagatacataatacctgaagatgtccaaggcaagtgatgccgtcagagaaccattggtggacaagaatatggctggatcaaaaccagaccagccgtggatggtttatctcangcacattcgttgccggtctgtggttcttttgcgttccggttcttgtgcgggataatccttcaacctgctcangctgcaaattaaggnatggacctttcaantgancaatagcctgaagttttcactcctttgggtncttaactaacntttggggcaaatgnattcggtgctataacaaacgggg

SEQ ID NO: 6779 - DNA, 407 bp, Arabidopsis thaliana
  unsure at all n locations
  Clone ID: LIB24-119-Q1-E1-C3
agctagaagcatttgataaagcttggtgctcttaccttgagggttttgtagtctggaaaattaatgatgctaagcttctagaaaaagatttagccagaactcaagagtctgagctgtctgaggtatcaaaacatacttcctctcccaaaataatagacagtggcttgaatcagaagacggtaaaggcatcttctccaactaatcgggctttattctctgaaactgatggagcacgagaatcaaaagcacctgcagattcgcatcttccatcttcatcttcaccttcaccgggctcatcgaatttgtcaccctctttgaactctgcagggagcgaggccatttctactccaaacgtggtagntaataactttgntgcaacgttttggnaagtgagaacccaantaaat

SEQ ID NO: 6780 - DNA, 425 bp, Arabidopsis thaliana
  unsure at all n locations
  Clone ID: LIB24-119-Q1-E1-C4
aagtcaaaaggtttcgctttctagatcatgtccacatttctcctaacatggattattatgaccgtcgcgttaagcgtaacgctttttcttatgccgcaacaaacaaatgcggctagagcgttcttcgtgtttggcgactcactcgtggacagtggtaataacaattacttagtcaccactgctcgtgccgattctccaccgtatggaatcgattatccgactggtcgaccaaccggtcgtttctccaacggcttgaacctccctgacatcatcagtgaacaaattggatctgagcctacattaccaattcttaaccctgaactcactggagagaagctattgatcggagctaacttgcctcctgccggnattggaattctcaacgatactgggggtccaattttggaccaaacctnagggtttgg

SEQ ID NO: 6781 - DNA, 423 bp, Arabidopsis thaliana
  unsure at all n locations
  Clone ID: LIB24-119-Q1-E1-C6
attccaattttctcggatttttatttcttatatacaaatccctaaaaccctatagccctctttcttcgtcacctactactactaactccaagctcaagctcctctgtttcttctgcttgtggttaaaaatcatttcagacacagtgcttttgatgactctctgcaacaaacaacagcagctgcagacaaagcttatacgaagctgtatctactgactttgatggtgaaatatcaaaaaccctaaattaattttaaaaaaaaacacattttttttcttcttttggtttttcctctgagggtattcatcatcaatgcttanaaagtacagtgggtaaacaanncaanagcaaagacccatttttttctccntcctttaaagcccaaaacnanccccnaanggntttggtttttaaantttggggg

SEQ ID NO: 6782 - DNA, 392 bp, Arabidopsis thaliana
  unsure at all n locations
  Clone ID: LIB24-119-Q1-E1-C8
acattaatgggtcaaannnnnnnnnnnnnnnnnnnnnnnnnnnnnnnnnnnnnnnnnnnnnnnnnnnnnnnnnnnnnnnnnaaagttttgtcgcagtatctattgttcttacagagagaaaggaaagctttagtcttttaccagtttgatccaattctgggtttcactgaaaaaaaagttgggagtttgattcttctaactgtagaagaaacagagtcaacagaagaaaactaaaaaagttgagatttttctctcacgcgctcaagaacttgagtatgtcttcttctgtagcagtgttatgggttgctacttcttctctaaatccaagacccaatgaacaattgtgggttggtaagggttctagaatcctctaanactgggtcccccctggc

SEQ ID NO: 6783 - DNA, 437 bp, Arabidopsis thaliana
  unsure at all n locations
  Clone ID: LIB24-119-Q1-E1-C9
acgcgtccgcacaaacaaaggagcttggactaaggaagaagacgataagctcatctcttacatcaaagctcacggtgaaggttgttggcgttctcttcctaagatccgccggtcttcaacgttgcggaaaaagctgtcgtctccgatggattaactatctccgacctgatctcaagaggggtaacttcaccctcgaagaagatgatctcatcatcaaactacatagccttctcggtaacaagtggtctcttattgcgacgagattaccaggaagaacagataacgagattaagaattactggaacacacatgttaagaggaagctattaacaaaanggattgatncggcgactcatcgacctatcaacgagaccaanacttctcaaggattccgtctgantctngttaanacagagggancctccttgtcaagaatt

SEQ ID NO: 6784 - DNA, 483 bp, Arabidopsis thaliana
  unsure at all n locations
  Clone ID: LIB24-119-Q1-E1-D10
ngttatccgccggtaccggtcaaaattcccgggtcgacccacgcgtccggattattttttctgatctgagaaaaaaaatggcgaatggagctaatagagtggatctcgacgggaaaccgatacaaccgttgacaatatgcatgatcggcgccggaggtttcatcggttcacatctctgtgaaaagctcttgaccgagacgccacataaggtgcttgcgctcgatgtttacaacgataagatcaaacacttgcttgagcctgataccgttgaatggagtggtcggatccagtttcatcgtatcaatattaagcatgattcgagacttgaaggtcttgttaagatggcggatctgattataaatcttgctgcgatctgtactccagctgattacaatacacgtcctcttgatactatctacaagcaatttcattgatgcgcttccaagtttgtgaaaatactgttcctgagaacaacaagcgtcc

SEQ ID NO: 6785 - DNA, 490 bp, Arabidopsis thaliana
  unsure at all n locations
  Clone ID: LIB24-119-Q1-E1-D12
tgtttatccgccggcnaccggtcaaaaatcccgggtcgacccacgcgtccncccacgcgtccgaagcaagcaaaatgaaagaacttgtgttgaagaaaaggtcagaactagaggagatatgtaggaaaacccacttgttgccagtgtcagacagtgctatagatcagactatcgtggcgatagaatctggtattgtggatgctacaatggtcctggagcatcttgagcaacatatatctaagatcaaagaggaagcactaagccgaaaagagatacttgaaagggttgagaaatggttatctgcctgcgatgaagaaagttggcttgaagaatacaacagggatgataaccgatacaatgctgggcgtggagctcatcttactctcaagcgcgctgaaaaagctccgtaatcttgttaccaagctcccaaggtatgggttgaaagcactgggcctcgaaagacaattagttttggggaacaagaaaacgg

SEQ ID NO: 6786 - DNA, 360 bp, Arabidopsis thaliana
  unsure at all n locations
  Clone ID: LIB24-119-Q1-E1-D7
gaaagtgctgacttgcagtgactttgagcatgaaatagcatcaaagcttgttctagaagctcttttcttcaaagcacgaagccccacacagacaacgtagcctagcctccgaagaatctgcatccctgaaccgccgcctgatagagagggcttacaaatacagacccgtcaaagtggncgagtttgagcttcctagaccgcagtgtgtagtctacctanacttgaaaagagaagaatgtgggggactgttcccgtcgggtagagtgtattcgcaggcctttcacttgggaggtcaaggggtttttcctgtcaagctcactgcaacatggnccaacagagctcgttccactgtttcngggc

SEQ ID NO: 6787 - DNA, 394 bp, Arabidopsis thaliana
  unsure at all n locations
  Clone ID: LIB24-119-Q1-E1-D8
ccgcccacgcgtccgcacgaaacgaaaaagaaagaagcgaagcaaacggtagaagaaantcctaattcaaacacaaagagaaaacgaagtttaggccaagggaaggcatctggtgaaagtttagttggntcgaggatcaaagtctggtggcctatggtcgcaaggctgaaacttanaggaattgacggaagggcaccaccatgagtggagcctgcggcttaatttgactcaacacggggaaacttaccangtccagacatagtaaggattgacagactgagagctctttcntgattctatgggtggtggngcatggccgttcttaattggtggaacgatttgtcaggttaattcccgtttaannaacgntncctcangcctgggcaacttcccg

SEQ ID NO: 6788 - DNA, 432 bp, Arabidopsis thaliana
  unsure at all n locations
  Clone ID: LIB24-119-Q1-E1-E8
acgcgtgggcggacgcgtgggtcttcatcattttctcttcttcntctccaagaaaacactgaagaataaatggggttccttaagccaaccatggcgattctttttctagcgatggtcnccgtttcatcagccgtggacatgtcaatcatctcctacgacgtagaaacatggcgtctccancaccggtggccgtagcgaagccgaggttatgaggtatctacnaggcatggttggtgaaacacgggcaaggctcacagccaganctctcttgttgataaagatcgacngttcgagatctttaaagacaatcttcgtttcgtcgatgancataacgagaagaatcttacttataaattgngtttgactcnttttgcnggttntagnaaccnannggtnttgatttaaaattnccttggggcttaaggatgggaa

SEQ ID NO: 6789 - DNA, 428 bp, Arabidopsis thaliana
  unsure at all n locations
  Clone ID: LIB24-119-Q1-E1-F10
actctgatgatattggatcaggacattgcatcgatgctgttaaaaaagttacttggttcatttcccctcgatccagaaaacaatctttatggaaagggtgatgataagtactttaaactcaacagtgtattgacagaaatctttttggaagtaagtgaatggagccaccttcctactgatctttccaatagatatctggaatttattgagaatacactactaggcaagatcaccaggagcattaggcttcgtaaagatattcacgaaaagactttacttgcactcttgccctttcttccaaaacttattctgagggtagaccgtgattggagagataatcttctggaggcatttactattaccttcagcgattgcaaaccaaagtctaaactccaaattancccggaatttcaactgttagaagacat

SEQ ID NO: 6790 - DNA, 426 bp, Arabidopsis thaliana
  unsure at all n locations
  Clone ID: LIB24-119-Q1-E1-F4
attctcttgctaaactccatcatcttctctttcttttttttcacttgtcccatttttttatattttcatctttctcttttggagtttcttcttctactgactctactggtaggtgtanggatttgtgagagaagaanaaaaagcanaatctttgaatggactggaatttcaaacttagctctggttatttatctggattcgatcaagaaccanatttatcaccaatggatggttcgatctcgtttggtgggtcgtnacagtcaaaancggntttttcatttgatctaaaacttggnangaaacattggaaactcntcctctgtttttggtgatacaanngcaagtgattangcttaataantggnaagatagtgccttagccnaanccagaaaggtcaaggaagctcgagttcaaaggagaancaa

SEQ ID NO: 6791 - DNA, 396 bp, Arabidopsis thaliana
  unsure at all n locations
  Clone ID: LIB24-119-Q1-E1-F8
acgcgtgggaaaagaaaaaaattctataagtaatctttattttgctaaagaaaacatagaaatctgtttgcaaagaagaagatatgggaaacagtttacggtgttgtttggcttgtgtacttccatgtggagctttagatttgatccgtatcgtacatctcaacggccacgtcgacgagatcactagtccaatgaccgccggcgagattcttcaggcgaatcctaaccatgtcttaagcaaaccttgttctcaaggagttgtgcgtaagatcttgatcttgtctcctgaatctgagcttaagcgtggaagcatctattttcttatcccggatacttctatgccggagaagaagaaaacanagaagagaaaagagctccgatgncggaaaaaacccc

SEQ ID NO: 6792 - DNA, 422 bp, Arabidopsis thaliana
  unsure at all n locations
  Clone ID: LIB24-119-Q1-E1-F9
cacaagaaaagttagagnnnnnnnnnnnnnnnnnnnnnnnnnnnnnnnnnnnnnnnnnnnnnnnnnnnnnggcgattttttccagagattctccgattctcnnnnnnnnnnnnnnnnnnnnnnnnnnnnnnnnnnnnnnnnnnnnnnttttcgattcgattgatgtgaaacgctcctacttgattcccgtcgtctgagatcggagttatcatcgangattgataatggttcccgaatcatcatcgaggataatgagtttttctggcgatgatttcgaattcgatattgatttcnaattcgatgcaccgaggttctatgatttctctagacctgagctttattccgangactgaanaaatcgaaatctgggttcaancctctgggaactancccccttcancctttttaggcccaaangttca

SEQ ID NO: 6793 - DNA, 422 bp, Arabidopsis thaliana
  unsure at all n locations
  Clone ID: LIB24-119-Q1-E1-G11
caaaccaaccttctagattcttctccttccttcttcaactctctctcacttctccagatatggttacatctccgacgaactcaacaatcaaatttctctgtagctatggcggcaaaatcctacctcgttatcccgacggtaaactccgttacaacggtggtcacactcgcgtcctcgccgttcctcgctccgtctcattttccgagttagcgtcgaagatggcggagatgtgcggcggcgtcggcggatctataaccgtaacgatccgatgtcagcttccgacggaagatctcgacgcgctcgtttcaantacttccgatgaagatctagtgaatctaatcgaagagtacgatntccgtttcctcttcatctccgatgaaaatcaggagtccntctaaaatccaccaaaatcngccgccggg

SEQ ID NO: 6794 - DNA, 481 bp, Arabidopsis thaliana
  unsure at all n locations
  Clone ID: LIB24-119-Q1-E1-C12
tccgcccgctacggtcaacatcccgggtcgacccacgcgtccacgaacangtcgtggtgagattttaggaatgacgaanaagatggagagtatctggcgaatcgcgacgggacaagatccgagccgtgaagattancancggatcgagttctggtcaaaccctgagcgttctggttggctcacaaagcaangcgattacatcaaaacctggcgtcgtcgttggttcgttctcaaacnagggaancttctctggttcaaagatcaagccgctgctggaattccntggatctacgccgcgtggtgtgatctccgttggtgattgtctcaccgtgaaaggagctgaagatgttgtgaataagccttttgcttttgagctatcnagtggtagctataccaatgttcttcattgctggataatnnagaaaggncnaanganaagngcntnaantcnaantgggaanatcgattgtgcaaacactcn

SEQ ID NO: 6795 - DNA, 409 bp, Arabidopsis thaliana
  unsure at all n locations
  Clone ID: LIB24-118-Q1-E1-G5
nnnnnnnnnnnnnnnnnnnnnnnnnnnnnnnnnnnnnnnnnnnnnnnnnnnnnnnnnnnnnnnnnnnnnnnngacgattcgtggaagagacttggagagaatatttctcaatgtctcctctcccaatcttccatcgtcttcctcacgccacgttctcttcctttctcctctcactgtctcaagctggaagttctaaaacatcagtggcattcctcaatgccttcaaatcagaagatatcattgctcgaattggactatggtggcagcttataagggctgttgtagttgtacctgtcttcaagttcctggtgcttctatgtttggtcatgtctgtcatgttcttcgttgaggttatgtacatggggaatcgttgttttgtatgtcaagctgttcaaggagaaagccaaga

SEQ ID NO: 6796 - DNA, 400 bp, Arabidopsis thaliana
  unsure at all n locations
  Clone ID: LIB24-118-Q1-E1-G9
antcccgggtcgacccacgcgtccacccacgcgtccggttgtttgaattcgagaagttcccggaaacatccctccgtagaaaattcatcggaggcgacttgaggagaaacacggaagctccgatctcacaatttcgcgacgaactcgcttcagcgattgtttctgttcatccgattaagatgaacggaggtccttccggtttcaataatgctccggtcacgaaagccttcgtcatcgcgactgctcttttcactgtgttcttcgggatccggggaggttcttccaagctcggcttatcttaccaggatatttttgaagaagtttcggatttggaagttaattatatcggcttttgccttctcgtccacaactcaattgctttctggcttaganttgctat

SEQ ID NO: 6797 - DNA, 367 bp, Arabidopsis thaliana
  unsure at all n locations
  Clone ID: LIB24-118-Q1-E1-H10
acgcgtccggctacatgcttgtcccttacgctaccttctttgttcctcctggaaccggaggtggaggtggtggtactccagccaaggatgcccttggaaacgatgtagttgcagcggaatggcttaagactcatggtcccggtgaccgaaccttgacccaaggattaaagggagatccgacttacctagttgtagagaacganaagactctagcgacatacggtatcaacgcagtgtgnactcancttggntgtgttgtgccatggaacaaatgctgagaacaagtttctatgtccttgccatggatcccaatacaacgcncaaggaagagtcnttagacgtccatccccattgtccnctatcgttg

SEQ ID NO: 6798 - DNA, 406 bp, Arabidopsis thaliana
  unsure at all n locations
  Clone ID: LIB24-118-Q1-E1-H7
ttttttcgcgttttccaccgcaaccaccgtcaccttcaaccgccggagccgccgcaaggaaggctcatcatccgccgtggcaattttttgaggtgtacaaagcattgcctatttgacgaaccaggaaatggttaaaaggcatggagagttttgatttacaagatatatcatgtcgcagtgcatagacggtttcaagcatgtatgctcctcttttttccggtgttttgatatcnatatttacaancaatctggaggccttggtgaccctgaacttcttgcgacagagacagtttttaagcgtgagtgaaatagaggctctctatganctgtttaangaanatcagcagtgntgtgattgatgatgggctantaaacaggaanaatttcagttagcttggtcaaagan

SEQ ID NO: 6799 - DNA, 459 bp, Arabidopsis thaliana
  unsure at all n locations
  Clone ID: LIB24-118-Q1-E1-H8
cgtaacggtcanaaattcccgggncgacccacgcgtccactcagtaaacataaagaacacaaccatgcttaggtttgattacttactaatcacggcacttgccatttcaactgtttcggttgtcatggcccaagtccctcccgagaaacaattcagagtgctcaacgaacccggctacgccccatacatcaccgagtacgacgcgagttaccgattcctcaactcaccgaatcagaatttcttcacaattcctttccagctcatgttttacaatacaactcctagcgcctacgtgttagctctccgagtcggaacgaggcgtgacatgagtttcacgcgttggatctgggacgccaatcgcaacaaccccgtcggagacaactccacactctcattcggccgaaacggaaacttgtgctcgctgagttaaacgggcaaagtcaagtgggaagacnaaca

SEQ ID NO: 6800 - DNA, 476 bp, Arabidopsis thaliana
  unsure at all n locations
  Clone ID: LIB24-119-Q1-E1-A11
gncccgtgtcaaatcaaganttcgccgggncacgcgtccnctcncctccatatcttaacaatttcatagcaaaccctaaaattgagaaagagatanagagagaaagatgggtacgaggaaagatcgagataaagaggatagagaacgcanacaacagagtggtgacgttctcaaagaggaggaatggattggtgaanaaggctaaagagatcacagttctttgtgatgcaaaagttgccctcataatctttgcaagtaatggtaagatgattgattactgttgtccttccatggatcttggtgctatgttggaccaataccaagaagttatctgggcaangaaactatgggatgctaagcatgnggaaccttagcaatgagattgntangatcaacaaatagaatgntancttacaactgggagctcangcatttnancgggagaagatatacagtctctcaacntgaaaaatctg

SEQ ID NO: 6801 - DNA, 476 bp, Arabidopsis thaliana
  unsure at all n locations
  Clone ID: LIB24-119-Q1-E1-A3
gttaggcccgccggtaccgnacnaacannggtcgncccacgcgtccggagnttactgagtcggaacaacatcagccaataaagccctgaaccctaattttcttttggctttggctggagaacgactgtangtgtgttcaacaatgtcgtcgaggaacttcaatccatttcaaaactggttcgagaaaccaccgaacccagtcccgtccatcaacttcgtctcgctcgctgantccttctttcccaagtcgcagtctccgaatttcncttcgattggacttccaaaattctcaaagaagtncccaaaacccgaaacagcaggaaccgacgaaccaggaccgtacaagcaaatagcnagatcagttcntatgggagtgtgagaacataccggattacaggcacactccagaagtggggtnaagcntctcaacgaaagattcangntttccnagaancgaaggggaatcccgggcnccg

SEQ ID NO: 6802 - DNA, 455 bp, Arabidopsis thaliana
  unsure at all n locations
  Clone ID: LIB24-119-Q1-E1-A5
cggcncggtcgaacaaaaannggcggncnacccacgcgtccacccacgcgtccgctaaaatttttcagttccccgatcgccggaattttcgccggtgatgtaattttcccgcgccttttttgggaggtgaatttttttttcttcnaaaagctcgagaagagtgaaaaccccagaaatgaccttgcgattcgtatggctccggntgttttcgctaccttaaacgaaccgtcgtaccaggaacaatgcggcgccgtttttatgaggaaatttacaaaccaatccgtcaccgaaaacaccaataaccttccgctcttcaaccctaacccnaaccctaatttcgaaaggagcaattcgagcaagcagtgcgatgactcgtcggaatttggaangcnatgcgacntttaatctcgctgggnacaccgcaagncaggngcacggganctaagaaacggcct

SEQ ID NO: 6803 - DNA, 432 bp, Arabidopsis thaliana
  unsure at all n locations
  Clone ID: LIB24-119-Q1-E1-A7
gttgttagccgcccgtgtcgaacaaaaattcncgggncgacccacgcgtccaattttaatttccaatggttttgcgtggcgaagagcttgagtttaatctaagagaatgggcacgacaaggccatttaactcgcgaagatcaaagttctagaaggttctctgcctcttgtatccgaagcttccgagaagaccacaagtcttgtacaacaaacgtcaccatctctagtactgcctcttctccgggttactccctcaaagatgagatcgatccatcaaattattccttcagtagtgcactcaaggcattgcaagcaaaatcagtgtacaagaagaattgggattggttgaaaccagaaggagttgagctaaactcgaaatggaacgaagcagngaagtatatatgcagtcctttatctgggngaagttcccttg

SEQ ID NO: 6804 - DNA, 406 bp, Arabidopsis thaliana
  unsure at all n locations
  Clone ID: LIB24-119-Q1-E1-A8
acgcgtccgcccacgcgtccgcgagaatcaaggttcatgagctgagggagaaatcaaaagctgatctttcgggtcagttgaaggaatttaaggcagagcttgctctccttcgtgtcgctaaggtcactggaggtgctcctaataagctctctaagatcaaggtggtgaggaagtcgattgctcaggtgttgacagtgatctcacagaaacaaaagtctgctttgagagaggcatacaagaacaagaagcttttgcctcttgatcttcgtcccaagaagactagagccatcaggaggagactcactaagcatcaggcatcgttgaagacagagagggagaanaagaaagaaatgtactttccaataangnagtatgccantaaagggggaagccntttaaacccggg

SEQ ID NO: 6805 - DNA, 372 bp, Arabidopsis thaliana
  unsure at all n locations
  Clone ID: LIB24-119-Q1-E1-B3
acgcgtgggcggacgcgtgggttgggatatactctgatgccgggactcttacctgcagccaaaccatgccgggatcactcgggcatgaagaacaanatgccaagacatttgcctcatgggggattgattacctcaagtatganaactgctaaaatacagggacaagtccaagagaaagataccctaagatgagtaaagcgctgttaaattcaggaagatccatantcttctctctgtgcgaatggggacaanaggatccagcaacttgggcaggagatattggcaacagttggagaacaacaggagatatccaagataattggnaaaccatgacattgatagcggatnagaatgatcgatgggnatcttatg

SEQ ID NO: 6806 - DNA, 443 bp, Arabidopsis thaliana
  unsure at all n locations
  Clone ID: LIB24-119-Q1-E1-B5
tatttatgccgnccggtaccggacanaaattcccgggtcgacccacgcgtccngattacctcaacatcgaaagctcatgctccaccgtgaatccggataaaaccgatatttccgggtcgggtcaaaagtttcgtcgcggttgttttacggaggagaaagctaagcanttgaggaggaaaaccgcagaagcttccacgttccatgacgtaatgtatcactccgccattgcttctcgacttgcgtctgatatcaccggccgagtcgaggattgaaacggattcgggtcagatctggagacgaatcaattaatgaataattaatcttttttttcttaattcantgttcttgtaggatgcagaccatcttctatcggtgctcctttttcaattgaaccgttggcttgtgtttggtcnttgtgtgttgtaaactccagnttcccttcc

SEQ ID NO: 6807 - DNA, 417 bp, Arabidopsis thaliana
  unsure at all n locations
  Clone ID: LIB24-119-Q1-E1-C1
naatccccagagtgcgacgaaaatgcagcancaagggagtaagagtggatctgagatggaggtgacatgggaggaccangcagaacattaatancttcagccgtctcaacaacaaagtccatgacctcgatgacgatatcaaatccgccaaggaaaagtgtgaaaatctagaggatgcagggaacgagttgatccttgctgatgaggagatggtgcgttttcaaataggagaagtgtttgctcatgtgccnagggacgacgtagaaacaatnatanaagagatgaagagaagcgacctgcaaaagccttgagaaactcgagcaagagaagggnatcaattggtaacacanatggcaacgctgaaanaagtattgtntgccaagttcaaaggattccaaccaatccttggagcnaaac

SEQ ID NO: 6808 - DNA, 435 bp, Arabidopsis thaliana
  unsure at all n locations
  Clone ID: LIB24-119-Q1-E1-C11
nagcactgagaagggaaaagatgggtgcaactgctccattttggcgattttcagcagcatcctatccagatctcaaggagcaagcgcctgttagtgttcttcgaagtagcaaaaaaggagccattgtccctcaaaaggaaacatcagcagggggagatgtttatcccgttgagccattttttgaccccaaggtacatcgtattctcgacgctcactggggacttctcactgacgaagatacgagtggactacggtcgcatactctatcattgcttgtaaatgatattccanggagttcttaatattgtganctggtgttttcgctcnaangggatacantatccagagcttggccgtnntgacatgcctgaaaccaagggcatttcacgcattacaacagttatacctggcaacagattgaatcggtcagcaaaa

SEQ ID NO: 6809 - DNA, 411 bp, Arabidopsis thaliana
  Clone ID: LIB24-118-Q1-E1-G3
aaatcttagtttcagacggaaagagagagtatagccatggaagtctcaaatcagaccagaaaacggaaagcaatcgacgccggacatggctcgcagccgacggcgtatcgaggctcagatggtgtagatctttctctccttgaagcacttgagaagtcttcgcataatggagtagaagcgcttgatcttaaaaccctaaaaaagcttgtcctctccttcgagcggcgtcttagagacaacatagctgctcgtctcaagtatgtggagaatccagaaaagttcgctgactcagaggttgacctacacgacgatcttcagaagctcaaggtgctcgctggagctccggaactttacccggaccttgttgcttccaatacggttccttcgattgtcaatctcctctctcatgaa

SEQ ID NO: 6810 - DNA, 463 bp, Arabidopsis thaliana
  unsure at all n locations
  Clone ID: LIB24-118-Q1-E1-D7
aagtttccgccgccaggcnaaggtcaagaantcccgggncgacccacgcgtccncggacgcgtgggctcattagggtctctctgtttctgggcaaattttcttcatctccgccgttttgcttcaatacagatttctgggattttttttaccgatcaaatttaggttttcgttttcactcagaaccttagaaaccctaattttgatacattagctttagagaaccttccatcggatccgtgtacaataaaaaagtttgcgttttttttttccttaaatcgattgaacgtgtttgaagatgcctccaaagcaacanccaaaggctgatttggcgaagaagcagaaacaagtggaagacaaaactttcggattgaaaaacaagaacaagagcaagaatgttcagaagtatgttcagagtctcaagcaatctgttcagccnaaacccgatgcaactaaagctgcagc

SEQ ID NO: 6811 - DNA, 413 bp, Arabidopsis thaliana
  Clone ID: LIB24-118-Q1-E1-E2
acgcgtccgcccacgcgtccgcccacgcgtccggattgatgtgtttgatcccaagttcaacattgtctctcctggtgctgatatgagcatctacttcccttacacagaggagaagcgtagattgactaagttccactctgagatcgaggagctcctctacagcgatgttgagaacaaagagcacttatgtgtgctcaaggacaagaagaagccgattctcttcacaatggctaggcttgatcgtgtcaagaacttgtcaggtcttgttgagtggtacgggaagaacacccgcttgcgtgagctagctaacttggttgttgttggaggagacaggaggaaagagtcaaaggacaatgaagagaaagcagagatgaagaaaatgtatgatctcattgaggaatacaagctaaacg

SEQ ID NO: 6812 - DNA, 437 bp, Arabidopsis thaliana
  unsure at all n locations
  Clone ID: LIB24-118-Q1-E1-E3
cgctgcccggtnccggtccaaaaattcangggtcgacgcacgcgtccanacagtnacttgttcctccctaaagagagaaaggatgtcctcacttctactgcttgttggactgcaatggctgctctgcttgtttgtctcaacttcacaatcggtccaattcaaatgctcaaactttatggaattccttactgggtaatgcgccgctgttactcccctgtttcagcctgagcaatttgtgtattatttcctctgccttactcaaaaaggtttttatgtcaaatacagataaatgtaatgtggttggactttgtgacttacctgcatcaccatggtcatgaagataagcttccttggtaccgtggcaaaggtaaaaatacatattctctggcttccactgttctttgacnacatcgctctttcttttaagggttaaancc

SEQ ID NO: 6813 - DNA, 391 bp, Arabidopsis thaliana
  Clone ID: LIB24-118-Q1-E1-E5
tgaagatgttgagaaacatttcccgggtacactaacagccattagagactggtttagagactacaagatcccagatggaaagcctgctaacagatttggtcttggagacaaaccagcaaacaaagactatgctttgaagatcatccaagaaacaaatgaatcatgggctaaacttgtgaagagatcagttgatgctggagacctttcactttactgaacatattttgcaatgtcgacttatgaggtcgaataatgaatagactcaagattcctatatcattcttgttgtttcctttcaattgagatgtaaacattgggatttggattttgtttttcaccattgatgactgagaagtaataaaatgactttctgctttggaaaaaaaaaaaa

SEQ ID NO: 6814 - DNA, 413 bp, Arabidopsis thaliana
  unsure at all n locations
  Clone ID: LIB24-118-Q1-E1-E8
acagnnnnnnnnnnnnnnnnnnnnnnnnnnnnnnnnnnnnnnnnnnnnnnnnnnnnnnnnnnnnnnnnnntcatctactttcttcaaccttcgagtccatcaatggtcactctcgagaccaacacaatcattctatagatgatttcgagagcattttcgacatcaccattgacaatttaagctgctctaacgaactcacgtgggatttctggnnnnnnnnnnnnnnnnnnnnnnnnnnnnnnnnnnnnaaaagatcgagtactgatcaagaaggctcaagttttgggttttgggagaataagccgacggattatgaagacaaagacttgggtctgaagctgaatctgaaccatcaagaagttatccgatgcttggtctgatcaccangaaacctctgtgggacagatacttca

SEQ ID NO: 6815 - DNA, 462 bp, Arabidopsis thaliana
  unsure at all n locations
  Clone ID: LIB24-118-Q1-E1-E9
ngtttacgccgccaggaaccggtcnaagaattcccggggaaaaaggtaactgctttttcatctcttaattataactcctttcctctcttctctctctctcttccatggtgggttcttcttttagtagatctctgcaccacccaaagcccaaagctcaaagctttgcacagaagatacagagagaaagaaccacatacaaaaaaaaagagtctacttttctttttgtttctacttgctatttattacttttcacaccacaccctctggtcaaatgtctttctctctactcttctttcctttggtctgagacaacagtagcaagagtccgtgaaagaagaaaacaaaatgttaagaattttgaagaagatgagggaaaaggaagcaactttatctgtttatttgacttgagtctcttcgatctacatctggattttgcaagcaattcctcctgaaggaaaaatg

SEQ ID NO: 6816 - DNA, 389 bp, Arabidopsis thaliana
  unsure at all n locations
  Clone ID: LIB24-118-Q1-E1-F11
ccaacgaaaccagaggacagtgaacaaagaattgtataattcgatctcaactcgttcctttgttgattctttactccgactattatgaggattgtacgtgcgacggagacgttctcggcggagcttaaagagttcatgtgcgccgctgtgcaaaggaggaaagacgacgacggattcagaggctctcgtggcggtggtaaatctagaaatgccatggatcttgattctgacgccggaaacagattggtttgtgttactggtggtgtttcttaccttggtcgtgccattgttaaacgtcttcntgttcatggatactccgttagaatcgtcgttgattgtccagaggacaaangagaaagtggagtgagatggaagctgacgccntaaaa

SEQ ID NO: 6817 - DNA, 417 bp, Arabidopsis thaliana
  unsure at all n locations
  Clone ID: LIB24-118-Q1-E1-F2
gaacgaatcagagatttttaccgatatccgtcgctctctcctcctccgtcgtcgtgcttcgcttctcttgcgtgtcatctttttcgacaaacccaaaatcaaggcagaatctgataatcgaaaggacccagtagaaaacttcgcgaggaatcaagggttagaagccctaacttgatcgctaattcgagaatgaagcatttggattgagggcaaaaatcgacgtttttaaaaagtctgaactgaggtggattcgttgagatcatctgatcaaatgctcttcgtggaagtaaacatttgaggcaaaccaggtcggtaacaaggtaagggggtatgtcnaagcaaaacccggaatatgcttgaaggtttgggttaanagatacttcttttaaaatggttgctcgggaaacaaagttcttt

SEQ ID NO: 6818 - DNA, 417 bp, Arabidopsis thaliana
  unsure at all n locations
  Clone ID: LIB24-118-Q1-E1-F4
gcgtctagggtttggttggtgggaagaaggttccgatcatggcgtcggtgtcgtcgtcggatcaaggacctaagacagaagcaggatgtancggcggaggaggaggagagagctcggagacagtggcggcgagtgatcagatgttgttgtatagaggttttaagaaggcgaagaaggagagaggttgtacagctaaggagcgtattaagtaaaatgcctccgtgcactgctgggaaaaggagttccatataccggggagtcaccagacatagatggacaggtcgttatgaagctcacctttgggataagagtacctggaaccaaaaccaagaacaagaagggaaaacaagtttatctaggagcatatgatgatgaagangctgctgctagagcttacgaccttgctgccttaaaata

SEQ ID NO: 6819 - DNA, 405 bp, Arabidopsis thaliana
  unsure at all n locations
  Clone ID: LIB24-118-Q1-E1-F7
acgcgtgggttttganangagcgactctgttccttcgccgccgatacgcactcttcttcatcggatttgttcctctggtgggattgtagctctccatgtgttgtacnaatgcctcttatgacaatgttttggagcttatactcaaattctgtgaaaactttgncggtgggaattgtgangatcctgtangatgaagatatccttgaattgcatatanggctttgttgantgangttctcatctcttgccacctaanggttttgattcngccactgtanctgctangggttcgcttctggaagaaatatgggtgagactctcatcatcatgctgtctatggagaactagcacccgtcaacacnggtatccatggattcaggtgcttttactcatcaaggaatnaag

SEQ ID NO: 6820 - DNA, 410 bp, Arabidopsis thaliana
  Clone ID: LIB24-118-Q1-E1-F8
acgcgtccggctttatgcctgcttgtgtgacaatctttgacaagaattgtaaaccattgatggaacttggcgaaggtccttataacactcttcgatggaacccaaaagggagagttttatgtgtggctggattcggtaacttgcctggtgatatggccttctgggatgttgtaaataagaagcagctaggaagtaataaagccgagtggtctgtgacaagtgaatggtctccagacgggcgttatttcttgactgcctcaacagcaccaagacgtcaaattgacaatgggatgaaaatcttcaactacgacggaaagcgttattataagaagatgtttgagaggctgtatcaggctgaatggaaaccagagtctccaagagaggttcggtgacatcagtgaacttatcaa

SEQ ID NO: 6821 - DNA, 398 bp, Arabidopsis thaliana
  unsure at all n locations
  Clone ID: LIB24-118-Q1-E1-F9
tttctctgtctgtctttctctctcagagaaatggctcttcnnnnnnnnnnnnnnnnnnnnnnnnnnnnnnnnnnnnnnnnnnnnnnnnnnnnnnnnnnnnnnnnnnnnnnnnnnnnnnnnnnnnnnnnnnnnnnnnnnnnnnnnnnnaacacccatcaccatcgtcaccacttggccaagcacaactacaaagatgctctcactaaatcaatcctcttctttgaaggccaaaggtcagggaaacttccttctaancagagaatgngttggagaagagactctggtctctctgatggctctgctcttcatgtggatttggttggngggtacnatgatgcaggagacaatatcaaatttggnttcncaatggnattcanaagcacaagtggttttaangg

SEQ ID NO: 6822 - DNA, 471 bp, Arabidopsis thaliana
  unsure at all n locations
  Clone ID: LIB24-118-Q1-E1-G1
tgtttacgcctgccagtagcggtccaaaattcangggcgtccacttcactctcnctaaactctctctcagatctctctctctctgtgattcaacaatggcggtttcttcttcttcgtttctatcgacagcttcactaaccaattccaaatccaacatttcattcgcttcctcagtatccccatccctccgcagcgtcgttttccgctccacgactccggcgacttctcaccgtcgttcaatgacggtccgatctaagattcgtgaaattttcatgccggcgttatcatcaaccatgacggaaggcaaaatccgtgtcatggatcaaaacagaaggcgagaaactcgccaagggaagagagtgttgtggttgttgaatctgataaaagncgatatggatgtagaaacgttttacgatggttancttgctgcgattgtcgtcggagaanggtgaaacagctccggttgggtgc

SEQ ID NO: 6823 - DNA, 468 bp, Arabidopsis thaliana
  unsure at all n locations
  Clone ID: LIB24-118-Q1-E1-G12
ttttccgagncctatgccggcaaaaaccggtccngncntcccgggtcgaccnacgcgtccgcccacgcgtccgagaagaacaaaaaccaaaaaaaaaacccagaaaatcagagaaacatangcgaaccgacagagaaaaaaaatgtcttcgccaagcaaacgcagagaaatggatatgatgaagctgatgatgagcgattataaagtggaaacgatcaacgatggcatgcaagaattctatgttgaattcaatggtcccaaagacagtctctatcaaggaggtgtgtggaagataagagttgagcttccagatgcttatccttanaaatctccatctgttggtttcantacgaaaatttatcatcctaatgttgatgaactgtcggggttctgtttgtttangatgttnttaaacaaaacttgggagtcctangntcgaccttgtnaaatgntgtttgagaacatttt

SEQ ID NO: 6824 - DNA, 466 bp, Arabidopsis thaliana
  unsure at all n locations
  Clone ID: LIB24-118-Q1-E1-D3
aaacttncccgccggccagncnaaaaattcaannggtcgacgcacgcgtcnatcttcntcttccttctcctttctctgtttatttgcttcgtttcctcttctctttctccgattctttatccatcttcgctcagatcttccccgtttcaactctttggatccagattctcctcctttttatgtaggtaacacgcatatcaagtgttaaagagtcaagatcacaaaaagttctatcgggtgatctgggctgctttcttttgtaatcnaattgcagaaactttgctctgacttggatagcttcgtaaaaggttcaatctttctccgtttttcatcaatgagtagtaactaatctggaaatttgttgggaagagaaagggcacattgcactgctattgctagagaangtttctgcatccatgctgggtagagagcatgcgtgganactgtgttttggggtgatgcccct

SEQ ID NO: 6825 - DNA, 485 bp, Arabidopsis thaliana
  unsure at all n locations
  Clone ID: LIB24-116-Q1-E1-H4
gtaggccggccgaaggtncaaaggtcnannnacgcgtcaggtcgacgaggatctcgattcgttagggctcctgggctcttactctgtcgcgttaatcttcaacctcaacccaaaatcccatctttttcctacagtcttcgctctgattatcgtcttcataatggtttctccaattacatcagacgtaactcaattcgnnnnnnnnnnnnnnnnnnnnnnnnnnnnnnnnnnnnnnnnnnnnnnnnnnnnnnnnnnnnnnnnnnnattcgttttgttcaacggagttcaatgcttaatggtcgtctcttctcgacttctactcccaatccagaccaaaccaccaccaagactaaggaaatcaagacaacctcgtcggattcaagactcagctatggctgacatgaagattctccgtacgcttgctggctatttgtgggatgagaagacaatccagaaattccgtttcaagggtcatcgctgctttg

SEQ ID NO: 6826 - DNA, 480 bp, Arabidopsis thaliana
  unsure at all n locations
  Clone ID: LIB24-116-Q1-E1-H7
cgccgnccggtacaggtccanaaattcccgggtcgacccacgcgtccgcgtcgtcacatggctcacattccgatgctcagattaataccacgtaaccgttccctatgacgttgtctccgttcttcgtctcttcaaccttcaattttgcaaaccctaaacgtttcgttcgttagtcgcgcgtactcagatttcaatgttgatcgtcgattatgtggttgattgctacgtcgttacccagatgttccattgatattctaggcatggcacaaccatgaagagctttctggcgtgagatacaatatcatctttgttggatcaacatgtcttttcatttggataagaccgagctgatgaagagtcattgactcattgttcctatagtgcatcaactaaatctttttgtatgaggacacactcaaaagcattctcccttcgagtggccaaaggttgctgtgctactttcttctcttctatggaggt

SEQ ID NO: 6827 - DNA, 468 bp, Arabidopsis thaliana
  unsure at all n locations
  Clone ID: LIB24-117-Q1-E1-A2
gtacgcctccagaattccaaggtcgacccacncgtccggctctctaacgccaatttcgatttcgccaaagttatcgctgtttcaggcagcgggcaacaacacggtagtgtgtattggtcaaaaggtagttctgaggtattgagatcattggattcaaagagatcattgaaagaacaactcgaaaacgctttttcggttaaggaatctcctatatggatggatagtantactacattgcaatgtaaagagattgagaatgctgttggtggagctatggagttgtcgaagatcactggctctcgtgcttatgagcggtttactggtccgcagatacggaagctttttatgactcagggggaggtgtatnanagcacggacaggatttcgcttgttagctcttttatggcgtccttgttggttggacaataagcttgtaatgaatnaactgatcctgcctgggaatgaatt

SEQ ID NO: 6828 - DNA, 382 bp, Arabidopsis thaliana
  unsure at all n locations
  Clone ID: LIB24-117-Q1-E1-A3
tctttttacngaagagagaaatcttagagctgagctaagaaaaatgtcaaaagaagtgagtgaagaaggaagacatggcaaagactacgtggatccacctccagctccacttctagacatggctgagcttaagctctggtctttttacagagctatcatcgcagagttcatcgccactctcctcttcctctatgtaaccgtagctacagtcattggccacaagaaccaaaccggtccttgtggcggtgttggtttactcggcattgcgtgggcctttggtggcatgatctttgtcctcgtctattgcaccgccggtatctccggaggtcacattaacccagctgtgacatttggtcctgttccttgggtcctaaaatgtccn

SEQ ID NO: 6829 - DNA, 445 bp, Arabidopsis thaliana
  unsure at all n locations
  Clone ID: LIB24-117-Q1-E1-A4
tacgcctccanaattccaaggtcgacccacncgtccgcccacgcgtccganacnaagaacggaanaaggacttcactttcacggcgaagttaggattcgtgttctttaatcgtataggaggtctcggagattgtgagacgctaatgagtcggaatgatganaatcatgtcaggtaagttcctgattctaaattttaatgtcataaacatgataacatcanttagtagtttggcttcgaaattttgtaattttgggtgattcangacaagttggtcgtactctggtggactttacgnaagtagccatcacaatgattgtatacctcaaangtttttacccatctggtgagtaaagagcgatttgtgagattgacatgcatctccaagtgattgatcaattntgtgtgttgtacggttaagcngcaatttgaacaggacggagnatg

SEQ ID NO: 6830 - DNA, 418 bp, Arabidopsis thaliana
  unsure at all n locations
  Clone ID: LIB24-117-Q1-E1-A6
ttctgcattttctgcttcccaatggcttccagaattgctgattctctcttcgccttcacgggcccacagcaatgtcttcctagggttcctaagcttgctgcttcttctgctcgtgtttctcctggtgtatatgctgtgaagccgattgatcttctgttaaaaggacgaactcatcgaagtagaagatgtgtagctcctgtgaaaaggagaattggatgtatcaaagcggtggctgctccagttgcaccgccttcagctgacagtgcagaagacagggaacagttagcagaaanctatggattcagacaaattggagaagatcttcctgagaatgtcaccttaaaagatatcatggatacacttcccaaagaagtgttttgaagaattgaggattctgaaaagcctttgaaantccggt

SEQ ID NO: 6831 - DNA, 428 bp, Arabidopsis thaliana
  unsure at all n locations
  Clone ID: LIB24-117-Q1-E1-B1
acgcgtccggaaaaatgtcggcaagacctgaaggaagtccgccggaggttacgctcgagacctccatgggtcctttcaccgtcgagatgtattacaaacactccccgagaacttgccggaacttccttgagctatcccggagaggttactatgacaacgttctgtttcacagaatcgtcaaggatttcattgtgcaaggtggggatcctacaggaactggaagaggtggtgaatccatttatggttcgaagtttgaggatgagataaacaaagagttgaagcacacaggagccggaattttatcaatggcgaacgctggtcctaatacaaatgggagtcaatttttcatcaccttaaccccacaaccgtccttggatgggaaacacacaatatttggtaaattttgccaaggcatggaggngattaaa

SEQ ID NO: 6832 - DNA, 409 bp, Arabidopsis thaliana
  unsure at all n locations
  Clone ID: LIB24-117-Q1-E1-B10
cgataaccaaaaaatccctattttccgagatgaataatacacgagaagaagtaggggaattcactcaaatcttcaacgctttaatgagtcttatgaggaaatttatattcaaagttctacgcgtcggtccaatccctactaacatttctttcatcatggatggaaaccgtaggttcgccaagaaacgcaatcttgaaggcctagacgcaggacacagagctggtttcatatccgtcaaatatattcttcaatactgcaaagagattggtgtaccgtatgtcacactctacgcatttggtatggacaatttcaagagaggacctgaagaagtcaagtgtgtgatggatctaatgcttgagaaagtcnnagctcacgattcgattnaagctgtatcanggaatatgaacgg

SEQ ID NO: 6833 - DNA, 447 bp, Arabidopsis thaliana
  unsure at all n locations
  Clone ID: LIB24-117-Q1-E1-B12
ngtacgcgtcaaaaattccaaaggtcgacccacgcgtccnaagaaaccctaagacctcttcgaaaatctccccagaaacacttatttcatttcttccttggccttgactacgcgtctttccttttactccggaaggaagatccagaaaggttttctttcgatcgttgcttttgactatgcatagatctggtacaacaatggcgtggaacgtattcaagttctgtactgccttacgaggtcttggatcgatcatgatccttttggttcttggtgttgtcggtgttacttattacgctgtcgttttgactaattatggtcctgcactctctcaaggtggccttgattctcttgctgctctcactatcttaatcctcttccatttcctcctggcaatgcttttgtggagctatttctcaatgggttttactgattcctggnggttgtgcc

SEQ ID NO: 6834 - DNA, 429 bp, Arabidopsis thaliana
  unsure at all n locations
  Clone ID: LIB24-117-Q1-E1-B3
acgcgtgggctctgatcggacgtatcatcagttgataagcacttgcgattttagtcgtcagaaggaatctgatgaatgcgaaaccctttattcttacgctatggagcatgagtttggtaacattgatcagtacaacatctatgcgccgccgtgtaacaagtcaagcgacggtggtggtagctacaatggttcttccggccgccggagtatgcggcttcctcaccttccccactccgtattgaggaaaatttccggttatgatccatgtnccgagagatatgcagagatctattataaccggcctgatgttcagaaagctcttcacgccaacaccaccaanattccgtataaatggacagcttgcantgaggtgctaaaccggnattgggaacgaaccnagatncaaggggttcccccnatataccggga

SEQ ID NO: 6835 - DNA, 428 bp, Arabidopsis thaliana
  unsure at all n locations
  Clone ID: LIB24-117-Q1-E1-B6
acgcgtccntcaggacttacaatgctaggctgcttggattagccaatgaggcgaaatcnaaagagctagtaaatctctttggagaacttaaggctagtgggctcaaacctgatgttttcagtttcaatgctatgattagaggatctatcaacgaaggaaaaatggacgaagctgaagcgtggtacaaagaaattgtgaagcatggttatcgtcctgataaagctacctttgctttattgcttcctgctatgtgtaaagcaggtgactttgagtctgcgattgagctcttcaaggagacattcantaagcggtatcttgtcggtcaaacaacgttgcagcagttagttgatgaattggtgaaanggtctaagagagaanaagctgangagattgtgaagattgcanagaccaaatgntttcttaaaagt

SEQ ID NO: 6836 - DNA, 411 bp, Arabidopsis thaliana
  unsure at all n locations
  Clone ID: LIB24-117-Q1-E1-B9
atcaaacaactaaattaaaaaaaaatcttgagagattcttggaacacaagaaaaacatgaaacctagaatgtgtttaatcttgtttattgctttaatgagagtaatgtcgattgtttctgctcagtcgagttgcacaaatgttctaatcagcatggcgccgtgtctcagcttcatcactcaaaacacttctctcccgtctcaacaatgttgtaaccagttggctcatgttgtccggtattcttctgagtgtttgtgtcaggttctcgatggtggaggttctcagcttgggatcaatgttaatgagacacaagctcttgctttgcctaaagcttgtcatgttgaaactcctcctgctagtcgctgccaaantnggtcctcnggtaaattcaaattcagaacatggaaatggt

SEQ ID NO: 6837 - DNA, 441 bp, Arabidopsis thaliana
  unsure at all n locations
  Clone ID: LIB24-117-Q1-E1-C1
cccnggccgtccgattgagtaatttccttctgcgcttgaaaagaaatgtcgaattctaggatgaatggtgttgagaagctaagcagcaaatccacaaggcgtgtcgcaaatgccggaaaggcaacactgcttgctcttggcaaagccttcccaagccaagtcgttcctcaggagaatctagtggaaggatttctacgagacaccaaatgtgatgacgcgtttatcaaagaaaagctggaacacttgtgcaaaacgacaaccgtgaagacgcgatacactgtgttgacgcgagagatactggctaaataccctgagctaacaacagagggttcaccaacaatcaagcaaagacttgaaattgcaaacgaagcggttgtggaaatggcaatgggaancnntttaaggtngaaccaaggaatggggaaggccantggaaaacat

SEQ ID NO: 6838 - DNA, 421 bp, Arabidopsis thaliana
  unsure at all n locations
  Clone ID: LIB24-117-Q1-E1-C2
acgcgtccggcgctcttgaagctttccggttagatcctgaaaagtggggagtgaatgttcaacctttgtctggatctcctgccaacttccatgtgtacactgcattgttaaagcctcatgaaagaatcatggcacttgatcttcctcatggtggtcatctttctcatggttatcagactgacaccaagaagatatcagctgtgtctatcttctttgaaacaatgccctatagattggacgagagcactggctacatcgactacgatcagatggagaaaagtgctactcttttcaggccaaaattgattgttgctggtgcaagtgcttatgctanattgtatgactatgcccgcatcagaaangtctgtnacaagcaaaaaagctgttatgctagcaaatatggcacacatcanttggtttg

SEQ ID NO: 6839 - DNA, 492 bp, Arabidopsis thaliana
  unsure at all n locations
  Clone ID: LIB24-116-Q1-E1-H3
ntgttacgcctgccgtagccgtccgaaaattccngggtcnacccacgcgtccgatcgatcaacaaagtgaggttaggttccatctccacctctttctctctcgaatcttctccgattaaaggaacaaggtctggtttacaaaagtctcatagatgtcgagtggaacagtgagaagggtttcacgtcaagatatacaactggttcaaaaccttatagaacgatgccttcaactttacatgaatcagaaagaagttgtggatactttactagagcaggctaaaatcgagcctgggttcacagaactagtttggcagaagcttgaagaagagaatcgggagtttttcaaagcttactatcttaggctaatggttaaacaccagataatggaattcaacaagttgcttgagcagcaggttcaccacatgcgtcagatgcatccaactgggtgttgcttctgtccaaaacacaaatggttctcatcttcaatcaatg

SEQ ID NO: 6840 - DNA, 492 bp, Arabidopsis thaliana
  unsure at all n locations
  Clone ID: LIB24-116-Q1-E1-F12
tagaaagtccganattcccgggtngccccacgcgtccgctntcatgctaaagagagccgcggaagagccactgggtcacgcagcagctataatcacagatgttctagagaatgcagaaaccaatcaagtgataaacgcttctcagaaacgaacgctgcttcaagaaatggctctacggctaacttaaaacaggggaaaaaaaaagaaaagacagaagacaaaaccttccctcttcaacaaccaatcaatcatcactggttagttacaaatatttacaaatgcgtgtattttacatatcttgtacctctgcctaatgaagggaatgttaaaaagtcttgaagatcgaaatccgctgattgacaaagcgggttctgtgtggaagtaggaaaaaggaaccaaaaattggaatctggttcctagatttttgggctgttctcataagtgaatganagcaaaacgtgtttaattatctctgtctttctcatattttan

SEQ ID NO: 6841 - DNA, 479 bp, Arabidopsis thaliana
  unsure at all n locations
  Clone ID: LIB24-116-Q1-E1-F4
cngtagccgtccgaaattccagggtcgacccacgcgtccgggttttcctacgagatgagtaaagcccaaaaacggaaacgcctaaacaaatacgacggcgaatcaaaaactccggccaataaatcaaccgtcgacggcggcaatccttaccctacactacttagacctaccgctgaagaatgccgagacgtaagggatgctttgttgtctctccatggattccctcccgaattcgctaattaccgccgtcaaagactccgatcattctccgccgtcgatgatcacgatacacagtgtaatctgaaatctgagacattgaatgaaacggaagaggagagtgtacttgatgggcttgttaagattcttctctcgcaagaatacaactgagagcaattcccaaagggcttttgcttctcttaaagctacatttccgaaatgggatgacgttttgaatgctgagtctaaatcaattgagaatg

SEQ ID NO: 6842 - DNA, 443 bp, Arabidopsis thaliana
  Clone ID: LIB24-116-Q1-E1-F5
acgcgtccggagtatccctctggctgggggtgctaatgtggagttcaatttggaaaaggaagcagagaggaaatttgcattgaaccttttgggtctatatcagaatatcagacaggcagtcagcgtttatgacgatttatctcatggtattgacagaactgccgaattaacggttggacgctttggtggtatcgatgctttagcacaggagtatggacaaggtatggctaagcaagggatggatgtattactttccacattatcaaagctattcaatctgttggagacatctcataaaggccaaattgttggggttatcgtccttgatgagagagtaaaccaagaatcagaaaatcttttgaactttgggtcttcccgttcatctgcacgctcaatggtggaagtggagggaattccaaagtgcagccattatccctgaggtt

SEQ ID NO: 6843 - DNA, 491 bp, Arabidopsis thaliana
  unsure at all n locations
  Clone ID: LIB24-116-Q1-E1-F6
anctgttccgcctgcccgtacaggtccgaaaattcccgggtcnacccacgcgtccgcggacgcgtggggttcaaggttgaagctaagaaaggagaatggttgcccggtttggcatcgcctgattatctcaccggcagtcttgccggtgacaatgggtttgacccgttgggtctagcagaggatccaagagaacttgaaatggttcgtccaggcagagctggtcaacggacgatgggctatgctcggtgtcgctgggatgcttttgccngaagttttcaccaagattgaatcacaaatgttccctgagtggtacaatactnggaaaaagcactattttgcancgccncctacattgttcccgatntagttttcatattgtnncattacnttgatatcacacggtggcaanacatcaagaacccaggatgtgtgaaccaagaccctatctttacgcaatacagnttacctaagggtnaatttggttaccctgg

SEQ ID NO: 6844 - DNA, 445 bp, Arabidopsis thaliana
  unsure at all n locations
  Clone ID: LIB24-116-Q1-E1-F7
acgcgtccgcatagtttcttcttgcttttgagaaaaaataattatatatttttatataggaaagggttaatttattaataaaaaaaaataaaaagaagcagaaaagagataatgcagggtggtaggcttttgacggtgttggtgtgcctcgcctccacggtggcgttggtgagcgccggtgacccttacttctactacacgtggaacgtaacctacggaaccgccgcgcctctcggaattcctcaacaggtgattctcatcaacggacagttccctggtcctaacctaaactcaacctccaacaacaatgtcgtcatcaatgtcttcaacaacctcgacgagcctttcctcttgacctggagtggactccaacacangaagaactcatggcaaagatggtgtgactgggacctcatgccaatcccaagcaaggaacaaacttcac

SEQ ID NO: 6845 - DNA, 459 bp, Arabidopsis thaliana
  Clone ID: LIB24-116-Q1-E1-F9
acgcgtccgccagctttatctctctctttttcacatcccatggctagatggtgacgacgattcacgcataaactagggttcccccacaaatcatcttacacgtatcctctattccttccttcctttctccgtcatcatcatttttcccaccgacaacaatctctcggagtttgggtattattacttctctcatcaaccaattgtaccactagatctcccagattccttcattatctctatcaataatggcgttgaagtctagttctgctgatggtaaaaccagaagctctgttcagatcttcattgtgtttagtttatgttgcttcttttacattttgggagcatggcaacgaagtggttttgggtaaaggagacagtattgctcttgagatgaccaacagtggagctgattgcaacattgttcctagcttgaatttcgagactcatcacgctggcgaa

SEQ ID NO: 6846 - DNA, 485 bp, Arabidopsis thaliana
  unsure at all n locations
  Clone ID: LIB24-116-Q1-E1-G12
aaattccgaaaagtcccgggnngccccacgcgtccgggacttgctaaatcaatagcttgggatggtgaaggtgctacatgtctcatcgaggtaactgttaaaggaacagaaactgaagcagaagcagcgaaaattgcacgctctgtggcttcctcttccctggtcaaagcagctgtttatgggagagatccaaactggggacgcatagctgcagctgctggctatgccggggtttcttttcagatggataagctgaagatatccctcggcgagttctcactcatggagagtggtcaacctcttccgtttgacagggatggagcaagtaactacctcaagaaaaccggtgaggttcacggaacagttacaatcgatatatccgtaggtgatggtgcagccatcggaaaggcatggggatgcgatcttagctatgactatgtcaagatnaacgctgagtacacctcatanaactgagaccgagagac

SEQ ID NO: 6847 - DNA, 474 bp, Arabidopsis thaliana
  unsure at all n locations
  Clone ID: LIB24-116-Q1-E1-G2
gtagncgtccacaattcccnggtcnacccacgcgtccgggntgtttttcttcctttttggtttttatcgattttacnnnnnnnnnnnnnnnnnnnnnnnnnnnnnnnnnnnnnnnnnnnnnnnnnnnnnnnnnnnnnnnnnnnnnnnnnnnnnnnnnnnnnnnnnnnnnnnnnnnnnnnnnnnnagaaagcccnnnnnnnnnnnnnnnnnnnnnnnnnnnnnnnnnnnnnnnnnnnnnnnnnnnnnnnnnnnnnnnnnnnnnncatggagatgggttctgacggtgaagatcagaagatcaggagcgtcgttggtgatgctaatcttaataataagaagaagaagattgataataattcctcctctaaggatggtcgtgtcaagcctaaacgtcagatgaaaactccgtttcaacttgaaaccttggagaaagtttaatcagangagaagtatccgtccggacgcaatggaaac

SEQ ID NO: 6848 - DNA, 444 bp, Arabidopsis thaliana
  Clone ID: LIB24-116-Q1-E1-G5
acgcgtccgcccacgcgtccgcccacgcgtccgctcagtttcagaaacccggaagagctgaggctgcatttgccaagcatgattgtttatcggtaatgaagaagttcttgctaataacaagaacagactacttagtggctcctcctgacacagagatcatagatcatcttgagataccgtcgacgattccagattggataacagaagaagagattcaagtgtatgcggaaaagtttcaaagatctggattcactggccctttgaattactacagatccatggatatgaattgggagatattggcgccgtggcaagactccaaaatcgtcgttcctactaagtttatagcgggagacaaagatatcggatatgaaggacctaatggaacaatggagtatgtgaaaggagaagtgttcaagattgttgtgcctaatcttgagataa

SEQ ID NO: 6849 - DNA, 509 bp, Arabidopsis thaliana
  unsure at all n locations
  Clone ID: LIB24-116-Q1-E1-G9
aactgtttccgcctggcncgtacangtccgaaaattcccgggtcgacccacgcgtccgcccacgcgtccggaggttttggaggaatgtggagaaaaaataagcaagaaagagtcaaagaagcgagccgctaaactggagaagttgctccgtaaacaggaacgagaagaagccacatcatcatctctttctctggaggaggaggatgaatcgtgttccagcaactacggtgacgtgactactaacgagttgcagtcggctgttgagggaaaagagctcactgatgtgagcaacttggttgaagagattgtggggtcagaggtttcgatcagaggtcgactgcacaagaatcgcttagtcggtaccaaattgtttgtgatcttgagggaaagtggattcacggttcaatgcgtggtggaggagaccagagttggtgcaaacatgattaaatttgtcaagcaactgagtcgtgaatctgttgttgagcttatcggtgtctctctcaacctaa

SEQ ID NO: 6850 - DNA, 484 bp, Arabidopsis thaliana
  unsure at all n locations
  Clone ID: LIB24-116-Q1-E1-H1
ccgtagccgtccgaaaattccagggtcnacccacgcgtccgtcgaaatttcctcttctcaaaaaactcaaaatttgaagatgaaggacagagaggaatcatcatcgtcttcttcttcaatgacaacaanaaaaaactaatggaataatcaacaacggcgaacacgaacctcgagatatcaacatccgatcattctcttctgttccttcttctcctcgtaacgcttcttccaaatacgatttcgtcaaggtcaaagtatggcttggagacaacgcagatcactactatgttctgtctcgattcttaagtctgtagaatgttaactgttactaagatcccaaatcatgaagctataaagatttctcttgaactcaagaagcttctaattgacaacaagtcttcttgatgtctctcagtctgatttggaaaccaatttgtttaagctaatggagcgacgtggttatggngaaagaagtacattaatc

SEQ ID NO: 6851 - DNA, 425 bp, Arabidopsis thaliana
  unsure at all n locations
  Clone ID: LIB24-116-Q1-E1-H10
tcccgggggncgccccacgcgtccgtttcttgtcttcaaactcacacaaagaangaaaagtcttcaaagctcaaaaagcaatgactcgaccgtcaagattacttgagacggcggcgccaccaccacaaccgtcggaggagatgatcgcagcggaatccgacatggtggtgatcttgtcggctcttctttgcgctcttatctgcgttgctggtctcgccgccgtcgtacgatgcgcttggctccggcggtttacagccggaggagattcgccgtcaccgaacanaggcttgaaaaagaaagctcttcagtctcttccaangatncactttcaccgccgcggaatcatcctcnggcgcccgncgctgaaganggagatcgacggaatgtgctatttgcctcantgacttcgccggaccggtgaanga

SEQ ID NO: 6852 - DNA, 495 bp, Arabidopsis thaliana
  unsure at all n locations
  Clone ID: LIB24-116-Q1-E1-H12
gnacgccccggaaagtccgaaattcacnggncgcnccacgcgtccgtcgtactcgagtaggtctcagttacgtnnaggatcgagcttangagatgagtggngttgaagagaaagtttctggaacgacanttacacctgcagatttcctcaaatccatccgtgggagacccgttgttgtcaagctcaattctggtgttgattatcgaggcactcttacttgtcttgatggatatatgaacatagcaatggagcagacggaggagtatgtaaacgggcagctcaagaacaaatatggtgacgcctttatccgtggaaacaacgttctttacatcagtacagtaaacatgactgtagcagacggagcctangcccatcatgatcatcaacaacaacaacagtggtcatgttatggctgccatttttgttgtcttcttctacctcatattaaaagagtatagacatgtnccaagattgtcatcctangttcctcaatag

SEQ ID NO: 6853 - DNA, 478 bp, Arabidopsis thaliana
  unsure at all n locations
  Clone ID: LIB24-116-Q1-E1-F11
attcccgggtcgncccacgcgtcnnnnnnnnnnnnnnnnnnnnnnnnnnnnnnnnnnnnnnnnnnnnnnnnnnnnnnnnnnnnnntttcactagggatatgtctgatgttagtagtagcatcaagtgtgatctatgaagcgcaaggaacgttcttactaaaccattacttgaagaagaattttccaaaaaaatgcaacgagtttacgccttacgctaacaagggtatgataacgttggtgaccgatctcgaaggtagcagtccggccactacagagttcaagactttctttacacagttcaagtcttacatgtctttcatcgagacaacatcggcctcaacaaaaaatgttgatgccgagatgacagctaaatgtgacggtcttttcaaggccatgtctgcattgagtgctagtaaaggcgtcaaatcagcggatgctggggagtatgaagatgaccatgttgtcgatgggaaagact

SEQ ID NO: 6854 - DNA, 405 bp, Arabidopsis thaliana
  unsure at all n locations
  Clone ID: LIB24-116-Q1-E1-C6
ttctggctaaattttgtgttttctcaggtggataagaaattttctctttgtcgttttcctcgataattttcggattacggcgacgaatcagnnnnnnnnnnnnnnnnnnnnnnnnnnnnnnnnnnnnnnnnnnnnnnnnnnnnnnnnnnnnnnnnnnnnnnnnnnnnnnggatcgtggacaacgctctcgctgtaaccaaagatgcagatcagtaaaaactgttacatatgagtctttgaataacattgcgaggtgcataaatggagtatcagctcttctgttgacccttctcccagggaaggctaatattcttgaaggcttacatggctgggaactcaggcctacgtttcggggaccacgtttaccacggtggatgcataatggggtctcttctttcaatgagt

SEQ ID NO: 6855 - DNA, 445 bp, Arabidopsis thaliana
  Clone ID: LIB24-116-Q1-E1-C7
acgcgtccgtagaaatccacaatatctttcttcacactttctttcactttcccgggaaaacagccgagaaaataaaagaaacgaagaaaagtttgttcctttgtggggatcaaagaagaatgtactcggcgattcggtcttcgcttcctctagatggcagcttgggagactactctgacggaaccaatcttcccatcgacgcttgtctggtcctaaccactgaccccaagcctcgccttcgttggacctctgagctccatgaaagattcgttgacgccgtcactcagctcggcggacccgacaaagcaacgcctaaaactataatgagaacaatgggagtgaagggtctcactctttaccatctcaaatctcatcttcagaaattccgcttggggaggcaatcttgtaaagaatcaattgacaactctaaggatgtttcttgtgt

SEQ ID NO: 6856 - DNA, 442 bp, Arabidopsis thaliana
  Clone ID: LIB24-116-Q1-E1-D5
acgcgtccgtacagaggtcattagcttccttctttcaactgaaattattcctctgtgcctccgtaccatggaaatggggagtgagctgtcaaaaacagtggcaacatttattgttcaaaagatactgttggatgatgtggggatggattacatctgcacaacagcagagcggttttttgcagttggtcgagtgttgggaaatatggttcagtcacttgtggagcagccttctccgcgccttttgaagcatatcattcgttgctatctccgtttatcagacaacccaagggcttgtgctgcactcgcaagctgtctccctgactcgctacgagatggatcctttagcaattgtcttcgcgaggatccaactgcaagaaggtggctgcaacagttggtgcacaatgttggagttggtcgcgtccaacacatcaaggtggaggat

SEQ ID NO: 6857 - DNA, 491 bp, Arabidopsis thaliana
  unsure at all n locations
  Clone ID: LIB24-116-Q1-E1-D6
aantgtgtccgccggccggtaanggtccaaaattcccgggtcgacccacgcgtccgcncgttantggcggcttcgttctcactcacgagcttcatctccttcatctcaccattcaaatcncaaactaaacctacaccaccaccaaatctcactcttccttctccaacaatctcccaaaggcgaagaaatgatctcgctatcgaatcaatggcggtcgaagaaacttcctcaaccgcttcttcactttcctctgagcttgcttccgtgatttgtccctcgcttgcttactcnaacacactcttcttcagttctggatacaatgtgcaagtgtttgttgaagataatgagtcagagganaggcttgtgaatcgatttangagaagaagtgatgagaactggtgttatacaggaatgtaagaggagaagatactttgaagaataaacaagatnanaagaaacgtatgactcgtgatgctgctaagcgtaataag

SEQ ID NO: 6858 - DNA, 442 bp, Arabidopsis thaliana
  unsure at all n locations
  Clone ID: LIB24-116-Q1-E1-D7
acgcgtccgcnctcttctttttttttttttttggtttttcatttaagtctattcaatcatggaaaccggtttaaacatcttaaagctatcgctatgcgtcagcctagtcgtggttggatcatatgctcaggctcccgcaccatggaatccatctaatgggtttcgtccggggacatgtgaccactacgagtgtcccacctataaattggtacaggccggatacggctttgagatccgcatgtacgacgctgccctatggatatctactantcctatcccctccctatccatgactcaagccaccaaaaccggtttccgacggtaaatgaataaatcgaatatataagacttggtgttctttcggtttctttatattataaactgaagttgactacgtttttgggtttatagattaaatangtacatanaaggagataacaag

SEQ ID NO: 6859 - DNA, 490 bp, Arabidopsis thaliana
  unsure at all n locations
  Clone ID: LIB24-116-Q1-E1-D8
aactgttccgcctgccggtaanggtccgaaaattcccgggtcgacccacgcgtccgctgttttcaaaacagaggagaagaagcttgagctaaagcttggaccacctggtgaagaagatgatgatgaatcgatgataagacacatgaagaaagaaccaaaagacaaatctatcctctctctcgctggcaaatacttctctccttcttccaccaaaaccacatcccataaaagaactgctcctggtccagtggtgggatggcctccggttcgatccttcaggaagaatttagctagtggaagttcttcaaagcttggaaatgactcaaccacctccaatggtgttaccctcaagaaccaaaagtgtgatgctgctgctaagacaacagaaccaaagagacaaggaggcatgtttgtgaagatcaacatgtatggtgttcccattggtcgtaaagttgatctcagtgctcataatagctatgagcagttatct

SEQ ID NO: 6860 - DNA, 498 bp, Arabidopsis thaliana
  unsure at all n locations
  Clone ID: LIB24-116-Q1-E1-E1
cgtagccgtccanaaattccagggtccacccacgcgtccggnaaaagctcgtttgattctgattttcagtacgaatacgaaccgtgaaagcgtggcctatcgatcctttagaccttcggaatttgaagctagaggtgtcagaaaagttaccacagggataactgggcttgtggcaaccaancgttcataagcgacgttgctttttgtccttccgatgtcggctccttccctancaattgtgaagcaanaattcaccaagtgttgggattgttcacccaccaataagggaacgtgagctggggttanaccgtcgtgagacaggttagtttaccctaactgatgccccgcctcnccnataagtaaattcaacctagtacgaaaaggaaccgttgattccgcacaaatttggtcatcgccccttggttgaaaagccagtggcgcgaagctaccgtgcgccgggattatgactgaacgcctctaagtcagaatcccgggcta

SEQ ID NO: 6861 - DNA, 495 bp, Arabidopsis thaliana
  unsure at all n locations
  Clone ID: LIB24-116-Q1-E1-E12
ctgttncgcctgcccgtacnggtccggaaattcccgggtcgacccacgcgtccgcccacgcgtccgattgatggtatgcttctgcttattgttgagaaagtcgtggaagaaatcgaaagaggtggattcaataaagttggatcagctccaccttcaccgtcatcggagtttagcgatgatctatgggctactatctgggaagttagtaatacagtgttnnnnnnnnnnnnnnnnnnnnnnnnnnnnnnnnnnnnnnnnnnatacgttcaatctcctgaagtgatggagatgtgtaggtttgctggagagattggtattcgtggtgatttgcttagagaacttagatttaaatgggcaagagagaaaatggacgacgctgagttttatgagagtttggaacagcaacgtgatttggataattcgattagggaatctgaaactgtggatggagaagtagaagaagaagggtttgttccttctgatgaanttgaatct

SEQ ID NO: 6862 - DNA, 497 bp, Arabidopsis thaliana
  unsure at all n locations
  Clone ID: LIB24-116-Q1-E1-E2
actgttacgcctgccggtagncgtccgnaattccngggtcgacccacgcgtccgctcttctctcattgaaatcgaacgaggatggggaagaagaaatcgaaggtaacggagccggaatctcaaaacgatgaatctcagacaatcttctccactctcttctccggcgaggttgaaagctctggctttgcgagtctcttctccgctgataaccctttccggcgaaaacaacctcaagaaatcaaagagtcgtcaattcctnnnnnnnnnnnnnnnnnnnnnnnnnnnnnnnnnnnnnnnnnnnnnnnnnnnnnnnnnnntttgcctgtgaagacgaagaaatctaaaaaggaaaaaaagcttacagattccggcgacgagaaagagacgatttcggaggctgtagaagaaagtgggttggtttcaaagaggaagaagaggaagagagatgaagattgagaacgaatacgaagacgaagaagtatggaagcgttgagatg

SEQ ID NO: 6863 - DNA, 443 bp, Arabidopsis thaliana
  unsure at all n locations
  Clone ID: LIB24-116-Q1-E1-E5
acgcgtccgnnnnnnnnnnnnnnnnnnnnnnnnnnnnnnnnnnnnnnnnnnncaccacaaaagtaacaaagagtggttggccatttttttatgtacactgacttctacaatctttgttgcattgtttattcaagaaccctaactcctacacaggtaaactgtaaggagagatgagcttatcggttttggtgtgagcagaggcagtctactcggcgaaagagtgttcattcaattgctcggttggaagcggctcaaccttctcggccttcccgtctttctttgggattatcagaccgtaacctccttcttttctcttgtacactatgtttatctcaccagtttcttcattttggaagccatagaagtcgtgactgactagttccagctgctcgactgcctcagcgacagtcaatggtggcatctcgaaagtcttggtacggaca

SEQ ID NO: 6864 - DNA, 443 bp, Arabidopsis thaliana
  unsure at all n locations
  Clone ID: LIB24-116-Q1-E1-E6
acgcgtccgcacaaatgtcatcattgaaagtggagctgtcccgatattcatccaacttctcagctctgctagtgaagatgtccgcgaacaggctgtttgggcattgggaaatgttgctggagactcaccaaaatgccgggatttagtcctaagttacggtgccatgacacctcttctgtctcaattcaatgagaatanaaagctttcaatgctganaaatgctacatggacattatcaaacttctgcagagggaagcccccacccgcatttgaacagacacaaccagctttaccagttcttgagcgccttgtgcaatcaatggatgaagaagttctcacagatgcatgctgggctctgtcatacctctcggataattcaaacgacaaaatacaagcagtcattgaagcaggagttgttcctcgcctcatccagctcttangtc

SEQ ID NO: 6865 - DNA, 423 bp, Arabidopsis thaliana
  Clone ID: LIB24-116-Q1-E1-E8
gggcggacgcgtggggcaaaaatgacagaactcaaatggatatgtatttcattctcactaacactcttgctaagcttagcagttgaaggagcctttaacataaaccagaaatggtctggtggaagtcattttggttacgagggcgggttctgttttcccggtctctgcattggaggatctggtggtagtagagtccattatggcagggaccattacggtggtggaagtcaatatagaggtggtattggttacagagagaccatgtactgcaaaccgttgacttgttatggtggctcatgtgatgcactccatttgcatttagacaaagggttatatgaatctctcatacgcaatactaagacagcgaaacaatcgtcgactgttgatttcaacatgccagagactttgaaacacaatgtcatc

SEQ ID NO: 6866 - DNA, 511 bp, Arabidopsis thaliana
  unsure at all n locations
  Clone ID: LIB24-116-Q1-E1-E9
aaactgttccgcctggccgtacnnagtccggaaattcccgggtcgacccacgcgtccgcccacgcgtccggtcgtcgccttttatacatcaaacggagacgtgttcgagaaaacacacgacgagttagacatagagtttctagggaacataaaaggaaagccgtggaggtttcagacaaatctatacggaaatggaagtacacatagaggtcgtgaagagagatatcgtctctggtttgatccttctaaggagtttcatcgttatagcattctctggactcctcacaagatcatattttgggtagatgatgtgccaataagagaagtgatcagaaacgatgcaatgggagcagattatccggcaaagccaatggctctttacgccaccatttgggacgcttctgattgggctacttccggcggcaaatacaaagctaattacaaatttgcccctttcgtagctgaattcaaatctttctctctaaacggttgctccgttgatcctaatcaa

SEQ ID NO: 6867 - DNA, 413 bp, Arabidopsis thaliana
  Clone ID: LIB24-116-Q1-E1-C5
ttcacatctaaatctcacaaatctctctcaagcttcgatctttcttctagagacgagctagtgcttccacaaaccctaaactatgtccggcggtttcttccggggtacttccgccgagcaggatactcggttttctaacaagcaagctaaattgatgaaaagccagaaatttgctccggagttagagaatctggtggatatcactaaagtgaagatggatgttatgaaaccttggattgcgactagagtcactgagcttcttggtattgaagatgaagtgctgattaactttatctatggtctgcttgacgggaaggtagtgaatggtaaggagattcagataacgctaactggattcatggagaaaaatactggcaaatttatgaaagaactttgggacacttcttctaagc

SEQ ID NO: 6868 - DNA, 477 bp, Arabidopsis thaliana
  unsure at all n locations
  Clone ID: LIB24-115-Q1-E1-A7
acgcgtccgaggaggagcaattgcatgtatgctcttggctcttctcttcttagggacatggccagcaatcatgactctaaccgaaagacgcggtcgacttcctcaacacacttatcttgactacacactcacaaatctgttagctgcagtgatcatagcgttgacactaggagaaataggtccgagcagaccaaatttctttacacagctctctcaagataattggcagtcagtgatgtttgcaatggctggaggaatagttcttagccttggaaacttagcaacacaatatgcttgggcttatgttggtttatcagttactgaagtcatcacagctagtatcactgttgttatcggcacaactttgaactatttcttggatgatagaatcaacagagctgaggtccttttcccgggggtcgcttgttccttgatcgcngtttgtttcggttccgctgttcataaaatccaaatgct

SEQ ID NO: 6869 - DNA, 483 bp, Arabidopsis thaliana
  unsure at all n locations
  Clone ID: LIB24-115-Q1-E1-A8
acgcgtccgggacagtgaaatcgaanaattgaancanaagcttctccatctctgcaatctctctatccatctctcgtcatcgcatgtttcgcttcccaattcggaagaaaganagacgacgcgtctgaancatatctccgtaatcggggtgaanaaaaacgcggcgagaagaagaggcagattttcgttttgggagggtagacaaatctggcgaaagtggagggcctaagggcnaggccgtggcttaagccaggagcttgtataaatggagatcaatatgactacgacggttcggaagacgaccattcnaggccttggtggcgccgtcgtctcagatccttgtntatggcagccacgtcntttactccgtccacttttcgaatcgctatctcgttgctccttctggtgctancgtctccgccgtcaattttctccccggcgaacaaaaaatttaaggacttcctggtaanggattaaggaaat

SEQ ID NO: 6870 - DNA, 496 bp, Arabidopsis thaliana
  unsure at all n locations
  Clone ID: LIB24-115-Q1-E1-B10
actgtttccctggncctacgcctccggaaattcccgaggtcgacccacgcgtccggtancctggtccggattcggttggcatctttgccatttcgcaaagatgcaatggagtggcagctcgagcctgtggtcttgttagcttagaacctatgaagattgcagagatcctcaaagatcggccatcttggttccgtgactgtaggagccttgaagttttcactatgttcccggctggtaatggtggcacaatcgagcttgtttatatgcagacgtatgcaccaacgactctggctcctgcccgcgatttctggaccctgagatacacaacgagcctcgacaatgggagttttgtggtttgtgagaggtcgctatctggctctggagctgggcctaatgctgcttcagcttctcagtttgtganaacagaaatgctttccaagtgggtatttaataangccttgtgaatggtgggtgggtccaatattcaaaattgtcn

SEQ ID NO: 6871 - DNA, 500 bp, Arabidopsis thaliana
  unsure at all n locations
  Clone ID: LIB24-115-Q1-E1-B11
cgtacggcctcggaaattcccgaggtngncccacgcgtccgctcatcttctcttccattcaaatctcacattccctcttcacaacaacagcttcgtattcgctcatcttcttcgctttctgatcttggaaatcgcaggcattgttcgtctactcgaggatttcaattttggtcatnnnnnnnnnnnnnnnnnnnnnnnnnnnnnnnnnnnnnnnnnnnnnnnnnnnnnnnnnnnnnnnnnnnnnnnnnnnnaccggcggttcgtatttccgacgggaatctaatcatcaaaaaccggacgattctaaccggtgtaccagataatgtcatcacgacgtcagcatcggaagctggaccggtagaaggagtcttcgtcggagctgtatttaacaaggaagagagtaaacacatcgtaccgatcggtacgcttcgcaattcccggtttatgtcttgtttccggtttaagctctggtggatggcccaaaagaatgggagaaatgg

SEQ ID NO: 6872 - DNA, 449 bp, Arabidopsis thaliana
  unsure at all n locations
  Clone ID: LIB24-115-Q1-E1-B3
gtccgccnacgcgtacggctagtggctccgtttcgttgcctcagatctctcttcgatcgagcttcttggggtcaaaaccagaagagctaaggcaattctcatttctcacttctctctcgattccgtcgtatctccgacgatcttgctcccgcacgatccgattgtgtaattcgttcgattttgcggtagaacaagaagacgaagaagtcgaaataggaaggattaangatggnggctggtggatttttgactcgagcatttgatacgatgcttaaggagtctggangaaagaagtttcctgatctccagaaagctattcaagcttatcaagatggttcaaaggttgttacgcaagctgcaacctcgagcatagtggagaattcacaaactgaatgtggaagtgaaaaaactgggggtangaagcanntgaaaccgcaaaaagtcacnac

SEQ ID NO: 6873 - DNA, 510 bp, Arabidopsis thaliana
  unsure at all n locations
  Clone ID: LIB24-115-Q1-E1-B5
gccgtacaatccgnaatcccgggtcgacccacgcgtccgtcactaaaagccacatagaacacaatttggatggactcactgttgaagaggctctggagaaggagaggttgtttatattagaccaccatgacacactgatgccatacttgggacgcgtaaacaccaccacgaccaagacttatgcaagcaggacacttctgttcttgaaagatgatgggaccttgaagccgttggtgatagagctgagcttgcctcatcctaatggagacaaatttggagcagtgagtgaagtatatacgcctggtgaaggtgtctacgactcgctatggcagttggctaaggcttttgtcggtgtaaatgactccggaaatcatcagcttattagccactgggatgcaaacacacgcatcgattgaaccgtttgtgattgccacaaacagacagctgaantgttcttcacccggtctttaagctccttgaacctcacttccgtgatacgatgaatatcaa

SEQ ID NO: 6874 - DNA, 529 bp, Arabidopsis thaliana
  unsure at all n locations
  Clone ID: LIB24-115-Q1-E1-B6
ntgttaccctggccgtaccgagtccggaaattcccgggtcgacccacgcgtccgctcttccagaattctcttaaagtttcctactttcctggaatttcgtcctcaatctctcaagtttcatcggttttgatttgggtttgatcggaaaagtcatgggtaattgttgcggaacagcaggatcattggctcaaaacgataacaaacccaaaaaaggaaggaagaagcaaaaccctttctcgattgattacggtcttcaccacggtggtggagatggaggtggaagacctcttaagcttatcgttttgaatgatccaacaggtcgtgagatcgagtctaaatacacgttggggagagagctaggtcgtggagaattcggtgttacgtatctatgtactgataaggagacagacgacgtttttgcctgtaaatcgantttgaanaaaaaactganggacagctgttganantgaaaaatgttntggnaaaaaggttagaatnttnanggcaaatgcccgaggcaaccccaaag

SEQ ID NO: 6875 - DNA, 478 bp, Arabidopsis thaliana
  Clone ID: LIB24-115-Q1-E1-B7
acgcgtccggtgaagtttgatttatttagagagataagttaaaaaaaaaatggtcggtatggatttgttcaaatgtgtaatgatgataatggtgttggttgtctcttgtggtgaagctgtttctggagctaagttcgatgagctttatcggtcaagctgggctatggatcattgtgtcaacgaaggcgaagtcacaaaactcaagcttgacaattactctggagctgggtttgaatcaagaagcaaatacttgtttggtaaagtctctatccagattaagcttgttgagggtgattcagcaggaacagtcactgctttctacatgtcttcagatggtccgaaccacaacgaattcgattttgagttcttagggaacactaccggcgagccttacatagtccagaccaatatctacgtgaacggagttgggaaacagagaacaaagactcaacctttggttccattccaccactgaatt

SEQ ID NO: 6876 - DNA, 480 bp, Arabidopsis thaliana
  unsure at all n locations
  Clone ID: LIB24-115-Q1-E1-C1
acgcgtccggcaaagtgtgtcttctccgatttcgcagacggttagatctcaacaagcgattctcatcgtcgtgaaccttcttctttaatggcgatcgataactctcgtcctcctccggacgaaatcttttacaagacgaagaagattttgtatcgtggacaaaggtgcaatatcattctccaggataagaatggaccatgtcctctcatcgccatttgtaatgttcttatcttgaaacacggaattaatctagacacttacaattctcaagtatctgaagaggatttggtgaatcttgtgatcgatgtactgggatgatacagacgagtacattgatattgggctcatcagaaaacttgcttgtgggataaatgtcatttgaaattcgagaaggattacggattttgagttaacactggagctagaaaaattccgtcacttaagaatcccttgtancanggatggcnagttattccacgg

SEQ ID NO: 6877 - DNA, 462 bp, Arabidopsis thaliana
  Clone ID: LIB24-115-Q1-E1-C10
acgcgtccgcaaaaatagtattttaagagatcgtcgcctacgatggcttcaaaagcattgctttttttaagtctcattgttgttcttcttatagcttctgaggtggtagccagagacctcgctgagaaatcggcagagcagaaaaacaatgaaagagacgaagtaaagcaaacggagcagtttggcgggtttccaggaggagggtatggagggttcccgggaggagggtatggaggaaaccctggtggaggatatggaaaccgtggtggtggatatagaaaccgtgatggaggatatggaaaccgcggtggaggatatggaaaccgaggaggaggatattgtcgctatggttgctgctacagaggctactacggtggctgcttcaagtgttgtgcttatgctggtcaagctgttcaaactcagccacagagtactgagccgggtcactaaaatcctaaaatg

SEQ ID NO: 6878 - DNA, 469 bp, Arabidopsis thaliana
  Clone ID: LIB24-115-Q1-E1-C11
acgcgtccgaataaaccataccataaaaaacatgaaaatcctctcactttcacttctcttgctcttggccgctacggtctcggcatccgttccagggctcatcgaactcgtcgattcgaaaaccatctttgggaacgtagccgaactcttagagaaagagaaactttccatcaactacgccaactgcagaagctggcaccttggtgttgagacctctaacatcatagacttcgacacggtgcccgcaaattgcaaagactatgttgaagactacttgatcacttccaaacagtaccaatacgactccaaaaccgtgtgcaaagaggcttatttctatgccaaaggacttgccctaaagaacgacaccgtcaatgtttgggatctttgacctaagatgatacctcctctctagtattccctactacgcaaaatatggatacggaacagagaagaacgacccgggggcgtt

SEQ ID NO: 6879 - DNA, 558 bp, Arabidopsis thaliana
  unsure at all n locations
  Clone ID: LIB24-115-Q1-E1-A4
actggtnagccttgcctaggcctccggaattccaaggtcgacccacgcgtccgcggacgcgtgggttaggtttgattcttctggctctgttttgttctgtttttggtgtttaattcttcttagcaagcaagtaatattcgatcgtcactgtttttgctttgattttgtgatttctctatcaaagattagaactttacgtgaccctttaagcgatcaacaattatctcactgttttttcagataagggtatatgagtttgttggacatgggtggagatatgatggaagatgattgggaatttgcgtcatcatcaaaccctaaaagaaccctaattccttgtgggccgtactgggaaacggaaagaatgccgacaaggtaacaagtatcccttgggtgggaaaanctttaaggtcaaagaacctaanaactggtaggaagtgacaagcacgtgccaagtcacaagagaagtttgttcaaagaaagaatgggggataaccaattaaaggttggttgaaaacnccctgggtttggtttgaatttgtccaacnggcaaccgga

SEQ ID NO: 6880 - DNA, 474 bp, Arabidopsis thaliana
  unsure at all n locations
  Clone ID: LIB24-114-Q1-E1-H1
acgcgtccgcaaactcgcaagttactctctcattcctcatcgtaccctctttactcaggtattttctgaagttaaaagatagaaataatgtctgaaaaggtgggagcgatgggtggtaacaagggtggagcattcgacgatggtgtttttgatggtgtgaagaaagtaattgttggaaaagacttcaacaatgtaacttatatcaaggttgaatacgaaaaggacggaaaattcgaaattcgtgaacacgggactaatcgcgggcagctaaaagagttttcaagtgggattatcctaatgaacatattacatcggtcgaggggaacaatccatggttacctttcgtcgctgaagtttacgacatcaaaaaggaanaacctcccctgtttttgggaatgtggtccggtagtaaaatttgtgttcgaaggaaacaagttttaaacntgttggggttttgtgggnccattcgggtga

SEQ ID NO: 6881 - DNA, 471 bp, Arabidopsis thaliana
  unsure at all n locations
  Clone ID: LIB24-114-Q1-E1-H12
attcgcngaaactccagggtccacccacgcntccggnggcancngagaaagaagtaatagttgtagctgcggtggcancggaagaggangagaanaagaggaanaaaccggttttgggagaagaccacactataatggaagcagtgttgaccgttgacttttgggtgctttttgtgtccttcttgtgtggtgtaggaactggtttagctgtgatgaacaatatgggtcagataggtcttgcccttggatacacaaatgtctcaatctttgtctccatgactagtatttggggattcttcggtcgcattctctccggtactctctccgaatactttctcaagaaagctggaacaccaagaccactatggaatgcagcctctcaaatccttatggccgtaggatatatactaatggctttagccgtgcctaattcactctacatcggttcaatggtggttggagtatgttacg

SEQ ID NO: 6882 - DNA, 482 bp, Arabidopsis thaliana
  unsure at all n locations
  Clone ID: LIB24-114-Q1-E1-H2
tcgacccacgcgtccgggancttctctgctcaccaacgtctctttcctcctccttcgctctctcttctgctcttttagtccctcgttcgttctccatgccagggacaaggagattcatggttctgtgtagttcccagaaggaaagtcagatgacagtgtcagtaactggagcaactggattcatagggagacgattggttcagagacttcgtgctgataaccacgctatccgggtcttaacacgctctaaatccaaagctgagcaaatatttcctgccaaggacttcccaggtattgtgattgcagaagaatcggagtggaagaactgtgtacaangctctactgctgttgtgaacttggcaaggactgcctaatagtacaaggtggtctcccgagatnaagaaagagantaaaggcaagccggattcgtgtcacctccaaaagttgttgacctaatcaataattcaccaacanaagctagg

SEQ ID NO: 6883 - DNA, 458 bp, Arabidopsis thaliana
  unsure at all n locations
  Clone ID: LIB24-114-Q1-E1-H3
acgcgtccggaaaaaaagagaaggcatggccgcggaagaagcgacggagttctacctgagatactatgtcggtcacaaagggaaatttggacacgagttcctggagttcgagtttagagaggacggtaagctccgttacgccaataactctaactacaagaacgatactattatccgcaaggaggtatttctcacccccgccgtgctcaaggaatgcaagcgtatcgtctccgagagcgagattctgaaagaagacgataacaattggccggaacctgaccgtgttggaaagcanagagctcgagatcgtcttgggtaatgagcatatctcattcgctacatctaagattggatttcttgttgattgcnaanaagcagtaatgatcctgaagggactcgnatcttctantatcttgttcaaggnctttgnaaatgtcctgtttttttcgctcaaccnc

SEQ ID NO: 6884 - DNA, 515 bp, Arabidopsis thaliana
  unsure at all n locations
  Clone ID: LIB24-114-Q1-E1-H4
gctggttcgcatggccgtngaatcccgaagtcgacccacgcgtccgtatcaccatcaacacatgcccatcaatgccatttcccagcaatctttaactttggtgactctaactccgataccggcggtctctccgctgcttttggccaagctggtcctcctcacggctcttccttcttcggctcacccgcgggacgatactgcgatggtcgcctcgtcattgacttcatagcggagagtcttggattaccatatctaagcgcgtttctagactccgttggttcaaacttcaagccacggcgctaacttcgctaccgcgggatctccgataagagctcttaactctactctacgtcaaagtggattcaagcccattttcactcgatgtacagttcgtacaattctataacttccacaacagatctcaaactgttcgtantcgtggaggagtctacaagacaatgttgcctgaaatcccgacaagcttctcaaaaagctttgtcacttttgacattggn

SEQ ID NO: 6885 - DNA, 468 bp, Arabidopsis thaliana
  Clone ID: LIB24-114-Q1-E1-H5
acgcgtccgtctaaaactactgggcattatgagacaggataattcgtttgaaaagagctctagtaaatggaaaatgaaagttggaaaaggaccattggacctcagtagcgaaagtccttcaagtaaacaaatgcatgaagatggaggctcgagtttcaaagctatgtctagccaccttcaagataacagagaacctgaggcgcctaacactcacttgaaaactttagatacaaatgaagcttctgttaaaatttctgaagagctaatgcacgtggaacatagttcaaagaggcatagaggaactaaagatgatgggacactagttagggatgatcggaatgtgctgaggcgttcagagggctcagctttctcaaggtactttcttagaatcaaacctctgttttttcttccgtacacaaccttttgaatgccttattgaagaactatgagatcgactgttgggacttg

SEQ ID NO: 6886 - DNA, 468 bp, Arabidopsis thaliana
  unsure at all n locations
  Clone ID: LIB24-114-Q1-E1-H6
acgcgtccgcccacgcgtccgcccacgcgtccgtgaaaacgaattttcttgtactggctttgtctttgtgtatccttctttcaagcttccatgaggtttcttgtcaggatgatggtagtggtttgagtaatttggatctaatagaacgtgattatcaagatagtgtcaatgctcttcaaggcaaggacgatgaagatcagtctgcaaagatacagagtgaaaaccagaataacactacagtgactgataagaacactatttctctatctctatcagatgaatctgaggttggatctgttagtgatgaaagcgttggacgttcgagtctgttggatcaaatcaaacttgaattcgaagctcatcacaatagtattaaccaagctggatctgatggtgtcaaggctgaatccaaggatgatgatgaagaattatctgctcatagacagaaaatgttggaagaaatcganc

SEQ ID NO: 6887 - DNA, 465 bp, Arabidopsis thaliana
  unsure at all n locations
  Clone ID: LIB24-114-Q1-E1-H7
acgcgtccnnnnnnnnnnnnnnnnnnnnnnnnnnnnnnnnnnnnnnnnnnnnnnnnnnnnnnnnnnnnnnnnnnnnnnnnnnnnnnnnnnnnnnnnnnnnnnnnnnnnnnnnnnnnnnnnnnnnnnnnnnnnnnnnngataatgggagcctatgaaacagaaaaaccaactaaagatgcggcggctctagagacacagtcgccggaagatttcgatcaaccatctccgcttcgtaaaatcatctccgtcgcttccatcgccgccggtgtacagttcgggtgggccttacagctctctcttcttactccgtacgttcaactcctcggaatccctcacaaatggtcatctctcatttggctctgtggtcaagtctccggcatgattgttcaaccaatcgtcgggtttcacagtgaccgatgtaggtcaaaatttggtcgccgtcgtcctttcatcgcaaccggagcc

SEQ ID NO: 6888 - DNA, 498 bp, Arabidopsis thaliana
  unsure at all n locations
  Clone ID: LIB24-114-Q1-E1-H8
ccggaattcccgggtngacccacgcgtccgggggaaccccttccaggaacagagctgaaagaggtgtggcatttggctgatgtccccaaaaacgacaactttcagtacactcactttgctcacaagataaacagcttcgacacagcgcctgctaagctcttggcttcagactcacgtatccgtcctgatagatattcccttgagcagggtgacctttctaaagctggttccgagaaacacagccttgaggagagacaaagggccgaaaagaggaccagagagacaaagggacaaaagttcactccaagatggttcgatctaacggatgagatcacacctactccatggggagatattgaagtataccaatacaacgggaagtacaattgaacaccgagacacggcagagagctcaagtagtgcctccaaacgaaaacggacctcaaatccgattcgagttnaatcccttggcaatatggtaatatctcaaaccgaatg

SEQ ID NO: 6889 - DNA, 429 bp, Arabidopsis thaliana
  unsure at all n locations
  Clone ID: LIB24-114-Q1-E1-H9
aagaaagtgcggatgtgattatcctagatgataacttctctacgattgtcacagtagccaaatggggccgttctgtgtacataaatattcagaaatttgtccagttccagctgacagtaaatgttgtggctcttattgtcaacttcttatcagcctgcctcactggttagttcccaacccacatttatttttctcttgttcaaaagactaatctcctcagggattgcaactaacttctctgttacattgacactaactactgtgggtctcaggaaacgcgcctctgactgctgtccaactactgtgggttaacatgataatggacacacttggagcactcgcgctaacgactgaaccaccacaggncgacctgatgaanagatttccaatgggaaagaaaggaaacttcataagtaatgtaatgtggan

SEQ ID NO: 6890 - DNA, 477 bp, Arabidopsis thaliana
  unsure at all n locations
  Clone ID: LIB24-115-Q1-E1-A1
gggtttatttttgttttttgggttcgccgaagtaaaaaaaaaagaataaggattttctcattaaatttccaaagattagtcttttgtatgtatcttcactttcttatgaatgtgtaaaccttactcattcccgtgatcctactttgggatttcgctagaagaagtttaggtgacgaccttaatttaagtttgtaaatgcaggtcctttctttctagggtttatcgaaattggtgtaaatcttttggaattggtttgagattttttcttttggggaattgcaattcattaagtcgtcgtgatccagtgtgtttttaagtgaagtaaggcattttcgatattcggagacttttaggtcaatgtcggctccaaccgcgaattccggccggtgggattcaacccgaccggagaantcaagattaagttcctgggccccgccnggnaataancctgcaancaagaaaaccgttggtcaaaag

SEQ ID NO: 6891 - DNA, 509 bp, Arabidopsis thaliana
  unsure at all n locations
  Clone ID: LIB24-115-Q1-E1-A10
actgtttccctgtncctacngctccgaaattcccaggtcgacccacgcgtccgcggacgcgtgggtttgataattatgacactagtggtcctcaaaatgttaatgcacacattgggcttgctaagctaaggaaggagtggattgatcgtcgggagaagctaggaacaccaagatacactcaaatgtactacgctaagcaagggatcataactgaggaaatgctctactgtgctactagggagaagctagaccctgagtttgtaagatcagaagttgcacgaggacgggcgattatcccttccaacaagaagcatttggagctggaaccgatgattgttggtagaaagttcttggtcaaggtcaatgcgaatatcggaaactctgctgttgccagctctattgaagaggaagtctacaaggttcagtgggcaaccatgtggggagctgatacaatcatggatttctcaactgggtcgtcacatccatgagacacgtnagtggattctaaa

SEQ ID NO: 6892 - DNA, 477 bp, Arabidopsis thaliana
  unsure at all n locations
  Clone ID: LIB24-115-Q1-E1-A11
gtccggaatggccngatccatccanccaaancgtcngcggantcttggggttngcccaacctggaatccanagacttgtgtttaagctgaaggaactggtcaggcgtatcgatgaacctgtttcaagacacatggaagagcatgggctagagtttcttcaatttgctttccggtggtataattgtcttctgattcgtgagatcccattcaatctcatcaatcgactatgggacacttatcttgctgaaggagatgcgttgccagacttcctggtgtatatatatgctagctttctcttgacgtggtctgatgagctgaagaagctagattttcaagaaatggtaatgttcctgcaacaccttccgacacataactggtcagaccaagagtcgaaatggtttgtcaagagcttacatgtggcatantaagttcaataattcccaaaaccatttggctaactgaaatgacttttcctnc

SEQ ID NO: 6893 - DNA, 499 bp, Arabidopsis thaliana
  unsure at all n locations
  Clone ID: LIB24-114-Q1-E1-G9
ntgttaccctgccggtaccggtccgaaattcccgggtcgacccacgcgtccgagcgtatctacagaggtgatagcaaccatgcgggcagaggtgtcagatgtatcaaagagcgcgatcagcaattcatttttactaagacgacgattcgagcatcccattctcgcttgacgatatctccaaatcgatgcaaaacgtagaggttgcagaggttgatcctcctccgttgatccgccaaaactccaacttcatgttcttgttggaaaggtcagattgaagtagtcaaagttccctatacccgatcgatcgctaggacattttcagattaggagatcagtattgtgctttcaaaaacaaagcctgtacattagtacatatgcctatctttgccaattggctttctggtactgtcctactaattaataggggtatattggggtaggaaaaaatatatatatgtgaactaaaatatttgttgtgtccaagcgttgataaggccaa

SEQ ID NO: 6894 - DNA, 492 bp, Arabidopsis thaliana
  unsure at all n locations
  Clone ID: LIB24-114-Q1-E1-E9
acgcctgccggnaccggtccgaaaattcccgggccccaattcacttgcagcttttgtaatttctctaatttgggtcgtaactcgtaagcggcggtggaattcaagtcgccaccggttccgatcaaagtcttccgttatacgcaaaccctaattcctcactacacgactctttttgatctgaatcgagagatggtacaggaggagaaagctatggaagcaataaatgacgctttgagagctttgcggaagcgtcatcttctggaagaaggagctcatgctcctgcgatttctgctctctctaagcctttaatctctcagggttcagaatggaaggagaaaacagaaaagctggaaacagagttacagcaatgttacaaagctcaatctcgactatctgaacaactgggtgatagaagtagctgaatccagaacttcaaaggctattttacaagagaaggagttgttaattaatgacttgcagaaggaattaca

SEQ ID NO: 6895 - DNA, 469 bp, Arabidopsis thaliana
  unsure at all n locations
  Clone ID: LIB24-114-Q1-E1-F1
acgcgtccgcgtacaacacgggtatctaaccgctctcattcatggtgacatagattccttgttaggtgtgcatttgatgaatctaacgtacaacacgggtatttaaccaaaaatggcatctacagtcaagcatgtggactaaacaatgagcatgatgtcatggggccatgacgactacatgtacatggaatttacactcaaggatgtggattaaacaatatagttaagcaaagttcattttgacttgatcttcatcacgtcaacatgaactttgattttactgtataacttgtatttactgtaataacaacaatatataacaattagaggttgtagatattatgatcaattacttaatcatgtcttgatcctaataactacggtctctgaattgctgtatattattattattacagcaagtacaagttataccgcaagatnaaagttcacgttgatgttggagaaagtc

SEQ ID NO: 6896 - DNA, 453 bp, Arabidopsis thaliana
  unsure at all n locations
  Clone ID: LIB24-114-Q1-E1-F11
acgcgtccggtgaaattcgaagagcgaatcaaagaggaagaagaagaaggaggaggtatagcaatgggggtcgattattacaaggttcttcaggtggatcggaatgcgaaagacgacgacttgaagaaagcttatcgcaaactcgccatgaagtggcatccagacaagaaccctaacaacaaaaaagacgccgaagccaaattcaagcagatctccgaagcttacgatgttttgagtgatcctcaaaagagagccatctatgatcaatatggagaagaaggtctaacaagccaggctccgcctcccggagcaggcggcgggttttcggatggaggggcttcgttccggttcaacggtagaagcgcaaatgatatcttctcggagttctttggcttcacaagancatttggtgactcacgtggtgcaagtccctctaatgggttccggttcgcg

SEQ ID NO: 6897 - DNA, 478 bp, Arabidopsis thaliana
  unsure at all n locations
  Clone ID: LIB24-114-Q1-E1-F2
acgcgtccgaaagaaagagaaagagcatcgttttgagcaaatgagtaggaacatggaagttaacgcaggcagttccggcgaaattccgtctccaataaggaaccgatttcaagaaaagtgggagtcaagcggtgtacgangtgacagagacgaagaaatcttgcgtgacgagagtcgacatgcctgggttgtcccgaagtcagatctcacctactgggtcgacgccaacaacgtccacttcttcgccgacgaaccagcaatgcctgagtacgaaaacgccggacgcaaatacggaggctccatgattttcaaccctgaggcttacgacgtcaagaaaactaaagtgaagcttatcaacggagtgctctggatnaccgtccctaagattccaggcaaaaacgcctccaataatgtcaaggagaagattctccaattactggatttaacaacacccttgggttggtgtcccgtaatggga

SEQ ID NO: 6898 - DNA, 478 bp, Arabidopsis thaliana
  unsure at all n locations
  Clone ID: LIB24-114-Q1-E1-F3
acgcgtccggaaacaaaaaaaaatggcgacggtacaattgtccacccaatttagctgccaaaccagagttttcaatctcaccgaactctaaatctatctccaagcctccgtttctggtaccggtgacctcaattattcaccgcccgatgatctccaccggaggaatcgctgtttccccccgtagagttttcaaagtccgagccacagatacgggagagataggatcagctctattggcggcggaggaagcaattgaagacgtggaagagacggagcggctaaagagatcgctcgtggattcgttgtacggaacagatcgaggtttaagcgcatcgagcgaaaccagagctgaaatccggagatntaatcacacagctcgaagtctaaagaaccctactccanctccgacggnagctctttcccttctcaacggcaaatgggttctcccccaanacaatcgttccgtgaaatttgtttc

SEQ ID NO: 6899 - DNA, 476 bp, Arabidopsis thaliana
  unsure at all n locations
  Clone ID: LIB24-114-Q1-E1-F5
acgcgtccggtanggcttgaggaggtgtgcatcatccgtctatcaataccctgacaaggaaaaccctaattttttttggcccaaagggttttatactttaatctcatactccgattcattgtcgaaaaacgatgatgcataattcaaccgaagaatcggaatgggaggtgagacctggtggtatgctcgtccaacgaagagacgacgccgcttcctccgaccacaaacctctccaggatcccgactctgcttccgccgcttttgctcaaaccatcagaatcactgtttctcatggctcatcgcaccacgatcttcatatttctgctcacgccactttcggggatgtgaagaaagctccttgttcanaaaactgggattggaagcctagttgaanttgaagatcttgttcaannggattttagaagagatgatgccngaacaattgcaanctggccgggtgttaaagggatgcgtcc

SEQ ID NO: 6900 - DNA, 469 bp, Arabidopsis thaliana
  unsure at all n locations
  Clone ID: LIB24-114-Q1-E1-F6
acgcgtccgctcatcttctcttccattcaaatctcacattccctcttcacaacaacagcttcgtattcgctcatcttcttcgctttctgatcttggaaatcgcaggcattgttcgtctactcgaggatttcaattttggtcatnnnnnnnnnnnnnnnnnnnnnnnnnnnnnnnnnnnnnnnnnnnnnnnnnnnnnnnnnnnnnnnnnnnnnnnnnnnnaccggcggttcgtatttccgacgggaatctaatcatcaaaaaccggacgattctaaccggtgtaccaagataatgtcatcacgacgtcagcatcggaagctgggaccggtagaaggagtcttcgtcggagctgtatttaacaaggaagagagtaaacacatcgtaccgatcggtacgcttcgcaattcccggtttatgtcttgtttccggtttaagctctggtgggatggcccagagaatgggaaaaaat

SEQ ID NO: 6901 - DNA, 465 bp, Arabidopsis thaliana
  unsure at all n locations
  Clone ID: LIB24-114-Q1-E1-F7
acgcgtccgccccaaagcataattatatataacaataaacaattagtaccaaaacacataaaaaatctataactgttatctcaaccaaaaattgtttattgttatgcgaggggttaaactcttggccgcgtgcctctacctggccgctgccgcaacggtggtagtccgagccgaagatccttacttccatcacgtatggaacgtgacctacggaaccgtgtctcctctcggtgttccacaacaagtcattctcatcaacggacaattccctggtcccaacgtcaactcaacctccaacaacaacgtcatcattaatgtcttcaacaacctcgacgaacctttcctcctcacatggaatgggatccaacacaggaagaactgttggcaagatgggactccaggaactatgtgtccgatcatgcccggcaccaactacacttacaatttcaagcctaaggatcagnt

SEQ ID NO: 6902 - DNA, 472 bp, Arabidopsis thaliana
  unsure at all n locations
  Clone ID: LIB24-114-Q1-E1-G1
acgcgtccgaagggaatcgactataatgcagaaattccttttgaaaagagggcacctgcgggattttatgatactgcggatgaagatcgtcctgctgatcaagtaaaatttccaactaccattgaagaacttgaaggaaaaagaagagctgatgtagaagcacatttacgcaaacaagatgttgcaaggaataaaattgctcagagacaggatgctccagcagctatattgcaagcaaacaagctgaatgatccggaagttgttangaagaggtcaaagctgatgttaccaccaccgcagatttcagaccacgagctagaagaaattgctaagatgggctatgccagtgaccttcttgccgagaatgaggagctaacagaaggcantgctgctactcgtgcacttttggcaaattactcacaaacaccaanggcaaggaatgacacccatgaggacacctcaaagaactcct

SEQ ID NO: 6903 - DNA, 450 bp, Arabidopsis thaliana
  unsure at all n locations
  Clone ID: LIB24-114-Q1-E1-G11
acgcgtccgagctttcagaagagattttcttagggtggttgagagctgaaagttttgatatttagtcaactttgttccactgaaccttctaggaagctacctcaagtagacagctttgttgacgggcttcaagccagtggtaaagatatgcttctgtagaagggttaatcttgagcattaaaggacatggctttctactctgaagacgacaagagcgaagactacctctttaagattgttctaatcggtgattctgctgtcgggaaatcaaatttacttgccagatttgcgagggatgagttctatcccaattcaaagtcgacgattggagtggagtttcagacacagaagatggatataaacgggaaggagattcaaagcacagatatgggacacagcaaggtcaagaacgttttanagcagtcactctgcatattaccgaggtgcaat

SEQ ID NO: 6904 - DNA, 471 bp, Arabidopsis thaliana
  unsure at all n locations
  Clone ID: LIB24-114-Q1-E1-G2
acgcgtccggacccacacaaggcgacacgtgtatggcttgggacattcgagacagccgaggccgccgcaagagcctatgatgcggcagcacttcgctttagaggaagcaaagcaaagcttaatttccccgaaaatgttggaactcagacgattcaacgaaattctcatttcttgcaaaactctatgcaaccttctctgacatacatcgatcaatgtccaactctattatcttactctcgatgtatggagcaacaacaaccattagtaggcatgttgcagccaacagaagaggaaaatcactttttcgaaaaaccatggaccgaatatgatcaatacaattactcctcttttggttaactaacatattgtcaacgctttgtatttctacttattcgatttancaattttttctctcccaatacaacttcagtctggattattgccttcttagatatgtcntcgaatgttatg

SEQ ID NO: 6905 - DNA, 514 bp, Arabidopsis thaliana
  unsure at all n locations
  Clone ID: LIB24-114-Q1-E1-G4
aactggttccgcatggccgcggaattcccgangtcgacccacgcgtccgctcacttccctcattggacctctctaactctcctctcttaccttctcctgtttaaattcttctcctttctttccacaatttctgtctaaccaattccaacaccaaaaaattccatttcttgacgatgaaacgaagccatcaagaaacgtctgtagaagaagaagctccttcaatggtggagaagttagaaaatggttgtggtggtggtggagacgataacatggacgagtttcttgctgttttgggttacaaggttcgatcttcaagacatggcaagatgttgcacagaagcttgaacagcttgaaatggtcttgtccaatgatattgcctcttctagtaatgccttcaatgacaccgttcattacaatccttctgatctctccggttgggctcagagcatgctctccggatcttaattactacccggatcttgaacccgaaccggatttgcgatctgagaacaa

SEQ ID NO: 6906 - DNA, 450 bp, Arabidopsis thaliana
  unsure at all n locations
  Clone ID: LIB24-114-Q1-E1-G8
acgcgtgggctacattccaaggaaatgctcggcaacaaacagaatgatcacatcaaaggatcatgcttcagttcagcttaacattggtcatcttgatgctaatggtctctacactggccaattcaccacttttgctctctgcggatttgtccgtgctcagggagacgcanacagtggcgtggacaggctctggcagaagaagaaggtcgaagctaaacaacagtgagagacaatctgacaatgtcataagctcttgtttgttttttgaggtttcgatttattagctatgtggctttgtcattgaattgaaaatgttagtttctctttatgcnaattcatgttttcgatttttctgctttattaannataattattaaggctttgnggccaatggaatcaanattctanctaaaaannaananaaaggggcggccgctctagaaggatcna

SEQ ID NO: 6907 - DNA, 375 bp, Arabidopsis thaliana
  unsure at all n locations
  Clone ID: LIB24-114-Q1-E1-E8
aaggaagaagaagaagaagaaaccatgggaagagctttcgtgtatgtaattctcggaggaggtgttgctgctggttacgcagctctcgaattcacccgtcgaggtgtctccgatggcgaactctgtatcatttccgaagaacccgttgcaccgtatgagaggcctgccttaagcaaaggttttctgctgccagaagctcctgcacggcttccttctttccacacttgtgttggagctaatgatgagaagcttacaccgaaatggtacaagggatcatggaattgaattggtacttggaactcgtgtttaantccgttgatgtgaggaggaagacncttttatcgancacaggggagactataagttacaaattct

SEQ ID NO: 6908 - DNA, 465 bp, Arabidopsis thaliana
  unsure at all n locations
  Clone ID: LIB24-113-Q1-E1-A9
acgcgtccgctccgtcatggtacacggcgggaagagcaanagtatttcacggncaaaaccacactctttgtcgttgagctcattttgatcggatgggcacaaggacgtagatgggccgatatcatcaagcccggtagcgtcaacactgacccagtcttcccaaacaacaaactgacgggcacagacgttggttacccaggtgggttatggttcgacccgttgggttggggatccggtagcccggctaagctcaaagagttgaggaccaangagatcaanaacggaaggttggctatgttggcagtgatgggtgcttggttccaacacatctacactggcactggtcctattgataacctttttgcacatcttgctgatcctgtcaagccacaatcctcgctgctttcaacacccaatgaagacaaccaaaaaaggttaatggggaaggtgaatgccttttgtgtt

SEQ ID NO: 6909 - DNA, 455 bp, Arabidopsis thaliana
  unsure at all n locations
  Clone ID: LIB24-113-Q1-E1-B1
gtccgtctgtctccacgatccacgccttgaccttcgttttttttttctcagagattagagaaaactccgataaccaatttctcaatctttttgtagatccaanttttccaggaaaaaaaagaggtttcgcgaagaagatgagttttcaagatttagaatcaggaagaggaagatcaacgaggaaattcaatggtggtcgacaagattcgacacaagccgttgcttctggaanattccagatcaataccggagtctccacgtttcagcgactcgttaacacacttggtactcccaaagatacaccggagctccgggagaagctgcacangacaaggttgcatattggacagcttgtgaangatacttcagctaaacttaaagaagctagtgaaactgatcatcaaagcggtgtcaatccaagtaagaagantgcagatgctaagcttgcaagggac

SEQ ID NO: 6910 - DNA, 480 bp, Arabidopsis thaliana
  unsure at all n locations
  Clone ID: LIB24-113-Q1-E1-B10
gccgaaatccggancgacccacgcgtccgggatctgttacnaanacaaagtcgctttantcagatctgaanaagaagaagaagaagaaacatagttgaagtctctgttaatatgtcttcaacaacaacagattctacagaattgcaaaatctgatcaaactgtttcaaaattgccaaactcatcctcgtcaacattttcctgcaaaatcttcagctgtantagtttgtctataccaagaacanngagaagacannaacgagctacgcgtaatcttaaccanacgatctactactctctcttctcatcctggggaagtagcattgcctggaggaaaaagagancaagangataaagatgatatagctactgcgttgagaaaaagctcgtgangaaatcggtttagatccttccccttgttacaatcatttccgttccttgaancatttgttaacaangaagggaatgtccgtaacaccaag

SEQ ID NO: 6911 - DNA, 495 bp, Arabidopsis thaliana
  unsure at all n locations
  Clone ID: LIB24-113-Q1-E1-C1
ccctnccggtagccgtccgnaattcncgggtcgacccacgcgtccgaaagctttcatttttcaatctcatcagagagaaattaagctatggcgaagaagattggagtaacgatggaagttgggaacgatggtgttgctgtcatcaccatttctaaccctcctgttaactctttagccagtccaattatttctgggttgaaggagaagtttcgtgacgccaatcaaaggaatgatgttaaggccatcgtgttgatcgggaacaatggaagattttcgggtggttttgatatcaatgtctttcagcaagttcataagactggggatttatcgcttatgcctgaagtatctgttgagcttgtgtgtaacctgatggaagactccaggaagccggttgttgctgcagttgaaggattagctcttggtggtggtttggaacttgcaatggcgtgtcatgccagagttgctgctccgaaagctcaattaggcttaccagaa

SEQ ID NO: 6912 - DNA, 522 bp, Arabidopsis thaliana
  unsure at all n locations
  Clone ID: LIB24-113-Q1-E1-C11
gaactgttacgcctggctttacgggccgnaattcncggaacgacccacgcgtccgtgcatactggtcattgattggttaatcagagctctctcttttcttttcctatctctagagactagagaaatggctctctatctctcttcttcacgactcatcacctttctctctttcatcttgcttctctccaatggcttctcgtcctcttcctctcgccctagcatccaccatcgtcaccacctggacaaccacaattacaaagacgctctctccaagtccattctcttcttcgaaggtcaaagatccggaaagcttcctccaaaccagagaatgacttggagaagcaactctggtctctccgaagggtccggtctcaaacgttggatttggtgggaagatactacgatgcaagggaacaatatgaagttttgggattccccaatgggnnattcaacaaccacaatgnctctcaaanggagntttaaattgaatttgggtgggcccaatgaaatccgaagttacca

SEQ ID NO: 6913 - DNA, 513 bp, Arabidopsis thaliana
  unsure at all n locations
  Clone ID: LIB24-113-Q1-E1-C2
taangttacccgccgtagcgtccgaaattccnggtcgacncacncgtccgggtttttaagtcncacctctcncnctcantgccgcatcttttcttacggttcttgtttcgctatctcttaaacacaaacagctctgtccgaataatctctcttcaagtanctcttttttctgattctgtatatccccatgaattactgatttccctctctataaacccatcaaagtaaaccaatttctcctgtgacttgtacctaactcgatcttancagactggtgatggcgtctttgaagcctttcgatcttctaggagaagangctgaggattcaagccagctcgctgtggctttgtctcagaaactcgagaaaagctgcngcngcngttcaanctcctaanggcgctaagttccaaacaanccggctcctccntctcaagcaattaaggaatccnaggaatgctccncaaaggaaggtcattggtgngactggtnggacgttgggngggaatttcccgt

SEQ ID NO: 6914 - DNA, 456 bp, Arabidopsis thaliana
  Clone ID: LIB24-113-Q1-E1-C5
acgcgtccgggaatattcatcacatactaagctcaaactttgggaattaccctaaaggacctgagttcaagaagatctttgatgttttgggagaaggaatcttaaccgttgattttgagttgtgggaggagatgaggaagtcaaatcacgccctattccacaatcaagatttcatcgagctctcagtaagtagcaataaaagtaagttaaaagaaggtcttgttccttttcttgataatgctgctcagaaaaacattatcatagaattacaagatgtgttccaagagattcatgtttgatacttcttcaattttgatgactggttacgatccaatgtcactatccatcgaaatgctggaagttgagttcggtgaagctgcggatattggcgaagaagcaatctattatagacatttcaaaccggtgatcttgtggaggcttcaaaactggattggg

SEQ ID NO: 6915 - DNA, 496 bp, Arabidopsis thaliana
  unsure at all n locations
  Clone ID: LIB24-113-Q1-E1-C7
ancgttccgccgcccgtaaggtccaaaattctcgggtcgacncacncntccgcngacgcgtgggggctggaaaatgaagcangagaagaatactggtcctgtcagcacgcaggctgcttctgaaagaggtggagtagatattgatgccagcacagatatcctagcagatgaggctctgctgaatgacgaagcgaggcagcctctgtcaaggaaagtttcaattccttcatcacggatcaatccttacagaatggttattatgctgcggcttgttatcctttgtctcttcttgcattaccgtataacaaacccagtgccaaatgcctttgctctatggctggtctctgtgatatgtgagatctggtttgccttatcctggattttggatcagtttcccaagtggtttcctgtgaaccgtgaaacctacctcgacaggcttgctttaagatatgatcgtnaangtgagccatcacagttaactgctgttgacattttc

SEQ ID NO: 6916 - DNA, 486 bp, Arabidopsis thaliana
  unsure at all n locations
  Clone ID: LIB24-113-Q1-E1-C9
cnttacggccgaaattccggacgaccacgcgtccgtggaaactgcancggcagagcttgagagactccaaattgaaatcctccacaaaatctccattcttgagagctcttttctcccacagaattcctctgctgctccgtcgccttctctaccggttgatgaaaacgaaactgtgactcgcctctccaccattctccagtccggcggcgttaacgacttctgcttcaagagagttgctaccgattactatgactggcctctcgaatctcgtcgcgacgttctcggcgcttcctcagtcgaccatctctgcaagagtattgttctggttaatactcaagctgcatcaaatattttggattgcagtgatccaaacaactcaaaatactatgtggttgtggttcaantatactgctagattcaatgctgaagcanttgaagcaatttcttaatcacnaaacgaaggnaaagattccaaagaaaagattt

SEQ ID NO: 6917 - DNA, 509 bp, Arabidopsis thaliana
  unsure at all n locations
  Clone ID: LIB24-113-Q1-E1-D11
ctgttaccctgctttancgggccgnaattcccggatcgacccacgcgtccgattccgactattttttaagagttttctctattcgtnnnnnnnnnnnnnnnnnnnnnnnnnnnnnnnnnnnnnnnnnnnnnnnnnnnnnnnnnnnnnnnnnnnnnnnnnnnnnnnnnnnnnggatgatgatgaagatcaaacttaaggagacagaagcagacgtaagccaagacgacattaaaagacaagaagcttacaacatgtctccacgcgtacnnnnnnnnnnnnnnnnnnnnnnnnnnnnnnnnnnnatgagcaagtcatcgagcgtgaggcaaaactgtttatgcgcaccaactacacaccctggctccttcaggtgccgttaccaacgtcgtaacgctggactccgggatgtctcnttggcacatcccgttccctctaacctttccaagttggctggtggagactccaaatctcccaagtgatgaatantanatattaagttgtttcctcnc

SEQ ID NO: 6918 - DNA, 492 bp, Arabidopsis thaliana
  unsure at all n locations
  Clone ID: LIB24-113-Q1-E1-D5
ttccccgccggtanggtccnaaattctcgggtcgacnnacncgtcngcatatgctctacaacgacagcctctctgcacttggaatttgtgtacaangagatcttaaacactttcataaggcgagatacatgcttgctcaaggtctgtacagaaggggtgggagcagtgatctgcaaagagcaaaggaagaactttccttttgtttcaaatcatcacggtcaagttttacgatcaatatgtgggagattgatggcatggttaaaaagggaaggcgaaaaactccaggtttggctgggaacaagaaggctcttgaagttaacctgccagaaagttcacggaaattcataacttgcattcgcaaatacttactgttcnatttgagacattggacgaaactgaanatgtcaacacactagaacgagcctttaantctcttcgatcagataagangttctctctaagcgttgaagaccttgtaccaattgcaatagg

SEQ ID NO: 6919 - DNA, 498 bp, Arabidopsis thaliana
  unsure at all n locations
  Clone ID: LIB24-113-Q1-E1-D6
ccgcccgtancggtccgaaaattcncgggtcgacncacgcgtccgggatctgttactaaaacaangtcgctttantcanatctgaanaagaagaagaagaagaaacatagttgangtctctgttaatatgtcttcaacaacaacagattctacagaattgcaaaatctgatcaaactgtttcaaaattgccaaactcancctcgtcaacattttcctgcaaaatcttcagctgtantagtttgtctanaccaagaananagagaagacaaaaacgagctacgcgtaatcttanccaaacgatctactactctctcttctcatcctggggaagtagcattgcctgnaggaaaaanagaccaanaagataaagatgatatagctactgcgttgagagaagctcgtgaagaaatcggtttagatccttctcttgttacaatcatttctgttcttgaaccatttgttaacaagaagggaatgtcngtagcaccagttatcgg

SEQ ID NO: 6920 - DNA, 462 bp, Arabidopsis thaliana
  unsure at all n locations
  Clone ID: LIB24-113-Q1-E1-D8
acgcgtccgtactttcacaaaccgggagaagattatcggagatcgcaaactatggccggacgagatcgttatattccatcatcagcagtttcaacttcatcatcttcaagattattagaatctcaattaatcgaatccgatcgaaatcgagctcgatctgtaatcctcgaggatcgaatcgcaatccaacaccgtgaaatccaatctcttctcaacgacaatcaacgattagctgtagcacacatcggactcaaagaccagctcaatgtagctaagcgtgagctcgaacggttacttgaaaccgctgttaaagttaaagcggaaggagaagctaaagtgcgtgaggtttatcagaatgcgttgagaatggangcggaggctcgtgtgattgatggacttggagctgagcttgggtcaggttaggtctgatgtacagaggttaggtagtgatagacaggagtt

SEQ ID NO: 6921 - DNA, 505 bp, Arabidopsis thaliana
  unsure at all n locations
  Clone ID: LIB24-113-Q1-E1-A6
aactgttccgcctgccggtanaggtccgaaattcncgggtcgaccnacgcgtcngcccacgcgtccgcccacgcgtccgcccacgcgtccgcccacgcgtccgcggacgcgtgggtttgagtctcttggattctgaacgtgggatctggggatttgaatagttacacttttttgtttatgaaaaaacatacgatgaagtctggtgtgatcataaccattgctctgttattatacacaagctttcttcttgtttgtctggcgaaagagtgtacagacattcctacgaagctctcatcgcatactctccgcagcgagcttctgcaatcacagaacgcaaatttgaantcagaggagttctctcattaccatttaactccaactgatgactctgcttggtctactttgttgccaaggaagatgttganagaagagactgatgaatttggcttggactatgttgtataaaaaantcaaggactcctaattccccgggtaacttctcaag

SEQ ID NO: 6922 - DNA, 508 bp, Arabidopsis thaliana
  unsure at all n locations
  Clone ID: LIB24-112-Q1-E1-F5
aactgttcgcctggcctaccnagtccggaattcccgggtcgacccacgcgtccgcggacgcgtgggcatggtttaaactatactcagcagcctataaggtccgagttctcaagaagtttattgcaagaacaccagcaactcccaaatggttacatgcatgggaaccttgggttgcagacaatgccgaatggggcaaatgttttgggaggtgatgtagaatctagtagggataagttatcagcaaggggatttactccagaacttcataatgttcctatgaggcttgagatgggagaatctccggttaattatgatttctttggtggtcaacaacaatcaaacacacagctctctggcatgctccagcctttgccaaggcagcagatgacattcaatgatatgcaactactgaagcagcaagttatggttaagcaaatgcatgaatatcaaatgcaacaacaacttcaaaagcaacagctaganggccaaggcagctcaattcnttgat

SEQ ID NO: 6923 - DNA, 470 bp, Arabidopsis thaliana
  unsure at all n locations
  Clone ID: LIB24-112-Q1-E1-F7
acgcgtccgcganatggtggttggttgcttggctggcgaaaaacctcaaatgattagtgctgctgtcaagggtgtagctcgtttgacatatgagttctccgatctcatatctagtgcttacaatttacttccttcaacatttcttctcctccagaggaaaaataaagaaattacaaaagcaaatttaggtttgttgaaggtgttggtggctaaatcacccgttgaaggactacacgcaaatttaaagagcatggttgaaggcttactaaagtggccagaaggaacaaaaaatctgttcaaagcaaaggtgaggcttctgttggagatgctcatcaagaaatgtggcacggaggctgtcaagtctgtgatgcctgaggaacatatgaaactcctgacaaacatccgaaagatcaaggaacgtaaagagaaaaaatatgcagctggctctgacatcagtaaatcgcaacant

SEQ ID NO: 6924 - DNA, 491 bp, Arabidopsis thaliana
  unsure at all n locations
  Clone ID: LIB24-112-Q1-E1-G2
aantccgatcgacccacgcgtccggcacaatgggtcaaggaccttccggcggattgaatcggcaaggagatcggnaaccagatggtggagagaagaaggagaagaagttcgaaccagccgcaccacctgctcgtgtagggaggaagcaacngaagcagaaaggacctgaagcggcggcgagattgccgacggtgactccttctactaaatgtaagcttcgattgctgaaattggagcgaatcaaggactatttgcttatggaggaagagttcgtagcgaatcaggagagattgaaacctcaggaagagaaagctgaggaagatagatctaaagttgatgatcttcgtggtacacctatgagtgttggcaatcttgaagagcttattgatgagaatcacgccattgtttcntcctcggttgggtcctgagtactacgttggcattttgtccttcgttgataangatnaaccttgaacctggctgctctattt

SEQ ID NO: 6925 - DNA, 520 bp, Arabidopsis thaliana
  unsure at all n locations
  Clone ID: LIB24-112-Q1-E1-G4
ctggttaacctgntccgtacggcccggaantcccgaatcgacccacgcgtccgcaaaaaatggcgatgtatgttatctacgangtcttcttccggctatggtctcttcgaggttcacggactatatgagatcggacataacactgangcggttcggacttctgtctccgacctcagtcgctttggccgtgttgttcagctcacagcgtttcatccctttgagtctgctctcgatgctctcaaccaagtcaacgccgtctctgaangtgttatgactgatgagcttaaaagttttcnggagttgaatcttcctaaggtcaatgagggaaagaaacccaagttcagtttacgattggctgagcctaaactcggttcanatatatttgaagctactaaaatcccatgccagancaatgagtttgttcttgagcttctcataagtgttcgccagcattttgatangtttatcaanggacttaaagcctggtgatcttgaaaaatcctcagcttgggttanctca

SEQ ID NO: 6926 - DNA, 472 bp, Arabidopsis thaliana
  Clone ID: LIB24-112-Q1-E1-G5
acgcgtccggagttcaaaagcatgtccaatcatttgaaagagcttaaggacaatgctgaagcagaatgcaatcgtgctcgtgaaaaggccgactacaaagccccgctaactccacagcaggagtcgttgagaatcattttcatcaaagaacagtatgacaccaagctgcaggaacttcaatatcaactgaccatgtccaagaagcatggtgaggaaattctgatgaaattacaagatgccattgatgagaatgaagcaaggaaaaaggcagaatccagccaattaaagagatctaaagagctggagggaaaaatattggaactggaggctgatcgacaatctgttatctatgataaacgtgagaaaaccacggcttatgacatgatgaaggcagagctggattgctcattattaagccttgagtgctgcaaagaagaaaaacaagaagcttgaagctattctgcaacaatgc

SEQ ID NO: 6927 - DNA, 511 bp, Arabidopsis thaliana
  unsure at all n locations
  Clone ID: LIB24-112-Q1-E1-H1
antggttccctggcctaccggcccggaattcccgngtcgacccacgcgtccgcgacaaggacgaggttccaagagaacttagcttcttgttctacgtacgacaccaaaaattaattcaaaaaagaaaaagaagagagttcaatgagaaaacattctcttgatcgatggcttttaacagctgttcttgtcgttctcctctcgtcttcttcctccttcgcggccnnnnnnnnnnnnnnnnnnnnnnnnnnnnnnnnnnnnnnnnnnnnnnnnnnnnnnacctctttgatcatcgatggcaaaagagagcttctttattctggctctattcattacccgagaagcactccggaaatgtggccaagtatcatcaagagagccaagcaaggcggtttgaacacgattcaagacatacgttttctggaatgtacatgagcctcaacaaggaaagttcaacttttcgggacgagctgatttggtgaagttcataaagttgattcaaaagaatggnatg

SEQ ID NO: 6928 - DNA, 496 bp, Arabidopsis thaliana
  unsure at all n locations
  Clone ID: LIB24-112-Q1-E1-H2
aattcccgantcgacccacgcgtccgaaaaaaactcaagagacaaaaaaaaaaggaaggcgcgtcagtgatggagaagattattgacgtagcttatggcgcatcagtgaaggtgggtttgacgttgttggagatgaatctgttgccggatattgtcattangcggctcacacgtctgcttctggccggtcgtctccgttccggttacaaacccacggcggagatgcaactctccgatctcctccgttttgttgactctataaagaagatgcctatagctatccataccganaagccaaagactcaacactatgaattaccgacagctttcttcgaacttgtccttggaagaaacatgaagtacagntcttgttacttctcaaacgattcaagtagcttacaacatgcagaggaagcaattttggcccttattgtgaaanaactaaagttggaagattggnaaaagtgttccttgaaaatcggatnttgctggggga

SEQ ID NO: 6929 - DNA, 473 bp, Arabidopsis thaliana
  unsure at all n locations
  Clone ID: LIB24-112-Q1-E1-H3
acgcgtccgggaaactggcatggccctcatgtgtgtggctatacgggtgtgttctgtgccccggctcttgatgatcctgacgtcgcggttgtggcgggggttgatttgaatggtgcggatatcgcagggcatttaccggctgaacttggtttgatgacagatgttgcgatgtttcatttgaattcaaaccggttctgtggtatcatacctaagagtttcgagaagttgagcctaatgcacgagtttgatgtcagcaacaaccggtttgtcggacctttcccttctgttgtcctctcgtggccggctgttaagttcattgacgtcagatacaatgatttcgaaggtcaagtccctcctgagcttttcaaaaaggatctcgacgccattttcctgaacaacaacagattcacgtctaacattcctgattccctcggagaatcatcancctccgttgtgacctttgctcaaaaaca

SEQ ID NO: 6930 - DNA, 471 bp, Arabidopsis thaliana
  unsure at all n locations
  Clone ID: LIB24-112-Q1-E1-H5
acgcgtccgtccagatagagctgtgtttcatagcaatagagctgcttgtttgatgcagatgaaaccaattgattatgaatctgtgatttctgaatgttcaatggctcttaaatctcagcctggttttactcgtgctttgcttagaagagctagagcttttgaagctgttggcaagtttgatttagctgttcaggatgttaatgttttgttgggttctgatcctaatcataaggatgctggtgagatttcgaagcggttaaaaactgctttgggtcctcaccaagatttgcagagccgtccttcacctgcagctcttggtgcttcggctgctttaggcggtcctattgctggacttggtccttgtttgccttctcgtaatgttcataaaaagggagttacttcgcctgttgggtctgtttcgttgcctaantgctangtaatggtaanggttgagaaggccacangtggtga

SEQ ID NO: 6931 - DNA, 485 bp, Arabidopsis thaliana
  unsure at all n locations
  Clone ID: LIB24-112-Q1-E1-H9
acttttacgccgnccggtaacggtccaaaaattcccgggtcgacccacgcgtccgaatccatccaatttagggttagggctgcccctaatctggaaacctttgcctcgtttctgatctgttttccggatccgacttgaaggaaagaagacgacgacgcactaccaaaaacatgggcgcgaattcgcttccaacggatgcaaccctcgatctagatgagcagatctcgcagctcatgcagtgcaagcctctctccgagcaacaggtcagagcattatgtgagaaagctaaggagatcttaatggatgaaagcaacgttcagcctgttaaaagccctgtgacaatctgcggtgatattcatggacagttccatgatcttgcanaacttttccgtattgggggaaagtgtcctgataccaactatccgtttatgggagactatgtcgaacgtggataatatccgtgggaaactgttacncgttgggtg

SEQ ID NO: 6932 - DNA, 488 bp, Arabidopsis thaliana
  unsure at all n locations
  Clone ID: LIB24-113-Q1-E1-A3
cgtaggcntgtgaaggttctnaaggtcncgggangcatcagccgacggctnngcccacgcgtccggaataaattcttctccttttcttttttgttgcaactagtgaaagagaaagagacgatcgcttannttcttcttctcctacactctgcgtttttgctctctttttactccgcattgctcctccgttantatcttcgccggcgaaaatttgttttctttttccctggaggtaaattcgaatcatgtcaaggcctgctccgcttcnacctcgttgcccgattccaaagaaactttctttgagtccagttgcanatacattctactcttcntcctcacccattgaatcatacattggncaatacaagtcatctactcaagattccaggctcgaagattaacctgcgtggcttgatgagttgctctgtganaaaactgatnggttgctcactanaggagncctccgntcccgctcagctagcnatcag

SEQ ID NO: 6933 - DNA, 505 bp, Arabidopsis thaliana
  unsure at all n locations
  Clone ID: LIB24-113-Q1-E1-A4
ctgttaccctgccgtagccgtccgaaaattcnnagggtcgacncacncgtccgattcggatctatcatcacatccccaaggactacgancaagatggtccttgctggtccatccaaatctgccgatactattttcaaatacatagctcctgaacaagttcccgttaantacggtggncttancaaagatactcctttgaccgaagaaaccataacggaagccatcgttaaaccggcagcaaactacactattgaattgcctgcttctgaggcttgcacgctttcatgggagcttagggttttgggtgctgatgtgagctacggagctcattttgagccaaccaccgaaggaagctatgctgtgatcgtctctaagacacggaagattggatcaaccgatnaaccggtgataaccgattcttttaatgtgggtgaaccgggaaagantgtgatcacaatcgacaaccatacttccaagaagaagaaagtgcctacangtcaaaact

SEQ ID NO: 6934 - DNA, 408 bp, Arabidopsis thaliana
  unsure at all n locations
  Clone ID: LIB24-112-Q1-E1-D11
attaccggctacaaggtttctctgctcgtcaacgttctctgaattagtggtattgaaagatgagcttatctcagaatgctccgaaaagtaagggtattaaaagagaggagctcaagaaacagtacgaagatgttgaagatgaggaagagattgggtccgatgatgatctcactnnnnnnnnnnnnnnnnnnnnnnnnnnnnnnnnnnnnnnnnnnnnnnnntcggaactggttgaaatgaaaaagcttgagaatttgatattcgggtcactctactctcctgttacgtttggtaaggaagaagaagaagatggttcggctttgtttcatgttagaccgttctgctgtgaagcagattcctgactacgaaggatgatggggatgaatgatgaaaganctttctgatgaa

SEQ ID NO: 6935 - DNA, 493 bp, Arabidopsis thaliana
  unsure at all n locations
  Clone ID: LIB24-112-Q1-E1-D12
gccgnccggtaacggtccaaanattcccgggtcgacccacgcgtccgcacaagccaatggcgcaacttactaattccctcaattatctcttttctgtttctctcttattatttgtatcgttccactgcttatgttttcgtttttcgttggttgcagcttgttcaaactccactgacgatcaacagattcaacaccatcaccaccggaaatgggttggtccctcaggccacaaagtcatcaccgtctcacttaacggccacgctcagtttcgctccgtccaagacgctgtggattccataccaaagaacaattncaagagcatcacaatcaagattgctcccgggattttacaagagaagaaagttggtggtttcagctacaaaacccgttncataacgttcaaaggganctgggtanggatgttgaccggctatangagtgggcacgaaccgttcgtcccgaccttgggggctaaaggtcaaacaatttacnt

SEQ ID NO: 6936 - DNA, 493 bp, Arabidopsis thaliana
  unsure at all n locations
  Clone ID: LIB24-112-Q1-E1-D3
tacgnccccggaaattcccanatcgacccacgcctccgcccangcgtcaggcaatctgcatgtcaatctctgcaatgtcgttcatggtgtcagttggattcaacgcagctgccagtgtgagagttantaacgaantangtgctggaaatccangatcancagcattttcaaccgcggtaactacaggagtgtcatttttactgtcattgtttgaagccatcgtgatcctctcgtggcgacatgtcatcagttacatttttacggatagtccagcggttgcggaanccgtcgccgngctctctcctttcttagccattaccatagttctcaatggaagttcaacctgttttatctggtgtggccgttggatgtggatggcaagcatatgtagcttacgttaacattggatgttactacattgtggggaatcngattggctancgttccttggnttcacctnngatangggagctaaggggaatatggncaggga

SEQ ID NO: 6937 - DNA, 496 bp, Arabidopsis thaliana
  unsure at all n locations
  Clone ID: LIB24-112-Q1-E1-D5
gtccgnaaattcccgggtcgacccacgcgtccggttcctttctctgtctgaatttcttttttccaataataaattttacaaatgctgtgttcttgattggcttttttaatcctcactgagatttgtgcttgaatcttgattatcttggtgaagtatgttgtgttcaaccatatgagctctgatggtgattctggtaacaggaaattcatgaactttgtgattcattgcatcaagaatagaagactagaagggggaggttaattagattatcttaaggtgtataaaatggaaaaaaagagtgtaccaaattctgataagttgtctctgattagagtgttaagaggtataatatgtctgatggtgttagtttcaacagcttttatgatgttgatattctggggggttcttancagctgtagtgttgaggctttcagcattcgctatagcccgtaaatgtgtttccctctcctttgggctccgtggctcgccttgtggc

SEQ ID NO: 6938 - DNA, 506 bp, Arabidopsis thaliana
  unsure at all n locations
  Clone ID: LIB24-112-Q1-E1-D6
gcctggncctacaagtccggaaattcccgggtcgacccacgcgtccgcacaagccaatggcgcaacttactaattccctcaattatctcttttctgtttctctcttattatttgtatcgttccactgcttatgttttcgtttttcgttggttgcagcttgttcaaactccactgacgatcaacagattcaacaccatcaccaccggaaatgggttggtccctcaggccacaaagtcatcaccgtctcacttaacggncacgctcagtttcgctccgtccaagacgctgtggattccataccaaagaacaataacaagagcatcacaatcaagattgctcccggattttacagagagaaagtggtggttccagctacaaaaccgtacataacgttcaaaggagctggtagggatgtgaccgctatagagtggcacgaccgtgcgtccgaccttggcgctaacggtcaacagttacgtacctatcaaaccgcttccgtcaccgtctac

SEQ ID NO: 6939 - DNA, 429 bp, Arabidopsis thaliana
  unsure at all n locations
  Clone ID: LIB24-112-Q1-E1-D8
caaacgaaaagaagcgacttttgcctcttttggtctctccccttctccggagagatctgctctctctatctatctctcaatctgtaagaagaagattcccacttcagtaaaagccctaactttacttgggaaagttcttcatcnatcatccttcaatcgtcatcatccatggctgatcaacaaaccctagattcctctactcctcctcctagtcaatccgatgatctatctcactcccactctacttcctctactacttcagcttcttcttcctcagatccatcactcttgaggtctcnctccttaagtcnactcaacgccggngctcctgagttcgttcctggtcganctantcctccgctgcctcancctccgangatgatnatcgcgcctccnnccgggtgganggtatggttcataggtatnacc

SEQ ID NO: 6940 - DNA, 428 bp, Arabidopsis thaliana
  unsure at all n locations
  Clone ID: LIB24-112-Q1-E1-E10
tggccgtgggatttgcccgaggcttggaacgacaaattggtgttcgcggtggtgatgaagaatccgctgagatcaaaaaatgttttcgattttatcatcatcttcttcttcacaactcgtcaattcaactctcaatttccaaaattcgccgaaatctccgatcaccgttatgtcgaagacgtctaaattcaaaaccctgacggagaatttcaccgtgagagtgcttaaagcagagaatcgcgaactgaacgtggctctgctctcacctttcactatcgcttcttcacggcttgattctgtcagtaatgttgcgattccggattgagctcaacgaatggatttgttgggtttgggganaaactccgatttttgccgntcggtaacggcggaggatcagataatggctntggtaaaagcncgggaagcta

SEQ ID NO: 6941 - DNA, 461 bp, Arabidopsis thaliana
  unsure at all n locations
  Clone ID: LIB24-112-Q1-E1-E11
acgcgtccggcaaaatcgggcagctggccagcatataacaccattaaaaaaacctcttcacagtccacagggtctccctctccccctccgtccgcaaactaatttccctggggcccaggcacccttgcagaatccttatgcttatagcagccagttgcctacctctcagctgccaccacagcaaaacatcagtcgtgcaactgctcctcaaactcctttgaacattaatctacggccaacaactgtgtcttctgcaactgttcaatttccccctcgttcccaagcaagcaaccgctacaaaagatgcaacaatcctccttctgagctagctcaagctcttgtcgcagcaaaactcagagtctaacaaagcaacattccaatcgtctcaagcaaggcaantttctcaagctgcaagcaagcaaggtgcaantctaatgcancaaaccaaaaccaaaaattta

SEQ ID NO: 6942 - DNA, 516 bp, Arabidopsis thaliana
  unsure at all n locations
  Clone ID: LIB24-112-Q1-E1-E2
ctggttcccgncctaccgccccggaatcccgngtcgacccacgcgtccgactaattcgattgttggaaacgtctaagtcattaattgtcctcgatgacatatgggaaaaagaagattgggaactaatcaagccaatatttccaccgaccaaaggttggaaagtgttgcttacttctcgaaatgagagtgtcgccatgcgtagaaatacatcatatatcaactttaaaccaagaatgcctaaccactgaagacagttggacactttttcagaggatagcacttcctatgaaagatgcagctgaatttaagattgatgaggaaaaggaagagttgggtaagctaatgatcaaacactgtggagggttaccattggccatcagagtgttaggaggtatgttagctgaaaaatacacatcgcatgattggagaagattatctgagaatattggatctcatctcgtgggaagaagaactaactttaatgacgacaacaacaatacatgttacaatgttatt

SEQ ID NO: 6943 - DNA, 459 bp, Arabidopsis thaliana
  unsure at all n locations
  Clone ID: LIB24-112-Q1-E1-E3
gggcggacgcgtgggcagccatgttcatccagatggcacgtgattcggaagccaaaactctgggcaagtggagcaatcctcaatacaaacaaagaagaatctgagagagcagaggaacataagctatgaggggtcaagagtggcagatatatcagtgatggccacagagtatagccccgtgctgaaatggcttagctacagggcatctccagatgcgtttccgggaatgggcgaagagacagatgaggaggacagtgatatttctgaagatgatgaaatacaagactggtgacattcaccatcttaagtgtcttatatgttaggtcagatagaactggtatgatagttaacaacttaacatcaagggaaggaacactaattgttctgcttacttataaatagaaaatggagagtcacttctctatctaacaaaaaaaaaaaaaaagggcggccgctnct

SEQ ID NO: 6944 - DNA, 449 bp, Arabidopsis thaliana
  unsure at all n locations
  Clone ID: LIB24-112-Q1-E1-E6
tacgcttatactaactttcatgagacacttggttctgagaaattttacagcaatggtagttcccgagataccgtagagatgagatttcatccggggcacgaagctaataatgtgaaggaagtatcagccacaagttggactggcaagagaaatccaagaattgttattgatcttgaagaacctcctcccacatgggtctcccatagagagactacagagcatgctcaggcttctgttagctatgttactgtgagaaatcctgacacaaaaccgtcgttctttgatcggatcagctcaaacattctgatggatgtagaccaatcactcgttgaggatgatagtgataagacaactagtaaggagtcaagtttactggatcttaataacacaccggttgatgagtctgtttccgagcctcgttactctctcttacaagatctganctgtgc

SEQ ID NO: 6945 - DNA, 424 bp, Arabidopsis thaliana
  unsure at all n locations
  Clone ID: LIB24-112-Q1-E1-E9
ctctctccacaaagataagccaacaatggttggtgattacagaggacgctttagtagccgtcgtttctccgatgactctgacgattcttccgacgatgcttcttccgtggagggagagaccacttcttccatgtactctgcggggaaagagtatatggaaacagaatggactaatgagaagcatagtttatatcttaaatctatggaagcttcattcgtagatcagttatataactcgctcggagctctcgggaagaacgagaatgtatccgaatcaacgaggttcggtagcggtagaaaaccgtctcaagaacagttcaaggttcttcatgatgggttcctggcaanaagataatgtgaaacaacctggaacatcggattaacgggaagggacgggtggtaaattccaatgagtttcctaagg

SEQ ID NO: 6946 - DNA, 504 bp, Arabidopsis thaliana
  unsure at all n locations
  Clone ID: LIB24-112-Q1-E1-F1
ctacggctccggaattcccgaagtcgacccacgcgtccgcccacgcgtccgctacattcgtcagtttcgcctctcggtttcttgaattctccaaggattcatgcttacacaagttcaagctttcagttgagagggatgatgttgatatgtgtacaatcatgccgtggatccaagacgctgttaatcgtagaatccaacatcttgaagtcgactgtcgcttcagttttcattttgaggcagtgtatctaaccctttacttaagtgagactttggtttcattgagacttcattttgtgacgctgcatcgttacgagtttgtatctttgccaaatctcaaggtgatgcatctagaagagaatatatattattgtcttgagactctggagaacttcatctcatcatgcccggttcttgaagatttaaccgttgttagaattgtagatattatcaccgagaagattttacgggtgcgctcctaggtcacttaacagtcctcaaactcgn

SEQ ID NO: 6947 - DNA, 461 bp, Arabidopsis thaliana
  unsure at all n locations
  Clone ID: LIB24-112-Q1-E1-D10
actcccgggtcgacccangcgtccgnccacgcgtccggtttttcttgttcttcacggagcttctggtttgtctgagaaccttatcaaggaatgcattgagaatggagtgaggaagttcaacgtgaacacagaagtaagaacggcttacatggaagctcttagctctgggaagaagaccgacattgttgatgtcatgtccgcaacaaaagcagccatgaaagctgtgatcgcagataagatccgtctctttggctctgccggaaaagcttgagttgttgataaaaaaatgtccgatnaattagttaagtacaattgtacatcacatccaaaggaataaaagaaacaacanatattacatcacatccaaagaagatgaatgcaattgtatgccaatgcagatgcaatngttgttgggaattaangaaatcanttttagtacnggtttaaccngtttttttttc

SEQ ID NO: 6948 - DNA, 455 bp, Arabidopsis thaliana
  unsure at all n locations
  Clone ID: LIB24-110-Q1-E1-H9
acgcgtccgcaacaaacaaacacatatatacaaatacacatacacttatcaacataaacagcctaaagatgagttctaaaggagaaggctctagttctacggcggagagggaggtgaagaaacaagtagcgagtgtgattcccgttacgaggaagctggtgaagactatggccgcgaaagccattatctctgctctcacgccatccggttgtggccggcactctgactctaccggcgacggcaaaggtaacggagggcgcgtgtaccccggtactcatcgttgatcggccattttcttgggattgaagatatatatgccgtcatgatcgtttatgggttttctttttatgttttttttttatatatctaaatgttggtgttctcgttgataattataagcttttgataattaatgcttctcctctttcnttcttcctaaaagatttaaatgtttt

SEQ ID NO: 6949 - DNA, 462 bp, Arabidopsis thaliana
  unsure at all n locations
  Clone ID: LIB24-111-Q1-E1-A1
acgcgtccggagaaagagaaggtaatcggccacgatgacgatggcgacgcctttcagtggggctgcgaactctattgtggcggcgaggaccgttctgataacgggagtgagcaaaggtctgggaagagccctagctctcgagctggccaagaggggtcacactgtgatangatgcgctcgtagtcaagagaagctcaccgctcttcaatcggagctttcctcttcgaccaatcatctcctcctcaccgctgatgtgaaatcaaacagcagtgtcgaagaaatggcacacacaattgtggagaagaagggtgtcccagatatcatagttaacaatgctggtaccatcaataagaacagcaagatttgggaagtctctgctgaagattttgacaatgtcatggatacaaacgttaaaggagttgcaaatgtgctgcgccattttanccctttgatgctcccacg

SEQ ID NO: 6950 - DNA, 472 bp, Arabidopsis thaliana
  unsure at all n locations
  Clone ID: LIB24-111-Q1-E1-A11
cgggtcgncccacgcgtccgganaaactcganaacgagaaaaatggcgagctccgatgctctcttgccaatctccgccagagaagaagaaccattatgtccttacacgagattaccaatggccgacccgaatcaagaaacccatggcccccggagaagaagaccctttaaaggtctcctcgccgtctcatttggtctcttgttcatcgccttttacgtcgctctcatcgccacacacgacggatctagatccaacgacgaagggatcgatgaaacagagacgataacgtcacgtgcacgtcttgctggtgtgtcggagaaacgtaacgatgggttatggaaactttccggtgatcggaacacgccggcgtttgaatggaacaatagtatgttgtcgtggcaacgaacggcgtttcattttcagcctgagcaaaattggatgaacgatcctaacggtccattgttctacaagg

SEQ ID NO: 6951 - DNA, 498 bp, Arabidopsis thaliana
  unsure at all n locations
  Clone ID: LIB24-111-Q1-E1-A12
cgcctgnccgtacaagtccggaaattcccgggtcgacccacgcgtccgtaaatgacaactgtccgcaggtgtacagattgcaaataaataatgggatccctatcaaaagttggtacgatgatccaactgatgatgggttgattactatacttcccttcttagagactttggctgttgctgatgatgttcggcctatcattggcaggagatttggtaacaaggaataagagtttccttctctttttttctatatacatcgagtgcagatcctgatttctctcctttggattttagttacaaattggcccttaattagttcctcatatctctttttaggtcgttaattaggtaaccaaagaataagctcgttgagtctagtgagaataagtttccttgcttgctccctttttttaataagaagacctagttgtgggcttaaatcttatgactttgctgggttcttctctgccaagatagatcctagaaaatcttgcagtt

SEQ ID NO: 6952 - DNA, 505 bp, Arabidopsis thaliana
  unsure at all n locations
  Clone ID: LIB24-111-Q1-E1-A2
aactggttcccttgcctagccgtccggaatccanggtcgacccacgcgtccgctcngacgcattacattttcttccgatcaatacagagagatcagtttctgagagagaagaanatgtctatanaggaagaaaacgttccaacgactgttgactcaggagctgccgatacaacggtgaantctccggngaagaaaccggnggcgaaaggtggtaaatctaacaagacgacgacggctaaagcaaccaanaagcctgtgaaagctgctgctccaacgaanaagacaacaacttcctctcaccctacctatgangagatgattaaagatgcgattgtaacgttgaaggagagaactggntctagtcaatacgcgattcataaattcatagangagaaacatanatcactgcctcctacttttangaagcttttgcttgtgaatctcaagagacttgttgcttctganaaattggttaaagtcaaagcttcctttaagattccttctg

SEQ ID NO: 6953 - DNA, 475 bp, Arabidopsis thaliana
  unsure at all n locations
  Clone ID: LIB24-111-Q1-E1-A3
caaangtcgccgcacgcgtcagcccacgcgtccggaacttctgggggatgatatatgctagaggagctggtgttgaaagaaattataccaaggcacttgaatggcttacacttgctgcaaaagaaggtctctattcagcatttaatggnattggctacttgtatgtcaaaggctatggagtagnataagannncctatactaaggcaagagaatattttgagaacgctgttgacaatgaagaccccagtgggcattataaccttggagttttgtatcttaaaggcatcngagtcaacagggatgtgaggcangcaacaaaatacttctttgttgctgcaaatgctggtcaaccaaaggctttctatcaactcgccaagatgttccatactggtgttgggcttaagaagaatctggagatggcgacttcattttataagctagtagcagaaagggggccgtggaattctctctcta

SEQ ID NO: 6954 - DNA, 459 bp, Arabidopsis thaliana
  unsure at all n locations
  Clone ID: LIB24-111-Q1-E1-A4
acgcgtccggcnatggaaggagagaagcaattggaanaaactattgaagcggcgtttcagataatttcanccatgaatgatgagctttgtaatccgtctttgtggtctacttcagctaccccgagttccgccgcgacgacgacgggttctaatgggttcggctctcgtttccgccgatgcggctgcgattgatggaacatcgcatcattcggaatctgctggtggtggcgggggcggaggaagtggaaatagtgttttggatgaggcgagtcttcggtataagaactcagtgacttcgcttcgtgctgttcttgctgcgattccaaattcgcagaaggcaaaagcatctgaaatgcaaaatggtttaggatccctgaaagtgaagacgagatcgaaaaattggaggagcaagccttaagtctcaaaatggagattgcaaagaagaatgttcatgttaaa

SEQ ID NO: 6955 - DNA, 490 bp, Arabidopsis thaliana
  unsure at all n locations
  Clone ID: LIB24-111-Q1-E1-B1
ccgtaggccncaggaattccaaggtcgacccacgcgtccggcgatggaaggagagaagcaattggaagaaactattgaagcggcgtttcagataatttcagccatgaatgatgagctttgtaatccgtctttgtggtctacttcagctaccccgagttccgccgcgacgacgacgggttctaatggttcggctctcgtttccgccgatgcggctgcgattgatggaacatcgcatcattcggaatctgctggtggtggcgggggcggaggaagtggaaatagtgttttggatgaggcgagtcttcggtataagaactcagtgacttcgcttcgtgctgttcttgctgcgattccaaattcgcagaaggcaaaagcatctgaaatgcaaaatggtttaggatctcctgaaagtgaagacgagatcgaaaaattggaggagcaagccttaagtctcagaatggagattgcaaagaagaatgttcatgttaaa

SEQ ID NO: 6956 - DNA, 501 bp, Arabidopsis thaliana
  unsure at all n locations
  Clone ID: LIB24-111-Q1-E1-B11
gttcgcctgnccgtaaaaagtccgaaattcccgggcnccactgattttggtgtancccttgtttatttgcttatgtttatcttttgatctgatctataaatatatatacaggttatcaaaaggcctccaccaaaaccaactcaacatctccgcctccatctccgcctccatctccgccgcgagttccagacgctcaagaattggagtaccttaaatccgactcttttcccgaacacgatgcgtagagttgtcattcggacggaggtgtgcgttccgataaaattaggctaccgccgcggctttcagaccttctagaattggagaaattgtttcccgaacgcgaggcgctgagttgtcctttggacggagatgaggattccaatgaacttaggctacggccgctggttccagacgctcaagaatggaagtaccctaaatccaagttatttcccagacacgcggcgtggagttgtcattcgggcggaggtggaggtggaggcn

SEQ ID NO: 6957 - DNA, 504 bp, Arabidopsis thaliana
  Clone ID: LIB24-111-Q1-E1-B12
aatggtcgcctggccgtacaagtccggaaattcccgggtcgacccacgcgtccgcccacgcgtccgcacgagagtcacgagagatcgagagaagtctttgattctcttctctcatcaaatcaaaatatcatctcagagactccgattctctctgtttctcctccacttttcaacccaagtccaccctcaaaattctcagaatgattgctcggatccttgccgccttagccgattccatggagatgccggtggctgccggtggtggatcagtgctcggtaccatcaaaatcgctgtgatgccaattgcaaaggtattcaccatgtgcttcttgggtcttctcatggcctccaagtacgttaacatcttgcctccctctggccgcaaactcttgaacgggttggtcttctcgcttttgcttccctgcttgatcttttcccagctcggacaagccgtcactctccaaaaaatgcttcagtggtggttcattcccgttaacgtcgttc

SEQ ID NO: 6958 - DNA, 459 bp, Arabidopsis thaliana
  Clone ID: LIB24-111-Q1-E1-B2
acgcgtccggatttcttttcggggagatctagtagttgttggattcgttaaacggagaagtggatttggtacgagtctttaggtttccttcttcaccaaaagctctatatagagagaatctgcgagctctttttggtaggaaattagggttcgtgttgcttggtaaatatagaatcaatgacggaggttgttctgcatatatacgatgtgacgaacagtggatcggagaagactaacaacaccattgttcagatcaataggttcttcaaagacgggatcggtcttggcggtatattccacagcgctattcaggtatatggaaacgatgaatggtcttacgggtattgtgaactaagaactgggtgtattcagctgcccgaatggaaagaatccaatgtacacataccgtgagaaaatcgtccttggcaaaacagattgcacaatcctcatggtgaatca

SEQ ID NO: 6959 - DNA, 502 bp, Arabidopsis thaliana
  unsure at all n locations
  Clone ID: LIB24-111-Q1-E1-B7
nctggttcccctgggccgtaccgagtccggaaattcccgggtcgacccacgcgtccgattgctcaatatctgtaatacatctccgatattaacgacaatagctcccggaattggagggacatgaatccatttgtctccatcctcagtggctcgggcgtaaagactgcttaatacaccatcttcttgtaggaggagagtgagagtgttgatgtctgagtggcgaccagttcctatggccaggcttggctcaggacatttcggatagtagttgaagttcattctcattgttcccattagggtttctttattggactcatcgatgattgtgtttagattgttgatgaacagaaggccacgtggcagcgaagtcatgtcgttgaggaagatactcaaacttgaggaaatctctccattccaaaacactttctatgcaaggattgaaacttgtggtcaaccacgccgtctccgacactgaactccctctccaataccttcttctctc

SEQ ID NO: 6960 - DNA, 457 bp, Arabidopsis thaliana
  unsure at all n locations
  Clone ID: LIB24-111-Q1-E1-B8
acgcgtccggcanagcgagaanaaatggcaaccatgtctgctcttcagagctcttttacttctctttctctatctcccagctcttccttcctcggncagcgtttantttccccgatttccctctccgtcacttctccggtcaagcccgctgagaacccangtcttgttcttgcaaagctcaagcgttgggaacgaaaagaatgcacaccaaacagtcttccgattctccacanaatgcatgtcaagtttggagatacagtcaaagtaatatctggacgcgacaagggtaaaatcggataggttactaanattttcantcacaacagtaccattgtgatcanagatgtgaacctcaaaacatnncacatgaagagccganaagagggagagcctgggtcaaattgtcaagatagaagcacctatcnacagctcaaatgtgatgttgtantcaaaataa

SEQ ID NO: 6961 - DNA, 533 bp, Arabidopsis thaliana
  unsure at all n locations
  Clone ID: LIB24-110-Q1-E1-H4
nttcaaaaggtcgacccgacgcgtccgttcttcnctgctcttctctcctccngttagaacactaagaaagaaagaacaaaaaantgctcaaaacaagttttcttcntctccaaatccctttctcccttcttccctccttcaaatgttagttatcggtcgggagggaagaacattcggcgggcggtttctcaagcgggagggagaatccatttactccaaaaagcatctctaagttcgttactggaacaaagagaattcgtgggccaatctcccaagatcgggaggtttttaatctcaaaagcttcaccactcaaacgccggttagactcaagcaactttctcaaaaactcgccggccgcgnaactcgctgccgactccgttttccccgaatttccggctccgccgcgaaatctcttccggtttttcccggattttaggaagccaagttctcgaggaaaacacgaacgaacgaacgtttaaaattccccggtttaatgaccaagaaggaacnttcaactaaactaangggaaat

SEQ ID NO: 6962 - DNA, 483 bp, Arabidopsis thaliana
  unsure at all n locations
  Clone ID: LIB24-110-Q1-E1-F3
tgtttacccncccgtagcctccaaaaattcnanggtcnacccacncgtccgcncacgcgtccggcctgagggatgacataagggattatgtgagaatcttggtgattggtgcgggtgggttgggttgtgagcttctcaaggatttagctctttctggttttcgtaatctcgaagtgattgatatggaccgtattgaggttactaatctcaatcgccagttcctgttcaggattgaagatgtaggaaagcctaaggcagaggtagcagcaaagcgtgtaatggagagagtgagtggagtagagattgtgccgcatttttcacgtatagaagacaaagagattgagttttataacgattttaatatcattgctcttggtcttgattctatcgaagctcgcaaatacatcaatggggtagcttgtgggtttcttgagtataatgaagatgatactccgaaaagagaaacgatnaagccaatgggta

SEQ ID NO: 6963 - DNA, 488 bp, Arabidopsis thaliana
  unsure at all n locations
  Clone ID: LIB24-110-Q1-E1-F4
ctgtttacgccgcncgtaggccgtccaaaaattcaagggtcgacccacgcgtccgnaaaatatgagcgaagaactaagtcaaaagccatcatcagctcagtctctgtcactgagagagggcagaaataggtttccttttctgtccctgtcacagagagagggcagattttttccttctctatctctttcagagagagatggaagaaagttttcttttctcagtatgttctcttttctcatgccactgttggaggttattaagattattattgcttctgtggcctccgtaatcttcgtcggtttcgcctgtgtaaccctcgctggttctgccgcagcattagtcgtaagcaccccggttttcatcatatttagtcctgttctcgtaccagctacgatagccacggttgtcttggcgacaggattcacggccggtggctcttttggancgacaagcacttggtcccatcaatgtggcttgttaaacgtan

SEQ ID NO: 6964 - DNA, 468 bp, Arabidopsis thaliana
  unsure at all n locations
  Clone ID: LIB24-110-Q1-E1-F6
gtaaaggtccaaaaattcccgggtcnacccacgcgtccgngacatttctgcgcagagatttgccatgaacgggaagaagcatgagactccctcccgggtttcggttcgatcccgatgatgaagatcttgtgttcgagtatctcgccaagaaggtcctccaccgtccaatggacttcgatctccctgagctccgttcttgcaatgttgatccatgggacttgctaggagagaagaacaaggaagtgtattacttcgtgaagaaggaagagcgagagaggaagggaagagagacgttatccggttattgggaagagtgtgaagaagaggaagtaatggaggctggtggtcgtgattgtattcatttagaaggaaggagaaagacatttgctttctttattggaaaaaaacctcgagggacaataactccatgggatcatgtacgagttccgacttctttcctctagagct

SEQ ID NO: 6965 - DNA, 423 bp, Arabidopsis thaliana
  Clone ID: LIB24-110-Q1-E1-F8
gggataaaacaaaaagaaaaaaaaaacattttttccaacacttgaaaagaaaaatcataaactttactaataataaagtttactattaatgaagggaggggttaaacttttggccgtgtgcctttgcgtggccacggcgaccgtcatgatggtccaagcggaggacccttacttccaccacgtgtggaacgtgacgtacggaaccgcatctcctctcggcgttccacaacaagtcatcctcatcaacggtcaattccctggtcctaacatcaactcgacttctaacaacaacgtcatcgttaatgtcttcaacaacctcgacgagcctttcctcatcacctgggccgggaatccagcacaggaagaactgctgggcaagatggaacagctggaacaatgtgtccgattcctccggggtcagaa

SEQ ID NO: 6966 - DNA, 433 bp, Arabidopsis thaliana
  unsure at all n locations
  Clone ID: LIB24-110-Q1-E1-G1
aatctgagaacaaggtctgcttcgattgtagtgcgaagaatccaacttgggcatcggttacatatgggattttcctctgcatcgattgttcagctactcaccggaatcttggtgttcatatcagcttcgtcagatcaacgaatttagactcttggagcccggagcagctcaggacaatgatgtttggtggtaacaaccgtgctcaggttttcttcaagcaacatggatggactgatggtggcaaaattgaagctaagtatacttcaagagctgctgatttgtatcggcagattcttgctaaagaagttgcgaaagcgattgcggaagaaactaattctggtcttctgtcatctcccgttgctacttctcagttancggaaagtatctaatggggtttcctcctaanccggtcaaaggaagantttacctcctt

SEQ ID NO: 6967 - DNA, 483 bp, Arabidopsis thaliana
  unsure at all n locations
  Clone ID: LIB24-110-Q1-E1-G2
ngttaactgccgtagcctccaaaattccaaggtcgacccacgcgtccgcccacgcgtccgcggacgcgtgggactacacaagatggtcagaaagagtctgataaaagaagccaaaaacagaaagtctcggagctgaaggaaggagggattctgaaacctccaaagaaacggtaacccactctactaatttctgtcatcactttttggcgaggttcagccagctcagtgaaggaagttaaggggtttgaataattggtatgctcatgcaattctttttggtaattgcatacctgaaatttagttgcagttgtttttttgacnaagtctcaagcaggaaaggagatggtttcaggagctgcactctttagggttatgttgaatggagtcttcaacctgtttagaagctccatttttaatacctttatgctttaaactgttagctctgtttccaatggatgtttccacaagttgtaacttttgcaa

SEQ ID NO: 6968 - DNA, 426 bp, Arabidopsis thaliana
  unsure at all n locations
  Clone ID: LIB24-110-Q1-E1-G5
gggagaagcagaaaatttacttagaaggagcgttgaaatcacgtacgaggcacgtgagattttctacaacagatgcaccaagggttcatgggatttcgcctacgctggaaaagcttcccggagaccaattcttgtcgcagcttccgttggtagctatggagcttatctcgctgacggctccgaatacagtgggatatatggagattctgtgagtaaggagacattaaaggatttccatagaagaagagttcaaatcttagcaaaatctggagccgacctaatagcattcgagactattccaaataagctcgaagcagaggcttatgcggatcttcttgaggaggaagatatcgatattccggcatggttctcgttcacttccaaggacgggagtcagtgtgccacgaagagantcagttgtagaat

SEQ ID NO: 6969 - DNA, 424 bp, Arabidopsis thaliana
  Clone ID: LIB24-110-Q1-E1-G7
gagactgtagagtgaagtttgatttatttagagagataagttaaaaaaaaaatggtcggtatggatttgttcaaatgtgtaatgatgataatggtgttggttgtctcttgtggtgaagctgtttctggagctaagttcgatgagctttatcggtcaagctgggctatggatcattgtgtcaacgaaggcgaagtcacaaaactcaagcttgacaattactctggagctgggtttgaatcaagaagcaaatacttgtttggtaaagtctctatccagattaagcttgttgagggtgattcagcaggaacagtcactgctttctacatgtcttcagatggtccgaaccacaacgaattcgattttgagttcttagggaacactaccggcgagccttacatagtccagaccaatatctacgtgaacg

SEQ ID NO: 6970 - DNA, 454 bp, Arabidopsis thaliana
  unsure at all n locations
  Clone ID: LIB24-110-Q1-E1-G9
acgcgtccgcccacgcgtccgcttcttcaagttttccatatactaatggggaggtttcataaatttcctctcctaggtttagttctgttcctcggtctgaccggctcacttatcgccgccaatgagtatgcctgttctagtaccgatatacactttactcgtgccaatttccctaaaggtttcatttttggtaccgcaactgctgcttttcaggttgaaggagctgtaaatgaaggatgtagaggtccaagcatgtgggacgtatacaccaagaaattcccacataaatgtaattatcacaatgccgacgttgctgtcgatttctaccatcgttacaaggaagatatcaagttgatgaaaaatctgaacactgatggctttagattttccattgcatggcccagaatattcccccatggtaagatggagaaagggaatangcaaagcaagtgtt

SEQ ID NO: 6971 - DNA, 407 bp, Arabidopsis thaliana
  unsure at all n locations
  Clone ID: LIB24-110-Q1-E1-H1
ctctctgttcttttttcctctggttttgattttttcctggcattattattagggtttttttcatacgttgttgaaaatggcgtagttggagaaaggagacgaatcgatcatctacctacttgcccattctttgtcgtcgtttttcgattttccttgattcgccggagaaatagcgtttccggcaatgaaaacctctctccgacggttacgaggtgtgcttcacaagcatgaatctaaagaccggagagatcttcgagctctggttcagaaagatgagcttgcccaagcttctcaggacgtagaagacatgagagattgctatgatagcttgctcaatgccgctgctgctactgccaatagtgcttaagaaattttccgaatctttgcgaaaactaagtgcntgtctc

SEQ ID NO: 6972 - DNA, 494 bp, Arabidopsis thaliana
  unsure at all n locations
  Clone ID: LIB24-110-Q1-E1-H11
anggttccctgggcctaccggtccggaattcccggntcgacccacgcgtccgcggacgcgtggggctgaagtctgaaagatgcaggcaagtgataggtttaacataaattctcagcttgagcatcttcaagctaagtatgttggtacaggtcatgcagatttgagcagatttgaatggactgtgaacattcagcgtgatagttangcttcatacattggtcactacccgatgctttcttactttgcaatagctgagaacgaatctattgggcgagaacgttacaacttcatgcagaaaatgctcttaccttgcggccttcctccagaaagagaagacgagtaagagcttgtgtgcatttgaaattaaaaaaaacattctacttcttagaagcttgtgtgcaatcttctttaactgctccaccaatgtaattgccgaaaaggcttcttcctgtttctagttcataatgcanttgttgatcatgatctaaacantt

SEQ ID NO: 6973 - DNA, 495 bp, Arabidopsis thaliana
  unsure at all n locations
  Clone ID: LIB24-110-Q1-E1-H12
cgcntgggcttaccggggccgtaanggtccggaaantcccnncgcgtccgcgncgatcncnccntcaacaatttaaccggtccaatccctgattctccggttttcttaaaccaggaatcaaatttcttttcaggaaacccgggtctatgcggtgaaccgacccgaaacccgtgtcttatcccttcctcgccgtctatcgtctccgaagccgacgtaccgacgtctacaccagcaatcgccgcaataccgaacacaatcggttcaaacccggttaccgatccaaattcacaacaaaccgacccaaatccccgaaccgggttacgacccggagttataatagggatcgtagtcggagatatcgctggaatcgggatcctcgccgtgattttcctnnnnnnnnnnnnnnnnnnnnnnnnnnnnnnnnnnnnnnnnnnnnnnnnnnnnnnnnnnnnnnnnnnnnnacagacacaattacgttatcaacatttcatcctc

SEQ ID NO: 6974 - DNA, 491 bp, Arabidopsis thaliana
  unsure at all n locations
  Clone ID: LIB24-110-Q1-E1-H2
ctgttaaacgtncagcagcctccanaattccaaggtcgacccacgcgtccgcggacgcgtgggtggtcaagctgatccacctgataacatattcaatgcattaggaaacgaattttcacatcctagtggagcaggtcgaggaaagcctcttgtggaatctgctccaatccgacaagaagataaccgccaaattcgacgccctccgcctccaccgcagcagcagagagtacaacctcagcagaagcgggctccaacggtcaaagatggaactcctaagccgcaattnnnnnnnnnnnnnnnnnnnnnnnnnnnnnnnnnnnnnnnnnnnnnnnnnnnnnnnnnnnnnnnnnnnnnnnnnnnnnnnnnnnnnnnnnnnnnnnnnnnnnnnnnnnnnnnnnnnnnnctatgcgtatatttgctggagattcagctgatggagagaaatttgctgagaaaatngganctgaaattgattgaaaacncttgcggga

SEQ ID NO: 6975 - DNA, 490 bp, Arabidopsis thaliana
  unsure at all n locations
  Clone ID: LIB24-110-Q1-E1-F2
ttaaccnctcgtagccctcaaaaattcaaaggtcnacccacccgtccgantgtaacngtgggctacctgatgcctagtcntcacgtgcgtggtacttcattagttccatctttttgcttactactttattttgggtaatgttcangcgaaaaagtcgttctatttctcctaggcgccatcnaagtcgatctgttactcctaagagacgttctccaaccccaaaacgttacaaaagacaaaagagtaggagttcaactccatctcctgcaaaaagatntcccgccgcaacccttgagtcagccaaaaataggaatggagaaaaacttaaaagagaagaggaagaacgaaaaaagcgacagcgtnaagcagaactgaagctaatanaggaagaaactgtgaaacgggttgaagaagctattcgaaagaaaggtcgaanaaaagcttacagtctgagaaaatcaaaatgggaaantccaaccccggttggagg

SEQ ID NO: 6976 - DNA, 488 bp, Arabidopsis thaliana
  unsure at all n locations
  Clone ID: LIB24-110-Q1-E1-C7
aatgtttaactngtcgcagntcgtaangtctgnanttcccgggtcccacccacncgtccgaacacgcgtccgcccacgcgtccggcagaatcaaggagttcatattcaagagactcttctgctaactccaggggtagagaagataggcgttttgttgccaaagagttagatacatttcagggacgtgataaagcttatgatgaggtttataatcctcgaaggttcactgataatgagaaaggactcagaggaggatcacattcaaaaggctctgatactaactctcggggttggggtgataggcgttctgttgtatatacaagagatatggatgattggagagagaggaataaaaccaaggatactagggagactggcttttttaagccggaaaacttttgcagaaattggatgtagtgaagatatgatgaaggccttaaaggaacanaattttgatccccggcacatattcaggctagggctttttc

SEQ ID NO: 6977 - DNA, 498 bp, Arabidopsis thaliana
  unsure at all n locations
  Clone ID: LIB24-110-Q1-E1-D10
aacggtttccctggntctaccggtccggaaatcccggatcgacccacgcgtccgctcacttttaagcggggcaggatatcttcagcgacttgatctatcacactgttcttctgtgatatcattggattttgcgagtagcttaaagaaggtttcagcattacagtcgatcaggttggatggttgttctgttacgcctgatggtttgaaggcgataggcacattgtgcaattccctgaaagaggttagcctaagcaaatgcgtgagcgtaactgatgaaggtctttcttctctagtaatgaaactgaaagacctcagaaaacttgacatcacatgttgccggaaactaagtagagtttcaatcacccaaatcgccaattcgtgtcctttactaagtctctttgaagatggagtcttgttctcttgtttccagagaagccttttggttgatcggacaaaagtgtcgggctacttgaagaacttgacttaactgacaacgaa

SEQ ID NO: 6978 - DNA, 429 bp, Arabidopsis thaliana
  Clone ID: LIB24-110-Q1-E1-D5
gggagaagctcgtttctagaagctttaaagtttgggatcttgctacttgcactgtgaaccttcaggcttcacttgctagcgagtatactgcagcagtaaaccgagttgtttggagtcctgatggaggtctactgggtgtcgcatattccaagcatattgtgcatatatattcatatcatggtggcgaggatttacggaatcatctagagattgatgcccatgctggtaatgtcaacgatcttgctttctcccaaccaaaccagcaattatgtgttgtgacttgtggagaagacaagacaatcaaggtctgggatgctgttaccggaaataaattgcacacttttgaaggtcatgaggcacctgtttattccgtgtgcccacaccaagaaagagaatattcaagttcataatcccaactgcctgttgaat

SEQ ID NO: 6979 - DNA, 422 bp, Arabidopsis thaliana
  Clone ID: LIB24-110-Q1-E1-D6
tcctctttaatttcatttccagctgttggttggcttgaaagtacggtatccacagcgaatcactattcttagaggaaaccatgaaagtcgtcagattactcaggtttatggattttatgatgaatgtctgcgaaagtgagtttccctgcaaacattcttatgttgtataagctactgactcgctttgttcatgtgatgacaaacttctttaactaatactatgcatgtcctcatggtttctgttgtcgctgctaattttctttctttctttattctagtcctggctagtttatattgatctaccgggttaatattgctttgctcatgtgactgtgttctcatgacattttttcgtaccttaagttgttgttagatagtgccattcaaaaatgaatttgataagatatgtctccttctatgca

SEQ ID NO: 6980 - DNA, 429 bp, Arabidopsis thaliana
  unsure at all n locations
  Clone ID: LIB24-110-Q1-E1-D7
acgcgtccgcatctttcagagctagtaagcagaagctggaaagtttattacagaaatggtcagaatgggaggctgaaaatacgtccttggctcaggatcaagaacaactattcgaatctggtgaagagacatgtttccccgccatacgtgttggattgcagaagacttcgtctgtgtcattctggatcgacaaccaaactggtcataagccgttggaagattttgttctagtggaaagtagcaccactcctctttatgaccgtaaatttgctataggtttaaattcagcagatggctcaagaaacgtggaagggggattggagattattgatgatgatcctccacgttgcttcaattgtggtggctataagtcattctctaaagagaatgtccaagggcctttggatcgatnagcggttaaaaagtgcc

SEQ ID NO: 6981 - DNA, 481 bp, Arabidopsis thaliana
  unsure at all n locations
  Clone ID: LIB24-110-Q1-E1-D9
ccggaaattcccggnacgacccacgcgtccgaaaagagaaagaaagcaaaaatggaggacacgaagccaccattgggaggtaacaacaatcctnnnnnnnnnnnnnnnnnnnnnnnnnnnnnnnnnnnnnnnnnnnnnnnnnnnnnnnnnnnnnnnnnnnnnnnnnnnnnnnnnnnnnnnnnnnnnnnnnnnnnnnnnnnnnnngcagcaatgtctagattcccgtcgaacatcgacgtgcatctccggccaccggggttgattcagaaccgacccattaatcctccgcctcagcagaatcctacccctaaccctaatttgggannnnnnnnnnnnnnnnnnnnnnnnnnnnnnnnnnnnnnnnnnnnnnnnnnnnnnnnnnnnnnnnnnnnnnnnnnnnnnnnnnnnnnnnnnnnnattgatgaggccattgaatcacatcgagcttcaatgcgcttatcaaggacgcttggcgttgttt

SEQ ID NO: 6982 - DNA, 433 bp, Arabidopsis thaliana
  unsure at all n locations
  Clone ID: LIB24-110-Q1-E1-E1
aacttccgatttcaaaaaaacaatttgaaatttgtcaaaaggaatattctgacgatcgattcttgattcgttttctcgcgtatagagagaaaaatggcgcttaatttatcgcatcagctaggagtactcgccggaactccgatcaaatccggtgaaatgacagattcatcgttgttatcaatttcaccaccatcggcgagaatgatgacacctaaagcaatgaatcgaaactacaaggctcacggaacagatccatcaccgccgatgagtccaattttaggtgcgacacgtgcggatctgtcggtggcgtgtaaagctttcgcggtggagaatggaatcgggaccattgaagaacagagaacgtatagagaangagggattggtggaaagaaaagaaaggaggangangtgttcccgtgtttgtgaagatgcc

SEQ ID NO: 6983 - DNA, 480 bp, Arabidopsis thaliana
  unsure at all n locations
  Clone ID: LIB24-110-Q1-E1-E12
ccggccgganatcccggaacgncccacgcgtccggccactagaagaaggagagatattgagggagaagaatcacattgatagattcgccgccgatctagagccgttgattttcttantcggnaaaagaaaatgagtggaagcagaaggaaggcgacgccggcgagtaggacgcgagtagggaattacgagatgggacgaactctcggagaaggaagcttcgctaaggtgaaatacgccaagaacaccgtcaccggagatcaagccgctatcaaaatcctcgaccgagaaaaggtcttccgtcacaaaatggtcgaacagcttaaaagagaaatatctacaatgaaactgattaaacatccaaatgtggttgaaatcattgaggttatggcgagcaaaacgaagatctatatcgttcttgagcttgtcaatggaggtgaactctttggtaaaatcnccgcaacaaagggaagctttaggng

SEQ ID NO: 6984 - DNA, 478 bp, Arabidopsis thaliana
  unsure at all n locations
  Clone ID: LIB24-110-Q1-E1-E3
cgtagccgtccaaaattcaanggtccacccacccgtccgngaaacttcggttgaaagttgctcttggtgctgcaaagggacttgcttttcttcacagttccgagacaagagtgatataccgagatttcaagacttctaatatccttcttgactcggagtacaacgcaaagctttctgattttgggttggctaaggatgggccaataggtgataaaagtcatgtctctacacgagtcatgggtacacacggatatgcagctcctgaataccttgcaaccggtcatctaacaacaaagagtgatgtctatagcttcggggttgtccttctggagctgttgtctggtcgtcgaagcagtggacaagaacccgcccatctggagagaggaaccttgtggagtgggctaaaccatacctcgtaaacaaaaagaaagatattccgaatcantgataatccgtcctcaaggaccaattactccaa

SEQ ID NO: 6985 - DNA, 427 bp, Arabidopsis thaliana
  unsure at all n locations
  Clone ID: LIB24-110-Q1-E1-E4
acgcgtccggtaaaaaatgtcgttgtgtttgggttatagcttgtatggtaacatcatggatcttcttacaccgatggggacaaagaaacaagagtggtccaaagacttggcctttggttggagcagcgatcgaacagttaactaattttgatcgaatgcatgattggctcgttgagtatctttataactcaagaacagtagtggttccaatgccattcactacttatacatacatagctgatcccatcaacgttgaatatgtcctgaaaacaaacttctccaattaccccaagggagagacttatcattcttatatggaagtattgttgggagatgggattttcaattctgatggagaactttggaggaaacagagaaaaaccgcgagtttcgaatttgcttccaaagaatcctanagattttagta

SEQ ID NO: 6986 - DNA, 428 bp, Arabidopsis thaliana
  unsure at all n locations
  Clone ID: LIB24-110-Q1-E1-E5
aaaagaaagacaaaattttcttgcaattgaaggtgaggtttggtgaaagggaaattgagaaaaccctagaacaagtacggtctctattttgctttaatgggtcgcgaatctgtggctgttgtgactgcgccgccctcggcgactgctccgggtactgcttcggtggcgacctcgcttgctcctggcttccgatttcatccgactgatgaggaactcgtgagctattacttgaagaggaaggttctgggccaacctgtacgcttcgatgcgattggagaggtcgatatatacaagcatgagccctgggatttagcagtgttttcgagattgaagacaagggaccaagaatggtacttctacagtgcattangataagaagtatggnaaacggtgctaaggatgaaccgagcaactaacanaaggtactg

SEQ ID NO: 6987 - DNA, 478 bp, Arabidopsis thaliana
  unsure at all n locations
  Clone ID: LIB24-110-Q1-E1-E8
gccgnccggtaacggtccaaaaattcccgggtcgacccacgcgtccgtctcaatccaacaaagaaaaaaaaagtcttcttctttttttacaagtctgagaattttctacagaaacaaaaatctgattgtttttcccactttgcatctgttttgaggatgccagctacggattttcaaggatcatttggaaggtcgttgctaagtttacggcgagaccaagttgactcatcaacagtcgtctccggaagtagtagccaccacgagccaagcaccatggaggttgagctagattcgtttcaaagacaagtcgctgagaaattcatcgatctcaacgcttcttcaaacgaccttctctctctcgaatggatcggaaagcttcttgattctttcctctgttgtcaagaagagtttcgagctatcgtattcaaccaaccgatctcaagatttctaaatctccgaatgggaccgtttgaattca

SEQ ID NO: 6988 - DNA, 452 bp, Arabidopsis thaliana
  Clone ID: LIB24-110-Q1-E1-E9
acgcgtccgggcacagaggacctgactggagtggcttatatcagaacggagataattacttggcccatcaacgtcttgccgtcatcgatcctgcttccggtgatcaacctcttttcaacgaggacaagaccattgttgtcacggtgaacggagagatttataaccatgaggagctgagaaaacgtctgaagaatcacaagttccgtactggtagtgattgtgaagtcattgctcacttgtacgaggagtatggtgtggattttgttgatatgttggatggaatattctcctttgtgttgctcgacacacgagataactctttcatggtggctcgtgatgcgattggtgtcacttcgctctacattggttggggactagacggatctgtgtggatatcttcagagatgaaaggcctaaacgatgactgtgagcatttcgaaacgtttcctcca

SEQ ID NO: 6989 - DNA, 431 bp, Arabidopsis thaliana
  unsure at all n locations
  Clone ID: LIB24-110-Q1-E1-F10
gggttgtactctctcagttactatctctctgtctcatggcgaatccgacggagaacctcgacgcgaatccacaaatccgagaaccagaagctnnnnnnnnnnnnnnnnnnnnnnnnnnnnnnnnnnnnnnnnnnnnnnnnnnnnnnnnnnnnnnnnnnnnnnntgacaccgagtcgaaatctcaaacgcgcgaaagcggatccagtgtagacagaatcaaggcggaatcgctattccgtcggatgcgagctgctcctgtgccggtgcgtgttcacgacgtgattatcggtggaaacgaagaagactaaggaccatatcattgaagcggaagtggatgctgtgagagaggcgaccacgttgccaattcgaatctccgtgcgttagatatctttgattccgtcaacattacgcttgantctggtccccccgaa

SEQ ID NO: 6990 - DNA, 481 bp, Arabidopsis thaliana
  unsure at all n locations
  Clone ID: LIB24-110-Q1-E1-C5
aaacttctcgccggntcggtnaanggtcatgaattcccgggnnnnnnnnnnnnnnnnnnnnnnnnnnnnnnnnnnnnnnnnnnnnnnnnnnnnnnnnnnnnnnnnnnnnnntctttgtggccctctttatctcggccgtgttagtgagctcagtctccgcggctacaatggagtctccagcaccatcaccaggtgcttcctctgcctccaccgtagcttttccggtggttggctccattgttgctgcatcactctccgccttcttggctcttctcttgcagtagaaagacaagagtcctcaaaatatgagaaggagatatataacaaaactctttttttgttctgattttgttccttagaatctatgatgacaaataacccattttgatgtataatctcattgtgtaagttattacactaatatatatgaagtatatgataataataacactattttatcaagatctaaaanaaaaaaaaa

SEQ ID NO: 6991 - DNA, 414 bp, Arabidopsis thaliana
  unsure at all n locations
  Clone ID: LIB24-108-Q1-E1-E8
tgtgaaagtgcatgatgattttacgacgtacccaagactctgtttctcttcactctcaactcatgctagtctcatccaaacaagccccaagctcatggctcatgcggctctcaacatcacattagcctcggctaaagtaacttcagcaatgatggtgcgtctctcgaataatcggctcaagcctaaagaantctcggccatganagactgcgtcnaggagttaggtgacacgttggaggagcttaggaaatcgattggtgagatgtgtcagctaanttggntcnanctatgaagnttacatnnccgatanagagacttgggtcagtgcggctttgacanatgtgaacacatgtactgacgggatttnaaggagaagatatgggncggggaangttaaggttttgggtanaaggg

SEQ ID NO: 6992 - DNA, 409 bp, Arabidopsis thaliana
  unsure at all n locations
  Clone ID: LIB24-108-Q1-E1-F11
ccanaaattcacgggtccacccacgcgtccggaagagtgaagtttgatttatttagagagataagttaaaaaaaaaaatggtcggtatggatttgttcaaatgtgtaatgatgataatggtgttggttgtctcttgtggtgaagctgtttctggagctaagttcgatgagctttatcggtcaagctgggctatggatcattgtgtcaacgaaggcgaagtcacaaanctcaagcttgacaattacncnggagctgggtttgaatcacagaaccaaatacttgtttggtaaagtctctatccagattaagcttgttgagggtgattcagcaggaacagtcactgctttccacatgtcttcagatggtccgaaccacaacgaattcgattttgagttcttanggaacacta

SEQ ID NO: 6993 - DNA, 398 bp, Arabidopsis thaliana
  unsure at all n locations
  Clone ID: LIB24-108-Q1-E1-F6
aaatgatttttgaccggcatgaggaatatctctacttaaatctggtcaaagagataatctcaaatggaaacttaaaagacgataggacagggactggtacattatctaaatttggttgtcagatgaaattcaatttacgcaggaattttccacttctgacgacaaagagagttttctggagaggtgttgttgaggaacttctatggttcataagcggttcaaccaatgcaaaggtacttcaagaaaagggtatccgtatatgggatgggaatgcgtcgagagcatatcttgatngtattggactgactgannagagangaaggtgaccttggacccgtttatggatttcagtgggagacactttggtgcnaagtacacacgtatgcaggctgantata

SEQ ID NO: 6994 - DNA, 453 bp, Arabidopsis thaliana
  unsure at all n locations
  Clone ID: LIB24-108-Q1-E1-G4
ccgnccagtcaaaaattaacggggtccganccacgcgtccgaaccaatctttaaaacaacttattcgtcttcaagatttctccaacaagtcctaccatgtccggcgaaggagacacgaccctcaaagctatctgttacaagcctggctctctccagttactcgatcagaggaagcttcctttagagactatttacttagagattcgtgatgcttcagatggatggagtgctattcaggaaatggttgtacgtggtgctcctgctatagctattgctgctgctctttctttggctgttgaagttttcanctttcatggttttgatggatnagcttcagatgctgttgcttttcntgagaacaagttggattatttagtgtcaagccgtccaacagcagttaatcttgcagatgctgctttgaaacttaaacatgttatagcaaaggccttggnt

SEQ ID NO: 6995 - DNA, 424 bp, Arabidopsis thaliana
  unsure at all n locations
  Clone ID: LIB24-108-Q1-E1-G7
gagaggagacagaggtggtgctgcacaagaatccttcctcctatatcctacaagactttggaatgggaanagaagttgttgaggtgcttatggaccgaaacgccgacgtttcaagcgctagagttcatgttgctcctaagatagctgcagaggagactgatgaggaatttgaagtcaaagaatgcacagaggagaagtctctttctgagaatgcaccaaatgttggatctgctgagagagttggagctcanaaatcacctaaaacccgtaatggaaatgctaaagtttcanngcagcaggatgctcctcntctcgcggtgaggaagccattgcaacccganaacaagaancatattgangaccangataattgctccattgcttcntccggttgcaacttccatgaggatgggntaagtcctgg

SEQ ID NO: 6996 - DNA, 425 bp, Arabidopsis thaliana
  unsure at all n locations
  Clone ID: LIB24-108-Q1-E1-H1
gggagacagaacactgtgtcaattttcattacctgggaacgaaaagcaaaatcaaagacaataattttttccccgagagagaaaatnnnnnnnnnnnnnnnnnnnnnnnnnnnnnnnnnnnnnnnnnnnnnnnnnnnnnnnnnnnnnnnnnnntctctctaccatcctggtctccttgccccgccacagatagaaccaatcccaagtggaaatctcccccctggttttgatccaagtacttgccgcagtgtgtacgttggaaacatccatattcaggtgacggaacctctgcttcaagaggtttttgctggcactggtcctgtagaaagctgtaaactaattaggaaagaaaagtcttcttaagggtttgtgcactactttgatcgaagatcggctggtcctgcaatccctttctctcaaatggg

SEQ ID NO: 6997 - DNA, 449 bp, Arabidopsis thaliana
  unsure at all n locations
  Clone ID: LIB24-108-Q1-E1-H10
aacgntgccgtagccgtccanaattcaagggnccacccacgcgtccgaaccgatacaagatcgaagctttgccttctgtttcttcgaaaatctaccatggctgctctacaataccttgaatcgcagaaaaatgcgcacccagagcttggtgagtggtacaattcgctcgcagatctgtaccagaagaagctctggcatcagctcactcttaagctcgagcagttcatcgctctctctgtctttcaggctggagatgctttaatacagctttacaacaatttcatcacngactttganacgaggatcaatcttctgaagcttgcgcatttcgctgttgtagtcncccgacagtatcctgaagaaagaagctgcagttagttatcttgaaggagtgattgagaagcttaaagctactaaagagtcaaggataaatgaaccaantagctata

SEQ ID NO: 6998 - DNA, 464 bp, Arabidopsis thaliana
  unsure at all n locations
  Clone ID: LIB24-108-Q1-E1-H11
acgctggccgtgcccgtccaaaattcaagggtcnacccacgcgtccgcaagaaaatgttggagattgggtacaagagaagtgccaaaagatgcaaagagaaatgggaaaacatcaacaagtattttaggaagacaaaagatgttaacaagaagagaccacttgactcaaggacttgtccttattttcaccaactcacagctttatacagccaaccaccaacagggaccaccgccaccaccgccaccacggccacgtcagccagagatctagacacccgacccgaggaaaaccgggttggatcccaagatcctgatatttctgtacccatgcatgtagatggagatggtgctggcgataaaagcaatgttcagttttcaggtttcgatcttgagttctaanaantcccntcnatatatntattagcagttatantcctcnttttctgctttttgctaaaanctca

SEQ ID NO: 6999 - DNA, 485 bp, Arabidopsis thaliana
  unsure at all n locations
  Clone ID: LIB24-108-Q1-E1-H4
cgcttccgccgccaggtaaaggtcaagagncccaggcacgcgtccgtgaatcaaatctcctagctcttctacgcaaaatcgagtgcatcgacaatggcggaacgtggtgtcgaacgtggtggagatcgcggcgatttcggacgtggattcggtggtcncggcggtggaagaggtggtccgagaggtcgtggtcgccgtgcaggtcgtgctccagaggaggagaaatgggtgccagtgactaagcttggtcgtctcgtaaaggaangtaagatcacaaagattgagcagatctacctccattctctcccagtcaaggagtaccagatcatagatttactcgtcggtccttcattgaaagacnaagtgatgaaaatcatgccggttcaaaaacaaaccagagccggtcagagaacgagattcaaaggncttcatcngtccgtccgganatagtaacgggtcacgttnggattaaggagtcaaaatgc

SEQ ID NO: 7000 - DNA, 437 bp, Arabidopsis thaliana
  unsure at all n locations
  Clone ID: LIB24-108-Q1-E1-H7
acgcgtccgcccacgcgtccgcgaaaatctctgaaagtctttttgtttgaagaagatgacgcatgttgaagatgataaggaattcaaggagaaacctttggttcaggttcggagcgacgacgacagtgaagtgaaggaagccaaagacggaggaggtgaagaagttaccggcggcnnnnnnnnnnnnnnnnnnnnnnnnnnnnnnnnnnnnnnnnnnnnnnnnnnnnnnnnnnnnnnnnnnnnnnnnnnnnnnnnnnnnnnnnnnnnnnnnnnnnnnnnnnnnnnnnnnnnnnnnnnnnnnnnnnggacagagtacctagtgaggccggttggtgaggttgaagatgaggatgatgcaagtgattttgaccctgaggagaatggcttggatgaaagaagaagtgatgaagagattgaaagaagatgatgttgatgag

SEQ ID NO: 7001 - DNA, 425 bp, Arabidopsis thaliana
  unsure at all n locations
  Clone ID: LIB24-108-Q1-E1-H8
gagttttcgaaaccagcgagattaatggcatcttccaccggtcncaccgtcgccggagctctgcttgccggagattttcgattaccagctgtatcgtctctaatacccagaaagacttcttcttcattgtcatgccttagcaacagagatttatcgtctccttataattgctgttggcgactatccagaggcaaaattttgacttctctcagtaactcacggaaatttgctgtgggaaaggaagcagaagatgggtttctatcgaatgtgagcgaagatactgatgagatgttcgacgacttgttcaacanatatgggaaggttgtttttanaagcactgatgttaagtctccaacagctgaggttgacgatgatgcagagagtttagcatttgctgttgaaattggctaaaanttgcgagtgat

SEQ ID NO: 7002 - DNA, 518 bp, Arabidopsis thaliana
  unsure at all n locations
  Clone ID: LIB24-109-Q1-E1-A8
gtttctccggcggnctagggtcaaanattcccgggtcgacccacgcgtccgnngacgcgtgggcggacgcgtgggtgagagtattgagcaagattctgattcaatttctgcaatatcatcgatggcgttatccaaagatttgatgttgaaatgctcggaagacatgatgagtgcttacaaatctgcttgtgaagaacacccaaaactaaaatcctttgatgcttcccttcagcagcgaaccaacaaaatgatagactcactcaccgttgaagacaagaatggttcgtcctccccacacgacgcacacatggagctctccaagcacctagttgaagttacccaangtgtggcaagacttcattaccgaaatccaanacgatgtgtggggacaaccaagctctaaagtattggtcctgggctattttgaaaatactaaaaagactttagagattttcaaaactatagagaaactgcgtccnagaacgcagaaaatggggccaaacttttcattccangaa

SEQ ID NO: 7003 - DNA, 480 bp, Arabidopsis thaliana
  unsure at all n locations
  Clone ID: LIB24-109-Q1-E1-B10
ncctggcactaaaggtccganattcccgggtngacccacgcgtccgtctntctctcccttttcgacttgagagtttgggtcctttgggagaaagaagaagaannnnnnnnnnnnnnnnnnnnnnnnnnnnnnnnnnnnnnnnnnnnnnnnnnnnnnnnnnnnnnnnnnnnnnnnnnnnnnnnnnnnnnnnnnnnnnnnnnnnnnnnnnnnnnnnnnnnnnnnnnnnnnnnnnnnnnnnnnnnnnnnnnnnnnnnnnnnnnnnnnnnnnnnnnnnnnnnnnnnnnnnnnnnnnnnnnnnnnnnnnnnnnnnnnnnnnnnnnnnnnnnnnnnnnnnnnnnnnnnnnnnnnnnnnnnnnnnnnnnnnnnnnnnnnnnnnnnnnnnnnnnnnnnnnnnnnnnnnnnnnnnnnnnnnnnnnnnnnnnnnccatttgaataaatgccattttgacagatcaaatatctcccacttttctctctctc

SEQ ID NO: 7004 - DNA, 430 bp, Arabidopsis thaliana
  unsure at all n locations
  Clone ID: LIB24-109-Q1-E1-B12
atatttcagtatttnannnnnnnnnnnnnnnnnnnnnnnnnnnnnnnnnnnnnnnnnnnnnnnnnnnnnnnnnnnnnnnnnnnnnnnnnnnnnnnnnnnnnnnnnnnnnnnnnnnnnnnnnnnnnnnnnnnnnnnnnnnnnnnnnnnnnnnnnnnnnnnnnnnnnnnnnnnnnnnnnnnnnnnnnnnnnnnnnnnnnnnnnnnnnnnnnnnnnnnnnnnnnnnnnnnnnnnnnnnnnnnnnnnnnnnnnnnnnnnnnnnnnnnnnnnnnnnnnnnnnnnnnnnnnnnnnnnnnnnnnnnnnnnnnnnnnnnnnnnnnnnnnnatggccttgaaatcggtcanncagttgttattgccgctgctatcctgatacacaacgttatgcanatcggagcatctgttgattccgagtatcaccaagctcatgcct

SEQ ID NO: 7005 - DNA, 425 bp, Arabidopsis thaliana
  unsure at all n locations
  Clone ID: LIB24-108-Q1-E1-E3
gtgagagccttttctttcggagttttcaacgcaattcttcagagaagcagaagagatgttgtacattatagggttaggtttaggagatgaaaaagatataaccttgagaggactcgaggctgttaagaaatcacagaaagtatacatggaagcttacacttctcttttgtcctttggtctctctgctgatggactttccaatcttgaaaagttctatgggaaaccaattatacttgctgatagaggaaatggtggaagaaaangcnggtgatatnantgatgaagccattgataatgatgtcgcctttctcgntgttggtgatcctttcgggagctanaacgcatangtgatcttgttgttcgangccaangacactccgggtgtaaaaagttngaggtanttgcacaaattgcatcnggtgaat

SEQ ID NO: 7006 - DNA, 471 bp, Arabidopsis thaliana
  unsure at all n locations
  Clone ID: LIB24-107-Q1-E1-G3
ccttccaggccggtcnagaattaacgggtcgagccacgcgtccgcccacacgtccgcttacatacatacacgtcttccacaagactcaaactccacagcatgggattctcacggtcgctcaaccgcaccgtgggcgtcttcgtcttcttcatcctcgacattgttgatttccngctttgctttacctacaagactcttgatttcttcttcgagtccgagtggnaaccctgctactgctgtccgccgcccgaggccaanccaatctcggctgganggaacacaggcggtaagatgatagtgtctgcaangatcaggagactactctaaggtggtctcactcacaaggacaaagatctanctggatnagatctccganaaacttnacnctcgcccttcactccncaccaagctcactaaagctgggngaaattgcttcaaggaanngatgttgttaaattgctgtnatgaggt

SEQ ID NO: 7007 - DNA, 419 bp, Arabidopsis thaliana
  unsure at all n locations
  Clone ID: LIB24-107-Q1-E1-G7
gttagaatcaaagaaaccgcttcaaggatggtgagtgaaggagcaacaagaaaagaacttaacctctgtttcgagaatatgaagatggaaggagttttgatctctgagtggaaagatatccctgtggagcttctcatgaagattttaaaccttgttgatgatcggactgtgatcattgcttcttgtatttgtagtggctggagagatgctgtttcccttggcctcactcgcctctccctctcttggtgcaagaagaatatgaacagtttggttctatctcttgctcccaaattcgtaaagcttcagactttagtactgcgacaggacaaaccgcagcttgaggacaacgcggtggaagccatagcanatcactgtcatgagctacaanattttggacttaagcaaaagctcgaaaaatc

SEQ ID NO: 7008 - DNA, 391 bp, Arabidopsis thaliana
  unsure at all n locations
  Clone ID: LIB24-107-Q1-E1-H12
atgtacacagccacttggccaaaagaagtaagaaaaattgcaagcgatcttcttgtgaaccctgtccaagttaacataggcagggtagatgagttggctgctaacaaagcaataacgcagtatgttgaagtagtcccacaaatggagaaagagagacgtttggagcaaatccttaggtcacaagaacgaggttcaaaagttataatattttgctccacgaagaggctttgtgaccatcttgcacgtagtgtcggacgtcattttggcgctgttgtgatccatggagacaagactcaaggtgagangagattgggtgcttaaccaagttccgaagcgggaagtcttgtgtactgatagctactgacgttgctgcccggggactccacataaa

SEQ ID NO: 7009 - DNA, 467 bp, Arabidopsis thaliana
  unsure at all n locations
  Clone ID: LIB24-107-Q1-E1-H2
ccggtgccggtcaaagaattcacgggtcgacccacgcgtccncgttgatgtgactaaagatgagaaacagatgatgcacatgtggaactcgtttgtgaggaagcagcgagtattagcagatggtcacattccatgggcatgcgaggcattctcaagattgcacggacccatcatggttcgaacaccgcacttgatttggtgctggagagtgtttatggtgaaactgtggaaccacggtcttcttgatgcccgaaccatgaacaactgtaatacctttctcgaacagctccaaatttgaaaacccaagaaatcattaatttaagtagaaaaacaaagaaagacaagagaagaagagttttgggttctcatttaactacttttggtgttttaagagaaagaggagcatatttatgcatgaatttgtcctcatcttttttttttttttttttaagtataaatggtgnaca

SEQ ID NO: 7010 - DNA, 419 bp, Arabidopsis thaliana
  Clone ID: LIB24-107-Q1-E1-H3
aactactcaagtccctcccttttccggcgtcgctattctcagtctcattctgtctcccccatggaagctcggattttgcagtcttcttcttcctgttattcgtctctttacgctgtcaatcgatcccggttctcttctgtgtcatctccgaaacctttctccgtcagctttgctcagacgacgagaacaaggactcgtgtattatccatgtcgaagaaagatggtcgcactgataaagatgatgacactgatagtctcaattacaaagattctggtgttgatatcgatgctggtgctgagcttgttaaacgaatcgcaaagatggctcctggaattggtggatttggtggtctctttccattaggtgatagttatcttgtagctggtacggatggtgtagggactaaattgaaattggc

SEQ ID NO: 7011 - DNA, 449 bp, Arabidopsis thaliana
  unsure at all n locations
  Clone ID: LIB24-107-Q1-E1-H5
ttcccgggncgacccacgcgtccncccacgcgtccgttctcatttctctctagtctatatcgctctcagaatacaattggaaaaaagaacaagggaagagaacacaaaaagaaatggttagagaagaggagaaatcgagatggtggtggttcgagagccacaagagctccaaacattctcaatggcttcaatcaacactcgctgagattgatgcaaagacaaaggcaatgttgaagttgttagacggaaacgcanactctttcgctcagcgtgctgagacttactacaagaaacgtcctgagcttatcagctttgtcgaanacttttatcgagctcaccgttccttatgccgtgaacttcgaccacctcaagtcttccgaccactatggatctcgctccgctaaggttccncaacaantccatggagtccgtttgtgacagcaantctc

SEQ ID NO: 7012 - DNA, 445 bp, Arabidopsis thaliana
  unsure at all n locations
  Clone ID: LIB24-108-Q1-E1-A5
acgcgtccgttttaatgccgccggccactcttgcgacgagctttatagctcctgtacttcctttcgaatcttcaacaccacttctccctatggtaacaacagtacggttcatacgacgccgtattgctgtttcactaactacgatacggtgcgggtgatgagtatgaacattttggattgctcacattacacgacggtgattgacaatggaaaaatgagaggagtggggcctttggattggtcctatggaatcgagctttcgtactcggtaacggagattggctgtgaccgttgccgaaagtcaggtggcacttgtggctttgacgccgaagacggagatctttctttgccagtgttccggttccaacaacaaccctacgagagaatgtggtggangtatgactgatcnaggangctgcagttttacaaacattaaatttaanaa

SEQ ID NO: 7013 - DNA, 440 bp, Arabidopsis thaliana
  unsure at all n locations
  Clone ID: LIB24-108-Q1-E1-C12
tttacgcctgcccgtaccggtccaaaaattcacgggtccacccacgcgtccgcacacgcgtccgccggaagcgaaaccatccgctcagctcggtctctgatatccgctcgacacgcaggagaaagactcctgagaagctggggtgggggaacgggctgggcagtggaagacgctaaagacaagatctggaaacttctagaagaatacgaagtangaggagtaatatcanaggcttgtcgatgcatacgcnatctaggaatgccgttttttaaccacgaggtggttaanaangctttggtaatgggaatgggnaagaagaacgatcggatgcttaatctcttgcaggantgttttgctgaagggatcattactactanccnaatgacaaaanggtttgngtcgagtcaaagatantcntnatgacttatccttggntaatc

SEQ ID NO: 7014 - DNA, 398 bp, Arabidopsis thaliana
  unsure at all n locations
  Clone ID: LIB24-108-Q1-E1-C4
acgcgtccgtcttctcttccggcgatattcccaaggcttgggagcaataacaataacaacgctatgttattaagcaacaacatcatttccattgaatcgatatctccgacgagaagctttcanattccgatgagtaaaatgagctgttgctctcggtgtttgcangagttatgaaaacgacgtanctaaggtggaaaaagatttaaccggagataaccggtcggttttgccacagtggntgcanaacgctaaagctaatgatgatggtgacaagaaactgacgaaagatcaacanattgtggagttgcagaanaaatggaacgacttatgtttgcgtttacatccgaatcagtctgtgtctgaaagaatanctccttctacgctgtctatgatgaaan

SEQ ID NO: 7015 - DNA, 401 bp, Arabidopsis thaliana
  unsure at all n locations
  Clone ID: LIB24-108-Q1-E1-D10
gtgaaccactacacacactaacacaatgagagagatccttcacattcaaggtggtcaatgcggtaaccagattggttccaagttctgggaagtcatctgcgacgagcacggcatcgattccaccggacgttacagtggagacactgcagatctccagcttgaacgtatcaatgtctattacaatgaagcttcaggtggaagatacgttcctcgtgctgttcttatggatcttgagcctggtactatggatagtatcagatccggaccgtttggtcagatcttccgtcctgataactttgtctttggtcagtctggtgctggtaataattgggctaaaggtcattacactgaaggtgctgaacttattgatgctgttcttgatgttgttcgnaaagaagctg

SEQ ID NO: 7016 - DNA, 440 bp, Arabidopsis thaliana
  unsure at all n locations
  Clone ID: LIB24-108-Q1-E1-D11
cgtagcccgtccaaaaattcaagggtccacccacgcgtccgaaaagatgtaactgagccaacggtanatagttttcttcgagaccttgaagaacctgaagacgaaccagaaacatcggaagagatcagcaaacaaagcatatnagagagttctgattttgatgaaacaagctgtggagagcgggactgcacttgtgttagatgctgctgatctggacgcagacacagtcttttcaaaaagctgttgccttttcgagtgtagcttcancaggaccaagttttccagcatggcttgagaaaacaaccaacggttaagaagcaggaaanccaagaattcgggtacggagacttggaggcaaaatcaaagtaatgtagtggtttcnaggaatgcntccnantcangtaatgttgtggttttggggaaaaagacaanttggcaga

SEQ ID NO: 7017 - DNA, 391 bp, Arabidopsis thaliana
  unsure at all n locations
  Clone ID: LIB24-108-Q1-E1-D12
acgtaatctgtatcctcctgaaccagagagtaatgaaggcaatggagaaccacgtcttgctcatactcctcagagtcggttgcctcggacaaaggatatgattgtaaatggaattactgtcaagatcaaatactgtgacacatgcatgctttacanaccgccccgtgcttctcattgttcgatttgcaacaactgcgtcnagaagtttgatcaccactgtccttggcttggtcagtgcattggattgagaaactataggttctacttcatgtttgtgttgtgctcaactcttctctgcatttatgtccatgtgttctgctggatntacgtcaagcggataatggatagtgnagaacataaacatcntggaaatcgtttctcnaagactcct

SEQ ID NO: 7018 - DNA, 434 bp, Arabidopsis thaliana
  unsure at all n locations
  Clone ID: LIB24-108-Q1-E1-E11
cgcctgcccgtancggtccaaaaattcacgggtcnacccacgcgtccgaaaacataagagagtctaaacactgtggtagaaaaaaatatagacttttagatatgtgtagtaaaataacattagtgttaactttattttccagttatttcatatcaacagatgctgtgaatggatcatttcctgcgcttttggcttttggagattcaattctcgatactggcaacaacaattttctcctgacttttatgaaaggaaatatctggccatatggaaggagtttcagcatgagaagggngacaggaagatttggaaatggaagagttttctctganatangttgctgaaggtttagggatcaanaagattttaccaagcttatcgtaagttgttcaantcgccaagtgancntagaaactgggtgtttgcntcgcatc

SEQ ID NO: 7019 - DNA, 464 bp, Arabidopsis thaliana
  unsure at all n locations
  Clone ID: LIB24-108-Q1-E1-E12
tagcctgccgtanccggtccaaaaattcacgggtcnacccacgcgtccgcnctatggtctaatgcggggattgccctccctgcgttggacccgtttacccgacccgggtcgatactcacgccgccacccggaaactctcctctgacaattaatttattatgggttgcttcaactccaagcattcttctccggcgggtcctccacgccctgtccgccgtcgcttggacaccaacgtccaccgaagtcatacccaagatccccataaccgccatgttcttcccggtccaccatctcaccgccgtgtcgtcaactcatctccgaaaaaacatcgcaacaatgacgacgatgctccaaaatcgaggacgactggtgttagcctaagatcgggattgccgcacagcaatgtanaggctgagcangtggcggctggttggcctcctggctcagctctgccggctcccgna

SEQ ID NO: 7020 - DNA, 409 bp, Arabidopsis thaliana
  unsure at all n locations
  Clone ID: LIB24-107-Q1-E1-G11
acgcgtccggaacttgttagaggctatctagatttcatgccacatgcctggaatattgtccctgtgaagcaaggttcctcgtgggttcgtatggtagttgatgcttgtcgtcctcatgatatcagagaagatacagatcaagaatatttctgcaggtacattccccttaatcggctaaatgaatccattcgcattaaggaaaagttggaaccaggatgttctgtttcttctctgtcaacgggaaaaggagttgaaagagctaatagtagtcttatccgatgcaagctaggctcaactgaagcagttgtgaangatgcgcacattagaggtttctggagcttccttaagatgacattaggacttttgagtatacatgcttaggacaantacgggattttaggagccttga

SEQ ID NO: 7021 - DNA, 424 bp, Arabidopsis thaliana
  unsure at all n locations
  Clone ID: LIB24-107-Q1-E1-B12
acgcntccgcccacgcgtccggtcgtgtttcttcttctctttgataacaatggcttctgcttgtcgtaagctttttaacagagcttccgtctcttccctcaaatctancctcagatcaaccaccggatctacgtcggctgcgtcatcagccggatttcgtcttccttctcaacccactcgccatttcnccttctccagatgtccttcggaggctgggatgtgttcagtcgctgttaccgntgcacagcacggtggcggnggcgaggctgacgtcatgtctaagnacaanttcaaggagtaggcgaggctctctctcaagggtanactctgctgcacntctcncgatntctaaggcngtttctcnnnacgtttcttgngaggttcacatttttgcttncnnccaagttggcatttaactctccct

SEQ ID NO: 7022 - DNA, 423 bp, Arabidopsis thaliana
  unsure at all n locations
  Clone ID: LIB24-107-Q1-E1-B4
aaatcttagccgtccgatcaaccaccgtgtactccgagaagatctcttcgattacttcaacgttcttctgattttcaccagctcagatctccgacaacattcnggtatcatttctcgcttttttttcctccaaatccttatccgccagattacgaaaatgaggagcttgatccgagagaggcatagtgaaagcttatctgtgaattcttaggatttgaatctgaatactcaggctttttgattccttctccgttacatgcngattcaattttgagctcccctgctantgtaaatctcctcagctcggaaacttagggttnagtttggggtcctttgctcttcgttgcggtaagccatgtttaagaaaatcatgaaangtgggcatcngaaagccctctaaatcccgaagctaaggaaccngtc

SEQ ID NO: 7023 - DNA, 409 bp, Arabidopsis thaliana
  unsure at all n locations
  Clone ID: LIB24-107-Q1-E1-B8
acgcgtccggatttttctcttcctttgataaatcccaatacctaattcccaaattcccttacttttaggcgccgaaagatagagagaaacatagatacgcattggtttttttcttttttgaagattctcgcttcttactacatgtgtatcaatcgatctctanccagattctccggaggagctttgagtcntgtcgtatacatgcagtgaaggtcctttgttagatgggaaaacttgttcttgagttgtcanaaggtattttctatgtttttggagtaganctgtttanaaggaagcagncaatatggagtttgantttggangaaatgtttttagtgttgttgtgaananatatcagttttgantgtttttggatgtgnntggggtnaagagaaancagttggggact

SEQ ID NO: 7024 - DNA, 412 bp, Arabidopsis thaliana
  unsure at all n locations
  Clone ID: LIB24-107-Q1-E1-C6
acgcgtccnggagactgctacacagcgaagcaaatccagaagcaattcacactcttctctgaatcattcgatgacttctacagataatgaggttcaaaagtatcaggatttcagtagggaatttaaagatgtgtatgaaacatggcagtcacctcanaaggtgagtcgctcaagggattgctcgcctagaaaaggaagatatgatgaaagtacgactgagaaacaaatggctcttgttcgtcaaaagttctcanaagcaaaacgccttgtaacagatgatagtcttcaccaatccaangagttccaagatgcacttgangtgttaagctcgaacaaggatttgtttgttcaatttcnccaggaatcaanttctttctctcagcagaatctttctgactttcaccatgntcct

SEQ ID NO: 7025 - DNA, 421 bp, Arabidopsis thaliana
  unsure at all n locations
  Clone ID: LIB24-107-Q1-E1-C7
tgtgttcaaaacaagttcattcgatctatagagacgaaacaaaaagagagatcgtacgcaaaagtttccgatatggctcgctcgtttgngagctaacagtaccgttgtgttggcgatcatcttcttcggatgtttatttgcgttgtcctctgcaatacaagaggctacgaagttaggatcantgatagggatagatcttggnactacttactcttgtgttggtgtttacaagaatggtcatgtcgaaattattgccaatgaccaaggaaaccgtantacaccttcatgggttggttttactgantctganagactcattggtgaggctgctaagaatcangcanctgtnaatccagagaggactgtcttcgacgttnaggagattngatcgggccnaganatttgaggataacgacgntca

SEQ ID NO: 7026 - DNA, 407 bp, Arabidopsis thaliana
  unsure at all n locations
  Clone ID: LIB24-107-Q1-E1-C8
aaacctcgccgccgtagccgtcaacgcatctttcatttcgggaatggcgaacaagattgcaatgtttctctcggaagcaatgaacaacaatgctgtgataaacacgtgtctaggagtatcgtttgtggttttgggattgagatctgataaacagcagaagtatgttgaggccttagcagagcagaaggagtcactcttcaagtctaataaggcaatgaaactcaccatgtgggagtggaaacagcagctctttgctgaagctgcctctgcgggtaatgccgcggttgttcctttgtcgacgcttaaggccatctatggtgaagttaccaccacaaccaatcaatctggtgacacagccaaggaagattctaaagtgtccactcccaagatcatgatatgagangttg

SEQ ID NO: 7027 - DNA, 396 bp, Arabidopsis thaliana
  unsure at all n locations
  Clone ID: LIB24-107-Q1-E1-C9
agatcatagagctgtggcatgtctgccatgtctccataatccacaggacacaattctacctactgttcaaaggtgaccaagccgatcaaatctacatggaagtcgagctaagacggttaacttggttagaacaacatctagcagaagtaggaaacgcaactccagctcgaaactgcgatgaatctgtggtttctctatcatcaagtataaaagcattgagaagagagcgagagtttttggcgaaaagggttaactcgagattgacgcctgaggagagagaggagctgtatatgaaatgggatgtgccattggaagggaaacagangaaacttcaagttcgtgaacaagctacgggactgatccttatgattcaangcacgtgcncgatagtggcag

SEQ ID NO: 7028 - DNA, 422 bp, Arabidopsis thaliana
  unsure at all n locations
  Clone ID: LIB24-107-Q1-E1-D7
ttctgttccacttccaggtctcaatcatcgcagagattgatctttacaagtttgatccttgggagcttccaantatttatanttcctaatttatgctttaatgatatgattaaaatgtacgatttaattttactatgaccactgtaatctagccactatttaaatttggnatatatagtaactatcttgtggataataatattttgantggtttaggcanggcgagttttggagagcacgagtggtacttcnttantcctcgggatcggaagtatccaaatggggttaggccaaaccgggcancaacttccggttattggaaaagcaangggaaccgataaaccgatatttacgtgcaatagtcacaangttggtgtcaagaaaagcgcttgtnttttaanggtggaaagcctccgnaaagg

SEQ ID NO: 7029 - DNA, 381 bp, Arabidopsis thaliana
  unsure at all n locations
  Clone ID: LIB24-107-Q1-E1-D9
ggtacccggagatcgtgttctaggctcttatgcatttgagataacaaaacaacctattgcagtgcacttgcgctccacctctgagaaacctgaaaggacattgttgctatctatctgtgctgaaggagctacaaaggttttcagtgttgtanattcaggttatcacgccataaaagatataaaggaaacatttgactccagattccagtgagaagggaaananaaagcttcaaactgacantatcatccgttanacanaaacgttcttgcttgtcgtgccangcattgntananctttggtnaattctcanncanaggaattggtttatgcttgtgcatcaaatgttgtgttacatttcagtcagagtgtagattaccaga

SEQ ID NO: 7030 - DNA, 472 bp, Arabidopsis thaliana
  unsure at all n locations
  Clone ID: LIB24-107-Q1-E1-E4
acctgccaggcccggtctaagaataccgggccnacccacgcgtccgatcaaacctcgccgccgtagccgtcaacgcatctttcatttcgggaatggcgaacaagattgcaatgtttctctcggaagcaatgaacaacaatgctgtgataaacacgtgtctaggagtatcgtttgtggttttgggattgagatctgataaacagcagaagtatgttgaggccttagcagagcagaaggagtcactcttcaagtctaataaggcaatgaaactcaccatgtgggagtggaaacagcagctctttgctgaagctgcctctgcgggtaatgccgcggttgttcctttgtcgacncttaaggccatctatggtgaagttaccaccacaaccaatcaatctggtgacacagccaaggaagattctaaagtgtccactcccaagatcatgatatgaagaggttgttaaattttttggta

SEQ ID NO: 7031 - DNA, 418 bp, Arabidopsis thaliana
  unsure at all n locations
  Clone ID: LIB24-107-Q1-E1-E8
gagttaagctataagagagtagaaagttggtgttaattaaagttttggttcggatattgatggtttttgtcaaaatgactgatgtttacttgatgattgtgatgttgatgggtttggggtttagtatagagttatcaaatgggcacaagttctatgttggtgggagagatggttgggtccttactccttccgaggattattctcattggtctcaccgaaaccggtttcaagtcaacgacactctttattttaagtacntgaanggaaaagattcagtgttggaggtgagtgaaaaanagtacaacacatgcaacacgactcaccctttgacttccctctcagacggtgactctctcttcctacntaagccgctcagnnccattcttcntcgtcagcngcaaccccnggcttctgtccc

SEQ ID NO: 7032 - DNA, 427 bp, Arabidopsis thaliana
  unsure at all n locations
  Clone ID: LIB24-107-Q1-E1-F1
gattccgatgatgaggggtctcgtttccggcgccaagatgctatcatcaaccccatcgtcgatggcgacaagcatcgccactggtagaagaagctacagtctgattccgatggttattgagcactcatcgcgaggagagagagcttacgacatcttctctcgtttgctcaaggagcgtattatctgcatcaacggtcccattaatgacnacacatctcacgtcgtcgtcgctcagcttctttacctcgagtctgagaatccttcgaagccngatccatatgtanctcaattcccctggcggccatgtcancgccggtcttgcaatttatgatactatgcagtacattcnttcncctattagcacaatttgtttggggtcaaggctgcatcaatgggcttcncttctgtttggcagcgggtgccaaag

SEQ ID NO: 7033 - DNA, 408 bp, Arabidopsis thaliana
  unsure at all n locations
  Clone ID: LIB24-107-Q1-E1-F12
cagtaagggaaagactgatgcatcacctcctaagaaaaccggcaacacagaaacgcgaaaacgaaaaagaaaacaggtagaggttcactccttatcatctggaagcgagtcagccggtgacattgaaggtgaagaggatgttcagagtacatggaaagaggacggaaatgcgccaagctcgggtacatttgatgaatgtgatgattatggaggtgctctaaaaatcactcaggaaggtgatgtgatgcaagaagaaagtgactttgatcactgttcttcanattgtacananatganagaatcaatgatgagagagatanagaaccttgaactgaagcttcaattgtatggaggacatgggtctgaataatttaacctacgacgagcttcttcanttttggaggcatc

SEQ ID NO: 7034 - DNA, 419 bp, Arabidopsis thaliana
  unsure at all n locations
  Clone ID: LIB24-107-Q1-E1-F7
acgcgtccggcctggaaaaaagaaagataacgggactcgagagattgagattacggagccacccactttcatggagtctacactctcagctttctcaaccgtcaaggcaacagcgatggctcgaagtagtggtggtccttcattacctctcctcactatttctaaagcacttaaccgccactttaccggcgccagacacctccatcctttattgctcgctcgctgttctccctccgtgcgacgtcttggtgggtttcatggcagtcgatttacttcgtcgaattcagctttgagaagcttgggagctgctgttttgccggtaatccgacaccgtttagagtgtttgtcgagctcatcgccgtctttcaggagtatctcanggtggcggcggttctgggatttgggggggtataatggtn

SEQ ID NO: 7035 - DNA, 421 bp, Arabidopsis thaliana
  unsure at all n locations
  Clone ID: LIB24-107-Q1-E1-G1
acgcgtccggagtatcttagcccgcgtctcgagattgtcttatcgatctctctccttagtctgcaagcgcttccactcgctccttacttcaggagagatttaccggttccggtcactatcaggttataccgagaattgtctctatgtgtgcttacgtttctctcatactggccgtagccatcgctggttcatgcttcgtgagaagaacaagtcaagtgggtatgttttggcaccaatcccaatttcccattctccttctttgcacgcgtcgagtatcgtggcggttggttctaaaatctacaaaattggcggagtcatggatggatctagtgtttcaatcctagactgctggtctcacaggtggctcgaagctccaagcatgcanatggaacgggaccgcccatcagccaatttaattgaa

SEQ ID NO: 7036 - DNA, 437 bp, Arabidopsis thaliana
  unsure at all n locations
  Clone ID: LIB24-107-Q1-E1-A7
acgcgtccnctttcagagtttggaattcataccataagcaaagatgtgaagagaacagaggatataatgcatgagaccttcccaaatgtttgggatgaattaatcaagaagcttcagtgtctcacactatgtgttaaaccangcaaaggatggatgttccactggcgttgcaagattatgttcctctgaagaccttgctgtatatgtacaagctttgaaagattgtataccaagaattcctccaaacactctttctaagacacatggnatgattgagatgccaaatcctactccagaattcttgatttttgaagcatttgtcgaaaccgatgaaatcatagtttcatccaaagccaagcagcaggctctcttggaaangtacgacgcggtgggtagaagatgactgtgggtgtaagtgggaaagcgtggggtcaaat

SEQ ID NO: 7037 - DNA, 415 bp, Arabidopsis thaliana
  unsure at all n locations
  Clone ID: LIB24-104-Q1-E2-E5
cgagattagattacatcttagggatgaagctggcgagtacctagaagaaagtaaacttaaggaattggtgaagagatattctgaattcattaacttccctatctccctctgggctancaaagaggttgaaaccgaggtcccanttgaggaagatgaatcagctgatgaggaaactganaccacctctaccgaggaagaaaaggaagaagatgctgangaggaagatggtgagaanaagcagaagaccaagaangtgaaagaaacantttatgaatgggaagttctgaatgatgttaaggctatanggctganaagtccaaaggaggtgacagaggaagagtacactagattctancantctctctcaaaggattttaccnacgagaanccaatgggcttggagtcactttantgc

SEQ ID NO: 7038 - DNA, 393 bp, Arabidopsis thaliana
  unsure at all n locations
  Clone ID: LIB24-104-Q1-E2-E6
tcctttctcaattctctccttcgaagcttttttcttgtgaggtcagaaaagaaaatgggaagtcaacaagtagcgatttcgtttctgacgaacttggcgaaggcggcgtttgggttaggtgtggcggcgacggcactaaactcgtcgctctacactgttgatggtggcgagagagctgttttgttcgatcgattcaggggagtgttggatcagaccgtcggcnaagggactcatttcttgatcccgtatctccagangccgcacatatacgatattcgtacgaaacctcacacnttctcctccaagatctggtacnaaggatcttcagatggctaatcncacccttcgtgttcnctttccgccctgaggtttcgcgtctcccgtncattttcc

SEQ ID NO: 7039 - DNA, 417 bp, Arabidopsis thaliana
  unsure at all n locations
  Clone ID: LIB24-104-Q1-E2-E7
ttctcatctcttacaagactgtttttgtgttcaattttgagtagatatggaagtggttgctgttgggtcaatgaatacgcagagacaggagacatgggcttgctctgtcactgagtcttttctcctcctcgtcggaaagaatctggcttgtcttctccttgtggcagaatcattactgataggtttggttgctgttgaccanaggttgtctgtcaaggagggttacaaaagaggaatccgtattgaggaaaacaaagatgctaagtgacagtgacgatgacgacgatgatgaagacgctgatgaggacgacgatgatgaggatgatgctaatgatgaaagatttctcaggggggtgaangggatgaaggagaagaaggaagctggatccaaaggatgatcctgtgaccantggtgga

SEQ ID NO: 7040 - DNA, 372 bp, Arabidopsis thaliana
  unsure at all n locations
  Clone ID: LIB24-104-Q1-E2-E9
taacttacccaaacaagaaacccaagaatccaaaatggaaatgctcaacgcaataattctcatcctatttccaatcatagggtttgtattaatcttctcattcccaacaaaaaccctaaaagccaaaaccgcatcaccctctaatccgacatcgtaccaactcatcggctctattctctccttcaacaaaaaccgccaccgtcttctccaatggtacacagatctcctccgtctctctccgtctcaaaccatcaccgtcgatctcctcttcggtcgtcggactatcatcactgcaaaccctgaaaacgttgagcacattctcaaaacaaatttttataacntccctaaaggnaaanctttcaagcgacctct

SEQ ID NO: 7041 - DNA, 415 bp, Arabidopsis thaliana
  unsure at all n locations
  Clone ID: LIB24-104-Q1-E2-F10
tttgttcatggaaaagatgggcttggcaaccaaaacttccctccacctaaaggaaaaccaattgaaaagtctggacctgagtttttagttgaacaagcaaagctttgccctggtgaaatcacggttgttgctttgggaccactaacaaatctcgcgttggctgttcagcttgatccagagttttcgaaaaatgtcggacaaattgttcttcttggtggagcatttgcagtaaacggaaatgtaaatccagcttcggaagctaatatttttggcgatcccgaagctgcagatattgtgttcacatgtggggccgatataattgctgtgggaatcaatgtgacccatcaagttattatgacagctgatgacaagggacaaaactagcatcatcnaanggggaaaataagctcaatta

SEQ ID NO: 7042 - DNA, 378 bp, Arabidopsis thaliana
  Clone ID: LIB24-104-Q1-E2-F5
tatatggtgaagactctacaaccattccaccgtttgtgataccagagccgccacctcctgctcccagagatccaagacacagtctgcgtaagaaaaggaaacgtaaattgcattcatcgagtcaaaagactacagacattggtagtagcagccacaatgctgtagaaagcagctctcaaggcaatccacaaacatctgcaactcctcctttgcctccaccgtctctggcgggtgaaacttcagggtcttctcaacccaaattacctcctcacaacctaaatagcacagaaccactgtcctctgaagcaatcataattccaccacctgaagaagattctggtgatagcagcagcgccatctgaagcaccagggcctagt

SEQ ID NO: 7043 - DNA, 421 bp, Arabidopsis thaliana
  unsure at all n locations
  Clone ID: LIB24-104-Q1-E2-F6
gatatcaatgttttggctttcttggtccctgctggcatcattgcgtgcttttcgcctctatctgatgccagctcttttgtggtcctttacattgtaatgtctgtatacttttctggagttatggttcgtcttatgctcgtgcttgctccagcagcatgcatcatgtctgggattgcgctctctcaagcttttgatgttttcacgggttccatcaaataccagttangcgcatcgtctaattccacagatgatgcagangacaacacttccacnaacaatgccccaaaagatgatgtttctgctggtaagactgacaagggtgaaagagattgtaaaanagcggtcttccaaaaagggcaagaagaaanagagagaaccggctgataaancttctgttaaggccaagattaaaaagaangct

SEQ ID NO: 7044 - DNA, 420 bp, Arabidopsis thaliana
  unsure at all n locations
  Clone ID: LIB24-104-Q1-E2-G11
ctatgagcggtgatgataaggcgatattgtatatgaagaggcaagatacaaaaactgaactaagaacatgcataaacatactcgcaatgacagaggttttgcatgcagaagtgccttcctttatcggggacaccaatgttgttaagctttcttggaaagaagccacaaagccattagcctatacaagagctttatatacagacctaatgtatggcatacccccggatattgatgcgtttcataattttatggacaaactctcagaagacttgctgaataaactagatatggagggaatgtgcgaattagaagatgatcaggttcaaagcacttgtgggttcatcangacttaaacaaagcacaagacacgtttccaagaaaagtaggantttcctacatgaaaaatcccaaagttacctt

SEQ ID NO: 7045 - DNA, 417 bp, Arabidopsis thaliana
  unsure at all n locations
  Clone ID: LIB24-104-Q1-E2-G12
aataaataaatttaagagaaatatctaagtttgggttcttccctgtgtctacccaccgtgatcatcataaaatggattgtgatttctgatttgtgagtctatctttctctactccattagcttcctctcccttggatggttacgtcactttctccgagcttacgtcatctatatccggtcttcacttctttttccttccattcctcagcagcattgcgtaatctatctgagttcaagatcatatgatattttcactttctggacaaaatgggacatttctcttccatgttcaacggtatagctagatccttctcgatcaagaaagcgaagaacatcaacagcangcaaaagctacgctaaggaagccacagatgaaatgggcgagananggggaacaaagaaaggacctaatttggg

SEQ ID NO: 7046 - DNA, 437 bp, Arabidopsis thaliana
  unsure at all n locations
  Clone ID: LIB24-104-Q1-E2-G4
acgcgtccgaacagaaagaaagtccacgcgaggacataagcgcgtgtgatttaaaatcgtcgtcgtcgtcttccacaccgactttaatctgattcttagaatcgccgtttggtttttaaccagagagattatctaccaaggaacgatgattattgaaagagctcgagttccgttgagccgatggnaacaaagcggccgtggcgatgggatctgcnctcggtgcgttggntgatnctcgtagagcggatcnaancgcagctctnnggcgaaactaccggtaaaccagcttttgnaatggntcttgagaagaatgaagaagagcgnaagaanggaagaagtncgtttttcaaaatcaactcaacnttctctccttangtggtggtcaantcattngatttttggccttaggaatggattgatttagaaaattgnttcga

SEQ ID NO: 7047 - DNA, 424 bp, Arabidopsis thaliana
  unsure at all n locations
  Clone ID: LIB24-104-Q1-E2-G8
taagccgtgttcttagacctggaggagtatttgtggccaccacatttatctatgacggtccattcagttttatccccttcttgaagaatcttcgtcaggaaataatgagatattcaggttctcacattttcctaaatgaacgtgagcttgaagatatctgcaaagcctgtggtctcgttaacttcactcgtgttagaaacgggccatttataatgctatctgcaacaaaacccagctaagctcaccctctttaaagtatatatacttttctgtaaaaaattggtataaagttataaacattataacaacttgagttccatacagtatacctaatttgtaaagctttttgcaaatgttcctattatctagcttgtaaattggggttaacatggtttgcanagggggtcttcttcntgtgaaaaaa

SEQ ID NO: 7048 - DNA, 430 bp, Arabidopsis thaliana
  unsure at all n locations
  Clone ID: LIB24-104-Q1-E2-H3
aaatatcccaaaatttagtggcggcgagagggaaaccaaaattcgcgagagagaagtatgtcgaagacgctggtgcaaccggtagggcaaaagaggttgactaatgttgcagtggttcgtctcaaaaagcaaggcaatcgcttcgagatcgcttgttacaagaataaggtcctttcatggcggtctggcgtggagaaggatatagatgaagtgctacagtcgcatactgtttattcaaatgtttcgaaaggagttcttgcaaaatcgaaangacttgatgaagtcgtttgggatcaggatgatcatacgaaaatatgcatcgatattttggagaaagggagaacttcaagttgctggaaanagaaagagaatcacaagttctcaagccagtttcggggatatagccancgattgttatgcaagaaaacta

SEQ ID NO: 7049 - DNA, 408 bp, Arabidopsis thaliana
  unsure at all n locations
  Clone ID: LIB24-104-Q1-E2-H7
taattggttcaaaatcatcctaaatcgagtagattgttttgaatcgatttttgaagttgattcgaagttcagtgattgtgattagaatttataaccagacccagtttttgaggtgaagaaaaagcagattttgtgttcaatttccatggaagacgaaccaggaagcgaaaatgaagcagacaccatagttgcttcaccacttgcaaaatggagaatcgaattctcgaaatcgtttcagaattacttaggacagatctgctcctaacattgttcgaagatggcttgtgactttagtcgctgcagtgatcnatatctatagggtttactctgtttagggnncttccgttanctcntanggcttagcnacttatatccntaannnctccgtgattggtttcctttccccta

SEQ ID NO: 7050 - DNA, 430 bp, Arabidopsis thaliana
  unsure at all n locations
  Clone ID: LIB24-104-Q1-E2-H8
acgcgtccggccacttcttgtgggactcgaactacgttgtcctcctcatctcttcaacactcactctcgtccctcttcatctctctccattcccgccttatccttacgaatcctcacgccgacggcggcaacgacatcttccgctgttattgaattaccggcgaacgtagcagaagctcctcgttccaaacgccattccaattcatacctggcgagaaaatccgccatttctgaagttcaacgctcctcgggattttctctcttctctgcagagattagcaagcagttttgaaggtacaagatttgaatgtaattttgcgtgattttggnatctctggaaagatgggcaggatcttatacangctctttgaatggatngaacaacatggaaagattagtgttcaaccttacagtnactggcataaagttt

SEQ ID NO: 7051 - DNA, 436 bp, Arabidopsis thaliana
  unsure at all n locations
  Clone ID: LIB24-105-Q1-E1-C10
atttactaagcaatatgtctggtgtttatggttgcatcaagtgtggtttatgaagtgcaagggactttcttgttaaagctttacttgaggaggaagtttcccangacgttgtatcgactttgccccttatgctggcaaaggtatgttgatgctcgtgagcaaccttgaangtggatgtcccgcaactaagagagttcaaacaattcttttcaacgttcaagtcttacatgagctttatcaagctcaagcatcgatatccgcatcgaaaaacatcgatgtggagatgaatgggagatgtgaattgctttccaaggctatgtctgcattgactggaancaaaagcagccaatcatcggaagttaanaatgancatgttgtcaantgggaaanactttggttgngcagannangcaaggttcaaggatgatgtccttga

SEQ ID NO: 7052 - DNA, 415 bp, Arabidopsis thaliana
  unsure at all n locations
  Clone ID: LIB24-104-Q1-E2-E10
acgcgtggggtccttgctggtcgtgtcgatgatctccaatggtctttcgatggacttcgaattgttgcttccggcgatggaaaaggcaaatctcttgttcgatccttcgcatgggactctggcaatacaatgggggattttgatggccattctcgtagggttttgagttgtgccttcaagccaacgagacctttccgaattgccacatgcggtgaagacttcttggttaacttttatgatggaccaccttttaagtttcactcttctcacagggagcattccaacttcgtcaactgcatcagatattcacctgatgggtactaaattcattaccgtaagctctgacaaaaagggtatgatttacgatggcaagactggggataaanttggganaattgggcctcaggaagatggg

SEQ ID NO: 7053 - DNA, 456 bp, Arabidopsis thaliana
  unsure at all n locations
  Clone ID: LIB24-103-Q1-E2-B9
cactctgccaggnccggtcaagananancgggtcgnnccacgcgtccgcccaancgtccgcccacgcgtccgaaaaatcgaaattctcatcaatagcanaaaaaaaattactcttagattttcctcaaaaaccttaatcaatcgccgggaaaatgaatattccggtgactatttcctccattactgtttcnaataacgctgtttccgacaatcgtcgtcatgtttcccgtgaaaatcgtcagcgttaagaaaaccgtcacttatatttttttttcntttcttcntcgtttttgtgaagatgatgatccactgatttgagagtagtagcttgagaggtttttagtagatttcgattttgcgattatttttgtttcctggaagagatctcatttttttgccacttccgatgatgaagattcaagccgattaacaacgattgccgggcgaatagagtgg

SEQ ID NO: 7054 - DNA, 405 bp, Arabidopsis thaliana
  unsure at all n locations
  Clone ID: LIB24-103-Q1-E2-C11
angcgtgggtaagtttcctctctctttagaactgtagagagagaaaagcctccatttttctcaaggcaatctctctctctctgcctcatctcataaacccattacaccaaagcctcatcgtagagagagaaacacaccanccattgttacactctaagagaagagaagagagaaggaaaaatggncggtgtatcaccaaagtttgtgttgccggagacattcgacggcgtgaggatggagatcacaggccaactaggcatgatctgggagcttgtaaaagcaccaagtgattgtccctcttcttcaattagctgtttacatctgtttgcttatgtctgtcangcntttatgtgaganggtttacatgggaatcgtcatccgtcctcgtcnaactcttctggaaaa

SEQ ID NO: 7055 - DNA, 438 bp, Arabidopsis thaliana
  unsure at all n locations
  Clone ID: LIB24-103-Q1-E2-D9
cgggtcggcccacgcgtccgcccaancgtccgcgacggtacaaaggcgaacaccggcaagatcgatttgaacggtgacggcgaatgtggcggcgaagtaacttaccggggaatccangattccgatcagngcnnnnnnnnnnnnnnnnnnnnnnnnnnnnnnnnnnnnnnnnnnnnnnnnnnnnnnnnnnnnnnnnnnnnnnnnnnnnnnnnnnnnnnnnnnnnnnnnnnnngttgtggtgagctaaattatgctagggaaaccggtgatgtaactcctggaagcaactctacggaaagatatcatcctctcttgaaagatgtggtcgaaagttcctgactcccccgaaggagagttatatttcttcttccaagaagaactgggattagcatgcatatctgctccagggaaaatggggtcagatgatgaagatttcnc

SEQ ID NO: 7056 - DNA, 465 bp, Arabidopsis thaliana
  unsure at all n locations
  Clone ID: LIB24-103-Q1-E2-E11
cctttgccagcccccggtcnaagacaaaacgggtcgnnccacgcgtccggacanaagtaagtcaaacagaaaanaatggatctcttantgattatagccggtttagtancggctgcaagccttctttttcctccgtagcacgaccaagaaatctctccggttanctccgggaccaaaaggtcttcctattanaggaaaccttcaccaagatggagaaattcaacccccannacttccttttccgtctctccaagctatacggcccgattttcacgaatgaaaatcggtggccgtcgcctcgcggtgatctcctcggncgagctagccaaggagctactcaaaactcaanacntnaacttcaccgcgcgtcctctcttgaaaagggcaacnnaccatgtcgnatcaanggcgtgancgttggtttcggggagtacaaccgccgtacgaacggtgagaatgaaggaa

SEQ ID NO: 7057 - DNA, 459 bp, Arabidopsis thaliana
  unsure at all n locations
  Clone ID: LIB24-103-Q1-E2-F11
nttccttcgcccagccccggtcaagacaacccggggncgacccacgcgtccngtcagcggcggtgtaaaaatagtcggagctatggcgatgcaggccggagttggcttatccaggatctttctcttagccggagcaggttacactggtacgatcatgatgaagaatggaaaattgtcggatttgttgggtgaattgcanagtttggtgaagggaatggagaaatctggagaagggtctgagggagattctgatgtttctgatgctatanctgcacaggttcgccggttggctatggagattcgacagctagcttcgcagcaacacataacggtcatgaatggagtttctggtgcaaacctacaagcccttgctgttcctgctgcgggcattgggagctctcggatatggttatatgtggtgggaagggactctcaantcactgaccttaagtatgtgac

SEQ ID NO: 7058 - DNA, 456 bp, Arabidopsis thaliana
  unsure at all n locations
  Clone ID: LIB24-103-Q1-E2-F9
tncttgccagccccggtcaagaanacccgggncgacccacgcgtccgatcaaaaccttcgacatacgttgcaattcggcatcggactgcatcatgcaggtttaaacgaccacgatagatctgcagtcgaagagcttttcacgaacaacaagattcaggttttggtctcaacaagtaccttggcatggggagtgaacctaccagctcacttaagttattataaagggaacagaatatttcgacgggaaaaccaaaagatatgttgacttccctcttacagagatcttgcaaatgatgggacgtgcagggcgaccacagtttgaccaacatgggaaagcggttattcttgtacatgaacctaaaaaaagcttttacaaaaagttcttgtacgaaccattccccgtagaaagtagtttgaaagagaagctgcacgatcacttcaatgcgggaaatcgtc

SEQ ID NO: 7059 - DNA, 418 bp, Arabidopsis thaliana
  unsure at all n locations
  Clone ID: LIB24-103-Q1-E2-G11
cacgcgtccnattcaagcggttctcctgttccttgtcttcgtcgttgagacgagagtacaagcgcagctagtgccgccggtgaggcaagatggtttcgtttacccaccgggtcatcgtttcgacccggatactatactaattgaggcgtattttgacccggtttgcccggacagtagagactcttggncgccactgaagcaagctcttcatcactatggatctcgcgttgcccttctcctccatctccttcctttaccctaccatgacaatgcctatgtaacatcacgggccttacacattgtgaataccgtacacgccaatgcnaccttcagtttgctggaagggttcttcaagcatcaagtcattgttttacaacgcgcaaacacaactccctttcaagacctgcagttgtnggag

SEQ ID NO: 7060 - DNA, 410 bp, Arabidopsis thaliana
  unsure at all n locations
  Clone ID: LIB24-103-Q1-E2-H12
ncnncgnancagcgagagtgagtgagagagtagagagtgtgtggagagatactaggaagttgaaggaaaaagcgagaaagatggctatgaaacagtgacaatgatatgtgcaaagaagaacggaagagagagatcttcttcaaggttctacagagagttgatatttcttctgagaacatgagagcacttccttacgactttgtgagaagcttctccaacaatgagctctctcgtaagatgaacgataaaagctcgatggggaagttcttgggaagtagaaatctgcaaaaatccaagattctatttcatggngaaatccggatgggagaantttgtgacgtgacaatgccttgggagccagtgaagtttcctancttcactcacaagngggaatatgcgttttacaagtn

SEQ ID NO: 7061 - DNA, 457 bp, Arabidopsis thaliana
  unsure at all n locations
  Clone ID: LIB24-103-Q1-E2-H9
tcatttgccagncccggtcaagngnncccgggncgncccacgcgtccgcttcantcgatttcaagaagtgaatcagacaggctcaaagcaaaacgtatgtttggctacttgttcaaaacctgaagttagggatcaggtcaaggcgaatgcaaggtcaggtggctttgtaatctctttagatgtatcagtcacagaggagattgatctcgaaaaatcagcatcaagtcatgatagagtaaatgattataatgcttccttgagacaagagtctagaaatcggttataccgagatggtggnaaaactcgtctgaaggacactgataatggngctgaatctcacttggcaacggaaaatcattcacaagagggtcatggcaantcctgaagacattgataatgatcgtgaatacngcaaaagcaagagcatgngcctctctgcagcagatagatgaanaag

SEQ ID NO: 7062 - DNA, 421 bp, Arabidopsis thaliana
  unsure at all n locations
  Clone ID: LIB24-104-Q1-E2-B3
agacgaaaccaggatcgtgaccgtcagggcgatagctcgtgggaggccaggatcgtttgacgatggtgacccacaaactacgaatctgtatgttgggaatctgtccccaaaggttgatgagaatttccttctgcgcactttcggaagatttgggcccatagctagtgtcaagattatgtggccaagaacagatgaggagaagaggcgacaaagaaactgtggctttgtttccttcatgaatagggctgatggacaagctgcaaaagatgaaatgcaagggatcatcgtgtacgagtatgaactgaaaattggatggggtaaagcagtttctctaccgtcacaagcattacccgctccaccacctggacatatggctattcngagtaaggaggggctgcaacttggttttttctgggtcaaa

SEQ ID NO: 7063 - DNA, 418 bp, Arabidopsis thaliana
  unsure at all n locations
  Clone ID: LIB24-104-Q1-E2-B4
caaaagtactttcattcangacttcagtttaagctatggcggcgaacgattcttcaaatgctattgacatcgacgggaatctcgactccgattcgaatcttaacactgacggtgacgaagcgaccgataatgattcctcgaaggcattggttactatccctgctccagccgtttgtcttttccggttcgccggagatgctgctggtggcgccgttatgggctctatcttcggatatggttcaggattgttcaagaagaaaggcttcaaaggatcatttgcagatgcagggcagtctgctaagacttttgctgttttatctggagtccacagtttggttgtttgccttctgaagcaaatccgangcaaanatgacgccattaatgttggagtaacanggtgtttgcactgggncttgct

SEQ ID NO: 7064 - DNA, 394 bp, Arabidopsis thaliana
  unsure at all n locations
  Clone ID: LIB24-104-Q1-E2-C7
aaattgaaagcattggagacaatggagagaataaacacgaaatgggtagcagcagcagcgagtatatggattcaaagctttagcggagctacatacacattcgctatctactcttcaatcctcaaatcatctcaatcttatgaccagtctactcttgatttcgtctctgtcttcaaagacatcggtggtacctttggtatcatctccggtttcctttacacggctatgacttctaagtcacgcggttttggtgggccttgggttgttgttttcgttgggttggttcaagtggtttgttgggattcttttttatttgggcttcggtggttgggttgattgctccgccgcctgtgccgttgatgtgcntgttcgtgttcttggctggtcactccnt

SEQ ID NO: 7065 - DNA, 407 bp, Arabidopsis thaliana
  unsure at all n locations
  Clone ID: LIB24-104-Q1-E2-C8
gtttcctactttcctggaatttcgtcctcaatctctcaagtttcatcggttttgatttgggtttgatcggaaaagtcatgggtaattgttgcggaacagcaggatcattggctcaaaacgataacaaacccaaaaaaggaaggaagaagcaaaaccctttctcgattgattacggtcttcaccacggtggtggagatggaggtggaagacctcttaagcttatcgttttgaatgatccaacaggtcgtgagatcgagtctaaatacacgttggggagagagctangtcgtggagaattcggtgttacgtatctatgtactgataaggagacagacgacgtttttgcttgtaaatcgattttgaagnagaagctgangacagctgttgatattgaanatgttagggaa

SEQ ID NO: 7066 - DNA, 385 bp, Arabidopsis thaliana
  unsure at all n locations
  Clone ID: LIB24-104-Q1-E2-D9
acacaagggacgttctcattacccctttacttgaaaaatttccccaaactgggcaaagactatgaggctttcgcaaacaaaggtatatcggactttttgggtgacctagagggtatgtgtcctaaaaccgcanagttcaaggatttctttgaaaacttgaaggattacatggccttcttcaattcagcagcacccgggtcaaaagacaaccagttcgagatgttcgtaaaatctgaaaagctgttcaaggctttggtctgctttcaacagtagtaaaggcggaacatcanaagattcgtggaagctggtggatggattgttgtcaatgggtaaaggtttggttganattaataanancggttcgaaggagaatacttttnaacga

SEQ ID NO: 7067 - DNA, 464 bp, Arabidopsis thaliana
  unsure at all n locations
  Clone ID: LIB24-103-Q1-E2-B10
cttttacttggnccaggccccggtcaagaanaacccgggncgacccacgcgtccggcatagaatcgtcgctgatcgaagtgattctgctcgattttgctctcacttgaaagatctgagtgatttgtttcagatcttctccgaaaggatgaagcggattggagataaagaaatcgacggttctgggtctcaaaatcaacatccagtgggctcccctcgaaacgaattacaagggcaatctccaaaacctggaaacggtaacaccaaagatgctttgacaaccgatgatgctttggcctacttaaaggaaataaaggacgtgtttcatgatcaaaagtacaaataccatctgtttctcgaagattatgagcgacttcaaggcacaaaggaccgatacttctgtcgtgattgcacgagtcaaagacctgttaaaggggacataaccatttaattctccgtanttaac

SEQ ID NO: 7068 - DNA, 497 bp, Arabidopsis thaliana
  unsure at all n locations
  Clone ID: LIB24-103-Q1-E1-F1
acgcgtccgggcgtcctttcgcanaaaccatttggagttggagctttgggcgacgacaatgggccccgaagaaaggagtgaaggtagctgctaagaagaagaccgcggaggaaagtttcaaaccctctattcgagaggaggcctaagcaattcggtattggtggagctttacctcctaagaaggatctctctcgctacatcaaatggcccaaatccatccgtcttcaaaggcaaaagaggatccttgaagcaaaaggttgaaggtccctccaactcctaaccaattcacaaagactccttgacaanaatccttgctaccagcctcttnaaaggtccttctganntacaagggcannangacaaancctgccaaaaaanggagcgtcttgntaaanaaaggcccaagctngaaancttaggggaaanccttcngattctaaanaagcccattgtagtcaaataccggcctcaaaccatgtgacctaccncattggggg

SEQ ID NO: 7069 - DNA, 499 bp, Arabidopsis thaliana
  unsure at all n locations
  Clone ID: LIB24-103-Q1-E1-F4
tnccggtccggaaatcacgggtcgacccacgcgtccgggttaagtctcaagttattctcttcgtgtcctgaatctgtgcaccaaaggttatcgaaaatgtcagtgcgagttctgaatcctaatgccgaggttctcaacaaatctgcggcgcttcatatgaccatcaacgccgccaagggtttgcaagatgtactcaagtcgaatctcggtcctaaaggaacaatcaaaatgcttgttggtggttctggggatattaagcttaccaaagatgggaacacgctattgaaggaaatgcaaattcagaatccaacagccattatgattgcgaggacagctgttgcacaggatgatataagtggtgatggtactacttccactgttatcttcattggtgagcttatgaaacagtctgaacgctgcatcgatgaaagtatgcatccacgantcctaagntgatggtttcgagattgctaaganagctactcctcaaatttcttga

SEQ ID NO: 7070 - DNA, 472 bp, Arabidopsis thaliana
  unsure at all n locations
  Clone ID: LIB24-103-Q1-E1-F5
acgcgtccgacctcttcgtcctcgtcccctgtcgttgctctttcttcctctacatcgccacattctcttggaagcgtcgcatcttcttctctgtttcctcactcctccttcgtgcttcagaaaaaacatccgatcaatgggacgagcacnaggatgatttcaccaaaatgtgccgcttctgatgcagctcaattgataagcgctaaagaagatatcaaagttcttctccggactaagttttgccatcccatcttggttagattggggtggcacgatgctggtacttataacaagaatattgnggagtggccactgagaggtggagctaatgggnagtcntaggtttgaggctgacgcttaagcatgctgcaaatgctggtctgcttaatgctttaaagctcattcagcctctcaanngacaaggtatctaacaatctccttatgcgggacttattccaagtttagctantgc

SEQ ID NO: 7071 - DNA, 502 bp, Arabidopsis thaliana
  unsure at all n locations
  Clone ID: LIB24-103-Q1-E1-G1
aacggttgtggccgccggtcggaatnagggtcgacccacgcgtccgcagtttcttccatccatggcgtctctttcttctacctctctctctctccccaagaattctcaccaactccatccttcatctggtttttctctgaatccaaatgctcgttgtgtcagtgtttcatttggactgaatcactccaacaaacttcatatttctgctcctaagaaccaaaaggatcctaaccattcaatctgcanacagagatgatgatggttcaggcagcacaggcctattcgtcggagggtttattttgggcgggacttatagtcggtgccctcggatgtgtatatgcaccacaagattaagcaaggcnatagcctggagcagaacggaaaangatttcatgnaggaaanttggcctaaaatcnataatatgacnnanggaaaaaagcttgggngaanaaacaacctaangtactaagctgnagaaaaaattggctcangccttaaact

SEQ ID NO: 7072 - DNA, 469 bp, Arabidopsis thaliana
  unsure at all n locations
  Clone ID: LIB24-103-Q1-E1-G3
acgcgtccgaaaaatactgctgaggaaaagcaatccacacgattcgattcaaagttttcattttttctctaaaagtttggattttgatttcgttgctgaacggaaaaagaatcagctcctttcagtttagggttttgggtttctgtttggtctctatcagatgatgtgtgaggagattcttcctctgtttgtgtctgtttcagatggaagacaatgataagtctccccctaaggattactataagattctagaagttgattacgacgcaactgaggaattgatcagactcaattatcggaagcttgcattgaagtggcatcctgataagcacaaaggcgatagtgcagctacagaaaaatttcaagagattaatgaagcttataatgtgctgatggaccctgctaaacgttttgagtatgatttcactggtatatatgagatccacanatacacnttacgggaaatatc

SEQ ID NO: 7073 - DNA, 441 bp, Arabidopsis thaliana
  unsure at all n locations
  Clone ID: LIB24-103-Q1-E1-G5
naagcaaagtagaaaacacaagtttctctcacacacattatctctttctctattaccaccactcattcataacagaaacccaccaaaaaataaaaagagagacttttcactctggggagagagctcaagttctaatggcgaacttggtcttatcagaatgtggtatacgacctctccccagaatctacacaacacccagatccaatttccnnnnnnnnnnnnnnnnnnnnnnnnnnnnnnnnnnnnnnnnnnnnnnnnnnnnnnnnnnnnnnnnnnnnnnnnnnnnnnnnnnnnnnnnnnatgggttcacgaggaattgggcgttgaatgtgaggcacaccattaacgacaccaatatttgaggagtctccattggagggaagatactanacagagatncgattcagngtgcgcctccncngttcaatttagctgatatna

SEQ ID NO: 7074 - DNA, 444 bp, Arabidopsis thaliana
  unsure at all n locations
  Clone ID: LIB24-103-Q1-E1-G6
nctttaacacagagaaagagcctgagagacaagtgagaaacgcaacaacaccaccgaaagagagagtccaaattcgaaagagaaaaagaatcaaattccttcttcttccttttttgattttcaattattactttaatcttctttcccgctctctattcttcttcttctttaggatcaatcaccgtttagctttcttcccatacgtctctccgtttacgaccagtatacagaggctggagctggggaagaaaaggattgtctatggagggaagacgtcggaataggtttggtatgccangaatacnatggatgggaaggcgagtaatggnaatggtttagagaagactgtaccttcttgtttccttaaggctatggcatgtgtacctganggangatgctaagtgtcactcnactgttgttnctggggtgggttttcgggaacct

SEQ ID NO: 7075 - DNA, 497 bp, Arabidopsis thaliana
  unsure at all n locations
  Clone ID: LIB24-103-Q1-E1-G8
cntagggaaggaattcccgggtcgacccacgcgtccgcttnagcacggtgcgacaagatggcgagctcagtgacgctgcttctatggagtcttcttcttctcggtacactaagcgctattcaggccaaaaagtctaaggaaaacttaaaggagatcacacacaaggtttattttgatgttgaaattgatgggaaagcagctggtcgtattgtcatgggtctatttggcaagacagtccccaaaactgtagagaatttccgagctttatgcactggggagaaaggaataggtaagaatgggaaggcgctccattacaaggggagttcatttcataggatcataccaagctttatgctccaaggaggcgattttacacatggaaatggaatgggaggagaatctatctatggtgagaagtttgctgatgagaacttcaaactcaagcatactggtccaaggttcttatcaatggcaaatgcccggtcaagataccancg

SEQ ID NO: 7076 - DNA, 453 bp, Arabidopsis thaliana
  unsure at all n locations
  Clone ID: LIB24-103-Q1-E1-H3
acgcgtccgaaaataattgagttttttttttaattagaaacaaatggggttgagtggtgttcttcatgtggaggttgaggttaagtctccggctgaaaagttctgggtagcccttggcgacggcatcaatctcttccccaaagctttccctaacgactacaaaaccatccaagttctanccggcgatggcaacgctcctggctccattcgcctcattacttatggagaaggatctccactggtgaagatatcggcgganaggatcgaagcagtggatttggngaacaaaagcatgtcgtacagcatcattgggcggagaaatgttggagtactacaaaaccttcaanggaaccatcancgttatccctaaggatggtgggtaaccttctgaaatggtctggtngagtttgagaagaccgcccatgnagattcgaagatccacaatggtcatcn

SEQ ID NO: 7077 - DNA, 447 bp, Arabidopsis thaliana
  unsure at all n locations
  Clone ID: LIB24-103-Q1-E1-H4
acagngangaaacgtcccaacgagctcagagagccacaccantcctcctttttcttcttcttcttcctcctgcatttttggttttggnggcgttgagacatcatcatgtcnancgcagaggatgtgaaagagcaaggaaacctcaccaacgaggcanagaagtcaatgccatcatcacancaggangangctgttgtaaagaagaagtatgganggctcatgccaaanaaaccacctctcatttccaangatcatgagcnagcatactttgactcanctgattgggctcttggaaaagcaaggtgttgcgaagccaaanggacccctgnaaagccttcgtcgcaanttacaaccaacgcagcagcagacacgttacaagaagtctccatttctccatctgaaggtggttcaanatggangagctgctccagggccgacngggaggtt

SEQ ID NO: 7078 - DNA, 420 bp, Arabidopsis thaliana
  unsure at all n locations
  Clone ID: LIB24-103-Q1-E1-H6
acgcgtccgcccacgcgtccgtttgtactcgaagtaacatactttttacaatcacatttttgaagaactttcattccataaatctacagatctttgtgtatcaagtaaagagatgtcaggaagaggaaagggaggaaaaggattgggaaagggaggagcgaagaggcacaggaaggttctgagggataacattcanggaatcaccaagcctgctattcgtcgtcttgctcgtangaggtggtgtcaagcgtatcacgtggnctcatctacgangagaccagaggtgtcctcaagatcttcctcnagaatgttatccgtggacgccgttacctacactgagcacgccaggaggaagacngtgaccgccatggnggttgtcnacnctttgaacaggcaaagnctnctcnctacnggnttcgg

SEQ ID NO: 7079 - DNA, 433 bp, Arabidopsis thaliana
  unsure at all n locations
  Clone ID: LIB24-103-Q1-E2-A10
aacggggccggcccacgcgtcnaanaaaacanaaagtagcttctccangacgcggttcccaatatctgcgtttcccgtttgcgttttccggcaatggctctccaagccactactactangttctgcttctccggtccaactttccgatcaactcctcactcactcacttcaaaacgtcctatctccatcaaagctactacttcttctccttcaagactctccaattcacgatctaatctcaaaggaagagcattgtctagtgatggttcaacacnnagaatctccttatgtantctgttttggngaaatgctaatcgantttgtnccgacgacaagcggactttcattanccgatgcaccgggttttaaaaaagctccaggtgggtgcacctgntaatgtanctggttggtatgctngtccttgggtgggttc

SEQ ID NO: 7080 - DNA, 439 bp, Arabidopsis thaliana
  unsure at all n locations
  Clone ID: LIB24-103-Q1-E2-A11
cactctccagngaccggtcaaggntnacgggtcgggccacgcgtccgcacaaatctctcttccacccattgttatctctgtagaagcgtgagagagatcacgcgtgttcaccgacacaatcaaaatatggcgaacggagccgatagattgggatctggacggtaaaccgattaagccgatgacgatatgnnngatcggtgccggaggtttcattggctctcatcnctgtgagaagcttatgacggngactcctcacaaggttcttgcgcttgatgtttacaatgataagatcaagcacttggnttggagccngnnaccgttcaatgggctggtcgggntccagtttcagccgtancancattaaggcatgantctagacgtganggactgatcaacatggcagatttgacganaaatctagctggcgattcngttctcc

SEQ ID NO: 7081 - DNA, 506 bp, Arabidopsis thaliana
  unsure at all n locations
  Clone ID: LIB24-103-Q1-E1-E8
tggttggcccggccgtancggtaaaggaaattcccgggtcgacccacgcgtccgcccacgcgtcngcctcttcctctcattatttttgttctcgccaccgaaacaacagaagttgcagactttatccgaatttagggtttcagctcgttctctcttctccaattatcagatccacgaaactctacttttcggatcaggtctcagcttctctatcgtttgcccctcagatcaacaaagtttcatgtctgaacttgattcccaggtccctactgccttcgacccgtttgctgatgcgaatgctgaggactcaggtgcaggaacaaaggagtacgttcatattcgtgtccaagcagcggaatggtaggaaaagcttgacaacggtccaggggctgaagaaagagtacaacgacaccaagatacntaagggncctcaagaaaagaantttgctgcaanggnanctgtgggttcaaggactcagnactcggacagggttattcaacnttca

SEQ ID NO: 7082 - DNA, 499 bp, Arabidopsis thaliana
  unsure at all n locations
  Clone ID: LIB24-100-Q1-E1-H11
tgtntctacggccccggtgatcccgaagtngccccacgcctccgcccangcgtcngacagaagctcgccttttaaagggttcatatgattttcttggtctcaactattacgtcactcaatacgcccacgcccttgacccaagtcctccggaaaaactcactgccatgacggactcactcgcaaaccttacatctcttgatgcaaatggtcaaccccctggtccaccgttctctaaaggcagttattaccacccaagagggatgttaaacgtaatggagcacttcananccanatacggtgaccctttaatctatgtcaccgataacggnttcagtacctccggtgggcccatacccttcaccgaatcatttcacgattacaaccggattgattatctctgcagtcatctatgttttctccgcaaggccatcaangagaagcgtgtcaacgtnaaangatactttgtntggtctcctggggataattacnattctgcaac

SEQ ID NO: 7083 - DNA, 420 bp, Arabidopsis thaliana
  unsure at all n locations
  Clone ID: LIB24-100-Q1-E1-H7
gaattttattattaaaaaaggaaaatgttattccttttttgcttctcttgacttggcgtaatcaacttcgccatcttcgtttttgtttcgatcccaatcgagttttctctcaatttgagaaatgggttcactgaaaaaggacggcgagatcggatatgagtttacggaggcgttactgtacgttaacggcgttcgtagagtcttgcctgatggattggctcatatgacacttctcgaatatctcagagatttaggattgaccggtacaaagctgggatgcggcgaaggtggttgtggggcttgcacggtgatggtgtctagttatgacaggaagtcaaagacctctgtgcantatgctgtcaacgnctngcctagcacctcncnaagcnggtagnagggatgcatgttagatccangtgg

SEQ ID NO: 7084 - DNA, 436 bp, Arabidopsis thaliana
  unsure at all n locations
  Clone ID: LIB24-101-Q1-E1-B5
acgcgtccgcttgtttgtgttctctcaaatcctctgataagaatcaatggccaaggaattagcagagaaagctaaagaagcttttctagatgatgacttcgatgttgctgttgacttatactccaaagccattgacttggatcccaattgcgccgccttcttcgccgatcgtgctcaggccaacatcaaaatcgataacttcactgaagctgttgtagatgcgaacaaagccattgagttggagccaacgttggcaaaagcctatctcagaaagggcactgcttgtatgaagctagaagaatatagtactgctaaagcagccctggaaaagggagcttctgttgcaccgaatgaaccaaagtttaagaagatgatagatgaatgngatcttcgtattgcaagaagaagaagaaagattgggtcaancgatgccacc

SEQ ID NO: 7085 - DNA, 413 bp, Arabidopsis thaliana
  unsure at all n locations
  Clone ID: LIB24-101-Q1-E1-C2
actcaaaggatgttcataccgagctgattcaacataaacgagcttggatgataaaacgtggtattgtcaaagggaagctctctgtagactcagccgagcaacgcctcgcggggttatgtcctcttatgccanaagaagttggtattcttttacgagcttatggatactcatgggatacaatcatatatgtcgctgggggagaggtttttggtgggcanagaacgttaattcctttacatggtatgtttgagaatgtcgttgaccgtacttctctaagtactanctgggagcttgctaaaatgtatggggcgtgaggcaaagcataatgatatcaagaaaatgacacctccttcgatcgaggtagaaacgangcatgattcattgaaaagcacaagacaagagacctcaaccgc

SEQ ID NO: 7086 - DNA, 412 bp, Arabidopsis thaliana
  unsure at all n locations
  Clone ID: LIB24-101-Q1-E1-C5
acgcntccgcccacgcgtccgcggacgcgtgggttttagatttcgaatcgagaccagatctgcgtgaagatgatagagaagtgtataggagcgcatcggtttcggagattacagagattcatgcgtcaagggaaagtgacgattctttgtctcgttctcaccgtcatcgtcttacgtggcanaatcggagccggtaantttggtacgccggagaaagatatcgangagatccgtgagcatttcttctacacgcgtaaacgcggcgagcctcaccgtgtcctcgtcgaggtctcttccaaaacgacgtcgtccgaagacaggangaaatgggggtaacagctngganaccntcgagtancaanacggtattcgttcatcaaaggagacgaagngganagctcgaataccgggg

SEQ ID NO: 7087 - DNA, 395 bp, Arabidopsis thaliana
  unsure at all n locations
  Clone ID: LIB24-101-Q1-E1-D2
acgcgtccnatttgagtgggatcaaaccctanatatggcggagaagcttgcgccagagaagagacacgatttcattcacaatggtcaaaaggtatttgagtgggatcaaaccctggaagaagtgaacatgtacataactttgccgccaaatgttcatccaaagtcattccactgcaaaatccagtcgaaacatatcgaagttggcatcaaaggcaaccctccctatctcaatcacgatcttagtgctcctgtgaagactgattgctcgttctggactctagaggatgatataatgcacattaccctgcagaanagggagaaanggcaaacatgggcatcaccgattctgggacagggtcagttaggatccttacgccactgatcttgangcagaa

SEQ ID NO: 7088 - DNA, 415 bp, Arabidopsis thaliana
  unsure at all n locations
  Clone ID: LIB24-101-Q1-E1-D3
attttgcgactcttcttctccttatcctctaaatctctcaccggtcaccgacgacgggaacttggtagttacaggaacaagaaatgtcctcgaagttccctctcggtgtacgcttcatcactcattctcttccttgtactcgtctcgcttccatgaattctggcgcccttatctattcatttcgttccgttcctgttctatccaaagcctttccttttaggttaaagtacattggattaggttcccgggtcaacttttcaacccgaccagagagatctcaanccgaattcgcgcggcgaagtggagctggaggaganattcgcgcgtccaagagcttgattgaggatgaggcagagcttagtgattgggtgagcgatttgcacggactaagttcgttgcgcggggaagttcancg

SEQ ID NO: 7089 - DNA, 388 bp, Arabidopsis thaliana
  unsure at all n locations
  Clone ID: LIB24-101-Q1-E1-D7
atcaatggtggatgagctggaagcaatgttagatgtggtagacccgcaaccgcaggggaaatcattgtcgatgagaagaagaacatttgatatgccagacagtttgatccgcanagaaatcgcagagggagtgactcagattgtgcagatgcttgaaacggaagaagaatgatggaatggagcactgtgtgtttgtgactcaggggctgtttttgttgttgtttgtgactgggaagaactgatcagcctctttagtttgattagtgttctgaatgtttctaattatgcagacaaaattaataatgagagtggcttgaacaagagattggtgtctcgctcgcatcagtctcatctctcanancntggtccctccttagtccggttnctg

SEQ ID NO: 7090 - DNA, 407 bp, Arabidopsis thaliana
  unsure at all n locations
  Clone ID: LIB24-101-Q1-E1-F11
acgcgtccnaacaaaagaagatccaaagatgagtgaagaagcatatgaagaaactcaggaatcaagtcaatctcctcgtccggttccaaaactgaacgagaggattctctcaacactatccaggagatctgtatctgcacatccatggcacgaccttgagattggtcctgaagctccattggtcttcaatgtggtggttgagatcacaaagggaagcaangtgaaatatgaacncgacaaaaagaccggtcttatcaaggttgaccggatcttgtactcctccgttgtttanccacacaantacggattcancccacggncattgtgtgaaggacaacgatcctcttgatgtccntggtccntatgcaaggaaccantgcttcccnggatgtntcctccgtgccata

SEQ ID NO: 7091 - DNA, 398 bp, Arabidopsis thaliana
  unsure at all n locations
  Clone ID: LIB24-101-Q1-E1-F3
gtgggttcgtcttcgacgacggcaaattcgtggaagctgtttcatcgattccggcttcactgaagcggcgtcgctcgacgtttattattccgacgactaggcctttgaggcagtttctgattaacttcaggcgataatggcaaacagaacagatccgttggcaaagaatataagaggaacgaatccgcagaatctggtagagaagattgtgcgaacgaagatttatcagcacaccttttggaaggagcagtgctttggtctcacggcggagacattggtggacaaagctatggagctcgaccatctaggtggtacctttggtggtagccgcaagcctactccgttcctttgcctcatattgaagatgcttcaaatccagcctgagaagagacanggca

SEQ ID NO: 7092 - DNA, 428 bp, Arabidopsis thaliana
  unsure at all n locations
  Clone ID: LIB24-101-Q1-E1-F4
tgagtgggatcaaaccctagatatggcggagaagcttgcgccagagaagagacacgatttcattcacaatggtcaaaaggtatttgagtgggatcaaaccctggaagaagtgaacatgtacataactttgccgccaaatgttcatccaaagtcattccactgcaaaatccagtcgaaacatatcgaagttggcatcaaaggcaaccctccctatctcaatcacgatcttagtgctcctgtgaagactgattgctcgttctggactctagaggatgatataatgcacattaccctgcagaagagggagaaagggcaaacatgggcatcaccgattctgggacagggtcagttagatccttacgccactgatcttgagcaagaaacggctcatgctccaaaagtttcaaagaagagaaaccgggattcna

SEQ ID NO: 7093 - DNA, 483 bp, Arabidopsis thaliana
  unsure at all n locations
  Clone ID: LIB24-101-Q1-E1-F6
ttttaccccggccaggtaccgagtcaaagaattcccgggncgacccacgcgtccgcggacgcgtgggcgtcgctgtcgctgtgtctctctttctcactctgttccatagatctgagcttctatcaatattctcggatcgctatcagtcaaatcttaagaatttcgtcgctttagctcaattcggattgtggaggaagttttaggatttgatctccatctcgtatccaagcatggttgctcctgtgcctccaggggcacctagacccaacagccagcaaaattccgggccacctaatttctacccgggttcacaagggaactcaaatgctttagccgacaatatgcagaacttgagcttgaatcgaccacctccgatgatgcctggctcaggtcctagaccacctcctccttttggtcagtcaccanangcctttcnctcagcaatccccttcntatggagctccgcaacgtngggccttcaag

SEQ ID NO: 7094 - DNA, 405 bp, Arabidopsis thaliana
  unsure at all n locations
  Clone ID: LIB24-101-Q1-E1-F8
acgcgtccgaaaaaaaagtgtttactttttgggttcctcttcggtgggttcactacactagtaacatctctgaacctgttctctgtctctcagcagcaaaacctcgaggcttctttttctttcattctctcaatttcttctctctgatctgaattctcgccgagtgaatctagaaccaggcaagctccaattaggtttaaggttttcaagcactctgtttccaatgctgcttccgagatggtttgcagaagcgttgttgctccnactttcaattcttgcctgttcaaacgctgcatttatcggtgtaaacattggcactgatctcaccaacatgccaccgccttcagacattgtnacacttctcaaatcacaanaagtcacacacgtccgtctctatgatgctna

SEQ ID NO: 7095 - DNA, 427 bp, Arabidopsis thaliana
  unsure at all n locations
  Clone ID: LIB24-101-Q1-E1-G2
ggagaggagactgtcttaatcgtttccgggtctcttattctgatccattcntctctcaagatctaagatttactgattttgaagtggagaagaaattagttgtctcgacaaaccccactagaaactttgtttagtgtgtcttcttaaagcctgcaagatgcagagaccacctcctgaagatttctccttgaaggagacgagacctcatctaggtggaggaaaactctctgcgnnataagcttaccagtacttatgaccttgttgagcaaatgcantatctctatgttcgtgtggttaaggcaaaggagttacctggcagnngatatgactggtangttgtnacccttatgttgaggttaagcntgggaactacgaangcancancaangnnttcnagaaggaatcgnatcctggagtgggacaagnt

SEQ ID NO: 7096 - DNA, 381 bp, Arabidopsis thaliana
  unsure at all n locations
  Clone ID: LIB24-101-Q1-E1-G4
aagcacattgctgaagaaatagacgagaattctccaaccttttcagatggtgtgcccaaggaaggacttagaatagaagatgttctagtcagaattgctcttctgatacnagttcaggagaaggtgaaatttgtagaagatcatccagggaaacctgttttcccctctcgcattcttgaaagattccccggactganaagtggnaaaatttggaaggaggaacatgacaagataatgatacgtgctgttttaaagcatgggtacggacggtggcaagctantgttgatgacaaagagttggggatccaagagcttatctgcaaanaattgaatttccctcacataangtttgtctgctgctgaacaagctggnttgcaggg

SEQ ID NO: 7097 - DNA, 413 bp, Arabidopsis thaliana
  unsure at all n locations
  Clone ID: LIB24-100-Q1-E1-G7
aatgccaagaccaagagtttcagagttgtctcagaggcaagctccaaggctgaggtcatcgtcatctacttctgattccaatcattccaaccgtctgatcactacggatcaaagttttaagcccggtgttgaccgtaaatctcctcgaagcggtggacctaacagtgatccgcttggtcagaagaaacttgggggacgaatatcggatctagagtcgcagttaggacaagcgcaagaggaactgagattgctcaaggagcagttggctaatgctgaagctgtgaagaaacangctcaagatgagcttcataaagaagtccaangaaaccaaanccgctgggctcgagtggangaatccngcaactgaaggctganaaggatttgatagagacgaaatnccctggttaatgttg

SEQ ID NO: 7098 - DNA, 467 bp, Arabidopsis thaliana
  unsure at all n locations
  Clone ID: LIB24-099-Q1-E1-E11
acgcgtccgctttgtttatcttagggtttgtagataaaggaagaagatcgttgtggcaaagaatgaaatcgatggctccgacggcgacgctggacaacaatgaggagctccggcgactcagggaggttaatattgacgaagctccggggcgtcgtcgtgttcgtgattccttgaaagatattcagcttaatctcgatcatatcctcttcaagacaccagaaaatgggattaagacaaaggagtcttttgaggtgaattcgagaggagttgagattttctctaaaagctggcttcctgaagcttctaagcctagagctttggtttgtttctgccatggttatggagatacttgcacatttttcttcgaangaattgcaaggagattggcattgtctggatatggaagttttcgctatggattatccggggattcggcttatcagagggcttgcatggttatatcccct

SEQ ID NO: 7099 - DNA, 488 bp, Arabidopsis thaliana
  unsure at all n locations
  Clone ID: LIB24-099-Q1-E1-F4
gtccganatcccgggtcgacccacgcgtccggaaaaagcctacggttgttctgttcctttcaatctcaccaaattttcatcttcaccttcanttttgatagattctcttcaccgaaccaaatccgtaaccctagcttcttcntaaattatanagaaanagagttaattcgaatctggatgaaattggttttgtctacatggaaatctagatgtgtctgattccgaaatctgagtctgagagatgctaggagcgattcatttgggagtattagcagcttgtttcgtcctcttcgttcccatggcaatggctggttggcatctgagcaggaacaagatgctcttctttagtggcgctttgtttatttctctcgcggtttgtgttcatctcacgccttatttccccttcccgttttccgacatcgttgccctcctgtttcctccngttgttgtccaaggattaaccgtatcctcttgtatcaaacgagggt

SEQ ID NO: 7100 - DNA, 510 bp, Arabidopsis thaliana
  unsure at all n locations
  Clone ID: LIB24-099-Q1-E1-F6
ggaactgttctcgcctgcgcntaccggtccganaattcccgggtcgncccacgcgtccggcanaagcaatggtggatgcagctataaaggctgcatcatctgtgaatgaaggggaagatgtgaacacaatgatccaagaagccttagagttggttggcaaaaatcagctattacgcagctctatggtcaaacatcangancatntaaatggcagtatagagcatcatcacaacccatctccttcaaatggatcanagcctgtggctaacaacgatttaaactcacaanatggttcanagaaaaacgctcaaatgccttcagagcttatcacctcctgtgttgccacttggctcatnattcagatgtgcncggagaagacagtaccctccanctgatgtcgcacagcttataagacgcagcaagtcacangcttgcaaccacnatgcncacataanctaccgatttaacaganganatccggacgtgcatggggaacggattaangactca

SEQ ID NO: 7101 - DNA, 515 bp, Arabidopsis thaliana
  unsure at all n locations
  Clone ID: LIB24-099-Q1-E1-G10
gggaatgtttccctggnccctgtttnccggggccccgggtcgacanaacgcgtccgggcacgcgtccggcataaangaaganatcanatgagagtcctcatgtgtatgcaattgcagatacagcaattcgcgaantgatacgcgatgaagttaaccaatctatcattatcagcggcgagagtggagcagggaaaactgagactgctaanatagctatgcaatacttggctgctcttggaggcggaagcgggatcgantatgagatacttaagactaatcccattttggaagcatttggaaatgcaaaaacattgagaaatgataattctagtcgttttgggaagctaatagagattcattttagtgaaagtgggnaagatatcgggtgctcaaattcaancctttttactagaaaagtctagagtggtccaatgtgctgaangggaaaggtcatntcntattttttancaactttgtgctggggcttcacctgcacttagagagaangccaaatc

SEQ ID NO: 7102 - DNA, 499 bp, Arabidopsis thaliana
  unsure at all n locations
  Clone ID: LIB24-099-Q1-E1-G4
gcatctancggtcgacgatcccgggtngacccacgcgtccggncaaanttccgactttttgcttctcccanaggctaatcatggacgctgtggcggcgaatttgtttcaatctccttccttactgcgtcaaacttccgaaaggttgatattttcgacgcccaactgtcctggcttcatgcgaattagctccggacctcaatttcgtctcagacaaaactcttctcttaaattctcgagaccatttcaaagcggaacaacttgtgttaaatctcggagaagctttgtggttaaagcttcagcttctgggtgatgcttcaacagaatcaatcgcgccgcttcagttgaagtctcctgtgggacagtttctgtcacagatattaagtgagcnatccgtcatcttgttcnagcagnctgttgaacagcagcttgannangctccaagattgattcgagacgctgaaagannaagngttaagattgnatcctctgtccttggga

SEQ ID NO: 7103 - DNA, 467 bp, Arabidopsis thaliana
  unsure at all n locations
  Clone ID: LIB24-099-Q1-E1-H1
acgcgtccggttnagagcttagaagccgtcggcacagnaagaagaagaanaagantgtctcacaggaagtttgagcacccaagacatggttctcttggtttccttccaatgaagagagctaaccgtcacagacgaaangtgaangcgttccctaangatgaccaaaccangccttgcaagttcacagctttcangggttacaaagctggtatgactcacattgtcagagaagtggagaancctggatccaagcttcacaagaagganacatgtgaggctgttaccatcattgagacacctgctatggtggttgttggagttgttgcctatgtgaaaactcctagangtttgaggtccttgaacaccgtcngggcacangcaatttgangttaaggaagtcaaggncaaaggtctacaagaantggggctaaatncnaagaagaaggntttcaactgggttaccctaa

SEQ ID NO: 7104 - DNA, 510 bp, Arabidopsis thaliana
  unsure at all n locations
  Clone ID: LIB24-099-Q1-E1-H12
cggttccnggcctacttttcgtgncccagggtcgganaatgcgtcgggncncgcgtccgattcaacagaggtttttgatattggagggaatcggtaacgggcatggaagccactgatccaagcgcagagatcgagctctacaccattcctgctcaatccagttggttcttatgggatgatatacacgaaattgaaagacgcgagtttgcggagttcttcactgagagctcaatcactagaacccccaaagtttacanggagtaccgagntttcattatcaataagtttagagaggacacttgtcggagactcaccttcaccagtgtccgcangtttcttgttggcgatgtcaatttgctccaganagtttttctcttcctccgaaaaatggggattgatcaattttagctcttccctgangaanaaatgaccatcntattgtccgtggataatgctnaaatngaacaagggactcctgcttggnattcnngttactggcaacccctaant

SEQ ID NO: 7105 - DNA, 469 bp, Arabidopsis thaliana
  unsure at all n locations
  Clone ID: LIB24-100-Q1-E1-A12
ccacgcntccgaaaaatatgtannnnnnnnnnnnnnnnnnnnnnnnnnnnnnnnnnnnnnnnnnnnnnnnnnnnnnnnnnnnnnnnnnnnnnnnnnnnnnnnnnnnnnnnnnnnnnnccgctggacgtcgaaacaacctgcctcgtccaaacctcagaagacgatgtaaggtcaccgcttcacgggctaatattgaacaagaaggtaacacagtgaaagaacccattcagaatattaaagtaaagggatacataacggcccaagaagagtttctggagggcataacttggtcgagaggtctcgatgacattgctgatatccgcggcaagatnattgctcgtcgagcttattagcgccaagactgaccagcggattacggtagaagactacgcacaacgtgtatgggccgaagcccctgatgagaagtacgagtgcgagtttgagatgcctgaagactttggaccagtgg

SEQ ID NO: 7106 - DNA, 423 bp, Arabidopsis thaliana
  Clone ID: LIB24-100-Q1-E1-B8
gcaaataacgaaaaccatggatccgaaaccaacctcgatgtggagctcaattgtgaagaaagatccaccttcaaagcctccggttaacgacggagctccggcagcgattctcgggatggtcggaaactgcaaatccacaaaaggaatatctattgcggttgttgacgccaacgccatcattgaaggacgtcagagcttaacaaacttcgccgacaaattcgtaactgtccctgaggttctctctgagattcgtgaccctgcttctcgccgtcgtctcgctttcatccctttcactattgataccatggaaccttctcctgaatctctaagtaaagttatcaaatttgcaagagctactggtgatttgcaatctctgtctgatgttgatctgaagttgattgctttgtcatacacgcttgaggg

SEQ ID NO: 7107 - DNA, 492 bp, Arabidopsis thaliana
  unsure at all n locations
  Clone ID: LIB24-100-Q1-E1-C9
actgncccgacatcccgaatcgncccacgcgtccggctncttcttcntcaanatctctctcttcancaaatcctcagaatatgancaacgacaaggntagcttcnacgtctccgatcttactgctgctcttaaggactaggatcganctggccttgtcaatgctctaaagaacangctgcagaatctggctggtcagcgttctgatgtgctctagaatctgactcccaatgtgagaaagcgcgttgatgccttgagggatatacagagccaanatgatgaactanaggcaaaattccgtgaggagagaactattcttgangccaagtatcaaacgctgtatcangcctttgtatgtcaagcgttatgagattgtgaatggcactactgaatttgaactggctccagacgatgataccaatgtgnaccaangagangagaaaactgcagaaganaaaggagttccaagtttctggctgacagctctgaaaaat

SEQ ID NO: 7108 - DNA, 354 bp, Arabidopsis thaliana
  Clone ID: LIB24-100-Q1-E1-D6
acttcgccccggccggtaccaagtccaaaaattcccgggtcgacccacgcgtccggtgacccgtgtggggacaataagttggtggaacactggctcggcccacgggtcggatctgttgtggcattgttccgggctgcccagtccaagctgagagtgatccgtgtgtgttaagcgaaggcttggctcaggcggttcttgcagtggagggcaatgcgtgaggctggtttcacagagcaagcgatcacctcccgctctcagcagtggacggatcacagctcgacgccactcagattcaccatggcctgctggctcgttcccagctggaccaccaatttttgaaaaaaaaaaaaaaag

SEQ ID NO: 7109 - DNA, 416 bp, Arabidopsis thaliana
  unsure at all n locations
  Clone ID: LIB24-100-Q1-E1-E1
cgatctagtagtcacgcgactccgccgtcgattacatggcttctnnnnnnnnnnnnnnnnnnnnnnnnnnnnnnnnnnnnnnnnnnnnnnnnnnnnnnnnnnnnnnnnnnttcgccacgtcaccaaactgctgcaacaaatccaaccacccttctccgccgccagcggaggataatcttctccatctcgtcgctacttacctccaaaatcatcaacaagaaactcaatgctcctgcgagacttcttgtcaaaacttcaatgttattagaagtcagaaccgtgttttgcgtcagcataagaatgttccacgagaatacgaccaagttgttctgtcttgtcttctccgcaaaatcgatgatcttgaatcttcactcaacaagttttcatcnttccatgacaaaagtccaaattgaaac

SEQ ID NO: 7110 - DNA, 477 bp, Arabidopsis thaliana
  unsure at all n locations
  Clone ID: LIB24-100-Q1-E1-G1
aacttttacgctgccccgtgccggtccanaaattaacgggtcnacccacgcgtccgntcacaaatcgtgtcatcactttgtgggtatangccccctgaattgttacttggtgcaactaaatatggaccagcgattgacatgtggtcagttggatgcatatttgctgaacttttgaatggaaaaccaatcttgcctgggaaaactgagaatgaacaattgaataagatttatgagctttgtggatcacctgatgaaagcaactggcctggagtttccaagatgccttggtataaccaaatgaaatcatctcggcccttaaagagacgcgtaagggagatctacagacactttgatcgccatgcccttgaactacttgagaaaatgttggtacttgacccatctcaagagaatatgcgcaaaggatgctcttgatgctgagtacttttggactgattcgctgccangtgattcaaagag

SEQ ID NO: 7111 - DNA, 495 bp, Arabidopsis thaliana
  unsure at all n locations
  Clone ID: LIB24-099-Q1-E1-D7
tcccgcactagggtccganattcccgggtngncccacgcgtccgttcatcttcttctcctctgcttttggaatcattatagtgataagaggagatggcggatataacagaatatctagagagatcgatgcagaattgttcacttattgatcggagaagtagtatgggagatggatttggtatgagcgatgaacatatcccgatctcagatagattcttggagctcagttctcacttctctgttccttctcatttggaacagtgtcttgatcttaagacaggagagatttactacagaagctggaatagtggaatgagagtgaaagaagatccgagaaaatcgatgagtcgtggtaactatgcagaccaatccaagtggtgaatcgtctggaacagttttttcatcagaagaagttagctcggtattatgaaagcgaagagtcctcatcagagtcgtcnccttcatcangaaagtatcacaaagaggaacaggaca

SEQ ID NO: 7112 - DNA, 485 bp, Arabidopsis thaliana
  unsure at all n locations
  Clone ID: LIB24-097-Q1-E1-G5
cngctttcgcctggccgtaacggtccggaattcccgggtcgacccacgcgtccgaagaagatgacgtgcttctcttctgctactcctcatcgccatcatcttctactttcttctccatctacttccaaatccctgcttcgatttccctcatcttatctgaaacctagccccagtcttctcttccatggctcatctcgctctctcctctcctgttcagacggcagcaacaaccgtcctcctccctccggtgacaccgtcccaaataacttctgtatcattgagggatcagagacagttcaagactttgtgcagatgcagcttcaggaaatccaagataacataaggagtagacgcaataagatatttctcctcatggaggaagtgaggaagttacgtgtgcaacaacgtatcaagagtgttaaagccatcaatgaggacagtnagctcnaaggtaccgagatgcctgagattacatcctccaantc

SEQ ID NO: 7113 - DNA, 398 bp, Arabidopsis thaliana
  Clone ID: LIB24-097-Q1-E1-G8
tgaaaaccacagttcagaaaacggaggatgaggattatgtagaagggagcgaaacaggatatcccgaggcatctggtaatccggttgatggtgcagcttccccgtcagctaccacaggctatgtcacaaagctagctgctgccccagctcctgtacccgatctgctaggtgacctaatggggtcagataatgctgcaatcgtccctgtagatgaacccacaactccgtcaggtcgtccactgcctgttgtcctaccagcatcaaagggtcaaggtctgcagattagcgctcaattaacccgacaagatggtcaagtattctacagtatgctcctcgagaacaactcgcagtcacttcttgatggcttcatgattcagttcaacaaaaactcattcggc

SEQ ID NO: 7114 - DNA, 506 bp, Arabidopsis thaliana
  unsure at all n locations
  Clone ID: LIB24-097-Q1-E1-G9
ccactgttttgcctggtcctancggtccgganantcccgggtngncccacgcgtccgctcaaattttgaaactaatcatctctctccttttttcaaacatacacagagaatgggtgggattcgaaaacccctgcgaaaaccaaattgttagattcgtcttcgatttctaatgtcagagtcgtccttagggttcgtccttttcttccccgggagatttcggacgagagttgtgacgggagatcgtgcgtttccgtaatcggcggcgatggaggagataccagcgaagtggcggtttacctcaaagatccagatagctgtcgtaacgaaagctatcagctgggatgcgttttacgggagagaggatgataatgtgaagcatatattcgatagagaagtaagccctttgattcctgggatctttcatggtttcaatgctactgtgcttgcttatgggagccaccggaagcggaaagacttttacgatgcanggaatcgatgagctacca

SEQ ID NO: 7115 - DNA, 476 bp, Arabidopsis thaliana
  unsure at all n locations
  Clone ID: LIB24-097-Q1-E1-H12
cagggtcggatantcccgggtggccccacgcgtccgncaagatatagcaggaaaggccctctctttgttcaagggagtacttgattacacagaattcaatgatgtggacatggtcactagaggcagtgattgaaaacattcaattgaaacaagacatattcaaagaaatcgaaaaggtttgttcaccccactgcattttggcgagtaatacatctactatcgacctcgatgtnattggtganaagactaactcaaaagatcgcattgttggcgcacatttcttcagtcnggcccatctgatgccccttctcgagattgttcgttcaaagaatacttctgctcaggtgattctgggatctcatggcggttggaaaggccataaagaaagttcccgtggtggttgggaactgcataggctttgcagtgaatanganattctttccttaagtcacaagctgcacatatgttggncaatc

SEQ ID NO: 7116 - DNA, 494 bp, Arabidopsis thaliana
  Clone ID: LIB24-097-Q1-E1-H7
ggaaactgctttcgcctggccctaacggtccggaaattcccgggtcgacccacgcgtccgcggacgcgtgggcggacgcgtgggcggacgcgtgggcggacgcgtgggcggacgcgtgggaaagtttatgtcaatctagcttacaacaacttgagtggaccaatcccacaaaccggtgctttggtgaacagaggaccaactgcattcttggggaatccaagactctgtggccctccattgaaggatccttgtttgccagatacggatagttcttcaacttctcacccttttgtaccggataacaacgagcaaggtggaggagggtcaaagaaaggagaaggtttaagtaaaactgctattgttgcaattgtggtttgtgatttcattggaatctgcattgtgggatttctcttctcttgttgttacttgaagatttgtgcacgtcgtaatagtgtggatgaggaaggctatgtgttggagaaagaagggaaaga

SEQ ID NO: 7117 - DNA, 452 bp, Arabidopsis thaliana
  unsure at all n locations
  Clone ID: LIB24-097-Q1-E1-H8
ggtngacccacgcgtccgcganttcccgtttcgtgaatttctctctctctgtgtgaacaaagacgaagaagacgaagtaacactgatagaaaccctagttttttttttaaatccgtcgaggcgtaatgtcgtcggagctgcagatttcgccggcgattcacgacccgcaaggtcaagagaagcagcagcaagccgccggagtcgggattttgcttcagatcatgatgcttgtcctctcttttgtactcggtcatgtccttcgccgtcataagttctattatctacctgaagctagtgcttctcttctaattgggctgatcgttggtggtttaacgaacatctcgaacacggagactagcataaggacatggntcaatttccacgatgaagttcttcnttctgtttccgctgcctcccatcatattccagtcaggnttcagtttacaacctaa

SEQ ID NO: 7118 - DNA, 447 bp, Arabidopsis thaliana
  unsure at all n locations
  Clone ID: LIB24-099-Q1-E1-A1
acgcgtccgcganagaagatttgggtatgaccatggtggaggatatgaccgtgaaatgggtgggaggcctggttatggtgatgaaaggcctcatggtcgctttatgggtcgctatcaggactgggagggaggacgtggaggttatggtgatgcttccaacagtggaaatcctcaaagggatggattgatgtcatacaaacaatttatccaggagttggaagatgatatattgccatctgaagctgaacgcagatatcaagaatacaagtcagagtatatcacaacacaaaaactgccttttttaacacccacaaagangaagactggttgaaaaataagtncatccaacaaacttactatcctgtcatagaaaggaggaatgaaccttgcacaagaanggtggcaaaaggatttccttaacttganttacaaaagccgggaacacta

SEQ ID NO: 7119 - DNA, 508 bp, Arabidopsis thaliana
  unsure at all n locations
  Clone ID: LIB24-099-Q1-E1-A5
ctgtcttgcctggcnctagcggtccgantattcccgggtggccccacgcgtccgctnatctcctaatctgtacggttcttatttcgaaagggtaaaaaccaaaagcgacgcaaagggcaaaatcggaaaaagtgttttatttatggccgccgttagtagttcgtcggagaccggagactgcggcgttacgggaaagagagatgagatcatgttgttcggagttagagtcgtggttgatccgatgagaaagtgtgtgagtttgaacaatctctctgattatgaaaagtcttctccggatgatgagatccctaagatagtcaccgccggangctggagatgggtgaanatnanaacnanacgggatgcgacggtgatttgtcgctnacggttacacctccgccaatgacgcngtcanatttcgncgtcnccnggcnggaaggaaaccnnggggttnccatggacttagaacgaaccataacaanggtccttgagtgggtttgccccnaac

SEQ ID NO: 7120 - DNA, 463 bp, Arabidopsis thaliana
  unsure at all n locations
  Clone ID: LIB24-099-Q1-E1-B12
tcccgggtcgacacacgcgtccggttntttttgttttgtaaatttggcaaaaactccctccaaaaaaaaacttagttgactgagaaaactaagcaaaaagatctccgatcggaatcttcntattcgccatggatgctctttctcaggcgatcagttccgggatctccgttccttacaagaacaattcttcttctctcgttccttctcacggactcacctccttaatcctccggaaatcgagatctccggtgaatccctcatcacgatctcgcgtctcggtgcgagcttcggagattcaacacagcaaaacctcagcttcatcgatcgatctcancgatccagattggaaattacantatgagaaagatttcgagcaacgattcagcatacctcagaanactgatgtcttacctgatgctgaaagccattcgtncancgttntgtcttaagnagaggtccccga

SEQ ID NO: 7121 - DNA, 508 bp, Arabidopsis thaliana
  unsure at all n locations
  Clone ID: LIB24-099-Q1-E1-C2
aacgtctgcctgncctaccggtccggaaatcccgggtcgacccacgcgtccgcccangcgtccgaagcaatccaaccgaaccgactcagagcttttgagtcttctaaatctctatcgaatttttctagggttagggctcctgatcgatttcgcgagctctgcgattattttaagtattaggatccgaaattagaaatgggtggagagggagattcaagtcagccgcagagtggtgaaggagaagctgtggctgtgaacatcaggtgctctaatggcacgaaatttagtgtgaagacgagtctcgattcaacggtggagtctttcaaagagttggtggctcagagcagcgatgttccagctaatcagcagcgcttgatttacaagggtcgtatcctcaaggacgattaaaactctcctcaagctaaggtttgcaaggctgattacaccattcatatggttanaaggctctgcaaccttcctcaacaccactcctgctcccggccgcaaa

SEQ ID NO: 7122 - DNA, 498 bp, Arabidopsis thaliana
  unsure at all n locations
  Clone ID: LIB24-099-Q1-E1-D10
taccnttccggaaaccccgggtcgacacacgcgtccggcgcaagcaatggtggatgcagctataaaggctgcatcatctgtgaaggaaggggaanatntgaacacaatgatccaagaagccttagagttggttggcaaaaatcagctattacgcagctctatggtcaaacatcacgagcatgtaaatggcagtatagagcatcatcacaacccatctccntcaaatggatnagagcctgtggcnaacaacgatttaaactcacaagatggttcagagaaaaacgctcaaatgccttcanagcttatcanctcctgtgttgccacttggcncatgattcagatgtgcacggagagacagtanctccagctgatgtcgcacaagcttaanncacgcagcantcacaagcttncagccacgattcccacangnanctanccgatttacagagaaantccaaaaccttcatggggacggnttaaagactcaaaacaangtcc

SEQ ID NO: 7123 - DNA, 489 bp, Arabidopsis thaliana
  unsure at all n locations
  Clone ID: LIB24-099-Q1-E1-D3
tgcctggcgactagcggtccgatnatcccgggtggccccacgcgtccgataaactctcttcttcttcttcctctcaagtatcgaaaccgaaacagagaaacatcaccaccaatgggatgttttatgggttgtttcggtctctcttccaacaaaaaacgcagaaattccattaggaagatccttcctcgagatcaaagaatctgtagctatgagccgctgctttcttcagatccgacagatttcagtactgtttcagataaccctgaaaagatctcaaattcgaacctcnnnnnnnnnnnnnnnnnnnnnnnnnnnnnnnnnnnnnnnnnnnnnnnnnnnnnnnnnnnnnnnnnnntttgacttgaatgtacaaacctatgancctattgtancttcangatatgagaatgcttngcagtgatgatgnaagaggggaaagggaggaaggagccaggggatcttcggntatagatagngaaaccagaggga

SEQ ID NO: 7124 - DNA, 500 bp, Arabidopsis thaliana
  unsure at all n locations
  Clone ID: LIB24-099-Q1-E1-D6
ttnccggccacgtacggtccgangatcccgggtngacccacgcgtccgcggacgcgtgggcggacgcgtgggctttctctctccatgagaactctaatctctcaccggcaatgtgtgacgtcaccgtttcttatctccgccgcatctccaccgtttcctggccggtgctttaagttatcctcctttactcctccacgtcataggcgtttttcttctctctcgatcagaaacatttcgcatgaatccgccgatcagacttcttcttctaggccgcgaactctttatcctggtggttacaagcgtcccgaactcgccgttcccggtttacttctccggctagangccgacgaggttatgagcgggaatcgtgaagagactcttgatttggtcgaccgtgctttagctaaatcggttcaanatcgtcgtgattgaanggcggaaccaccgctggtaagctctacgaagcggcntgtttgctnaaaatcacgttgtcanaaggc

SEQ ID NO: 7125 - DNA, 487 bp, Arabidopsis thaliana
  unsure at all n locations
  Clone ID: LIB24-097-Q1-E1-G12
ccgtagcggtccggaaattcccgggtcgncccacgcgtccgtacaacttggccaatcaggctattgacagagcagctggagtggatggctcagacggttacttacactctcatcaaacatcgcttgggagatcttttctaccgcttagtgtttcagaantttgaagatccagctgagggagaagatacacttgtagccaaattcaagaaactgtaataatgatctgacttctggagaacgcgccttggaagatggnactcgagaagcaagcagttttcagaaatcggaagtattcgagcatcgagcatcatcacagtggggtaatgatgagtccatgaatccaggttttgagcccgaaagaaataagtggttgttgtgatatatgttctcgcttcctctcttcatgatttcatttatttgttggtgtacagacaaaaggaatattaactcttacgacaaggttcaaaaaggttaaatattctcacaa

SEQ ID NO: 7126 - DNA, 474 bp, Arabidopsis thaliana
  unsure at all n locations
  Clone ID: LIB24-096-Q1-E1-A2
aactgtttacgcctgcccggtaccggtccganaattcccgggncgacccacgcgtccgcttttaagagctaagagccaagaagcttggtttgggaactgcatatattcatggtttgaagcatgctacgggtgatttcgtcgtgatcatggatgctgatctttcacatcatccaaaatacttaccaagtttcatcaagaaacaactagagacaaatgcaagtatagtaactggtacacgatatgtaaaaggtggtggtgtacacgggtggaatcttatgcggaaactcactagtagaggagcaaatgtgctagctcaaacacttttatggcctggtgtatctgatttaacaggatcattccggctatacaagaaatcggcgcttgaagacctgattagctcatgtgtgagtaaanggtatgtctttcaaatgggaaatgattgttcgtgcaaccagaaaaggataccatattnga

SEQ ID NO: 7127 - DNA, 465 bp, Arabidopsis thaliana
  unsure at all n locations
  Clone ID: LIB24-096-Q1-E1-A5
ccntttcgccgccaagtaccggtcgaanaattcccgggtcgaancacgcgtccgcatttcaatcgcatttctagggtttctttctctacgattcaatagattcggacgaattgggggattctgaccagagagaagctatggaggaaaacgaagaggaagaagaattgcggccaacggcgctatacacggtcggtggttcagacgaatttacctttgtttctcccgatgggctctccggtcaatacacgggccctgatcacgacggcgtanttcttcagactgaaaatccggcgccgactaactgtcttgcttactacttcgaggttcatatcatgaatgctggtgaaaaaggagagatcgcgattggtttctccaaggaacacatctataancaaangatatactgtcagaagctgtgcctacattggtaacagtggactcatatgctctcaaaatggagatggt

SEQ ID NO: 7128 - DNA, 400 bp, Arabidopsis thaliana
  Clone ID: LIB24-096-Q1-E1-A6
gtctcttttcttctctccgagtagcttaagctttcgtcgtcgagctctttcccgcttctggcgatgttcatcctcagagttcattccgttgactccgagagaccaatctccgttgaagaagaagaatcaggtttcacttacgcatcgaaaagagctcagcctcctcttaaactcatacaaccatctctcaaactcaccgaccgcaaaggcttgatccatctctatcgcaaatcttcacatagctctctgcctaaccctagctcccgatccaccactctcttcatcgtcgctgttcccaattatctctcctctctcgattttatccgtttctgtgattcccgcatctcccaagtctccgacatcctcttcatcaggaacgatggaatggaagatagatata

SEQ ID NO: 7129 - DNA, 394 bp, Arabidopsis thaliana
  unsure at all n locations
  Clone ID: LIB24-096-Q1-E1-A9
attccngggtcgacacacgcgtccgaccacgcgtccgcacatacaagactctcctcacagaacgatttagatttaatcgggaaaaagttcagtcagtgacactaatgttcgaatcgaacatggttcttcaaacactatcttcttcttctcctccaattcaccgtctctatcttcaccattctcagattctcccttcttctgggtcacccagcaagatttctcttcaggcagatacatggaaggactttggccattcgatcttttcatgaaatttctgcnagaggtttaccggntttgaacaaagcttccttgaagaagctaccaatcaaaggatctacctttctgctggggcaaancttgttgatggtttctgctcacccacagttggnagcaa

SEQ ID NO: 7130 - DNA, 470 bp, Arabidopsis thaliana
  unsure at all n locations
  Clone ID: LIB24-096-Q1-E1-B4
cttttacgccgnccttaccgggccnnaattcccgggncgacccacgcgtccgntctttcttccncttctctcattgaaatcgaacgaggatggggaagaagaaatcgaaggtaacggagccggaatctcaaaacgatgaatctcagacaatcttctccactctcttctccggcgaggttgaaagctctggctttgcgagtctcttctccgctgataaccctttccggcgaaaacaacctcaagaaatcaaagagtcgtcaattcctnnnnnnnnnnnnnnnnnnnnnnnnnnnnnnnnnnnnnnnnnnnnnnnnnnnnnnnnnnnnnnnnnnnnnnnnnnnnnnnnnnnnnnnnnnnnnnnnnngcttacagattccggcgacgaagaaagagacgatttcggaggctgtagaagaaagtgggttggtttcaaagaggaacaagaggaaagagagatgagattgagaacg

SEQ ID NO: 7131 - DNA, 403 bp, Arabidopsis thaliana
  Clone ID: LIB24-096-Q1-E1-B8
gcttgtcatcaaatcgattcctcgagtgaggaaacatttctcttttcgtggatcttacgagaccgagaagagagtaagatatgtccggcgcatcgtctgaggatagcagtattttcgctcgctgtgaagacgtagactgtaacaagaaaatacctgtagagcttgtaaggatgcacatttgttatgctatgttccataggactctggcagctcgaggttttgggacacaaactcaggctaagaagaaacctacaaacaagaagaagtcaacaacatctcttaccgattttgctgtcttcatgaatcatttccgtaaatcttttagaacagattataatggtgcattggtgaaagaaggttcaaagatcggttgggaaatgtggaagtctatgactgaggatga

SEQ ID NO: 7132 - DNA, 437 bp, Arabidopsis thaliana
  unsure at all n locations
  Clone ID: LIB24-096-Q1-E1-C10
taccggtcatnaaattcccgggncganncacgcgtccanttaaaccttatctcttcaccaccangcttctcaaagctttagcctcgagagcaaaattctctcaagctttagccatgtctgcctctgcttcttccctctcngctttcaggcctaaatcgcttcctctctgcgtctccagacncgcttccgtctccgtcttacctccttcnctctccttcaaacttcantccgaccacctcgtctctatcttcgcttcntccgccctcaaatgctcatcccccgccgagtacccgtcgcgtttcgttagaaacgttgctgtatcttcggattttgaggtggaggaagatgatangttcgctgacngngacgattcagcgcctgtggagcgtnantccttctctcctggagcttaagctctttgttggggaccnttccgt

SEQ ID NO: 7133 - DNA, 471 bp, Arabidopsis thaliana
  unsure at all n locations
  Clone ID: LIB24-096-Q1-E1-C4
aacttttacgccgnccgttaccggtgccanaattcccgggacgacccacgcgtccgnttgaaaagagaagaagaagattgcttcaatgagctgggtgtagtgtcaaattgtgatgctactgaatctgtaagcacggaaatattggaatctatgaacattggttgtagtcaaggtcttaaagattctggaaacataagaccacagaacaacattctaggatgttgtagtaatgctgtagagaattttaatagagtcggagaaactgaaaggagtgatgatcttgaacatctcacactgaaggagcggcgcaaaatgcttcttgaaagggttgctataaggttgcctgaatctaacgtagaggataatactgaagattgcgatgaaactgaactttataaaataaaagcggagatttcatgcgaaaatgggatagcttcgtcttctggagtccaattcagcggctttctanag

SEQ ID NO: 7134 - DNA, 439 bp, Arabidopsis thaliana
  unsure at all n locations
  Clone ID: LIB24-096-Q1-E1-C7
accggtcanaaattcccgggncgacccacgcgtccnccattttcttcctctctgttccggcgacgcttctcctcgccgttccaatcctctccggcatagaaactcggtgtctccttcatcttcctttcccttctgttcgacttcttccttttcttctttctacattcctatggcgggaggagatggtcaggtgtctcattcgcttgagaagcagttcgagagtttccgtgttcaattggaagaatctgcagctttgagagagcagattcgtgctgtggttatggagattgagtctgctactaggcttattcaagctaatcttcttctcgttcatcaatcgcgtcctattcctgaggttatcganaaagctaaggaaaaaatcgttgatttgaagcagtattatggtcggcttgctgaaattcttgaggaagtgtcctgg

SEQ ID NO: 7135 - DNA, 411 bp, Arabidopsis thaliana
  Clone ID: LIB24-096-Q1-E1-C9
acgcgtccggaagatcgtgacattggtactcgtcgtcttcgtcatactttcgacatcattcccggctgccatcaaagccgaagacacgggagatacaggaaatgtgggagtgacatgtgacgcaaggcagcttcagccttgccttgccgcgattacgggaggaggacaaccctcaggtgcatgttgtgcaaagcttacagagcaacagtcatgcctctgtggtttcgctaagaaccctgcgttcgcacagtacattagctctccaaacgctcgcaaagtgctccttgcttgcaatgttgcttatcccacttgttgaaacttatctagagattttataaataaataaacgaaaggaaataaattacattatatcaaacgttatgatacaattcaaccgtttgggttaatgta

SEQ ID NO: 7136 - DNA, 454 bp, Arabidopsis thaliana
  unsure at all n locations
  Clone ID: LIB24-096-Q1-E1-D12
ccctttacgccgnccaagtaccggtcanaaattcccggggtcganccacgcgtccacaaatcctcagaagatgagcaacgacaaggatagcttcaacgtctccgatcttactgctgctcttaaggacgaggatcgagctggccttgtcaatgctctaaagaacaagctgcagaatctggctggtcagcgttctgatgtgctcgagaatctgactcccaatgtgagaaancgcgttgatgccttgagggatatacagagccaacatgatgaactagaggcaaaattccgtgaggagagagctattcttgaagccaagtatcaaacgctgtatcagccnttgtatgtcaagcgttatgagattgtgaatggcactactgaagttgaactgggctccagaggatgatancaacggtnggaccnaaggagaagangnaaaactgtngaagcagaaaag

SEQ ID NO: 7137 - DNA, 406 bp, Arabidopsis thaliana
  unsure at all n locations
  Clone ID: LIB24-096-Q1-E1-D6
acagctgaaattccccagatcattaagtggctatcgaaaatggttgatgatggtgacaacagaaacctacctttctatagagctaaaactccagaacttgttccagaaagcgctgaaccgatgagatcaggagtcccaaagaccgtaaaagcaactcagaaattgttgagcttatggaacagaatcaaagactacctagctgatccaagaatggggcctacattgcttctaggagcgttgttatctgcaggcaatgtttggtggatgagaagccgatcatcaacacaacaacctgctcagacaaatcagccatcaccaaatcaaccaagccgataacgtnnnnnnnnnnnnnnnnnnnnnnnnnnnnnnnnnnnnnnnnnnnnnnnnnnnnnnnnnnnnnnnnntt

SEQ ID NO: 7138 - DNA, 418 bp, Arabidopsis thaliana
  Clone ID: LIB24-096-Q1-E1-D8
acgcgtccgattctccaaagattaagatcactgaactggtatggttacgagagtttatgtttgccttcaacttttaatccggagtttctggtcgaacttgatatgcgttccagcaatcttcggaagctatgggaaggaactaaacaacttagaaatctcaagtggatggatttgagttattctagttatctgaaagagcttcccaatctttcaactgcaactaatctcgaagaattaaagcttagaaattgctcaagtttagtggagctcccctcctctattgaaaaactcacgagtctccaaatattaagatcttgaaaattgttcgagtcttgagaagctccccgctatcgagaatgcgactaagctccgtgaattgaagctccaaaattgctcaagtctaatagagctccctctt

SEQ ID NO: 7139 - DNA, 449 bp, Arabidopsis thaliana
  unsure at all n locations
  Clone ID: LIB24-096-Q1-E1-E1
ggtaccggnccaaaaattcccgggncgacccacgcgtccggacgaagcaaatccaaaccaaagttctccattttcgtagcttctttaagctttttcagtatcatagagacacttttttttttttgattagaaatggctttagctgttacntcttcttcaactgcaatctctggatcgagtttctctcgttctggagcttcttctgaatctaaagctcttcaaatatgttcgattaggttatctgatcgaacccatttgtctcagagacgttactctatgaaacctttaaacgctgagtcacattcacgaagcgaatcttgggttactcgtgcttcaactctaattgctcctgaagttgaagagaaaggaggagaagttgaagactttgagcaacttgctaaaaagcttgaagatgcttctccacttganatcatggataaagctcttga

SEQ ID NO: 7140 - DNA, 451 bp, Arabidopsis thaliana
  unsure at all n locations
  Clone ID: LIB24-096-Q1-E1-A11
tacgccggncctttacgccgccaaataccggtcaaaccattcccgggtcgacacacgcgtccgaaaaaaagtcaaaaaagtttcgaaaatccaaaaaaagataatggcgcaggttcaacttcagggtcagactccgaatggttcgaccgcggcggtcacttctgctccggcgacgtcaggtggagcaacggcgacccagtttggtaacacgtcgctttatgtgggggatctcgatttcaatgtgacggactcgcagcttttcgatgcgtttggccaaatgggtactgtggtcaccgttcgtgtctgtagggatttggtcactcgccgatctcttggctatggatacgttaacttcaccaatccccaanacgctgcaagagcgatccaagaactgaattacatacctctttatggaaaacctattagggttatgtantctcatcgtgattct

SEQ ID NO: 7141 - DNA, 467 bp, Arabidopsis thaliana
  unsure at all n locations
  Clone ID: LIB24-095-Q1-E1-E9
aactgttaccctgccgttaccggnccagaattcccggancgacccacgcgtccgcaagttaagtacgacggtttctgaaataaagaaaacatttcttcaatcttgtgcttacggtgatatccgtggattcaaatcgatattgagaagatggtagatgcgatcacggagttcgttgtgggaaagatcggcaactatctcattgaagaagcatcaatgtttatggcagtcaaagaggatctagaagagctgaagacggagttgacgtgcatccatggttatctcaaggacgttgaagcgcgagaaagagaagatgaggtctcaaaagagtggtcaaaactggttttagatttcgcttatgacgtcgaagatgttttggacacttatcacttgaaactcgaaagaaangtcacaaaggcgangcttgaggagattgaccaacangatangcaaggaanattggatgcctt

SEQ ID NO: 7142 - DNA, 468 bp, Arabidopsis thaliana
  unsure at all n locations
  Clone ID: LIB24-095-Q1-E1-F10
naactgtttacgccgccgtttaccggnccanaattcccggancgacccacgcgtccgcgatattatccnnnnnnnnnnnnnnnnnnnnnnnnnnnnnnnnnnnnnnnnnngattctgagtttagggttttgtttgtgttgcttcgaattgagcagctatggcttccgtgttgctacttcttctggtgttcgtgtttgatctcattgcttttggtcttgctgttgctgcagagcaacgangaaccacctggcanatttcnagagaatcaagagatttgagctactgtgtgtatgacaaggacatagcaacgggtctcggagtcggttctttcttggtcttattagcgagtcagctcttaataatggtggcgaaccgatgtttatgcngtggaanagcattgacaccaanttggttcaaaatcttggggcantttttcccttcaacaanaactggggttttcctcctcaa

SEQ ID NO: 7143 - DNA, 475 bp, Arabidopsis thaliana
  unsure at all n locations
  Clone ID: LIB24-095-Q1-E1-F2
acgcgtccgcgatattatccnnnnnnnnnnnnnnnnnnnnnnnnnnnnnnnnnnnnnnnnngattctgagtttagggttttgtttgtgttgcttcgaattgagcagctatggcttccgtgttgctacttcttctggtgttcgtgtttgatctcattgcttttggtcttgctgttgctgcagagcaacgaagaaccacctggcaaatttctagagaatcaagagatttgagctactgtgtgtatgacaaggacatagcaacgggtctcggagtcggttctttcttggtcttattagcgagtcagctcttaataatggtggcgagccgatgtttatgctgtggaagagcattgacaccaagtggttcaagatcttgggcaatttttctcttcatcaacaactggggttttcctcctcataacacaagtgtgtttacntgctggctctgtncgaaacgcttaacaatacaaagtaccg

SEQ ID NO: 7144 - DNA, 120 bp, Arabidopsis thaliana
  Clone ID: LIB24-095-Q1-E1-F4
acgcgtccgaacttctcttatattatttatttcaagagttaaaaacatcaaatatccattgtgtcctctcttgttttttactatcttcaagagttggtactaaaaaaaaaaaaaaaaagg

SEQ ID NO: 7145 - DNA, 487 bp, Arabidopsis thaliana
  unsure at all n locations
  Clone ID: LIB24-095-Q1-E1-G1
acgcgtccgctaaggttttgttactgattgagaaaacatgggaggtgacaatgataatgacaaagacaaagggtttcatgggtatcctcccgctggatacccaccccctggggcttatccacccgctggatacccacaacaaggttaccctccaccacccggtgcttacccgcctgcaggttatcctccgggtgcctacccacctgctcctggtggttatcctcccgcccctggttatggtggttatcctccaactcctggttatggaggttatcctcctgcacctggtcatggtggttaccctcctgctggctatcctgctcatcactcaaggacacgcangaagaattggggggtatgattgcaagtgctgcaactgcctaanggagctcaacacgtngcctcanaactcnaaaggtccctaanggcaatgctgcaaaatgggncaccggtttttggccaatgggcaatgggttaagggcnaagg

SEQ ID NO: 7146 - DNA, 462 bp, Arabidopsis thaliana
  unsure at all n locations
  Clone ID: LIB24-095-Q1-E1-G10
ntgttacgcctgccggtaccggtccagaattcccgggncgacccacgcgtccgcccacgcgtccggcatacaggaagaaatcaaatgagagtcctcatgtgtatgcaattgcagatacagcaattcgcgaaatgatacgcgatgaagttaaccaatctatcattatcagcggcgagagtggagcagggaaaactgagactgctaaaatagctatgcaatacttggctgctcttggaggcggaagcgggatcgaatatgagatacttaagactaatcccattttggaagcatttggaaatgcaaaaacattgagaaatgataattctagtcgttttgggaagctaatagagattcattttaagtgaaagtggaaagatatcgggtgctcaaattcaaacctttttactagaaaagtctagagtggtccaatgtgctgaangggaaaggtcatatcatattttt

SEQ ID NO: 7147 - DNA, 406 bp, Arabidopsis thaliana
  unsure at all n locations
  Clone ID: LIB24-095-Q1-E1-G11
cgaaaagagagagagaaaacaaaacaaaaaatggctacccgaaaagctctgatcaacgttcaccggatcattcgctccaccgccgtggttggccggagctctatcattcctgccgccgctaaccggtcatatcctattatattccggaatggagttgatttgggggcnagattcttctgtgagaacactgcgtctgcccagaatttcgatattgatctctctaacgaagagaataatagaagaacgatcaacagattgttgtataggagcaagcaaagagggtttttggaacttgatcttgttttggggaattgggttgaggagaatgttaattccatgggacgaaaatggtgttaaatccctaattcatgtcctcaatttggaaaaacctgatcctggaaatggg

SEQ ID NO: 7148 - DNA, 477 bp, Arabidopsis thaliana
  unsure at all n locations
  Clone ID: LIB24-095-Q1-E1-G4
acgcgtccggccaaagttccgactttttgcttctcccagaggctaatcatggacgctgtggcggcgaatttgtttcaatctccttccttactgcgtcaaacttccgaaaggttgatattttcgacgcccaactgtcctggcttcatgcgaattagctccggacctcaatttcgtctcagacaaaactcttctcttaaattctcgagaccatttcaaagcggaacaacttgtgttaaatctcggagaagctttgtggttaaagcttcagcttctggtgatgcttcaacagaatcaatcgcgccgcttcagttgaagtctcctgtgggacagtttctgtcacagatattagtgagccatcctcatcttgttccagcaagctgttgaacagcagcttgaacaagctccaaattgatcganacgctgaagaacagagtaaagatgcatcctccgtccntgggaacaaacaatgggtcccca

SEQ ID NO: 7149 - DNA, 432 bp, Arabidopsis thaliana
  unsure at all n locations
  Clone ID: LIB24-095-Q1-E1-G5
tgaaaaattagggtttgagttcttcttctaatcgatcagaaagatgggtggaggaaacgcacagaaatcagccatggctcgtgccaaaaacttggagaaggctaaggctgcaggaaaaggtagccaattggaagctaacaagaaagctatgtcgattcagtgcaaggtttgtatgcaaacattcatctgcacgacatcggaagtgaaatgcaagggagcaacgccganggcgaagcatcccgaaagcccgatgttggcgcttgtttccctcaactcaaagaaagtgatgaaagctattatctcaactataaaggattccaatgtataaccgtatgggttctcatctttcccaagtttggtaacaaaatcccnaacaaattttaagggttccaattccccccaacttgtttcaacaataaatccccttgcaan

SEQ ID NO: 7150 - DNA, 444 bp, Arabidopsis thaliana
  unsure at all n locations
  Clone ID: LIB24-095-Q1-E1-G6
acgcgtccgctatttatcaatagcgatgaattgagacgacctggcacaggtgataaagatgaagatgatgataaagaaaccaaataccgattagatccaaagtatgcaaatgtgaagacacctgaacgtcatgtgaggactcgactttacttcacatctgaatcgcatattcattcgctcatgaacgtccttcgatactgtaaccttgatgaatctctcctaggagaagaaagcctcatttgccaaaacgccttagaacgtctctgtnaaaccaaggnactcgattacatgagttacattgtcctaaaggtctttgagaacaccgaggtatcacttnaaagacccgaaaagatccccattgnacttacatttaaccgtgggagctgaattgtctcccctaaaggganaatgacgaccaagnaggagacantgttaatgggggga

SEQ ID NO: 7151 - DNA, 407 bp, Arabidopsis thaliana
  unsure at all n locations
  Clone ID: LIB24-095-Q1-E1-H11
acaaaaaaatatcttttttttttctnnnnnnnnnnnnnnnnnnnnnnnnnnnnnnnnnnnnnnnngtgtccattttattaggcatgttggtgatctttgtttcaccaatggtgttcgcagatgatttgacaccaatcccagagggcaaaccccaagtggtgcagtggttcaatacccacgttggtccattggctcaacgtaaaggcttagatcctgctctcgtaactgctgaggctgctccacgtatcatcaacgtgaatccaaagggaggtgaattcaaaacactaacagacgcaataaagagcgttcccgcagggaacacaaagcgggtgatcataaagatggctcatggtgaagtacagagagaangtcactatcgacaggaacaaacccttcattacaattgn

SEQ ID NO: 7152 - DNA, 384 bp, Arabidopsis thaliana
  unsure at all n locations
  Clone ID: LIB24-095-Q1-E1-H12
acgcgtccggccagcaggctatgtaacatggatatcatatcacaagtgcaacaaatcatttgctttgcgtttcatgatagtaagcttctcatggagacatgtcaagaagctagaaatctccggaagattgttaccctcttctacctggattgagtgattcagtgtttcccacttcaaaaaactcttctttgtcttcttagtgttttgttcatcttcctcttcggagaaagacaagttccattgtaattaaggaatcgtcgtttacacatgcacaacctattctttggtctttcatttttttaattgctttanangggaatctcctcgatcatttttaatacggtttgtggctaataagtttccgttaaaaaagaaagcgggcgc

SEQ ID NO: 7153 - DNA, 485 bp, Arabidopsis thaliana
  unsure at all n locations
  Clone ID: LIB24-095-Q1-E1-H6
acgcgtccgaaaagaagcaaaatcttgagtagaaacaaattttcctgtatctctctctcttgtaatctccgacgaagaaacacagttttatggcaaccaccagatcgaagagctttcagttgatcaccagcttaaggaaacacctagttaacacacgcgcttccacacgcgccaccgcctctgctctcttcccttcacgtcggagtggacattcctcggcgtatgacaagaacgtggaggatgaattgcatgcaagtgcagtacctgacgaagttataaagccaagattnctgataaatatgggctctcanccccaaaacaggagtcctccggtccctcctaagaactgaacaaaagcggcancggcngaagggtgnaacaacaaggacacaagnattgctggaaggaaaaccggccnggtttggccaaanaagttccccaanggattcgggnaaagactcaccaaaggttgggtcccccnttcc

SEQ ID NO: 7154 - DNA, 246 bp, Arabidopsis thaliana
  Clone ID: LIB24-095-Q1-E1-H7
acgcgtccggggttatgtataattacgtttcagataatctatcttttgggatgttttggttatgaatatacatacatatacatatagtaatgcgtggtttccatataagagtgaaggcatctatatgtttttttttttttattaacctacgtagctgtcttttgtggtctgtatcttgtggttttgcaaaaacctataataaaattagagctgaaatgttaccatttctaaaaaaaaaaaaaaagg

SEQ ID NO: 7155 - DNA, 471 bp, Arabidopsis thaliana
  unsure at all n locations
  Clone ID: LIB24-095-Q1-E1-E3
acgcgtccgctcncttgcaggtgcgcttaantggggtagctacttttattggttcaattggcttancggtggctgctgctgtgctatgtgattcttctgactcgatatttcactggtcacactaaagacaataatggaggtcctcaattcgttaaaggcaagacaaaagtcggtcatgttattgatgatgtggtcaaagtccttaccgtagcggttacaattgtcgtagtggcattgcctganggtcttcctttggctgttactttancccttgcctattcaatgaggaaaatgatggcanataaggctttggtgcngaggctatctgcttgcgangacaatgggctctgccaccactatttgcanccgataaaactggnacacnaactccgaatcagatgactgtgggttgnatcntangctggggggnaaagaaaacagttctgaacnaaatngcaaacaaataacacc

SEQ ID NO: 7156 - DNA, 517 bp, Arabidopsis thaliana
  unsure at all n locations
  Clone ID: LIB24-095-Q1-E1-H8
tggccgtaancggtccggaaattcccgggtcgaccnacgcgtccgcttntnctttnggtttcnnacaacggcncacnntcctacaacacacaggacgcccctcgtattctccgggaagaaacgaaacgatcgcgatgacnangacggtgacgccttggttgcgaagaaatcagcactggcggtgtgtgatgccgaccctgcagcggccatagcgaatatccgacatgagtttggggagcacgggggagtaaacatgtccatcgaagcctccgccaccttcaccgtcatggnaccggataccatgatgcggatgttcaccggagaactgggaccggacaacgacttctacgtatacagccgacacttcaaccccaccgtgctcaacctcaagccgccaaatggctgctctcgaagggaaccaagctgcctactgtacctcctanccgggntgttcggcgataatcgtcaagttgatgctgcaactgtggcaancaagccggagggacaccttngtttg

SEQ ID NO: 7157 - DNA, 459 bp, Arabidopsis thaliana
  unsure at all n locations
  Clone ID: LIB24-095-Q1-E1-B8
taaggtccganatcccgggtcgncccacgcgtccggannacccagatcgcatgatgcttaccttctcggtgttcccttcaccaaaggtttctgatactgtggttgagccttacaacgctactctgtctgtccatcagcttgttgngaatgctgatgagtgcatggttcttgataatgaggccttgtacganatttgcttcaggactctcaanctcantacccccagctttggtgatttgaaccacttgatttctgctactatgtctggtgtgacttgctgtctgaggttccctggtcaactcaactctgacctccgaaagcttgctgtgaatctcatcccattcccccgtcttcacttcttcatggtgggttttgctcctctcacctcaanaggttctcatcagtagcgttccctcacantccctganctcaaccagcaaatgtgggaatccaataaca

SEQ ID NO: 7158 - DNA, 434 bp, Arabidopsis thaliana
  unsure at all n locations
  Clone ID: LIB24-095-Q1-E1-C1
ntaccggcccggaattcccggancgacccacgcgtccgcgaagctggaaggagattctttacgtagtagataggccacaggtggtttcaatcttccccaacaaccagacgaaatcaaacataaatctgtaacagtcgaagaaactctcactctttaattgntcaatggcgtctcttcaaatcagtggctccgttaaattcgngccgttcgttggattcaaccggatncgccatttccgtccgatcgccagtctcggatttcctcgttttcgacggagattcagtatcggacggtcattgttgcttcgtcgttcttcttccttctccggtgactctcgtgagtctgatgaanagagatttatcacagacgcagagagagatggttctggctccgttccttgggtttcannncactcctcccgggtgnttaacaaa

SEQ ID NO: 7159 - DNA, 437 bp, Arabidopsis thaliana
  unsure at all n locations
  Clone ID: LIB24-095-Q1-E1-C12
ttacgccgnccgttaccgggccaaaaattcccggaacgacccacgcgnccgcggacgcgtgngcggacgcgtgggaaaaagtttggatcttttgttcatctattttttctttgagtttttttttctgtgttcatcctctgttctattttttttttcntcncattcttgggttgatttttgacttctgtttgggttgatttagtctgcanggtttaagcagaggttggtttgtggattcttcgatttcttcttcagatttagtctacaatgaagtgagaatttcnaaagatanacaangaaaaacttgagactttagcaagatggagactgtgagaccaatggttgttgctcctaagggtaacaaactcagacgcaagtttgctaaagttcttaacattcataaagctaacgggtgttgctccagaaggngaaaatga

SEQ ID NO: 7160 - DNA, 529 bp, Arabidopsis thaliana
  unsure at all n locations
  Clone ID: LIB24-095-Q1-E1-C2
actgtttccctggctntaccgggcccggaaattcccggaacgacccacgcgtccgggtggaggaggtttnnnnnnnnnnnnnnnnnnnnnnnnnnnnnnnnnnnnnnnnnnnnnnnnnnnnnnnnnnnnnnnnnnnnngtttggaaaaggtggagggatcnnnnnnnnnnnnnnnnnnnnnnnnnnnnnnnnnnnnnnnnnnnnnnnnnnnnnnnnnnnnnnnnnnnnaataggcaaaggtggaggagttggcggcggtatcggtaaaggtggaggtatcggtggcgaaatcgangcaacaanaggaaccagagaccaatgaggcaactgagacgaaatcanatgacttggctggtggtccaaacattgaagccgaacccgtttaagcaacaagaagagaacancaaagggccaactgttaatttcacttccgaagtttcccccttgngtttaaccncttaagttaaaaccagaacaaccgttttacnccantatcaanaattnntttaaattaagcaattttttgnag

SEQ ID NO: 7161 - DNA, 512 bp, Arabidopsis thaliana
  unsure at all n locations
  Clone ID: LIB24-095-Q1-E1-C5
gcctggcccgtaacggtccggaaattcccgggtcgncccacgcgtccgcaagttaagtacgacggtttctgaaataaagaaaacatttcttcaatcttgtgcttacggtgatatccgtggattcaaatcgatattgagaagatggtagatgcgatcacggngttcgttgtgggaaagatcggcaactatctcattgaagaagcatcaatgtttatggcagtcaaagaggatctagaagagctgaagacggagttgacgtgcatccatggttatctcaaggacgttgaagcgcgagaaagagaagatgaggtctcaaaagagtggtcaaaactggttttagatttcgcttatgacgtcgaagatgttttgggacacttatcacttgaaactcgaagaaaggtcacaaaggcgaagcttgaggagattgaccaacaaaataagcaagaagatggatgcgtacaacatanttgatgatatcaagaantctcaaagaagaagaattttnggtatca

SEQ ID NO: 7162 - DNA, 468 bp, Arabidopsis thaliana
  unsure at all n locations
  Clone ID: LIB24-095-Q1-E1-C6
acgcgtccgcccacgcgtccgagccacttttttttcttttgtaattttcctttcttttttttttcttttgaattttcgggaagcagcatttccactggagctgcaaaatcttcctatcaaaattanagatcgatccaagttttagattcgagaattattttctccaaattagatttatatatcaaaaggaatcgaaaatagacagcaatttttgttttgtcggatcgtattgaatcagctgtgaattttagcgccaatttaaccactgaatcgtttgattagaagctaagatttggtcttacgatcgatctaagtagggttcttcttcttaagtgtgtgttttgttaaaattagtaaagagagatggagaagaagaaagtcgcgacccgctagtgtgccatgggcaatcgagacctgttgtgggatttggtccaaaagccaatcaatcccggatgggttcntcctcaa

SEQ ID NO: 7163 - DNA, 407 bp, Arabidopsis thaliana
  Clone ID: LIB24-095-Q1-E1-C9
atacttgtagctagtgcgctcgagagatgcaatgtacaaaccaaaagaaatggggcttctggagaatggggaagtagctaaattattttccttacgggttagtattaattctagtcaacttgtaacagctactggcttctgttactttctgtattaatatcaccttcccatttcttttagcagcatgtgaacacagatatgtcatcacctgatggaggccatgttagggagagagaatcgcatcctgaacatgacaaacgtgctcagctgagcaatcaagctgaagcagttggtgttgggagaatggaacagtctgattcaacaagtccattaccgaataatctgggcagtagaaaggagtttaacgacctctcctcaaaaagttgcaagttttttgggccgtttta

SEQ ID NO: 7164 - DNA, 463 bp, Arabidopsis thaliana
  unsure at all n locations
  Clone ID: LIB24-095-Q1-E1-D10
ngtttacccgccgttaccggnccaaaattcccggancgacccacgcgtccgtgtaaaaccagagaattttctgcttgggcctcctggaactcctgaagagaaaaaacttttccttgtagacctcggcttagcatccaaatggcgagatactgcaactggactacatgttgaatatgaccagcgtcctgatgtttttagaggaacagtacgttatgctagtgtacatgctcatcttggcagaacttgcagtcggagggatgacctgggaatctcttgcttacactcttgttttccttcttcgaggccggcttccatggcaagggtaccagggagagaacaaaggtttccttgtttgcaagaagaagatggccacttccccaaaaactctttgctgcttctgtccccaaccttttcgtcaagtttgtccgagtaagtgggcaatttgaagtttggatgaagganc

SEQ ID NO: 7165 - DNA, 451 bp, Arabidopsis thaliana
  unsure at all n locations
  Clone ID: LIB24-095-Q1-E1-D12
aatttacccgccttaccgggccaaaattcccggaacgacccacgcgtccgcttctctctcactctctcgaagttcatcaatggctcttcatccacaccttcaagactccaagaatttcanagacttttgcggaatcgacggccaagatttcgccggaattaggatttaaccgctcagagaatctccatgatnaatctcagcatcctccatatattcctccatttcatgttgctggttttgcaccgggaccggtggttcaaattgatggttctgatgggggtaatggagctgactttgagtggaactatgggtcttggtcttgaaccaagacntgagaggataaaggaacaagatttcttgggnaaacaattctcaagatatcttctattgattttttgcaagctcgggtctgtatcaaaccgggattgggtctgtctcctgacaatgctcn

SEQ ID NO: 7166 - DNA, 485 bp, Arabidopsis thaliana
  unsure at all n locations
  Clone ID: LIB24-095-Q1-E1-D3
acgcgtccgatcatctctcttcttcttcttcctctcaagtatcgaaaccgaaacagagaaacatcaccaccaatgggatgttttatgggttgtttcggtctctcttccaacaaaaaacgcagaaattccattaggaagatccttcctcgagatcaaagaatctgtagctatgagccgctgctttcttcagatccgacagatttcagtactgtttcagataaccctgaaaagatctcaaattcgaacctcnnnnnnnnnnnnnnnnnnnnnnnnnnnnnnnnnnnnnnnnnnnnnnnnnnnnnnnnnnnnnnnnnntttgacttgaatgtacaaacctatgaacctattgtaccttcaagatatgagaatgcttgcagtgatgatgaaagaaggggaaaaggngggaagaacaaagggattttccgntatagnataagaaaaccanagggtttaagcngttanatttgggtaaccctcaaaacaaa

SEQ ID NO: 7167 - DNA, 509 bp, Arabidopsis thaliana
  unsure at all n locations
  Clone ID: LIB24-095-Q1-E1-D4
taccgggcccggaattcccggaacgacccacgcgtccgcggacgcgtgggattcaggaagagcgtagttctcggagggaagtcaggcgttccaaacattcggaccaacagggaaattcaacaacttggaaggtactgcgtggagcaattcaatcaacaagcacagaacgagcaaggaaacataggatccattgcgaaaacagacacggcaatttcgaatccattgcaatttagccgagtagtgtctgctcagaaacaggtcgtcgctggactcaaatactatctaaggattgaagtcactcaacccaatggctctaccaggatgtttgactctgttgtggttattcaaccatggctccattctaagcagttgctcggtttcactcctgttgtcagtcctgtctactaactttatttcttcctattccgacttaaaatttccataatatgatnaaagaaaagactaaaangtgtntgatacnaagctanttaagaatggggttaaaagtt

SEQ ID NO: 7168 - DNA, 453 bp, Arabidopsis thaliana
  unsure at all n locations
  Clone ID: LIB24-095-Q1-E1-E12
cttttacgccncccgtttaccgggccaanaattcccggaacgacccacgcgnccgtacttagtctncaatgttggtgatgctatttttattagtgacttgaactcgcaggacaaggatccagtaaagtctatacatatcagcaattcaaaccctatgtgccatgcatttcatccagatgctaagggtggncatgatctacttattgggctgaactctggggatgtctacaccgtatcactaagacagcagttgcaggatgttggtaagaagcttgttagtgctcagcattataacaaagatggttctgtaaataacagccgctgtaccagtatagcttgggtgcctgngaggtgatggatcctttgttgctgctcatgccgatggaaatctgtacgtatatgaancngaataatanaangtgcaactggattcctcaattttcccggccnaaa

SEQ ID NO: 7169 - DNA, 473 bp, Arabidopsis thaliana
  unsure at all n locations
  Clone ID: LIB24-095-Q1-E1-E2
acgcgtccgcccacgcgtccgagccacttttttttcttttgtaattttcctttcttttttttttcttttgaattttcgggaagcagcatttccactggagctgcaaaatcttccnatcaaaattatagatcgatccaagttttagattcgagaattattttctccaaattagatttatatatcaaaaggaatcgaaaatagacagcaatttttgttttgtcggatcgtattgaatcagctgtgaattttagcgccaatttaaccactgaatcgtttgattagaagctaagatttggtcttacgatcgatctaagtagggttcttcntcttaagtgtgtgttttgttaaaattagtaaaggagagatggagaagaagaaagtcgcgaccccgctatggggcaanggccatccgaaacctgttggngganttgtccaaaagtccaaacaccccggaggggttccttccnaaaaag

SEQ ID NO: 7170 - DNA, 499 bp, Arabidopsis thaliana
  unsure at all n locations
  Clone ID: LIB24-095-Q1-E1-B7
accggtccgnaaattcccgggtcgncccacgcgtccggtcnttcggaactctgcaacgagagttagggtttatacagagcaaagagaaggagaaagcgaaaccaaaaatcgacattaatggctgacgaagattacaacgacgtcgatgacttgggatatgaggatgagccagcagagcctgagattgaagaaggagtagaggaagatgttgaaatgaaggagaatgatgatgtcaatggtgagcctattgaagctgaagataaagtcgaaacagaacctgtgcaacgtccacgcaaaacgtcaaagtttatgaccaagtatgagcgtgctcgtatcctcggcactcgcgctttgcagattagcatgaatgctcctgtcatggttgagctagagggtgagactgatccacttgagattgcgatgaaggagcttaagcagcggaagataccattcactattaaacgctanccaactgatggggaatttccaagnatgggga

SEQ ID NO: 7171 - DNA, 479 bp, Arabidopsis thaliana
  unsure at all n locations
  Clone ID: LIB24-093-Q1-E1-F1
aactgttacgcctgccntaccggtccaaaattcccggnnccgacccacgcgtccggttacaatttatttcttagctttttaagttttatagcttatcctgtgaaagttttatagtaagttgctgaaattggtaattagttgagaggcaataacattgttggttaggcgtactgactaatttctagttttgccagaaatgaatgtcttctggtttctggtattcatcatgtgaattctgtaatcaattcgagtctctggacattttgttaaacaaaatcaaaacaagacattaattttgacctttggagacattaatctttgggtttgttttccaccggatgcagctttatgtacatgtggaaatctatgcatcaataccatgagactcagaacagcatcgtggagcaagtccgggggctcattaacagatcgggcaaaaggcgaatcaacatctgaagctacaccgacaaagctacacg

SEQ ID NO: 7172 - DNA, 418 bp, Arabidopsis thaliana
  Clone ID: LIB24-093-Q1-E1-F10
gctacggtgactccgattctctaccgagccacgagtcttacactgtgagtcacctaagtcgctgatgtcatcggtttactcgatcactacggcactactcaggcttttgtggctgggcatgactggggagcaatcataggttggtgtctatgcttgtttagaccaagaccgagtcaaaggtttcataagtctctctgttccatatttcccaagagatccaaaactcaaaccttcagattttttcaaaatttttggagatggtttatacatcactcagtttcagaaacccggaagagctgaggctgcatttgccaagcatgattgtttatcggtaatgaagaagttcttgctaataacaagaacagactacttagtggctcctcctgacacagagatcatagatcatcttgagataccg

SEQ ID NO: 7173 - DNA, 415 bp, Arabidopsis thaliana
  Clone ID: LIB24-093-Q1-E1-F6
acgcgtccggttttcatgtaacatccatgaccaccgctgggagtcgttggggtgtagtaatgtccaggaactcaggctactctgaacaggtggtggagcttgacttcttgtacccaagtgaaggaatacatcgaaggtgggaaagtggatacaggataacatcaatggctgcaacagctgatcaagcagctcttatattgagtatacctaaacgaaaaataaccgatgaaacccaagagactctccggacttctgccttcccaagtacccatgtcaaggagaaatgggcgaaaaatctgtacattgcatcaatatgctatggtcggacagtttgctgatgaaacatggagtatactgtttcaacctctctcactctctctctagggttttagggacgatctctctctagaagcct

SEQ ID NO: 7174 - DNA, 418 bp, Arabidopsis thaliana
  Clone ID: LIB24-093-Q1-E1-F8
ggagctagtgagaagaatgctcttcaggctctcaaagccagtgattggcaccttgaagcagcgtttgatgtgttttacagccagcctcaaccaagaagcaatgctgctgaagtaagacgcttggaggagctctacaatagatataaagacccgtattctgatatgattcttgcggagggtatctcggttctgtgtaatgatcttgaggtggaaccgcaagacatagtcacgttggttctttcgtggcatatgaatgctgcaacagcgtgtgagttttccaggcaagaatttatcagtggattacaggcattaggtgtagattcaatcgggaagttgcaggaaaagctgccatttatgcgttctgagcttaaagatgaacaaaagttccatgagatatacaactttgcttttggggtgg

SEQ ID NO: 7175 - DNA, 420 bp, Arabidopsis thaliana
  unsure at all n locations
  Clone ID: LIB24-093-Q1-E1-G1
atgaagttgatgaggttgttgttgattagagtttaaaccaaataaaccctaaccaanaataaataagatctgaggttttttctcgagaagtaagagagatctggaatttggcgacgatganttacggatgggcgatatacgaaggcacggtggtgatancttcactaagtctcttangatgggcaggtttatggtttcttaancggagattatacaaagagtatgaagagaaacnagctttggttcaaatcattttcagtgtcgtcttcgctttctcttgtaatctattgcagctcgttttgttcgagatcatacctgttctctctagagaggcaaggatgataaactggaaggtgggatcntttttgtttgatacttcttctgggtttcaagttgccgttattaccantgcgaatttga

SEQ ID NO: 7176 - DNA, 419 bp, Arabidopsis thaliana
  unsure at all n locations
  Clone ID: LIB24-093-Q1-E1-G12
caggtgatattttaacaaagttcttagtacaatgggatctgttgatgctgctaatggaagtgggaagaaacctacagttatatttgttcttggtggtccaggaagtggaaaaggtacccagtgtgcttatattgttgaacattatggttacacacatctgagtgctggagatcttcttagagctgagattaaatcaggttctgaaaatggaactatgatccagaatatgattaaagaggggaagattgtaccttctgaggttactatcaagcttctacagaaagctattcaggaaaacgggaatgacaagttcctcattgatggtttccctcgtaatgaggaaaaccgagcagcatttgaaaaagttactgagattgaaccaaagtttgtcttaatccttcgattgtcctgaaggaana

SEQ ID NO: 7177 - DNA, 482 bp, Arabidopsis thaliana
  unsure at all n locations
  Clone ID: LIB24-093-Q1-E1-G2
acgttaccctgccntaccgggccaaaattcccgggncgacccacgcgtccgcggacgcgtccgcccacgcgtccggtttttgtttacagagcatattacagatgcacgcatcgattcacacaagactgtttagcagtgaagcaagttcagaaatcagacacagatccttcccttttcgaagtgaagtatctcggaaaccacacttgtaacaacatcacatccccgaagacgacgacgaacttctctgtttcattgacgaacacgaacatctttgaaggaaacagagtacatgttacagagcaatcggaagacatgaaaccgaccaagtccgaagaagtgatgataagccttgaagatctggagaacaagaagaacattttcagaacgttttctttctctaaccatgagattgagaacggtgtgtggaaaagtaaccttttcttgggaaatttcgtgggaagatctttctcctgcaacatcaa

SEQ ID NO: 7178 - DNA, 412 bp, Arabidopsis thaliana
  Clone ID: LIB24-093-Q1-E1-G5
atttagcgagtcacatattcgaggaaatgcgacagagaaacgttgtctcttggagttctatgatcgtgggttacgcagctaacgggaatacattagaggctttagaatgctttcgtcagatgagagaattcggtgtcagaccaaacaagatcacgttcgttggagttctcagtgcttgcgtccatggaggtcttgtggaggaaggaaaaacatattttgcgatgatgaagtcagagttcgagctagaaccgggattatcgcattacggatgcatagttgatctattgagccgtgacgggcagcttaaggaggcaaagaaagttgttgaggagatgccgatgaagcctaacgtgatggtttggggttgtttgatgggaaggtgtgagaaagtttggggatttgaagatggctg

SEQ ID NO: 7179 - DNA, 419 bp, Arabidopsis thaliana
  unsure at all n locations
  Clone ID: LIB24-093-Q1-E1-G9
gagcccatattggatggcacctgaggtgataaagaattcaaatggcagtaaccttgcggtcgacatatggagtcttggatgtactgttttagaaatggctacaacgaaacctccatggagccagtatgaaggggttcctgctatgttcaagattggaaacagcaaggagcttccagatatccctgatcatttatctgaagaggggaaggattttgtaagaaaatgcctacaaagaaaccccgcaaatcgtcctacagctgctcagcttttggatcatgcttttgtaagaaatgtgatgccgatggaaaggcctattgtgagtggcgagcctgcagaaagccatgaatgtagcttcgagcaccatgaagatnactgggacattggacatgcaaaggagtcctccgtgcctaaactncgga

SEQ ID NO: 7180 - DNA, 461 bp, Arabidopsis thaliana
  unsure at all n locations
  Clone ID: LIB24-093-Q1-E1-H12
gccncgaaaaattcccaaggtccacccacgcgtccgcccacgcgtccgcggacgcgtgggcagaaaggtgtaatgcttgactgggtgaagaagctgcaccaagaagggaaactaaagcagttaatagacaaagatctaaatgacaagttcgatagagtagaactcgaagaaatcgttcaagttgcgctactctgcactcaattcaatccatctcatcgaccgaaaatgtcagaagttatgaagatgcttgaaggtgacggtttggctgagagatgggaagcgacgcagaacggtactggtgagcatcagccaccgccattgccaccggggatggtgagttcttcgccgcgtgtgaggtattactcggattatattcaggaatcgtctcttgtagtagaagccattgagctctcgggtcctcgatgattatgactcactggtttttaaaaaatttcctttcc

SEQ ID NO: 7181 - DNA, 442 bp, Arabidopsis thaliana
  unsure at all n locations
  Clone ID: LIB24-093-Q1-E1-H3
taaaactgtttttttactacttgtagtaaaaccatgaagcgatcatccttggtcgattcttgttcatattcgagaatatttcgcagtattttctgtctcttatccttttgtatcttcttcttgacaacgaccaatgctcaggtaatgcatagacggctctggccttggccattgtggccacggccgtatccacagccgtggccaatgaatccaccaacacctgacccatcaccaaagcctgtcgcaccacctggcccatcatcaaaacctgtcgcaccaccaggcccatctccatgcccgtcaacaacaacaaagcctcaaaccaaagccccaacaagcaacctagccaatctccatgccatcaccacnacctaaagcctcaaccaaaaggccaantgccaacaaccaagcatggcccancnancacctcctaaacctcaaa

SEQ ID NO: 7182 - DNA, 423 bp, Arabidopsis thaliana
  unsure at all n locations
  Clone ID: LIB24-093-Q1-E1-H4
ctgttacgcctgccgttaccgggccanaattcccgggacgacccacgcgtccggaagatacggattttctaatgagaaaaatgggtgttgttgtatgattacggctataataccatgccccaacccagataaatacgtcttctacgacttcgttcatccatccgagaaagcttacagaacaatttctaaaaagcttgtccaggatatcaagaatggccttgcctgatttattatatatacaatgctttattttaattttaataacagccatcgttaataatagaaatgagaagacaaaaatcatacatggcgatctctctgtttttcttatgttaaagaatgtataatccagtttatgtattgttcactttatataatcccagaacaacaaaggagtttgtttacaagaaaaaaaaaaaaagg

SEQ ID NO: 7183 - DNA, 412 bp, Arabidopsis thaliana
  Clone ID: LIB24-093-Q1-E1-H5
tatcctctctctcaaatcgcggagtctccgaagtttctctgtcagacaaaatgcagtcgtcaacgtatgcggttaaaggaaacgctgcgtttgcgtttcagagacggaccttctcttctgacagatcgacgacttctaccggaattcgcttcgctggttataagagcttagccaccaccgggccactctactgttctggttctgaagccatgggagcgacgcttgctcgtgctgataacgggatccagagcgttatgagtttctcttctgtcaaagctcgatcggtcagagctcaagcctcatctgatggagatgaagaagaagctatacctctgagatctgaagggaaaagctctggaacagttttgccttttgttggggttgcttgtccttggtgctatactctttggtt

SEQ ID NO: 7184 - DNA, 301 bp, Arabidopsis thaliana
  Clone ID: LIB24-093-Q1-E1-H7
gagattgctacgttgtcagcaagtcctttgctcaatctgaagccaacaaatgatgaaaaataccaaacttggggaagccattcctccccagtttctttgttgcattcagttcaagatctattaatgttatgatgatccttcggtttccgagttttgcttgttttgttgaccttaatttttcttactgattctaaatttataaattcctggttatatacttgcatgatttctctaatgtcctcttggctttggacattttcgtttggaaaagtttttaactttgcaaaaaaaaaaaaaaagg

SEQ ID NO: 7185 - DNA, 424 bp, Arabidopsis thaliana
  unsure at all n locations
  Clone ID: LIB24-094-Q1-E1-A1
acccactctcctcggaaaccacagcgacggacggacggacggacgataaaacttttgcctctaatttgctcctacaaatctggaatcagccggagcgaatctcgaagcttatgatctcgacttgctgaagaggctgggaatggctggtaaagaggagactgatgtatctgcacaagggtctttaaccagggaggccactgagatatggaggagtgagttggaatctcgccggtttcaggtagatagtttagaagctgaacttgtggatgtcaaggcttaccttgagtttggctcagaagaagatgccagaaaggagttaggagttctttcgggtanggtcagatcgactgcaactatgttgccgttatttgagatcaaaagctaagagtcctgggcattcctgatgattctancaaatgtgtca

SEQ ID NO: 7186 - DNA, 415 bp, Arabidopsis thaliana
  Clone ID: LIB24-093-Q1-E1-E8
agattgagtcaccaccaccatagtaatatacgcgtatgagttcccagatgtgatctccatccaacgttgtatttctttcgttttggttatcttcttcggttccatcgaattccaacaattcccatcgaggaatttggttacgaatcttttgatctgactaaacctagggagcttgatcacaaggagactgaaaccaatgctaggaggagtctcttcaggttagtagaatgagtagaaaaagaacggaaaatggcagtgaatcaggaccagccacttctcatgttcctgtggatagattcgggtttctcaagcaagaacatgccaattcgcctgagcgttttagcaagtctaaaactacatcatccactgatcatgacagagaggagaagaaaggtgagaaaatgggaggaagatg

SEQ ID NO: 7187 - DNA, 475 bp, Arabidopsis thaliana
  unsure at all n locations
  Clone ID: LIB24-093-Q1-E1-C7
ccttacgccgnccagtaccggtccaaancattcccgggtcgacncacgcgtccgacgatttcctttttccgccggaagaagaagcaaaaaaaaaagaaatcgaatctctctttcaagtgttcgatttaaagcaaaagtgtaattataatcggaagcgagatcttgagaaatggtgggatgacggcggagggagatggcgaggggaggaggagaatggaccggagggatcgccggaaccggagttctctctttcaaaagaatcactctacttgtttgctttttcaacattctcattgctctctttgttcttcgctttctctatgcttcttctctccacatctattccaataacgataatggttcctactttttattttccttttcatttttgctctctgattcatgataattcgtatctgaagcagctctgttggttttttgttantcaattgttaaagttacaaaagctgaanaa

SEQ ID NO: 7188 - DNA, 468 bp, Arabidopsis thaliana
  unsure at all n locations
  Clone ID: LIB24-093-Q1-E1-C9
tacgcctccanaaattcccaaggtcgacccacncgtccgacgatttcntttttccgccggaagaagaagcaaaaaaaaaagaaatcgaatctctctttcaagtgttcgatttaaagcaaaagtgtaattataatcggaagcgaagatcttgagaaatggtgggatgacggcggagggagatggcgaggggaggaggagaatggaccggagggatcnccggaaccggagttctctctttcaaaagaatcactctacttgtttgctttttcaacattctcattgctctctttgttcttcgctttctctatgcttcttctctccacatctattccaataacgataatgggttcctacnttttantttccttttcanttttgctctctgattcatganaattcgtaatcngaaagcagctctgttgggttttttgttaagtcaagttgntaaaantacacagctgatgaaga

SEQ ID NO: 7189 - DNA, 479 bp, Arabidopsis thaliana
  unsure at all n locations
  Clone ID: LIB24-093-Q1-E1-D1
aactgttacgcctgccgttaccgggccanaattcccggancgacccacgcgtccgaatctttagtgtttttgtagtaacgttatggatcataagggttgatgctagggttttcggaggacgaggaatcgaaaaatttgtaactttcggtcagaattatattgttacgtggggacaaagtcatgtttctacactccattctggcgaagaagttgatctttacatggatcaatcttcaggtggtgggttcgaatccaaggacgcctacggatcaggtctctttgaaatgagaatcaaagtgccttcaggaaatactggcggcatcgtcaccgctttttacttgacgtcgaaaggaggtggtcacgacgagattgacttcgagtttctagggaacaacaacggaaaaccggtaacgttacagacaaatctgtttccaaatggagaaggaaacagagaanaagaggttttgcttgggtcaaac

SEQ ID NO: 7190 - DNA, 417 bp, Arabidopsis thaliana
  Clone ID: LIB24-093-Q1-E1-D11
gattccgtttcattgatcgatcaatcaaaatctcgccggagtttcttcccgccggcctgaatcatgcctctgcctatattcccgtcgcggttacagtgttcgtcttcatcgtcttcgtcgtcgtcgcgatcttcgttttttaggcctaagcttcgaatcgatccaagcttgaccttaattccaggcttatccaacgacgtcgggagactgattctctccttcgtcccttaccctcacatctctcgtatcaaatcaacctgtaaatcatggtacgctttcctctcttccaaaaccctaatttcactccgccatagcaagagacaacaagcaacaccaacaatctctcgcatctcctttgtatcttccctcaagatccttcgatttcgcctccttttctcttcgattccgtgactctct

SEQ ID NO: 7191 - DNA, 481 bp, Arabidopsis thaliana
  unsure at all n locations
  Clone ID: LIB24-093-Q1-E1-D12
tgttcacgccgcccggtacngcgtccnanaattcccgggtcgacccacgcgtccgcccacgcgtccgcttaccaagagaaatttactttttttaaaatatacattcaaacttaaaacatgcaacttcaaataaagacactttctaatgagaaatttacaattgaatgtgaattaactgattcggtaagatcaataaaagaaaaaatcgcttcgaaagatcttaaagataaatacgaagctgatgcggttaaactaattttttcgggaaaaattctcgaagattcaaaaacacttgaatcttattcgataaaagaagatagttttctcgttgttgttaaacaaacaccgccaaaagcatcatcaagcagcagcaactacaccgagttcatcagctgcatcaactaatgttnnnnnnnnnnnnnnnnnnnnnnnnnnnnnnnnnnnnnnnnnnnnnnnnnnnnnnnnnnnnnnnnnnnnnnnc

SEQ ID NO: 7192 - DNA, 482 bp, Arabidopsis thaliana
  unsure at all n locations
  Clone ID: LIB24-093-Q1-E1-D3
aactgttacgcctgcctttaccgggccaaaattcccggancgacccacgcgtccgaatctttagtgtttttgtagtaacgttatggatcataagggttgatgctagggttttcggaggacgaggaatcgaaaaatttgtaactttcggtcagaattatattgttacgtggggacaaagtcatgtttctacactccattctggcgaagaagttgatctttacatggatcaatcttcaggtggtgggttcgaatccaaggacgcctacggatcaggtctctttgaaatgagaatcaaagtgccttcaggaaatactggcggcatcgtcaccgctttttacttgacgtcgaaaggaggtggtcacgacgagattgacttcgagtttctagggaacaacaacggaaaaccggtaacgttacagacaaatctgtttctaaatggagaaggaaacagaagaaaganaaggtttttgctttggtcaaan

SEQ ID NO: 7193 - DNA, 424 bp, Arabidopsis thaliana
  unsure at all n locations
  Clone ID: LIB24-093-Q1-E1-D8
acgcgtccgcttttaacaatggctttctcttctctatctcctctacctatgaagtcacttgacatttcgagatcctcatcttctgtctcaagatctccttaccattttcagagatacctattgagacgtctacagctaagttcccgttcaaacttagaaatcaaagattcatcaaacactaggttgttgttccagcgctgagtcaaatacatggaagaggattttgtctgcagcaatggcggcggctgttatagcctcgagctccggcgttccggccatggcagagcttaacaggttcgaggccgatacacgtggcgagtttgggattggctcggctgctcagtacggttctgctgatctcagcaaaacagttcactccaatgaaaatttcagaagagccaacnttacttctgccgacatgaga

SEQ ID NO: 7194 - DNA, 423 bp, Arabidopsis thaliana
  unsure at all n locations
  Clone ID: LIB24-093-Q1-E1-D9
atatttcctttggggtgtcttccaaggaagaaaagagactaacccacaaaagaacacatctttgcctacttcaaatgttttgccgcgtgacagagaccccaaggagctgtgtcaaacgagttctccttccaagcatttggagaaagggtcttctctacgtgagagctccagcaacggaattgaaacacggaatgggacagatgcacgtagtcatgagaatccaaataacagggaatcctctattgagcgatcaccgagcaaaaaggaggatattgctcttaaagtggaagaagcaggtgtgaatcacatccccccctcaagttactgggatnaaattctggagatagtctagtgaggaaggttcanaaagtcgagggaacaagaattaggtggtaagaangatctgccattgacgggtcatgg

SEQ ID NO: 7195 - DNA, 423 bp, Arabidopsis thaliana
  unsure at all n locations
  Clone ID: LIB24-093-Q1-E1-E10
ggaaacaagtctaatcctcctcccggagaattcacgaacttagaggagattcttccaaaagggtttttagatcggacggtggagatagggaagatcataagctgggcaccacaagtagatgtgttgaatagtcctgctataggagcgttcgtgacacattgtggatggaactcaattctcgagagtctttggttcggtgttccgatggcggcgtggcctatctatgctgagcaacagtttaacgcgtttcatatggtggatgagcttggtttagcggcggaggtaaagaaggagtaccgtaagagattttctggtggangagccggagattgtgacggctgatgagatagagaagangggatcaagtgtgcgatggaacaggatagcaaagatgangaaagaaggtgatggaagatgaaagga

SEQ ID NO: 7196 - DNA, 421 bp, Arabidopsis thaliana
  unsure at all n locations
  Clone ID: LIB24-093-Q1-E1-E12
taaaatggcttcctcttcctcttctccgacgcctagtgctgcggcggcggtctctcctcttacggaggaagaattaactctaacagttaagtggaatggaaaagagtacaccgtccgtatctgtgccgatgactcagtcgccgagctaaaacgtcgcatctgccttctcaccaccgttttacctaaacgccaaaagcttctttatcccaagatcggaaacaaactctctgacgattctcttttactctcttcgatctcctttaagccctccctcaagatgacaatgatcggtactgttgaagatgatataataagtagatcaagctgaatctcctgaaattgttgatgattttgagcttggtaaggaagaagctgttgatgttaaagataanagaagttaataaaacagaagttgagaagg

SEQ ID NO: 7197 - DNA, 478 bp, Arabidopsis thaliana
  unsure at all n locations
  Clone ID: LIB24-093-Q1-E1-E3
ctgttacgcctgccgntaccggtccanaattcccgggncgacccacgcgtccgttcttaagctagttttatacttttcttcttcctttcatttgggttaagagaagccatggataccgagtttctccgaaccctagatcgtcagattcttttgggtgtcttcgttgctttcgtcgccgttggtgctggtgctgcttattttcttacatcctccaagaaacgcagagtgtgtttggatccagagaatttcaaggagttcaagcttgttaagagacatcagcttagtcacaatgtggccaagttcgtttttgaactcccaacttctacttctgtgttgggtcttcccattggacaacacatcagttgcaggggaaaggatggtcaaggagaggatgttattaagccatacaccccgactacgttagactctgacgttggacgtttcnaacttgtcattaaagatgtatccgcaanggacg

SEQ ID NO: 7198 - DNA, 415 bp, Arabidopsis thaliana
  unsure at all n locations
  Clone ID: LIB24-093-Q1-E1-E5
ttattcttgccctagagataccgagcgggagattccagattgagagcagcttcgagtctctctctcctcgccgttccttttcgcttcttcaagtttcgttgccaagagagattctaggtattgaagttatagaatggactttgatgagtatgagtacttagagaagacagttgaaaatcctcacctggagaatgaagttggtaatggtggtggtgatgagaaagtcaaatctgaagggaaagagaggagtaggagctcaaggcataggggtgacaagaagaaggagagggatgaagatgaggatggtcggcgttctaagcggtcgagatcgcatcaccgttcacgttctaaggacagagagagggataggcatagaagtacaaggagcacagagatagagatctngaaaaaggat

SEQ ID NO: 7199 - DNA, 415 bp, Arabidopsis thaliana
  unsure at all n locations
  Clone ID: LIB24-093-Q1-E1-E6
ttttctatacggtcagttcgatcctctttttatcgacaatcctacacaaatccataatcatggccgccactgcttcctccgaagcttctgaaggaccagtgatgggtctcatcaacaagcgtctccgtgctctccgtaagaaatacaaccgaatcactcaaatggaagaatcgatttctcaaggcaaaaccctaaacaaggagcaagaagaagtcctccgctctaaacctgccgtcgtcatcctaatcgacgagcttgaaaagatccgtgctcctctctccgccgctgtgacagaggaaatcagcctcgctactcagcttaaccgtgcttcatccgatcaaaccaccgcatctgagcaaaaggaagtcactgatatcccgcangaagttagcggcggcgatgatggcgccaagtt

SEQ ID NO: 7200 - DNA, 417 bp, Arabidopsis thaliana
  unsure at all n locations
  Clone ID: LIB24-093-Q1-E1-E7
tctctgtatttccttcacctccggctaaatctccggcgaccgcgtaacttgttctccggtctgaatagtgaataaacacacacacggagccaaatccaggagaaattaggtttgaattagagagattaggagaatacaaattggtttggtggttttcaagtatgctaccaagtgggttgaaagaaacccaactccgtgagagcaacaacaaccaaaaagtccatcctcaaccaatggaagagtctatcaatcagaatcctgaagctatggaagcacttatctccaatctcttcggaaacatctcgtctttgaaatctgcttatatcgagcttcaaagtgctcatactccttacgatcccgagaagattcaggcagcggacaaaagttgtcatttccngaactcaagaatccttccgg

SEQ ID NO: 7201 - DNA, 420 bp, Arabidopsis thaliana
  Clone ID: LIB24-093-Q1-E1-C11
acgcgtccgttttgattctgcttactcccaaaaacacacatttaaacatcttagagagatgtcgatctccggagctgtgcttagtgggttgggtccttcgttcttgatcagtggaggcaagagaagcggcgttggcggtggagctatgaaagttggccggaagaatgtgatcattgcacctcagcgcaagaagtcatgggtctcagccgccgtgaaaggtgctggtaactcaccgaacgaccccaaatggcttgatgatgcctcagagaaagcttcggggtacgtgaaagaagaagggaagtgaagtgggaaacgtgtctgctcaaaagggacaagagcttcaaaatcagatggagagagcaaaagactacatttttggggaaagctggtgaagcgatggactcggtggctgaaaatgca

SEQ ID NO: 7202 - DNA, 475 bp, Arabidopsis thaliana
  unsure at all n locations
  Clone ID: LIB24-092-Q1-E1-H4
ccttcncgggtcgaaccacgcgtccgagtctcttctctgctcgccgatcgttactccgtcgaaatcaccatggcgccaaagaaggataaggttccaccaccgtcatcaaagccggccaaatctgnnnnnnnnnnnnnnnnnnnnnnnnnnnnnnnnnnnnnnnnnnnnnnnnnnnnnnnnnnnnnnnnngtgttgtttgatcaaggcacttatgacaagcttctcactgaagctcccaagttcaagctcatcactccatcaatcctctccgaccgtatgaggattaatgggtctcttgcgaggagggcgattagggagctaatggcaaaaggtttgatcaggatggtctctgcacactcgagccagcagatctacactcgtgccaccaacacctaaaaagcgtgacctttcaatggtttggttctcgactcttttcctgggnttttgtcctttgatgtatacattaatcatcaag

SEQ ID NO: 7203 - DNA, 439 bp, Arabidopsis thaliana
  unsure at all n locations
  Clone ID: LIB24-092-Q1-E1-H5
acgcgtccgcccacgcgtccggcgtcaccttctcatcaacaaattcaaattctcctcggtaagcatgagaattgaatctggggagaatttgaatttgttgatgagaaggtgacgcatatcgtatcccgaccaagcaaaacatgaggatggcattgtattggctcgtacagggatgcacagcangcgactcacttgtcttccactactctggtcatggttcgcgtcaaagaaactacaacggtgatgaagttgatggctatgatgaaacactctgtcctctggattttgaaactcaggggatgattgtagacgatgagatcaacgcaaccattgtacgccctcttccacatggtgtcaagctccattcaattatcgatgcttgccatagtggtaccgttctggatttacccttcctatgcagaatgaacagagctgggca

SEQ ID NO: 7204 - DNA, 483 bp, Arabidopsis thaliana
  unsure at all n locations
  Clone ID: LIB24-092-Q1-E1-H6
gcccgagtgttacgaagccaggtaccggtccagaattcccgggtcgacccacgcgtccgcggacgcgtgggcggacgcgtgggcggacgcgtgggcggacgcgtgggagcaaatctatatatctattacccatctcgaattcgaccgaacccatgttctaatctccttcgcaacattggaaatctattttaaaaatccgttgagatatagttatataagtagtttggtgactcaattaggtttacacacaaagacatgggatcggctggtgtagcgagttcttcttctgatgttgcgatctcagctttgcgtgagaagcatgagaaggaagtagagaatctaacattaacgacacaacctttgaatacattgaagttgtttgttgaggctactattcagtacatcaagcgattcatatcgtatccnattgggctcatggangttggtttatactgataaccactttgttagtggtatctggng

SEQ ID NO: 7205 - DNA, 488 bp, Arabidopsis thaliana
  unsure at all n locations
  Clone ID: LIB24-092-Q1-E1-H7
cccaantgttacgcctgccaggtaccggtccggaattcccgggtcgacccacgcgtccgattaggtctccttacaatgtatgatcagtttttgtccaggaagcaagtatccgactttgatctgtttacactggatgacatagattctgctttccagaatgtgatcagattgacttactctcaaaattaccatctttctggaaagggagagggtattgtaattgctcctcatgttgctggacacatgctgggaggtagcatctggaggataacaaaggatggggaggatgttatatatgctgttgactacaatcatcggaaagaaaggcatttgaatggaactgttttacagtcttttgttcggcctgctgttctgataaccgatgcatatcatgctctttataccaatcaaaccgcaagacagcaaagggacaaagaatttctagataccatttcaaaacatcttgaagttggaggaaatgttcattg

SEQ ID NO: 7206 - DNA, 421 bp, Arabidopsis thaliana
  unsure at all n locations
  Clone ID: LIB24-093-Q1-E1-A1
aaactgtgangtaaaacanagaanaangaaaaatggtgctaaaggtgtacggacctcactttgcttcaccaaagagagctttggncacactgatcgatgaanggcgttgccttcgagaccatccccgtctatctcanganaggagaacacaagcagcctgcttatctcgctctacagccttttggtacngttcctgctgttgttgacggtgactacaaaatcttcgantcccgtgcggtgatgaggtacgtagctgagaagtacaggtcacaangacctgatcttttggggaaaaccgttgaagacagnggtcaagttgaacaatggcttgatgtggnancgancacttacacccancgctantgaacttaacnctcacataatggtccnaacaattaanggaatcccaacctgatgagaa

SEQ ID NO: 7207 - DNA, 466 bp, Arabidopsis thaliana
  Clone ID: LIB24-093-Q1-E1-A5
gccagtaccggtccaaaaattcccgggcccttttcctctgttcatcactttaagaaaattacaaacttttatcttctattggacgaatctttgatctggttttaattaatcacacgcttactttaggatttttttacctgaattcgaatatatacttttgattttcatcttccgtagtccgtaccgtagaattgaggagcttcatggagaacgagctgtttatgaatgcaggagtttcgcatccgccggtgatgacgtcaccgtcttcttcgtcggcgatgcttaagtgggtttcaatggagactcagccagtggatccaagtctcagtcgcaatctgttttgggaaaagtcaacggaacaagagcatttttgattcggctctgagctcactcgtctcttctcctacgccgtcaaattcaaacttttccggttggcggagtaagtggagaaaatgtcattaatgaa

SEQ ID NO: 7208 - DNA, 484 bp, Arabidopsis thaliana
  unsure at all n locations
  Clone ID: LIB24-093-Q1-E1-B12
ttttacgccgntcgtacgcctccanagttccaaggtcnacccacncgtccgattgcttanctcgaaaaatggcatcttcagccgcccaaatccacgttctcggcggaattggattcgcttcttcttcttcttccaagagaaatctcaatggtaaaggcggtacctttatgccgagaagtgccttcttcggtacaagaaccggtcctttctccacacccacttctgcttttctcagaatgggcaccagaaatggcggcggcgcttctagatacgcggttggtccggttcgtgtggttaacgagaaggttgttggaattgatttgggtacgactaactctgcagtanctgctatggaaggaggtaagcctacgatttgtgactaaccgctgaaggtcagagggacaacgccttctgttgtgggcttacacgnaaggagtggtgatagggccttgnttgggcaagattgcgaaagaangcaagcttg

SEQ ID NO: 7209 - DNA, 487 bp, Arabidopsis thaliana
  unsure at all n locations
  Clone ID: LIB24-093-Q1-E1-B3
gaactgttacgcctgccgttaccgggccaaaattcccgggattgaattaaaactgtttttttactacttgtagtaaaaccatgaagcgatcatccttggtcgattcttgttcatattcgagaatatttcgcagtattttctgtctcttatccttttgtatcttcttcttgacaacgaccaatgctcaggtaatgcatagacggctctggccttggccattgtggccacggccgtatccacagccgtggccaatgaatccaccaacacctgacccatcaccaaagcctgtcgnnnnnnnnnnnnnnnnnnnnnnnnnnnnnnnnnnnnnnnnnnnnnnnnnnnnnnnnnnnnnnnnnnnnnnnnnnnnnnnnnnnnnnnnnnnnnnnnnnnnnnnnnnnnnnnnnnnnnnnnnnnnncctaangcctcaaccaaagccagtgccaccaccagcatgcccaacaacacctccctaaacctcaaccggan

SEQ ID NO: 7210 - DNA, 476 bp, Arabidopsis thaliana
  Clone ID: LIB24-093-Q1-E1-B4
aacgttacgcctgcccttaccgggccaaaattcccgggaccgacccacgcgtccggagagtaattcactacacacacacaaaaaataaattgagtgcctcccccaaaaacaaaattggtagataacgagcaattgttttttttcagatttgatcctgaatttttacatttttttttgcaatctccccctaatctgttgtttctcgcttcttcttctgttaatcatctgtctttcaaaaagaaagaaaaaagaaaaattcgatttctgggtttgtttttgtcatacagaaaaaaatcaagcttatgaatttgtgtttaattttttgttttaatttgaaaggcaggttttttcagaacgagatcgtttttttcaaatttcttctgattttacctcttttttcttcttagattttagtgaatcgagggtgaaatttttgattccctcttttcggatctacacaagagggtgcttaattc

SEQ ID NO: 7211 - DNA, 417 bp, Arabidopsis thaliana
  Clone ID: LIB24-093-Q1-E1-B7
acgcgtgggcggacgcgtgggcggacgcgtgggcggacgcgtgggttctaggtacctcaaattagcgacacattatggcatctccaggggaaaaatatgttaccagcgatatggttcatttttaaccgtagaggatgtgatgcagctgtacagtatgttgaaaattttcagtttttagatgattgcgagaagagtgaggttgagttggccttgaagaagtttcgcgttctttatccagatgcagtgagagagagtgcagagaaaggactgcttaggggaattgctgctcatcatgcaggttgtctacctctttggaaatctttcattgaggaactttttcagcgaggacttgttaaggttgtctttgctactgagacacttgctgctggaataaacatgcccggctaaaaacggctg

SEQ ID NO: 7212 - DNA, 425 bp, Arabidopsis thaliana
  Clone ID: LIB24-093-Q1-E1-B9
ctatctcctccactatctcctctctgcatctgacactctatagacattgttgataaaaatgagtacaccaggctcttctagatccattccattcaaatcgaagaaacgattggtgatggattcgccgtcttcgaaatctcaaaccgggaatccaaatccgtcttctgtagcattgcctacgccggaaaaaccacttgagaacatgcttagtagatcgagaaaccgatctgtggctttatcaagtgaaagaaattcgtcaagccgctggatctcgtcgcaagatctgaagatccggttgcttcatctgccaaaagcaggctctttttcgattcatcatcatcttctccttcaaaacgtaaaagctctaacaaaaatgcaagagaaagagaaacttccggagaagtacgaagaatctggggaaagtt

SEQ ID NO: 7213 - DNA, 480 bp, Arabidopsis thaliana
  unsure at all n locations
  Clone ID: LIB24-093-Q1-E1-C1
tgttacgccgccgttaccggnccaaaattcccgggacgacccacgcgtccgcgctgaaactttcatgagctactccacctggaacctatcactttctaacacggntccaaaatattccgaggtagcttcttcccagtacttttttcaaatctatcctgcaagatcaagtcacaaacactaggactgtttctccaatgaacaacgaagcctttcatctgttaagatgaactccgcagctcctaactcggatttcttgaatcttcatcacataaactccacatggaatcagaatctgcagctcaggtcaactgattctccacatctccacctggaatataagtctcctcaccgtatttccaggcgcctacagtggagttacctggacgatgttgaggagatcataacaggcatgaaagtcctttccaagctcttgtatccggaatcgatntcctccttgagaattttaagaattgggtaaaa

SEQ ID NO: 7214 - DNA, 496 bp, Arabidopsis thaliana
  unsure at all n locations
  Clone ID: LIB24-092-Q1-E1-H3
ctgttacgcctgccggtaccgtgtccaaaantcccggggtcgacccacgcgtccgnngacgcgtgggcggacgcgtgggtttggctgtcggtgttgataatatgtgcatcctggttcatgctgtcaagaggcaagagcaagagctgcctttggaaagaagaattagcaatgcccttatggaagttggaccatcgattactctagcaagtttagccgagattttagctttcgctgttggtgctttcattaaaatgccagctgttcgagtattctccatgtttgctgcattggctgtccttttggactttcttctccagattaccgcgtttgtagctttgatagtttttgacttccgacggacggaggataagcgagttgattgcttcccgtgtattaagacatcaaaatcatctattagtgctgaaaaangggttggtcaaagaaaagctgggccttttgactcgatatatgaaggaagtccatgcacctgttctta

SEQ ID NO: 7215 - DNA, 488 bp, Arabidopsis thaliana
  unsure at all n locations
  Clone ID: LIB24-091-Q1-E1-E11
ctgttacgcctgcccgtaccgctccgaaaaattcccnggtccacccacgcgtccgcncacgcgtccgcccacgcgtccgcggctcgatccgccaagtagagtaagcagcaatgactaaaaagaagaatcctaatgttttcttggatgtatcaattggtggggatcccgttcaacggattgtcattgagctttttgctgatgttgtccccaagacagcggaaaacttccgtgccctctgcacaggtgaggcgggcgttggaaagtccactgggaagcctctacatttcaaaggatcatctttccatcgggttatcaaaggattcatggctcagggtggtgatttttccaatgggaatggcactggtggggagagcatctatggtgggaagttttcagatgagaactttagattggaccatgatgggagctggagtcctttcaatggcaaaattgtggccaaataccaacgggtcccaatttttaaactt

SEQ ID NO: 7216 - DNA, 509 bp, Arabidopsis thaliana
  unsure at all n locations
  Clone ID: LIB24-091-Q1-E1-E2
ggaangttagcctgccgtattggtccancttcncgggtccaancacgcgtngntgaaaatcaacttgaacgacctaaaacancaacaaacgactccgggcgaagtgtatgtatctttcactttctcactaaccaaccaagacgacaaaagaaaattattcatcttagctaagctcgattagtttctggcggaaacggttttgtggataattgttagcatattccgatcttgccctcccccgagagagagagtcnnnnnnnnnnnnnnnnnnnnnntctcttacgaagctacgtgtgacctaacattctccagattgttgtttatagcctcttcttagatttacgatttgtgagcttgtgaagatttcttggnangaattagagttctctgtttcgagatcgagatgaataataataataataatagaggaagatttccaccggggattggtgcggcggggtcctggtccgggattctaattttcaatcacgggatccgnaatccaacct

SEQ ID NO: 7217 - DNA, 453 bp, Arabidopsis thaliana
  unsure at all n locations
  Clone ID: LIB24-091-Q1-E1-E5
acgcgtccgncagaaagtcgccgagaaagttaaaagtagaacggcggagaaaaaaaaaacgaagaggaagaggagagatggagtcgcagaagaagatagctcatgagatcggaggtatgaagaacgatgctcttcgctttggtcttcacggcgttaagagcgatatccttagatctcatcctctcgaaacggcttacgaatctgggaagcaatcacaagaagaaatgaagaggagagtgatcacgcatacttatggagctgctcttcctttgaagatggatcttgatagacaaatcctttctcggtttcagagacctcctggaccaattccttcatcaatgcttggccttgaagtctacacaggagctctagataattttggttttgaggattacttgaatgatcctcgcgaatccgagacgctgnaaccantagacttcaccacgggatggg

SEQ ID NO: 7218 - DNA, 420 bp, Arabidopsis thaliana
  unsure at all n locations
  Clone ID: LIB24-091-Q1-E1-E9
cctcctcctccttctcttccttcttatatataaatatatccacaaaatcatctcttttgcttcgctgtttctctcattattccatctctcttatcgccgctacaaacgtttcttcttcaacctcgttcagagattatcctcccttcttttctcatcttacaaggaagttgggcagttaaagctgctgggatcaccagttttgtcaaaagtggagtgtgaagaatcttttatgtctgaacaggcttctctctttcaatcatctatccggcttttaggagagtactgtcctatatctaggaaaaagtccactcataaagttggtggtttgcgttttgaggaggacatcacgagctgtattgggatttcaagtttatgcaactgagtgattatcactgcctcttccggacatccccntggttg

SEQ ID NO: 7219 - DNA, 491 bp, Arabidopsis thaliana
  unsure at all n locations
  Clone ID: LIB24-091-Q1-E1-F11
ctgttacgcctgcccgtaccgntccgaaaattcccnaggtccacccacgcgtccgcnttgatctttcattaattcttctcaagatcttcagagtctacaagggaagatcaaagtaattaaataagctgaagtaagaggaagtgatgttttctcttatgtctggactatggagttacatgtttagcaagactgagtttaatgtgcttattcttggtatcgacaaagctgggaagacgacatttttggagaaactgaagacgatatactcaatctcggaaggtcttcctcatgatcgaattgttcctactgtggggcttaatattggtcgcattgaagtctccaatgctaaaattgtgttctgggatctgggaggtcagcctgggtttgcggtctatttgggagaaatactatgaagaagcacacgcgttgatatatttgattgatgcaacttgcccaacccgccttggaagatcctaaatctgccttagaaa

SEQ ID NO: 7220 - DNA, 503 bp, Arabidopsis thaliana
  unsure at all n locations
  Clone ID: LIB24-091-Q1-E1-F12
tccctgccgtacggnccaaaatcccgggtccacccacgcgtccgggacgattcttctattgggaatcggtcaacgtcctcaagtttatcatagatcttanggtttctaatcaagatatttgattcatcaaaatcaccaactagggtttacaaagtccatgcttttcgatcattgatcagagagctttcaagaaatatttgcaagaaaatggcaatggctccagtaataaagctggtcttaggttcagttgcctttgccattttctggatattagcagtgtttccctctgtaccattcctaccaattggtcgaaccgccggttctctgttcggtgcaatgctaatggttatcttccaagtgataaccccggaacaagcttatgcagccattgatctcccgatactcggtcctctccttgggacgatgggtgttagtaaaatacccttganaaaaccggatatgttcaaattacnttanggacaattgctttcgtgggaaaaanc

SEQ ID NO: 7221 - DNA, 515 bp, Arabidopsis thaliana
  unsure at all n locations
  Clone ID: LIB24-091-Q1-E1-F2
ggaatgttagcctgccgtatngtccgacttcccgggtcgaaccacgcgtccgcaattttccggcgaaacagccgatgaaagtcccgcctgaatcttctgtacctttcaccgggcgattgacttcacttcagaatcgagagatgagtaaacggaatccgaagattctgaagatttttctgtatatgttacttctcaactctctctttctcatcatctacttcgtttttcactcatcgtcgttttcaccggagcagtcacagcctcctcatatataccacgtttcagtgaataaccaatcggcgattcagaaaccgtggccgatcttaccttcttacctcccatggacgccgccgcagaggaatctaccaactggctcctgcgaaggttacttcgggaatggatttacaaagagagttgacttccttaagccgaggattggaggaggaggagaaggaagctgggtccgatgtttttacaagtgaggacaatncaagagttcgattttgtgaagggaa

SEQ ID NO: 7222 - DNA, 510 bp, Arabidopsis thaliana
  unsure at all n locations
  Clone ID: LIB24-091-Q1-E1-F3
gantgttagcctgccgtactngtccgaacttcccgggtcgaancacgcgtccgcncacgcgtccgcccacgcgtccgcgctttcgatggtcgaaatcagttggtaaagaggaaactctgaaagttgtgttaaaaaaaaaactagaatcatggcggcgtcaatgacgaaacccatctcaataacttctctcggtttctattctgatcgaaagaacattgctttctctgattgcatttcgatttgttctggattcagacattcccgaccatcttgcctcgatttggtcacaaagtcaccgagtaataacagtcgtgttttacctgtcgttagtgcccaaatatcttctgattatattccagactcgaaattttacaaggtggaagcaattgtcagaccatggagaatccagcaagtttcatcggctttactgaaaatcgggattcgaggtgttactgtttctgatgtgaaaaggtttggtgcacaaaggaggttctaccganagaaaacggt

SEQ ID NO: 7223 - DNA, 506 bp, Arabidopsis thaliana
  unsure at all n locations
  Clone ID: LIB24-091-Q1-E1-F4
gcctgnccgtattggtccaancttcccgggtccacccacgcgtcccaaacgatatcgtcgtcgtctcctaaaccgtcggtggtgatgatgtcnaaaagagaggcggaattgaaagagataagatcgaagacgacggagcagttacaagaggaggttgttgaccttaaaggtgagctctttatgcttcgtctccagaaatcggcaaggaatgagttcaaatctagcgactttcgtcgtatgaagaaacaagttgctcggatgttgacggttaaaagagagagggagatcaaagaagggataaagaaaangttgtcnangaaacttgacagacaatggnagaaaagcatagtaccaagaccacctccgtctctgaagaaacttcaagcagatttagcagcttcagctgcntcttctgcttgaaaaaacccgctattggatttaanggnctcttccctgntgtttccctcgagaatgttngtaaaccccggttatttggttggntgaaa

SEQ ID NO: 7224 - DNA, 455 bp, Arabidopsis thaliana
  unsure at all n locations
  Clone ID: LIB24-091-Q1-E1-F7
acgcgtccggtggaaagctgataaaaagaatgatcgtaaacgtgaagccgaaagattttggttccatcattaaaggttaccctggtgaggatcccaagatcttagctcatttcagggatctcttggacaaaatgttcatccttgatcccgagaggagactgactgtgtcacaggcattagctcacccattcatcactggcaagtgaaaccacattgccattttccctctctgttgtatcaggaaatgctgttgtcctagatatctgtacattaaatatcttaattaccattgaaggatctaatctttgaattttctctaccttccctctgctgcctgagagagctttggttacaatgtcgacatgggtggagttctcattaccgacgattctcaggggactttactggttctctattgacatcgaccaantgcttaaaagacactcccttaacat

SEQ ID NO: 7225 - DNA, 421 bp, Arabidopsis thaliana
  unsure at all n locations
  Clone ID: LIB24-091-Q1-E1-F8
cagaggaagttctcaagacccacgatcttgagtgttgtagccgaccagagacggttgggaccagagcaatctcttacaactttaaagacatcggattcgcaccgtacggtgaagattggagaacgatgcggaagctctcggtggtcgagctcttcagctcgaaaaagcttcaatctttcaggtatatcagagaggaagagaacgacttgtgtgtcaagaaactctctgatttagcttcgagacgatctttggtgaatcttgagaaaaccctttttactttagtcggaagtatagtgtgtaggatagggtttgggataaatctccgtgagtgtgagttcgttgatgaagatagcatcgatgatcttgtgcacaagtctgaagatgtcataaaggaatccaacctccccggatttctttccng

SEQ ID NO: 7226 - DNA, 512 bp, Arabidopsis thaliana
  unsure at all n locations
  Clone ID: LIB24-091-Q1-E1-G12
caactgtncgtacggccccgaaaattcccaggtcnacccacgcgtccgtggacattggttctcataaggctttctctgttggtgggaatcgcatggatgtaaattcccaaaatgctgtcctgcgatctcctcaacagttatctcatctctttcctggaaggagtccaatgggttcgatgccagggtcatttgactcgccaaatgaacgatacaggaatctctctcaccgaagaagcgaatctagctctagcaatgctgacaaaaaaactgtatgagcttgacgttgaccgtatattacgtggggaggacaggaggacaacattgatgattaaaaacattcctaacaagtacacttcgaaagatgcttctatctgctaatgacgaagcaatgttaaggaacntaagaattcccttaatttgcaattgacctcaagaacaaatgcatggtgggannatgccttcaacaaacctaattgaacccngaaaaggattgtcccaattttttaagggga

SEQ ID NO: 7227 - DNA, 506 bp, Arabidopsis thaliana
  unsure at all n locations
  Clone ID: LIB24-091-Q1-E1-G3
tagcctgcccgtactngtccgaacttcccgggtcnaaacacgcgtccggnttctcctgaagttcaccgacctcgttctttggaggttcagcctcaatcggagcctcttccaccgccggttcagctcggagaaatcactgaggaggagcttaagctttatgatggctccgattctaaaaagccccttcttatggcgatcaagggccagatctatgatgtttctcagagcaggatgttttatggaccaggtgggccatatgctctgtttgcagggaaagatgcaagccgagctctggcaaagatgtcatttgaggaccaagacttgactggagacatctcaggtctcggtgcatttgagctagaggcgttacaagactgggagtacaagttcatgagcaagtatgtcaaagtcggaaccattcaaaagaaggatggagaangcaaagaaagttcagaaccttccgaagcaaagactgcctctgcggaaggtctttctacaaaaaacng

SEQ ID NO: 7228 - DNA, 488 bp, Arabidopsis thaliana
  unsure at all n locations
  Clone ID: LIB24-091-Q1-E1-D3
gtccgaacttcccgggtccaaccacgcgtccganatatgggcatnagaggcctcctttggaattccttgcgatgatccaaggaagagttttggcacgtgatctatttgtagcttatgcacggtgtcataagcatgaatttctgaaggatttcttcttatctacgggccagattcatgaggtagcttttcttttatggaaagaatcatgggatatggggaaaaacccaatggctagcaaaggatctccattgcacggtccgcgcataaaactaatagagaaggctagaaaccttttctcccaaacaaaggaacacactttcgagtctaaggctgctgaggaacatgcaaaactcctgaagatacaacatgagctagaagctagtacgaagcaggctatctttgttgattcaagcatcaatgatactatacgcacatgtattgtcctgggtaataaccgttgctgcaataaaaagtgaagacagaattca

SEQ ID NO: 7229 - DNA, 470 bp, Arabidopsis thaliana
  unsure at all n locations
  Clone ID: LIB24-091-Q1-E1-A1
cacgcgtccggagcaacagaagaagaaccggagacgatgacaaaggattgctctggaaacttccccaagttaggatcagagacattggaaaagttggtccagcttttgggactcggtgtcggttgcggatttggtttcggcgccggtcttatcggaggtgtangattcggaccaggagttcctggattacaatttggtcntggatttggagctgggttgtggaattggtgtangttttggctatggtgttggaagaggagctgcttatgatcactctcgttcttattacaacgttggaaaaccatctctgaatgaagttgattcactgattgatgaacttgttgttatcacgaagaagcttgtgaaagctactacaaatgaaatccacaagtgggtaaaatgatgaacttttaaggattgttgcagcttccaagtaaatggtantgtttgggtttgttcctaaaattaaa

SEQ ID NO: 7230 - DNA, 434 bp, Arabidopsis thaliana
  unsure at all n locations
  Clone ID: LIB24-091-Q1-E1-A12
acgcgtccgcagctatggcgttaccaccattgtctattcgcggggatcttggtgttctctccacagctgctgctagatatgctccttcgcttttaaaatcttttatcaaaatgggtcctaaaggagcgttgggagcgacaaaacttctccgcccgttctcggagatcgttgattctttggagttaaaagacccgtttatacgaaactggattgatcttctcgcattcctgctcgcaggggtcaaatctgatggcatactttcagcagagatggtagccacttatgttaactgtatcctttattccacaacatgtctaacatggaaaaaagaaacaagattatcatacttttggtgcaaaagatcggtttaaaatgaagtctttgtttcctatgtgtgcagatctacaaggtttgcagaatgggtacaaggccng

SEQ ID NO: 7231 - DNA, 440 bp, Arabidopsis thaliana
  unsure at all n locations
  Clone ID: LIB24-091-Q1-E1-A5
aaaantgggtaanacgtattgtatcttacgangttgtnttgaacaagctagcgttggtgtggtcgaacgttggggtcgattcgagcatatgggctgaaccgggatgtcatttcttcaaccctctcgccggtcaatggctcgccggngttctctccactangatcaaatctcttgatgtcaaaattgaaaccaaaactataggataatgtgtttgtgcagctggtttgttcgattcagtatcgtgtagtgaaagctagtgctgatgatgcgttttatgaagcttcaaaaccctaaagagcagatccaagcttatgtctttgatgtggttagggctttgggtcccaatgatgacgcttgatgctctttttgaanaaaatggtgaagttnccaantctgttcttgaggagcttgngaangtgattgggtgcttantgggtaca

SEQ ID NO: 7232 - DNA, 459 bp, Arabidopsis thaliana
  unsure at all n locations
  Clone ID: LIB24-091-Q1-E1-A6
acgcgtccgctctaacacaaaaaacaatctcagatattaaataaagtgttaatcaaccggagaactctccgacaaaacctcgccgacgattttccgacgatgaaagatgggctttttcgggagactgttcgggagtaaaaaaaagtctgataaagctgcttcgtcgagagataaacggaggtggagcttcaccaccagatcttcaaattccagcaagagagctccggcggtgacgtcggcttcggtggttgagcaaaatggtttggatgctgacaaacatgcgatagctgtggctgctgcgacagccgcggtggcggaagcagctcttactgctgctcatgcggcagctgaagtcgtgagactaacaagcggaaacggcgggagaaacgtcngtggcggtggaaactcgtcggtgtttcaaataagaangaaataaccgtcggtngggctcaaggagaa

SEQ ID NO: 7233 - DNA, 485 bp, Arabidopsis thaliana
  unsure at all n locations
  Clone ID: LIB24-091-Q1-E1-A9
ctgttaccctgccgtaccggtccgaaaattcccgggtcnacccacgcgtccggagcaacanaagaagaaccggagacgatgacaaaggattgctctggaaacttccccaagttaggatcatgagacattggcaaagttggtccagcttttggactcggtgtcggttgcggatttggtttcggcgccggtcttatcggaggtgtangattcggnccannagttcctggattacaatttggtcttggatttggagctggttgtggaattggtgtaggttttggctatggtgttggaagangagctgcttatgatcactctcgttcttattacaacgttggaaaaccatctctgaatgaagttgattcactgattgatgaacttgttgttagcacgaagaancttgtgaaagctactacaaatgaaatcgacaantggntaaaatgatgaactttaacgatttgttgcanctccaaagtaaatgggta

SEQ ID NO: 7234 - DNA, 508 bp, Arabidopsis thaliana
  unsure at all n locations
  Clone ID: LIB24-091-Q1-E1-B1
ngttagcctgcccgtatttagnccgncctncgcgggtccanaccangcgtnggcggaaatccagcttatagaagcatcngtgcggcagcgttggctgcgtcagggaggttagaagaagcagttaaagaatgccttgaagctgtgagatgtgatccttcttacgctagagctcatcagagactcgcttctctttatctaagattgggagaagctgagaatgcgagacgtcatctttgtgtttccggacaatgtcccgatcaagctgatttgcagaggttgcagacgcttgagaagcatctcagactgtgtacggaggctcgaaagatcggtgattggagaacggtgattagcgaaatcgatgcagccattgcaaatggagctgattcttctcctcagcttgtagcttgtaaagctgaagcctttttgcggcttcatcagataaaggattcagatttgtgtatatccagcantccgagaatgggttatcaccatactcaaccaacctgag

SEQ ID NO: 7235 - DNA, 466 bp, Arabidopsis thaliana
  unsure at all n locations
  Clone ID: LIB24-091-Q1-E1-B10
acgcctgncccgtaccggtccanaaattcccgggnccacccacgcgtccgaacacgcgtccggtccacttctttgggctaaattcagggttttgtgaagaatgggtaacagagtaatctgcatgaagaagaaagatgttgttatcanaagtggaggagatgggtccagaagcaagagagtgaatcgttcacagaggaagttgcttgctgatgaagagaatttgcatcgaagagctttgtctatggctattcatcaagctcaagtttctcaagagatttgatggatccatgtctagacgaatcgggtctactagctctagaagaggaacactctctgactcattttctaataacangcaggttcctgagtttttgggagancttgaaggttaagaaattcgttttggtgcatggtnaaacggtttgggggcatggtgtttgggaacaaaaacctantgccgtccatt

SEQ ID NO: 7236 - DNA, 489 bp, Arabidopsis thaliana
  unsure at all n locations
  Clone ID: LIB24-091-Q1-E1-B3
acgtttccctgnccgtattgtccagncttcncgggtcnaaccacgcgtccngaaagctgcaaggacggcctttgatgaaggaccttggcctaaaatgagtgcttatgaaaggtcaagagttttgttgaggtttgcagatttggttgagaaacacagcgaagagctcgcgtctctagagacatgggacaatggcaagccttaccaacaatccttgaccgcagagattcccatgtttgcaagattgttccgttactatgctggatgggcggataagattcatggactaacaattccagctgatggaaactatcaagttcacacattacatgaaccgataggtgtagctggacagatcataccgtggaattttccacttttgatgtttgcttggaaagttggtcctgctcttgcttgtggtaacaccattgtcctcaaaaccgctgagcaaacacctctcaagggtttctatgctggaaaagctttccntga

SEQ ID NO: 7237 - DNA, 497 bp, Arabidopsis thaliana
  unsure at all n locations
  Clone ID: LIB24-091-Q1-E1-B7
gccaatgtttacccggccgtaccggtccaaaaattcccgggtcnacccacgcgtccgatcatgagagagttcaggtctggttcctcccgtgttctcatcaccactgacctcttagctcgtggtattgatgtccaacaagtctccctggttatcaacttcgatctcccaactcagccagagaactaccttcaccgtatcggaagaagtggaaggttcgggagaaagggtgttgcgatcaatttcgtgacccgtgatgatgagaggatgctgtttgatattcagaaattctacaatgtggttgtcgaagagctgccttcgaacgtggccgatctgctgtgaagggagaaaagaagtcggttctgttgctgtgtttgctctgccgtactagtatcaccggagaagaaaggttttcttgttttgcaaggcactctttgatctgattttgacccgtcgtctatcaagcgatttacatttcttaaattttctaantgttggtc

SEQ ID NO: 7238 - DNA, 450 bp, Arabidopsis thaliana
  unsure at all n locations
  Clone ID: LIB24-091-Q1-E1-C12
acgcgtccgnaagacgcgtgggcggacgcgtgggcggacgcgtggggtcgaggatttcaaagccgcctggtcggaatctcacatccgtcaaatggaagacggaaaagctatccagctcgtccttgatcagagcactggatgtggatttgcttccaaaagaaaatatctattcggacgagtgagcatgaagatcaaactcattcccggagactctgccggtacggtcaccgctttctacatgaactccgatacggccacggtgagagacgagctagattttgagttcttgggaaacagaagtggtcaaccttactcagtgcaaacaaacatatttgctcatggcaaaggagatagagaacaaagagttaatctttgggttcgacccatctatggattaccacacttacactatcctaagggnacacaaanacaattggtttttancgtaaa

SEQ ID NO: 7239 - DNA, 509 bp, Arabidopsis thaliana
  unsure at all n locations
  Clone ID: LIB24-091-Q1-E1-C2
gaangttagcctgccgtattggtccgccttcccgggtcaaccacgcgtngcanctgaagaagcaaacancattagaaaagagatgcaagcaattcacatcgtgacgacgcgattgagctcaagctttattaggcctgttcttcttgacttcgtttcntgttcgcctctacgccagttctctacccctangcgctttatctgtgccgcgagcaaggtcaatggaggaggcaggtcaggttcgattgttgctccattggtagtgaatgaagaatttcagaacatcgatgtcaatcctcctaaaggaactcgtgatttccctcctgaggatatgcgactccgcaactggctcttcaaccacttcaaagaggtctcacggttatttgggtatgaggaagtggattttccagtactggagacggaggcattgttcatcaagaaaagctggggaggagattagaagaccaaagtttgtccttctacgtttccganttcatcngtttaactaagct

SEQ ID NO: 7240 - DNA, 473 bp, Arabidopsis thaliana
  unsure at all n locations
  Clone ID: LIB24-091-Q1-E1-C9
tacngccccaaaaattcccnaggtcnacccacgcgtccggtttctaagtctctcgtccttttcttttaaccacactccttgcttgagattcaatcgaaaactgaaattcgcaagcctccactgctcgccgtcgcactcatcggaatattccattggcaccgtactaccctgaaatcatctcatcagatcaaaacgggagtttaactagaattgcgtggattaatggggaagaagcagagcgagatatctgcaatggagatcgacgatccgaaatctgaaagctcggatcagatccttccaaggttctcgatcaatgttctgcagctgatgaaatcttctcaggcgcaacatggtctgcgtcatggtgactatgctcgctatcggaggtattgctccgcacgtttgaggaggttatacaaagtccttgaaattcactcatgggccgtggaaaatacactcgaacgaggccantc

SEQ ID NO: 7241 - DNA, 467 bp, Arabidopsis thaliana
  unsure at all n locations
  Clone ID: LIB24-091-Q1-E1-D2
acgcgtccgcnaactcaaatcttcaatcttcatcttactctctaattgctttcctattccgatctctgtttcttcataaagtctcaatcttttttttctctatggccggaactaaagattctcatgtagtggagattccagtagatgaagagcataaagagagacaacaacaacaacagttggttgcggtctcaaatccgggaatgggaatactcaaagtgattcagcagcatccgttgtctgaaatctcagagagtccaggacatttgttgcttttgaagttatggcaaagagaagaagatttgttctgtcgtcgtgttcttcttaaagaatcaagactaagagtcaatcaaaagagagatctttcagctttgttgtttcttcctagtcttccatgggttcttcctcacacttgtctactcctcntccttgttccgatgaagcctgacctggtgaaagttantccg

SEQ ID NO: 7242 - DNA, 429 bp, Arabidopsis thaliana
  Clone ID: LIB24-090-Q1-E1-H9
ttgtttatcacaaaggtcgagctcctcgtggcgaaagaaccaattgggttatgcatgagtatcggttggttgatcaagaccttgataaaactggtgttcaccaagatgcgtttgtgctttgtaggatttttcagaagagtggctccggacctaaaaatggagagcagtacggtgctccgtttgttgaggaggagtgggaggaggaggatgatatgacatttgtacctgaccaagaagatcttggaagtgaagatcatgtttatgtccatatggatgacattgatcagaagtctgaaaactttgtggtctatgatgccattcctattccgttaaactttattcacggggagtcgagcaataatgttgaaacaaactactcagactccataaactatatacaacaaacaggaaactatatggacccgggtg

SEQ ID NO: 7243 - DNA, 446 bp, Arabidopsis thaliana
  Clone ID: LIB24-090-Q1-E1-F5
acgcgtccgcccacgcgtccgaccagctgatgatgtgaaaactgatatttcacaatcaagtaggataacgggggacaacactcacaaggattataatagtcctaccgcaaagcgaaggaagaaaggagggaacattgagctgagtccagtggagaggtcaaccaatgattcacgcattgtggttcacactcagactctgtttgatattgtgaatgatgggtaccgatggcgtaaatatggtcagaaatcagtaaaaggcagcccatatccaaggagctactatagatgttcaagccctggatgccccgtcaagaaacacgtagagaggtcatctcatgacacaaagttgcttataacaacttacgagggaaaacacgaccacgatatgcctccaggaagagttgttactcataataacatgctggactcggaagttgatgataaag

SEQ ID NO: 7244 - DNA, 458 bp, Arabidopsis thaliana
  Clone ID: LIB24-090-Q1-E1-G1
ttctcaattcctcaatccttactctcttccagggtaagatcttatatgaaatgatttgctaagaggactataagtctcggtgatcggggaattcgatatggaggagagtgaaacaaaggggagaatcagtcaagaaactgataaggcttgtgtttcagttgagagaattgggtctactttactctcatcatttgtgaagaaaggtaaagaagtatcaaataagagaaattctaagcagaataagcgaaaagcggaagaagaactctgttcgaaatcaagaaccaagaagtactctcggggatgggtccgttgtgaggaaatggaggaggagaaggttaagaaaacaagaaagaggaaaagtaagagacagcaaaaggataataaggttgaggttgatgattctttaaggttgcaaaggaggacaaggtatttgctcattaaagatgaagatgcagcag

SEQ ID NO: 7245 - DNA, 443 bp, Arabidopsis thaliana
  Clone ID: LIB24-090-Q1-E1-G10
acgcgtccggggaggagtcgcttctcttctcttgagtaatttagtccctttttgtgttatggaatcaattggttgatgaacaaatacaagtgtaaaacgatgccgggtttaacaacacacatgaatgagcattactcttcttctgggttttggtctgaggacgacgatggacttacctacgatcagttggaccagttctggagtgagctgtcgtcgaaagctaggcatgagcttcttaggattgacaagcaagacactgtttgagcaagctcgcaagaacatgtgctgttccagatgccttggactgttgcttgaaggcttcgcccaagattctttctgctgggagggccgcgtacgaaaaaagaatgatgggaccctccaaagataactgtaaatctaatggcactaggaaatgtacggttgcgtaccagaaccctcctgtt

SEQ ID NO: 7246 - DNA, 422 bp, Arabidopsis thaliana
  unsure at all n locations
  Clone ID: LIB24-090-Q1-E1-G11
tctcactctctccgtagtctgagactcgccggaaaagcttgtattggcttctcttcgatttctggcggaagtaaggatatcacgtgagctatgaagttcctcatgcaatccatttctgggaggaatcgatctctggttcgagctctagttagtcggcgttacttcgcttcatcgccggaggaaatcgcaaagagaaattacgccaacgatctgtcggaatacaacaccgctgtcaactccgtcacagctcagcgcaggcactatttgctgagggatgtttatgatgatatgaagcttgatggtgtgcagcctacagctgatatcttccattcatttgtcgtgggaacgatgaagggtgctcggttaagcgatgcgttctttttccgggaagaaatgaaagccatggggattgctccaaatnt

SEQ ID NO: 7247 - DNA, 492 bp, Arabidopsis thaliana
  unsure at all n locations
  Clone ID: LIB24-090-Q1-E1-G5
ntgttcacgcctgccggtaacggtccgnaaattcccgggtcgacccacgcgtccgtatcagtccccgccgagaatcgagaagcagcagccatggccgacgtagttcaataccgcctcgagcggatggttgacgagcttgatgatctagaacgaagagaaatcttcactcgtgctgagatagctgagatcgtgaagcagcggcgtaagtttgagtaccggctcaagcgtccaagcccactcaaagaagatttcatagcctatattgactatgaggttaagctcgatgagctccgtcagctacggaggaaatcggtggcgcgtgtgactaagaagagaaagaagaaatcagtatctgatttcgccggtgtggctaggattgttgagatttatagattggcgacgatgaggtataaaggtgatatcaatttgtggtttaagtatctcgagttttgtaaacagaagaagcatggaagaatgaaaaaggcattggct

SEQ ID NO: 7248 - DNA, 450 bp, Arabidopsis thaliana
  Clone ID: LIB24-090-Q1-E1-G7
acgcgtccgcgcttcctcctcctcgtgcggctgtctctgctttcgttccaaagggaacccttaagaagagtcttagcaataccgttgccgttagccaggtgagaatccttaagcgcggcgaagaaatccccaaggagacttcagatctggttgtggaaatgtcagatctgggatctactcgtcggattggaccagatccgggtttgattccgggtcagatccgtttatctggccgcaaatcgaaatcagcaccgttttacgccggtcctgtgaccatgacctcgccgcctcctaagcgatgtcccgcttccagctttcttcacgaaagaaggcaacaaatgatctcatcaaggatcttcgcctagacatcgcctgacggtgtctgtcaccgatcatttttgattttttaaaaaatcctcccgatgattcaaatggttaccaagagtgtta

SEQ ID NO: 7249 - DNA, 446 bp, Arabidopsis thaliana
  Clone ID: LIB24-090-Q1-E1-G8
acgcgtccggggaggagtcgcttctcttctcttgagtaatttagtccctttttgtgttatggaatcaattggttgatgaacaaatacaagtgtaaaacgatgccgggtttaacaacacacatgaatgagcattactcttcttctgggttttggtctgaggacgacgatggacttacctacgatcagttggaccagttctggagtgagctgtcgtcgaaagctaggcatgagcttcttaggattgacaagcagacactgtttgagcaagctcgcaagaacatgtgctgttccagatgccttggactgttgcttgaaggcttcgcccaaattccttctgctgggaaggccgcgtacgaaaaaagaatgatgggaacctccaaaagataactgtaaatctaatggcactaagaaatgtacggttgccgtaccagaaccctcctgttcat

SEQ ID NO: 7250 - DNA, 486 bp, Arabidopsis thaliana
  unsure at all n locations
  Clone ID: LIB24-090-Q1-E1-G9
ctgtncacgcctgccggtaacggtccgaaaattcccgggtcgacccacgcgtccgagcggttgttatagccactggagttcacaccttctttggtaaagctgctcaccttgtggacagcactaaccaagttgggcacttccagaaagttcttacatccattggaaacttctgtatctgttctattgctattggtatagcgattgaaatagtcgtcatgtaccctatccaacaccgaaagtacagagatggaattgacaatctcttggtcctcttgatcggtggtatccccattgctatgcccacggtcttgtctgtgactatggctatcgggtctcacaggttgtctcagcaaggtgctatcaccaaacgtatgacagccattgaagaaatggcgggaatggatgtcctttgcagtgacaaaaccggggacactaacccttaataaattgagtgtggataaaaacttggttgaggttttctgcaag

SEQ ID NO: 7251 - DNA, 485 bp, Arabidopsis thaliana
  unsure at all n locations
  Clone ID: LIB24-090-Q1-E1-H11
ctgtncacgcctgccggtaacggtccgaaaattcccgggtcgacccacgcgtccggatgctcacaaagcagggctaaaactatatgcgtcaggttttgcaaatgatgttgatattgcatataactacagttgggatccagtttctgaatatctatcttttgttgacaatggcaatttttctgttgatggtatgctctctgattttcctttaactgcatctgcatctgttggtaagaaaattatcttctacagacaaaatattatttcttaatacattacttgtaatactcaaaatcaaacattttatttttgtatttcttcagactgcttctcccacattggcagaaacgctacaaaacaagtggattttcttgttatatcaaaaaatggtgcaagtggggagtatcctggatgtacaaaattggcatatgagaaggcaatcaaagatggttctgatgttattgattgccagttcaaatgtcnag

SEQ ID NO: 7252 - DNA, 445 bp, Arabidopsis thaliana
  unsure at all n locations
  Clone ID: LIB24-090-Q1-E1-H12
cacgtccgcngattcccaatcttnnnnnnnnnnnnnnnnnnnnnnnnnnnnnnnnnnnnnnnnnnnnnnnnctagctccatgttcgaaacagagnnnnnnnnnnnnnnnnnnnnnnnnnnnnnnnnnnnnnnnnnnnnnnnnnnnnnnnnnnnnnnnnnnnngaagagaagaaatagaaaaaccagattcaatctacctccgggtaaatccggttggccatttcttggtgaaaccatcggttatcttaaaccgtacaccgccacaacactcggtgacttcatgcaacaacatgtctccaagtatggtaagatatatagatcgaacttgtttggagaaccaacgatcgtatcaagctgatgctggacttaatagattcatattacaaaacgaagggaaggctctttgaatgtagttatcctagaagtataggtggggattcttggg

SEQ ID NO: 7253 - DNA, 505 bp, Arabidopsis thaliana
  unsure at all n locations
  Clone ID: LIB24-090-Q1-E1-H4
tgttacacctgnccagcagncngtaanggtccaaagtncacgngtcnatccacgcntacgcnnnnnnnnnnnnnnnnnnnnnnnnnnnnnnnnnnnnnnnnnnnnnnnnnnnnnnnnnnnnnnntggtatttgctttgtatgtttgttttgagatcaaaatggcttcaagtgcttcaaagttcatcaagtgtgtgactgttggtgatggtgctgttggtaaaacctgtatgctcatctgctacaccagcaataaattccccactgactacataccaacagtttttgacaactttagtgcaaatgttgttgttgaaggcaccactgtcaatttggggctttgggacactgctgggcaagaagactataacagattaanggcttaaagttacaaggggaacaagaagttttccgtcctggccttcccaaataatcaagccgaacctagctacgaagaaatgtttttaaaaaagtgggttccctgaactccaacacttttgctccaag

SEQ ID NO: 7254 - DNA, 448 bp, Arabidopsis thaliana
  unsure at all n locations
  Clone ID: LIB24-090-Q1-E1-H6
acgcgtccgttcaaatttctctcctttaaacctttctcaatcatctttcttctgccttggaatcctgatcatggcgtcgtcttctctcacttcgaaatccattctcggatccaccaaactcggttcttcttctcttccctcggagctccgtcgtctctcttctcccgccgttcagatctctctccgtacccaaaccaggaagaacttccagatacaagctactggaagttcatatgggactcattttcgagtttcaacttttggagaatcacatggaggaggagttggttgtatcattgatggttgtcctcctcgtattccacttactgaatctgatttgcaattcgatctcgatagaaggagggctggncagancaaggatnacaactcctanaaaagagactgatactgccnggatatcgtccgggaggcctcggaagggatgacc

SEQ ID NO: 7255 - DNA, 433 bp, Arabidopsis thaliana
  unsure at all n locations
  Clone ID: LIB24-090-Q1-E1-H8
ctctctctctctctcgtttccaacatcattccatggctgacgatagcgaattgtatcctcgtttcttcaaagtgttcctcgttgaatcggcttctgaatcgttgatgattccgttgccttttatggcatttcttgctgatccattgccaaagacagtgaagctccaaggtcttggaggaaaactttggactgtgagcttgaagaaaataagcggagctgcgtatcttactagaggatggccaaaattcgcagaggaacatgagctgaagaacggagagttcatgacatttgtgtatgatggtcatcgtacctttgaagtgagtgtctttgattcgttggggtagcaaagaggtcagagctgaaatacaagccatacnactttctgattctgatcctgatccngttgtggaagacgaaaaagactcaactgatg

SEQ ID NO: 7256 - DNA, 408 bp, Arabidopsis thaliana
  unsure at all n locations
  Clone ID: LIB24-090-Q1-E1-F2
acgcgtccggctaaacatactgataatagtctcataagtgagctgtacaagcaataggtctcatcaaaacaccaaacctgggacaacgcaaaagaaaagctctgcttcgattgtcaatcttgtaaagcgggtctactcgacaacgtcaaaagcgcttggaagaaagttgcaatcgttaacatcgtcttccttgtcttcctcatcattgtctactctgttggttgctgtgctttcaggaacaacaagagggatgacagttattcccgtacctacggatataagccttgaacatagtttatcgggttttangacagagattcgttgatacattgttggagtttggttttntgtttgatganttttagcnttggtgttttgatgagacctattgccttgtaagctcacttt

SEQ ID NO: 7257 - DNA, 470 bp, Arabidopsis thaliana
  Clone ID: LIB24-089-Q1-E1-C1
acgcgtccgagctaatcctatgtttaagttctgctccaagattgaaaaccatgaatacaagggaaaaggaaaccaaagaactcgtaagaagagagcttgtgagactgctccacagccaaggaatgtgaaaaagactccaagattaggagtagagggaccagtgtatcaagttgatgaggagagaggacacactcaggtttcaaacagaaccaacaccatctcaggaaatttacagcgcttgctaccaccatcgtgctcagtctccgatcaggtggctaatgtgaaacagggcattgtagatagtctgaacactgtgagacaatgtcggactgagcttgagacaagtgaacaaaatctgcaagcctctttgctagcaattgacgccttaagggagaggatatggggaatcagcaaaatcctcagcagtaatctggtttgaagtgagactgaagatggggaaagaaacaaag

SEQ ID NO: 7258 - DNA, 499 bp, Arabidopsis thaliana
  unsure at all n locations
  Clone ID: LIB24-089-Q1-E1-C6
ctggccctaccgnaccggaaattcccgggtcgacccacgcgtccgctaatgcacttgcccgcttgaaggtctttgaaggagttcctactccatatgacaagatcaagaggatggtcgttcctgatgctctcaaggtcttgaggctgcaggctggacacaaatactgtctgttgggtcgcctttcttctgaagtcgggtggaaccactacgacaccatcaaggagctggagaacaagagaaaggaaagagctcaagctgtttatgagagaaagaagcaacttagcaaactcagagctaaggccgagaaggttgctgaagagaagcttggatctcaattggatgttcttgcacccgtcaagtactgaattcaatcagtttatcgtatttgaatgtttttgcaagttttgctcagacattatactattatattacgaggttttgttgtatgcgattttgacntaagttaatttcttgaattcgactttacntaagttaattc

SEQ ID NO: 7259 - DNA, 463 bp, Arabidopsis thaliana
  unsure at all n locations
  Clone ID: LIB24-089-Q1-E1-C7
acgcgtccgcttctctgcgatttgaatgaacanatccaacttcattcacaaatttcatcactctgcaaaaccacatacaatggaagataacgaagaagaagaagaatcaccgacggagttaaacacgatcaccggtttaagcggttttgtagttatctctcccgataagctatctctcaaatacactggcgtttctcaacacggtcacgatgtcggcgttgttcaagctaataaacctgctccgtgtaaacgtttcgcttattacttcgagatttatgttaaagatgctggtgttaaaggacgtgtctccattggtttcactactaatagtttcagaatcgcgagacatcctggatgggaactcaacacttgtggttatcatggtgaagatgggcttatatatctaggaaaacgtcaangtgaaacctttggtccgacttatacaactgggtgatactggttg

SEQ ID NO: 7260 - DNA, 261 bp, Arabidopsis thaliana
  unsure at all n locations
  Clone ID: LIB24-089-Q1-E1-D2
aaaccaccgtggtttgaggcattactggggtctccgtgtcagaggacaacacaccaagactactggtcgcagaggaaagactgttggtgtctcaaagaagcgttaagaaagatccaatgttgctacttacttctgtattggatacttcataaggacctgtttttatttcgtactaggacctttttgtgtgacgcttttcgagctttttgtgatcacattcctctgtttttcnnnnnnnnnnnnnnnnnnnnnnnnnnnngg

SEQ ID NO: 7261 - DNA, 506 bp, Arabidopsis thaliana
  unsure at all n locations
  Clone ID: LIB24-089-Q1-E1-D4
atggttcccgtgcctangcctccggaatcccaggtcgacccacgcgtccggcggtgcttgngactcaataggtttagaatatcagataggttaaacatcgataggtacactcaagggttcttggagaatcataaaggtctaacagaggattactggcctctctatgctgttgctggtggcattggagtctttatcagttgggtttggtcattgctgcttggctcttacgccaatgagatgatgaaagtttcggttcacatcttaacaacctatctagctgtagttagtgtactatgtttctggtgcagactgttcttttggggcggtgcattcgctgttggatctctgttgcagttcttgtatgttatttcagttatagacagacttcctttcacaatgctggtcctacggaaagcgctgaaattagtctggggacttcctaaggtgataatggtggcacatgctttcacagtagtcatgcttttgtggatgtccccaatggtcct

SEQ ID NO: 7262 - DNA, 507 bp, Arabidopsis thaliana
  unsure at all n locations
  Clone ID: LIB24-089-Q1-E1-D6
ctgttccctggcctaccggtccggaattcccgggtcgacccacgcgtccgcccacgcgtccgcgagcttcttcttcttctagggcttccacgcgactacgcctgccaaaatcattctacaggaagcatgaagccagtcttctgtgggaactttgagtatgatgcgcgcgaaggtgacctggaacgactattcaggaaatacggcaaggttgagagggttgatatgaaagctgggtttgcttttgtatacatggaagatgaaagggatgcggaagatgccatccgagcacttgaccgctttgaatttgggcgtaagggacgcagacttcgtgttgaatggacaaagagtgaacgtggaggtgataaaagatctggtggtgggntcaaggagatcctcatccancatgagaacttccaaagactctctttgtgattaactttgatgcggataatactaggacccgggatttaagagaaaacacttttgagccgtatggaaagatctaaa

SEQ ID NO: 7263 - DNA, 471 bp, Arabidopsis thaliana
  unsure at all n locations
  Clone ID: LIB24-089-Q1-E1-E1
acgcgtccgatactcgtttcttctctctttggtttcatacagatcccaaatttctagggctcctagtcctttgatttcttcgactggaatcgcaattccccactacgtcaagctggacagacaccgaagggatcgccatgagagtggcggctacgaggattcctaccataaccaccgagcccatcccagaggtccatctcgtccctcagattcacgcttcgaagaggatgatgatgattttcgccgccaccgtcgtcgtcgtggaagcagccctagcaattatcgaattggaattgggggcggaggaggaggtaatggtggtcgacgctgggaagatgacactcctaaggattttgatggtcccggagatggaggtttccggcaaatgaatggtcccccanatagagtanattttaaacctaagggtcctcaacaagggtgggaagttttccgnctaaggggttttgccca

SEQ ID NO: 7264 - DNA, 480 bp, Arabidopsis thaliana
  unsure at all n locations
  Clone ID: LIB24-089-Q1-E1-E10
gtaccgctccgaaaattcccngganncagttttagggttcngtcgttcttattcactctcgattcttcgcttagcttcgtcttcttcatcgaagatttatctctacaattcgctgtggatcttcggggcgggcgaatttcattgattttccattgaatctgcgaggttacatatccggatttgtgttatcggagctgaatttaggaatggaggtagagaaatccaagtataggagcgaagatttggatgtggtggaggaggaggctgatttgaagaagagtcggcgagatcgtgatcggagtaatgagcggaagaaggataagggttcagagaagcgtcgagagannnnnnnnnnnnnnnnnnnnnnnnnnnnnnnnnnnnnnnnnnnnnnnnnnnnnnnnnnnnnnnnnnnnnnnnnnnnnnaacgtaaggagaaaggagaaggaaccgganaacggagggataaggatanggttgaag

SEQ ID NO: 7265 - DNA, 511 bp, Arabidopsis thaliana
  unsure at all n locations
  Clone ID: LIB24-089-Q1-E1-E3
gtttgccttgncctagcctccggaaatcccaggtcgacccacgcgtccggagagaatcaaaaatcaaaatgtcttctcctactgcgactaagtacgacgtctttctgagtttcagaggactcgacactcgtcgcaacttcatcagttttctctacaaagaactcgttcgaagaaaaattcgaactttcaaagacgacaaggagctcgagaatggccggaggatttctccggagctcaaacgcgccatcgaggagtcgaaattcgccgtcgttgtggtctctgtgaactacgctgcgtctccttggtgtctcgatgagcttgtgaagattatggatttcgaaaacaagggttccatcaccgtgatgcctatcttctacggcgtggatccttgtcatttgagnnnnnnnnnnnnnnnnnnnnnnnnnnnnnnnnnnnnnnnnnnnnnnnnnnnnnnnnnnnnnnnnnnnnnnagtancttcgtggagacgagcattgaccaatttagcgagta

SEQ ID NO: 7266 - DNA, 515 bp, Arabidopsis thaliana
  unsure at all n locations
  Clone ID: LIB24-089-Q1-E1-E5
taccgntccggaaattcccgggtcgacccacgcgtccgcccangcgtccgcggacgcgtgggctcgagactgtagagtgaagtttgatttatttagagagataagttaaaaaaaaaatggtcggtatggatttgttcaaatgtgtaatgatgataatggtgttggttgtctcttgtggtgaagctgtttctggagctaagttcgatgagctttatcggtcaagctgggctatggatcattgtgtcaacgaaggcgaagtcacaaaactcaagcttgacaattactctggagctgggtttgaatcaagaagcaaatacttgtttggtaaagtcccaaccaagattaaccttgttgagggtgattcagcaggaacaagtccactggcttccaacatgttcttcaagatgggcccgaaccaacaaacgaaattccgatttttgagtttcttaaggggaaacaactaaccggncgaacccttacataagtccaagaacaaatatcctacgttgaacgga

SEQ ID NO: 7267 - DNA, 512 bp, Arabidopsis thaliana
  unsure at all n locations
  Clone ID: LIB24-089-Q1-E1-E7
taccgntccggaaattcccgggtcgacccacgcgtccgcggacgcgtgggcgtgaacaaggagccgtcacacctgttaaaaaccagggtatgtgtggttcatgctggtcatttagtgcgataggagctcttgaaggagcacattttctagccactaaagagcttgttagcctcagtgagcagcagctcgtagattgtgaccatgagtgtgatccagcacaagccaattcatgtgattctggttgcagtggaggactaatgaacaacgcttttgagtacgctcttaaagctggtggtctaatgaaggaagaggactatccttatacaggacgtnaccataaccgcctgtaaattcnacaaagaccaagaattgttnccaatttngtccaacttnaaccttgtcccctncgggatgaaagaaccaaaatcncctgcctaatcctantccaacatgganctccaagctaattgcctaacaattgcgaatgtnggaatgcaaacaatacataagga

SEQ ID NO: 7268 - DNA, 483 bp, Arabidopsis thaliana
  unsure at all n locations
  Clone ID: LIB24-089-Q1-E1-F1
acgcgtccggngggaantatntgtnttggactgaatagatttcagaaagcattagagcttctttacaatgttgtgactgctcctatgcatcaagtcaatgccatagctcttgaggcgtacaaaaagtacatattggtgtctctcattcacaatgggcagtttactaacactctccccaagtgtgcttctacagcagcacagaggagcttcaagaactataccggaccttacattgaactgggtaattgttacaacgacgggaagattggtgaactagaggcattggttgtggccaggaatgcagaatttgaagaggataagaaccttggattagttaagcaaagcaagtgtcatcccctttacaaagccgtaacaatctgagaattgacacagaagttacttnganccctggtccgcttcaagatatancccaacatggtccaactttggtaatggctaagganggcggaaaatgcatgttcc

SEQ ID NO: 7269 - DNA, 489 bp, Arabidopsis thaliana
  unsure at all n locations
  Clone ID: LIB24-089-Q1-E1-F11
aactgtttagcctgnccgtacngctccgaaaattcccaggtccacccacgcgtccggctgattctcgccttctcggtaaggttcaaggcatggaantcgggctctctctaggcttgaaaagtgatgaaggaggcttaaaactttctctttcggaatgtggatgccatgtggaagacattaccattgagttggaaggaggagcatcanggttttatcangggatggttaatgcanttaaagaccaanttgggtcaagtgtggaangtnccattgccaanannctcacggaaggagtatcataccttgattcattcctacaaagccttccaaaggaaatcccagtggatgataatgctgnccttaatgtcactttcaccantgatcctatattgagaaattcatctatcacttttgagattgatggcttgttcaccagaggagatacaantcaagtcttaaaatcnttcctcaanaagtctttatcttaat

SEQ ID NO: 7270 - DNA, 495 bp, Arabidopsis thaliana
  unsure at all n locations
  Clone ID: LIB24-089-Q1-E1-B3
cncaggaattcccaggtcgacccacgcgtccgggccaaagttccgactttttgcttctcccagaggctaatcatggacgctgtggcggcgaatttgtttcaatctccttccttactgcgtcaaacttccgaaaggttgatattttcgacgcccaactgtcctggcttcatgngaattagctccggacctcaatttcgtctcagncaaaactcttctcttaaattctcgagaccatttcaaagcggaacaacttgtgttaaatctcggagaagctttgtggttaaagcttcagcttctggtgatgcttcaacagaatcaatcgcgccgcttcagttgaagtctcctgtgggacaagtttctgtcacaagatattaagtgagccatcctcatcttgttccaacagctgttgaacagcagcttgaacagctccaaattgatcgagacgctgaagaacagagtaaagatgcatcctctgtccttgggaacaaacantgt

SEQ ID NO: 7271 - DNA, 499 bp, Arabidopsis thaliana
  unsure at all n locations
  Clone ID: LIB24-088-Q1-E1-E4
aactgttacgcctgccttaccggtccgaaaattcccggntcgacccacgcgtccggataggtgtagctggacagatcataccgtggaattttccacttttgatgtttgcttggaaagttggtcctgctcttgcttgtggtaacaccattgtcctcaaaaccgctgagcaaacacctctcacggctttctatgctggaaagcttttccttgaagcgggtcttcctcctggtgttctgaatattgtttcgggattcggtgcaacagcaggtgctgccctcgcgagtcatatggatgtagacaagcttgcttttacaggatcgactgatacggggaaagttatacttggattgggctgctaacagcaatcttaagcccgtaactctggaaacttggagggaaatcaccgttcaccgtattcgaagatgctgatattgataaaagctgtaaaccttgcanactttgccctcttcntcaaccaaggggaatgttgctgccccgg

SEQ ID NO: 7272 - DNA, 434 bp, Arabidopsis thaliana
  unsure at all n locations
  Clone ID: LIB24-088-Q1-E1-E6
aaaagggaaaattaccagacaagagtnnnnnnnnnnnnnnnnnnnnnnnnnnnnnnnnnnnnnnnnnnnnnnnnnnnnnnnnnnnnnnngaaaatctagaagaagagaaagctacaaaaatctcaacatcgaggtaagagttttggctacagagcaaccatgctaacttgcgccttctcccaaaatcttatccactaatctcggtaaggaaagtgatgttggcaaaatggtgaagaaaggaagttggttttctgctatcaaaagggtttttactccacattccnnnnnnnnnnnnnnnnnnnnnnnnnnnnnnnnnnnnnnnnnnnnnnnnnnnnnnnnnnnnnnttttgggaagctaaggcatggcgagaccaattcatttcttcccatcttcagagagcctagtantatccaaaagatctgggcgaaggctg

SEQ ID NO: 7273 - DNA, 503 bp, Arabidopsis thaliana
  unsure at all n locations
  Clone ID: LIB24-088-Q1-E1-F2
gaactgttaccctgcctgtaccgggccgaaaattcccggatcgacccacgcgtccgtccacttcgatttttcaatcagtaatattggtggttcagagatgatgatgatgaatcttttaaggagatcagcgatagccatcggccgccaatcaaaatcgaaactggcgtcgttttcctccgctacacaaccttgttccggaatcccaaaatcgtccaagagggtttttagcaactcatttctttcaaaggactctactggagctaatggactattgtttcgcttccgaaacccgcaagcaagtatatgtacggaagctcgtccaaagaacatcaactcatcttactttaccaagatcttttgcatcaagaacttcaaaagaacctgggaatcagcagaataaggctaagaaagangtgacgactgtgggaggatccttttgattctcctacataccacatccccggagaanccnggtgacctttacagaangggcgtcctaaagt

SEQ ID NO: 7274 - DNA, 492 bp, Arabidopsis thaliana
  unsure at all n locations
  Clone ID: LIB24-088-Q1-E1-G1
ngttacgccgcctttaccgggccaaaattcccggaacgacccacgcgtccgcccacgcgtccgtgatcaccggaaaatcttagccgtccgatcaaccaccgtgtactccgagaagatctcttcgattacttcaacgttcttctgattttcaccagctcagatctccgacaacattccggtatcatttctcgcttttttttcctccaaatccttatccgccagattacgaaaatgaggagcttgatccgagagaggcatagtgaaagcttatctgtgaattcttaggatttgaatctgaatactcaggctttttgattccttctccgttacatgntgattcaattttgagctcccctgctagngtaaatctcctcagctcggaaacttaggggtttagtttgggggtccttngctcttccgttgcgtaaggccaggttttaagaaaatcaggaaaaggtggggcatcgaanagcccctccaaanccccgaggg

SEQ ID NO: 7275 - DNA, 503 bp, Arabidopsis thaliana
  unsure at all n locations
  Clone ID: LIB24-088-Q1-E1-G2
aactgtttacgcctgcctttaccgggccaaaattcccgggacgacccacgcgtccgggccattggccatagagctctcgctgcctcctacagccgaatccgagaacaagtttgtttatactcatggacatgacgctactactcactggatttggaaactagccaaagctcatgtctgctcaaatgatgctggtgttcaccaacttgtgaaccactggctaaggactcatgcttccatggagccttacatcattgctactaacagacagttgagtacaatgcatccggtttacaagctacttcatcctcatatgcgctacacgcttgaaatcaatgctcgtgcgcgtaaaagcttaatcaacggaggaggaatcatcgaaagttgcttcactcccggaaaatacgcaatggaacttaactctgcancgtacaaagaacatgtggcgatttgacatggaaaggacttcctgctgatcctgttccgaggggaatgggaaaaaaaag

SEQ ID NO: 7276 - DNA, 436 bp, Arabidopsis thaliana
  unsure at all n locations
  Clone ID: LIB24-088-Q1-E1-G7
acgcgtccgctcacagaaaaacctataaagctctanagagaaagagagagagagatggnangtaaagaagaanatgttagagtcggagctaacaagtttccggagaggcaaccgatcggaacttcggctcagagtgacaangactanaangagccaccacctgcgccgttgttcnagcccggcgaagctagcttcatggtccttctggagagctgggattgctgagtttanagctacgtttttgttcctgtacatcactgttttgactgttatgggtgtgaagangtcaccgancatgtgtgcttccgtcggaatccanggtatcncttgggctttcggtggtatgatcttcgctctcgtctantgcaccgcctggtatctccgggtggacacatcaagcccanacggttacgttcggtttgttcctagctangga

SEQ ID NO: 7277 - DNA, 500 bp, Arabidopsis thaliana
  unsure at all n locations
  Clone ID: LIB24-088-Q1-E1-H4
actgttacgcctgcctttaccgggccaaaattcccgggacgacccacgcgtccggccaccaanaggcgggaaccctgattccaacacactcatcagcgacacgaccactgtgatctgtcttgatgattaccattcnttggntaggtacggtatgaaatagcagaaagtcaccgctttggacccacgcgccaatgactttgatctcatgtatgancaagtcaaagctcttaanaatggtatagccgtcnagaaaccgatttataaccatgtcactggacttcttgaccctccggagcttattcagcctcctaagattcttgncatcgaaggtcttcacccaatgtttgatgaagcgagtangagacttactagacttcagtatctacttgggncattangcancgaaagtcaaattcgcctgggaaattcananggacatggctganaagagggcacaatttggnnancatcaaaggnnaattacgaaagcccgaanagcc

SEQ ID NO: 7278 - DNA, 414 bp, Arabidopsis thaliana
  unsure at all n locations
  Clone ID: LIB24-088-Q1-E1-H5
gaaagatccaaaggattattattaaagttaaaaaatgacaaaagtcccaatctcttcgagcaaaatcagtccttaccgcatcgtgatcgttcttcgccttgtgatcttagttttcttcttccgtttccgtatcttgacaccagccaaagacgcataccctctctggcttatctcagtcatctgcgagatctggttcgctctctcttggatccttgatcagttcccgaaatggtttccgattaaccgagaaacctaccttgaccgtctctctatgagatttgaacgggatggggaaaagaacaagcttgcaccggttgatgtgtttgtcagtacaatggatncgctcaaggaaactcccataatcanagccaacacaantccttcnattttanccgttggataaccagtggaana

SEQ ID NO: 7279 - DNA, 525 bp, Arabidopsis thaliana
  unsure at all n locations
  Clone ID: LIB24-089-Q1-E1-A1
ctggtttgcctggccctaccgggtccggaaatcccgggtcgacccacgcgtccgcggacgcgtgggcggacgcgtgggcggacgcgtgggcggacgcgtgggctgagattcccgccgacatgcttctgtttcaaatatgcattccatttatcatcgagcatttcagacttcggaccacaattaagtcccttctacgctgctggttcactggggttggttgggcgcttggtttaacagacttcctcttgccaagaccagaagacaacattggtcaggacaatggaaatggtgaaccaggaaggcagaacagagcacaagtgttgcaggtcggaggacctgacagggccatggctgcgcttccagtagctgatgaccctaacagaagtcgcctccgtgctgggaatgtcaacacggggtgaggaatatgaagatgatgacgaacaatctgattctgaacaggtacaaacttttgtggtcccggataantctcccttcnacttgttgcatgggtgactcctcctcccc

SEQ ID NO: 7280 - DNA, 490 bp, Arabidopsis thaliana
  unsure at all n locations
  Clone ID: LIB24-089-Q1-E1-A11
antgttagcctgccgtacgcccgnaangtccangttcacgggtcgatccacgcgtccggnanaantgccggcggcaananggnactcattgtttctanatctatgtatcatatacatccgtaacaatcgtaagaatcacactagttccttctaacctttgaatactagtgtgcttttgtccgtcagtcgccattttgtttgtagccaaatactaaagctggatacaagttgcagtcttatgatagttctaaaatcggtaatggtgtatgtcggcttgtgtgtgtctgtgaagtanagatatagctgtaatctgtatacagtttgagatatgaagtcagttagagtttctcctttttactattacatatggcctcttttgatgctcttaaggtctgagagagccaccatgctactcattgtttctatatctatgtatcatatacatccgtaacaatcgtaagaatcacttcgtattaaaaaaaaaaaaaaa

SEQ ID NO: 7281 - DNA, 427 bp, Arabidopsis thaliana
  unsure at all n locations
  Clone ID: LIB24-089-Q1-E1-A8
tgaaggagttcctactccatatgacaagatcaagaggatggtcgttcctgatgctctcaaggtcttgaggctgcaggctggacacaaatactgtctgttgggtcgcctttcttctgaagtcgggtggaaccactacgacaccatcaaggagctggagaacaagagaaaggaaagagctcaagctgtttatgagagaaagaagcaacttagcaaactcagagctaaggccgagaaggttgctgaagagaagcttggatctcaattggatgttcttgcacccgtcaagtactgaattcaatcagtttatcgtatttgaatgttttttgcaagttttgctcagacattatactattatattacgaaggtttgttgtatgccgattttgactaatttaattccttgaantccgacttacttaatttaattc

SEQ ID NO: 7282 - DNA, 451 bp, Arabidopsis thaliana
  unsure at all n locations
  Clone ID: LIB24-089-Q1-E1-A9
acgcgtccgcnaatctctctctctctcttcaacccctcttctcaatctagggttagggtttcgattctgctagaggttttttttctcccaacttatacttctaagccctctcgtcataagccttgttgactcttcttcttaatttgaagaacttcgtaggctaagcatgtcgtgattatcccaaatttctggtgtttattcaaactccattgttacaaagattttctttgataagttaaagcaatgtatacctccgaggcagcccctgattttgttgttgaccagggcatgtattaccccgttgatgccagttatggctattactgtacaggttatgagtcacccggtgattgggagaaccatcagatgttttttggtgtagatggttcagaagtccaatacacaggtgggcagaatgaaaattctccctatatatgctatacacctaagt

SEQ ID NO: 7283 - DNA, 475 bp, Arabidopsis thaliana
  unsure at all n locations
  Clone ID: LIB24-089-Q1-E1-B12
acgcgtccgcccacgcgtccgcatttcgactttggcgtttctcgatctgttgtttctgctcccaaataaaaataaaaaaaaatcggatcggggatttccccaaatcgtaaaattaggttttgttcttcatttcaagccctagcttaagtttaatccgttaatccttattcattaaagggttttgattcctacctttgtttccgcttccctccctccgaaattttgcaaattccgttattaaaaggatcctaagtttttccggctcttgtactacgtcaaagtttcaagggattccccgaagtttcgattctcttcgtccgtgcaataaccgtgtcaagctttacgtctgggtctgcttcatcaccaagtggacttttccgtttgcaattacgaattcnaactggttcgaatccaatttaagaagggcaaaatgtccccccttcctcctgtaaccaaactccctccctaattgaag

SEQ ID NO: 7284 - DNA, 462 bp, Arabidopsis thaliana
  unsure at all n locations
  Clone ID: LIB24-088-Q1-E1-E3
cccgggtcnacccacgcgtccgtatcagtccccgccgagaatcgagaagcagcagccatggccgacgtagttcaataccgcctcgagcggatggttgacgagcttgatgatctagaacgaagagaaatcttcactcgtgctgagatagctgagatcgtgaagcagcggcgtaagtttgagtaccggctcaagcgtccaagcccactcaaagaagatttcatagcctatattgactatgaggttaagctcgatgagctccgtcagctacggaggaaatcggtggcgcgtgtgactaagaagagaaagaagaaatcagtatctgatttcgccggtgtggctaggattgttgaagatttatagattggcgacgatgaggtataaaggtgatatcaatttgtggtttaggtatctcgagttttgtaaacagaagaggcatggaaagaatgaaaaaggcattggctc

SEQ ID NO: 7285 - DNA, 420 bp, Arabidopsis thaliana
  unsure at all n locations
  Clone ID: LIB24-088-Q1-E1-B1
acaatcccttttaaacacaagaaccaactcaatacgcatcacaaagaaccctaaattcctggaagatctcaaaaggaaaattcaaaaccaaagcttcaagcaatcatcaagcaaaggaaaagctcaaattttgggtcttttatatatttatttcttaaagttacaatctttttgattgtggtttcagtgtacgaacacgcaagaactcgcgtgaaaaaaattgtatccaagcttcgtgaaaggagtctctctgtatttagtggcgttttgttctgttgttatttctgaaatattgaagcttttgatttgggtttcaagagagcagagatgtgtagtttgtcggcgattatgttgttaccaacgaagctgaaaccagcttattcagacaaacgggagtaacagtagcagcagcagctcant

SEQ ID NO: 7286 - DNA, 484 bp, Arabidopsis thaliana
  unsure at all n locations
  Clone ID: LIB24-088-Q1-E1-B2
antgttacgcctgccttaccgggccgaaaattcccggatcgacccacgcgtccgggccattagagacctcagaagaagagaagtttttgattcttcgtcgagactttactcgattttgcatcnnnnnnnnnnnnnnnnnnnnnnnnnnnnnnnnnnnnntttctgggtttcgattttgggtgagagataacaaaccctaggtgttgtgtaaatcgtgatcacatatatgctttttgagtcgacgattagagaagacgaagaagagtagcaagcaaacactatgatgaacacttctaatggaatgatatcagcgccatcttcgtcgtcttcaccggcggcgaatcctcagtcgccgggaattaagacttatttcaagacgcctgaagggaagtataagcttcactacgaagaaaacgcattcctccnggtccccttcaatacgcacatggcaaaactgttactcaggtaactatagctcaacnta

SEQ ID NO: 7287 - DNA, 493 bp, Arabidopsis thaliana
  unsure at all n locations
  Clone ID: LIB24-088-Q1-E1-B4
tgttagcctgcctgtaccggnccgaaaattcccggatcgacccacgcgtccgcaaaactagtcttgctccaggctctggagttgtaacanagtacttggcaaagagtggcttgcanaagtacttgaatcagctcggcttcagtancgttggttatgggtgcaccacatgcattggaaactcgggggatatccatgaagctgtggcttcagcaatagttgatnatgacttggtggcatccgctgtgttgtctgggaacagaaattttgaagggacgtgttcacccgttaacaagagctaactatctagcttccccaccgcttgttgtancctatgctctggctggaactgtngacattgattttganacacagcccattggaactgggaaagatggaaaacagatatttttcagggacatttggcccncnancaanaaatttgcggaggttttcaacccaanngncctcccgggaaaggtttaaacccnacata

SEQ ID NO: 7288 - DNA, 418 bp, Arabidopsis thaliana
  unsure at all n locations
  Clone ID: LIB24-088-Q1-E1-B6
ggcttctaacaaacgctgtctgaatcatatttcgattctgatttttcntcagggattcgtatagccaataagttttttcaatattcaaaacataaaccccatcaaaataatctccggaccagtttctctttcgattcagtcggaccggaaaaacantggcgtctgtgaaccctttcgatctcttggacgatgacgcanaggatcccagccagattgttgcgtctaagccattgaaagttgtggctccggttcagactgcgaagtctggtaagatgccgactaaaccgcctcntccntctcangctgtgaagggaggcaanggaacntcctngtggaggtcnggtgctggccgtggagggagttatggtcctggtgcacctggtggaancatcagggattcagggaacaatgaatggnc

SEQ ID NO: 7289 - DNA, 501 bp, Arabidopsis thaliana
  unsure at all n locations
  Clone ID: LIB24-088-Q1-E1-C2
gaactgttaccctgcccttaccggnccgaaaattcccggattcgacccacgcgtccgtgctcataaaccctaaaaatcctctctttttctcaaccttgattcttagccatggagttctggggaattgaagttaaatcangaaagccagttacagtgactcctgaanaaggcattcttatccacgtttctcaggcatcgcttggagaatgtaaaaacaagaagggagagtttgtgcctttacatgtaaaggttgggaaccagaacttggttctgggaactctatcgactgagaacatccctcagcttttctgtgatttggtattcgacaaggagtttgagctttctcacacttggggaaaaggaagtgtttactttgttgggatacaaaactcccaacattgagccacaaggctattctgaggaagaagaggaagaagaggaagaaattcctgccgggaatgctgccaaggctgtanctaaaccaaaggctaaacctgcaaa

SEQ ID NO: 7290 - DNA, 490 bp, Arabidopsis thaliana
  unsure at all n locations
  Clone ID: LIB24-088-Q1-E1-C7
ctgttacgcctgccntaccgggccgaaaattcccggancnacccacgcgtccgccaagaagaaggcgttgaatcctttcgttttccgattccatttttgggatctcttgtttcgttttcttctctttggatccattccattcccatgttccccaatttctttaatcggtgttgcttccacaaggcttcatgagcttgtataacaagtttctctaggaggtgttaaagagccagatcaagctttcagaagagattttcttagggtggttgagagctgaaagttttgatatttagtcaactttgttccactgaaccttctaggaagctacctcaagtagacagctttgttgacgggcttcaagccagtggtaaagatatgcttctgtagaagggttaatcttgagcattaaaggacatggctttctactctgaagacgacaagagcgaagactacctctttaagaatgttcctaatcggtgantctgcctgt

SEQ ID NO: 7291 - DNA, 426 bp, Arabidopsis thaliana
  unsure at all n locations
  Clone ID: LIB24-088-Q1-E1-D1
gggcntttgtggtctctgttggatttggtttggactatcttcacgagattatcctcatcttcccgcttcttctctcctttgaatctttcttcgttgttctttcactttcttaaagaggatgtgagattgtttttggtacttagaaaatggatacaccggaaaagagtgaaacccagatcggtactccagtttctaaactcaaagtcgaggattcaccagtgtttagttacatatgcaatctctcaccaattangactatcaaaccaattccaatcacttgtcctttaagctctctcaattacgcatctccancttctgttttcacttctcctcacgctgtttctcataaagagtctcgtttcagaagtcaaaangatgtgtctgcttctaaagaagttggagaataagaagctttagtccgtancg

SEQ ID NO: 7292 - DNA, 426 bp, Arabidopsis thaliana
  unsure at all n locations
  Clone ID: LIB24-088-Q1-E1-D3
atgcccttgtatgactacatctacggcacaatggatgaaagcacggatacgttgtacgaagaaaactctagaaagaggagatgatatagtggacgtggtgcacttaactcacctgacgacgccagaatcnatataccatttgcgcattggcttggcctcatttgcctcctaccccttcgcttatagatggttcatgcgccttttgtggcctttcacctctctctccatganattcacgctcttctangcccgcctctttgtcgctgagagaanctccttcaacangctcaacttgcagtcttgggtgatacctanatataatctacagtacttgttaaaatggaggaaagaagcgatcaataacatgattgagaaagcgatactggangcagataanaaaggantgaacgtgctagtctgggtctc

SEQ ID NO: 7293 - DNA, 485 bp, Arabidopsis thaliana
  unsure at all n locations
  Clone ID: LIB24-088-Q1-E1-D5
aactgttacgcctgcctttaccgggccgaaattcccgggacnacccacgcgtccgcgacgtttctcagatccgtccggcgagttagatccttgagaaatcatggctccggtctcggcactcgctaagtataagctggtgtttctgggagatcaatccgtcggcanaaccagtatcattactcgattcatgtacgacanattcgacaacacttaccaggccacaattggtattgattttctatcaaagacaatgtaccttgaagatcgaacggtcagacttcagttgtgggatacagctgggcaagagcgattcaggagtctaattccgagctatatcagggattcctccgttgctgttattgtgtatgatgttgcaagcaggcagtccttcctaaacactactaagtggatcgatgangttaggacagaacgtggtaatgatgtcataatcntgccttgtgggaaacaaaactgatctaantgga

SEQ ID NO: 7294 - DNA, 438 bp, Arabidopsis thaliana
  unsure at all n locations
  Clone ID: LIB24-088-Q1-E1-D6
atgactctctccttcaaattcaatcctccttcttctcttctattctcttcccgcttcatcctcctcctacgtcatccggacgctacgtttccccggcgccggcggattctaccgattcattgcgttagatttgtcactgagccctaagaatttggggaattttggtctgcttcggcgaaggatcgatggagaaatctaccaaatgtgctgtttgctacaagtcgtttcgtccctcaatctgtgtagattgtgttaaacgcgggttaaacgaatacaagggcaaagttgggctcntttaagaatcctcnggaagnttcntaattcaaaataaattggttaantngtaanaaaggagaaggcatttatccaacgtttnttggaaggagcttcanaatgagnaancttgcnaaatttgcgggaaaaagcttaagctacaag

SEQ ID NO: 7295 - DNA, 465 bp, Arabidopsis thaliana
  unsure at all n locations
  Clone ID: LIB24-088-Q1-E1-D7
ttaccgggccaaaattcccggnaccacccacgcgtccgcnccctcttcatgcccttgtatgantacatctacggcacaatggatgaaagcacggatacgttgtacgaagaaaactctagaaagaggagatgatatagtggacgtggtgcacttaactcacctgacgacgccagaatccatataccatttgcgcattggcttggcctcatttgcctcctaccccttcgcttatagatggttcatgcgccttttgtggcctttcacctctctctccatgatattcacgctcttctacgcccgcctctttgtcgctgagagaaactccttcaacaagctcaacttgcagtcttgggtgatacctagatataatctacagtacttgttaaaatggaggaaagaagcgatnaataacatgattgagaaaagcgatactgganggcanattagaaaggagttaaggtgcnt

SEQ ID NO: 7296 - DNA, 428 bp, Arabidopsis thaliana
  unsure at all n locations
  Clone ID: LIB24-088-Q1-E1-D8
gggcggacgcgtgggggggtgcttccgctcgaggttggtactcgcgtgatgtgtcaatggagagacggaaaataccatccggtgaaggttatcgagcgccgaaagaattataatggtggtcacaatgattacgagtactacgttcattacacagagtttaatagaagattggatgaatggattaagcttgaacagcttgaccttgattcagtagagtgtgctttagatgaaaaagttgaagacaaggtgactagcttgaagatgaaatctatcgaagctctactttgtcaatgtttgaggtggatggcaagaagaataaggtctatgcacagaacctctgttatctggcaaagttatttcttgaccacaaaactctttactaagacgttgatttgttccctgttctanattcctctgtgaatgtgatg

SEQ ID NO: 7297 - DNA, 446 bp, Arabidopsis thaliana
  unsure at all n locations
  Clone ID: LIB24-088-Q1-E1-E1
acgcgtccgnagcaaacttcaaaaggtaacatgataaaaaggtttgctgcttgggtttgacttcattacttgctctccctgggggtcaattccccgatgaagcgctgcagcgtgttttcagggcaacacttgatcttctagttgcatataagaatcagctagctgaagcagctaaggagacanaagtannnnnnnnnnnnnnnnnnnnnnnnnnnnnnnnnnnnnnnnnnnnnnnnnnnnnnnnnnnnnnnnnnnnnnnnnnnnnnnnnnnnnnnnnnnnnnnnnnnncacaaagtgttaaactgcagaagttagctgcacaggcaaangccttccactnnnnnnnnnnnnnnnnnnnnnnnnnnnnnnnnnnnnnnnnnnnnnnnnncagtttcantcacccatccgatgaagtggatgcctttgtaatcnttgtccatgcaatc

SEQ ID NO: 7298 - DNA, 478 bp, Arabidopsis thaliana
  unsure at all n locations
  Clone ID: LIB24-088-Q1-E1-A8
accggtccanaattcccgggtccacccacgcgtccgcncacgcgtccgacgagacagatttgattccatttttattactgttactatcatccaaacccttggtatttgtagccatgagtcttgtttcagatctcatcaaccttaacctctcagactccactgacaaaatcattgctgaatacatatgggttggtggttctggaatggacatgagaagcaaagccaggactctacctggaccagtgactgacccttcgcagctaccaaagtggaactatgatggttcaagcacaggccaagctcctggtgaagacagtgaagtcatcttataccctcaagccatattcaaggatcctttccgttgaggaaacaacattcntgtcatgtncgatggcgtacactccccgcggggtgnaccaatccccgactaacaaaangacacgctgcgggtaaaggtcttagcaancctgatgttgca

SEQ ID NO: 7299 - DNA, 462 bp, Arabidopsis thaliana
  unsure at all n locations
  Clone ID: LIB24-086-Q1-E1-E8
acgcgtccgcccacgcgtccgcagatttcgaaaaagctctcttttttttttctccttcgtgttacacaaccatttctagatatcattttggtgattaagttatttaagaaatggctgatcatttgagtttatgtaccgatcgtctcataacatctgagagcttggactcagagaaagattcagattcttcaggagaaagttcttaccggcctcaaggcacagacttggcttcttcatctgtgaatgaaactgaggttcctagagagtactacgcggttgcggatgaggaagaacctcttctccaatctgttgagtgtcgtatttgccaagaggaagatagtactaagaaccttgaagctccttgtgcttgtaatggtaagtttaaagtatgctcaccgcaagtgtgttcagcgttggtgtaatgagaaaggngacataaccctgtgaaataagtcaccaacc

SEQ ID NO: 7300 - DNA, 408 bp, Arabidopsis thaliana
  unsure at all n locations
  Clone ID: LIB24-086-Q1-E1-E9
gagcgtcctaaagtganatacaattcagatacaggtaagtacgtgntgtggatgcatatcgangatgcaaactanacnaaagcttcggttggtgtanccattancgataacccaacaggtccattcgattacttatacagcagatcgccacacgggtttgatagtaaagacatgacagtctacaaagacnatgataacgtaccctacttganatattcatcataggacaacagcgtgctgcatatcggtcccctgaccgagaattacctcgatgtgaagccgggtaatgaagagaatcatggtgggacaacacaganaagctccggctatcttcaaacatcanaacacttactacatgatcacgtctggttgcaccgggatgggcacnaaacnaagcattagctcatg

SEQ ID NO: 7301 - DNA, 427 bp, Arabidopsis thaliana
  unsure at all n locations
  Clone ID: LIB24-086-Q1-E1-F10
ccgggncgacccacgcgtccngaccattgcattgcttcatctctgatcttcttcattctttttgttaactttggttctaccctaaacttgtctcctgcaaccatcggttgttcatgctctctgtttcatggtgcgatgaaggagatgggcaaattgggaggagaaacaaggcagtgagaaagctgtgggagttggatcttgtgtacctcacatggaccgaggtttcagtacacccggacgcaccaatggattggaacgccacatatgtctcagaccagaacatactaatgggaattgagatgttcaagatctttgggcaggtattaagtttcttcactgtctgcgatgtattaactgaagaagcctcttggagacatgtttcgaggaaccaaagggagtcaaaaacttaatctatcttgtacgaaca

SEQ ID NO: 7302 - DNA, 490 bp, Arabidopsis thaliana
  unsure at all n locations
  Clone ID: LIB24-086-Q1-E1-F5
gtancggtccggaaattcccgggtcgacccacgcgtccgcggacgcgtgggttggacaacacaaacatagacctcgttgcagaacgcgagaaggtggtgtctttaacaaggcagattgagtcacttggtactgtcaaagagaagaatttagtgatggaaaaagaaactcaggagtataaggagatgctggaggaatcagaaaagtgtcgggtgcttttagaggagcagatttcgcagcttgaaagtgattccaacgagaatattagagagctctgtagcaaggtggacattgcatatgccaagttggcagaagaggttgagaagactgcctcattggttagaaaaagtgagtctattgatctaaacgaagagcataggcaacgggagcttgatcattacaaggaaatgcttgaggagtctaccaaaactcaacttctcttgcaagagaaagttgtagatgtggaaaacgactcnaagaggaaacttgctg

SEQ ID NO: 7303 - DNA, 491 bp, Arabidopsis thaliana
  unsure at all n locations
  Clone ID: LIB24-086-Q1-E1-F7
taccnagtccggaaattcccgggtcgacccacgcgtccggtcattgccaagtggggttcaaggtcttggaatggggttaccagatatgaggagtaagaanaaaggaaagaaaaagattgctaaagaggaccatgttactgaggcacttgataaactcagggaacaaactagagaaactgtgaagggacttgagtccttgtcatcgaagcagcaacctacaggttctgatgatgctatggttgaagattggatcaagcaattcgagaatcttactgggtctaacgacttggagtcgatagtggacacgatgatgcaacagctgttatcgaaggatattcttcacgaaccaatgaaagagattggtgcaagatacccaaaatggctagaagagcatgaatccagtctaaacaaggaagaattcgatcgttattcacgccagtatgaacttatcaaagaactcaacttggtgtacganaacgaaccaaacaatt

SEQ ID NO: 7304 - DNA, 425 bp, Arabidopsis thaliana
  unsure at all n locations
  Clone ID: LIB24-086-Q1-E1-F8
gtccgnaaattcccgggtcgncccacgcgtccgggnnagaccaacggttacttgcaaagagaaaggaccttgtaacggcaagaagcttaggtgtcctgctaagtgtttcaaatcttttagccgctccgggaaaggatacggcggtggaggtggcggtggaggatgtactatggattgtaagaagaagtgtatcgcttattgttaagatataataaagatcacatcatctttataatatatagtcattatgatggttatgtattttctatgttatagcctatagattatgagatcatgaggatccttttgtcttgattcgatttgtagcagttttatatgcataatatatggttgtgatgnnnnnnnnnnnnnnnnnnnnnnnnnnnnnnnnnnnnnnnnnnnnnnnnnnnnnnnnnnnnnnnngg

SEQ ID NO: 7305 - DNA, 452 bp, Arabidopsis thaliana
  unsure at all n locations
  Clone ID: LIB24-086-Q1-E1-G1
attgaaagacagagtgttaggggtccaacagagtttctgagttcgtgttgcttgtgtaagangaaacttcaaggcaatngacatatacatgtacaaaggagagatgggattttgtagtgccgaatgcagatcagtgcanataatgaatgacgaacgacaagngcaatgtnaaacgcangtttcaagaaacgccgacgttttgagctctccttacgccgccggacagagattatctgccggagtattcgtattttaggatgatcacaattcacaataatacgaagagnnnnnnnnnnnnnnnnnnnnnnnnnnnnnnnnnnnnnnnnnnnnnnnnnnnnnnnnnnnnnnnnnnnnnnnnnnnnnnnnnnnnnnnnnnnnnnnangtganatttttggttaggttaaaaagcacattgtananaaagttttgctttttggtaanttttaatacc

SEQ ID NO: 7306 - DNA, 419 bp, Arabidopsis thaliana
  unsure at all n locations
  Clone ID: LIB24-086-Q1-E1-G10
gactcccgggncgacccacgcgtccgtgataacaccgatccatctctttctttctctctccgtcgactctcgttcttaaagatgaaagctttctacgtattcgttgttgctcttcttctcaccttgaattataggggagaagcaagtggttctgttttcttcattgatggatccaacaatcaatatcttcgtccacgatcatccagtgaggcacttcccatgtcgcctgttgaaatatctgcagcagtgtctgccttgttgggttttgcaccttcagcaactttgacagctgatggctcatccangttgaacaagattctaanncctantccatttggagaggcctncgcgctgcttttgtgctagaantcgntggagctgatgatatgccttttggaaaacctccctagtcattcntt

SEQ ID NO: 7307 - DNA, 403 bp, Arabidopsis thaliana
  unsure at all n locations
  Clone ID: LIB24-086-Q1-E1-G12
tggctctctctcttcctaagtttcctctctctttagaactgtagagagagaaaagcctccatttttctcaaggcaatctctctctctctgcctcatctcataaacncattacacnanaacctcatcgtagagagagaaanacaccaaccattgttacactctaagagaagagaagagagaaggaaaaatggacggtgtatcaccaaagtttgtgttgccggagacattcgacggcgtgaggatggagatcacaggccaactaggcatgatctgggagcttgtaaaagcaccagtgattgtccctcttcttcaattagctgtttacatctgtttgcttatgtctgtcatgcttttatgtgagagggtttacatgggaatcgtcatcgtcctcgtcaaactcttc

SEQ ID NO: 7308 - DNA, 511 bp, Arabidopsis thaliana
  unsure at all n locations
  Clone ID: LIB24-086-Q1-E1-G2
ntggttaacgtgcctacgccccggaattccaagtcgacccacgcgtccgcccacgcgtccgcagatttcgaaaaagctctcttttttttttctccttcgtgttacacaaccatttctagatatcattttggtgattaagttatttaagaaatggctgatcatttgagtttatgtaccgatcgtctcataacatctgagagcttggactcagagaaagattcagattcttcaggagaaagttcttaccggcctcaaggcacagacttggcttcttcatctgtgaatgaaactgaggttcctagagagtactacgcggttgcggatgaggaagaacctcttctccaatctgttgagtgtcgtatttgccaagaggaaagatagtactaagaaccttgaagctccttgtgcttgtaatgggtagtttaaaagtatgctcaccgcaagtgtgttcaagcgttggtgtaatgagaaaggcgacataaccctgtgaaatatgtcaccagccttatca

SEQ ID NO: 7309 - DNA, 463 bp, Arabidopsis thaliana
  unsure at all n locations
  Clone ID: LIB24-086-Q1-E1-G6
acgcgtccggtggtgatagattcacctcctgcttccttctgagggggttagccccgaggctcttcgcctcggcgggtttcaaattcccccaaatctaacaaactcacagattcattttctccattttttttgtttgttgaaaatttgaatccacaaattttgaattcatttgtaaccgttcgttgaagaagaagaagatgcctgctctagcttttgttgatactcccatcgataccttttccagtatctttacaccgtcgtctgtttccaccgccgttgttgacggttcctgccattggtctccgtccctctcctcctctctttaccgtatcgacggatggggaagctccgtatttcgcagcgaattcctccgggaacatctctgttcgtcctcatgggtcaaacactttacctcaccaagacatcgatntgatgaaagttgtgaagaaagttacagattcga

SEQ ID NO: 7310 - DNA, 465 bp, Arabidopsis thaliana
  unsure at all n locations
  Clone ID: LIB24-086-Q1-E1-G8
ccacgcgtccgcgcnatcgttgagattagtattcgtcaagggtccaagagaaggcgatgctctagattacaagcctggatctacgattcgtgttggtcgaatcgttcgtggtaatgaaatcgcaattaaagacgctggaatctcnactaagcatcttcggatcgaatcggattctgggaattgggtaatacaagatcntggatcttccaacggtactttattgaattcgaatgctcttgatccagagacgtcggtaaatctcggagatgggcgatgttatcaaactangtgagtatacatctattttggtgaattttgtgattgatgattttcangagannaagcttacgangaacaattnggcgtcaggctaatgccaaggaanccaagttagggttttaagaaagtatccatttggggggatatcactgaaggaaagaaaagggggttgggatnttgaaattt

SEQ ID NO: 7311 - DNA, 388 bp, Arabidopsis thaliana
  Clone ID: LIB24-086-Q1-E1-G9
cggcgacaagattgatttgaaggacggtgaagcaacaacaccaccaaaaacagatatcgagtcacagattctcgcggctatgcagtcccgagtaacctacctcagagataaagcagacaacttcacctttgaaggtgtgcggaggttgctggaggaggatctgaaattggagaaacatgctttggatgtgcataagagctttgttaagcaacatttggttcagtgcttagcaggtgctgagaatgatgaaacttcagaaaattctctagaaactgagaagaaagatgatgtaactccagtgaaagaagcagcaagagttatctaaagagcacacgacgaaaaaagatggtaaggaagatatgactgggtgatgatgagaaaacaaaag

SEQ ID NO: 7312 - DNA, 402 bp, Arabidopsis thaliana
  unsure at all n locations
  Clone ID: LIB24-086-Q1-E1-H11
ttgttatgattattttcgcaacataatggaggagttcacgactgagaagtctccatctttgacggtttatgtccctctagttgctggggcaatagcacgctccttggcttgtatctcttgttaccctgttgagttagcaaggacacggatgcaggcatttaagggaacgcaaagaaatgtgaaactgcctggcgtttggaagacattagttgacgtcgtcaatccagtgaagggctcaaataatggatataggatgttatggactggtcttggtgctcaacttgctagggatgttccattctctgcaatctgctggtcgatacttgagcctacccggagaagcattcagtcggccatgggtgaagaaccaagggcangcantntaataagtgcaaacttcgc

SEQ ID NO: 7313 - DNA, 476 bp, Arabidopsis thaliana
  unsure at all n locations
  Clone ID: LIB24-086-Q1-E1-E7
ttcccgggtcgncccacgcgtccggaaaatttgtttatctatgagtgattttgacatggcatttacagttcatccagaaagctggaatccgatgtggtctgtatcaagcatacttacaggacttctctcatttatgatggataccagtccgacaactggaagtgttaacactactgtaattgagaaacaacggttggctaagtcatctctcgctttcaattgtaaaaccccagcatttcgaaagctatttccagagtatgtanagaagtacaaccagcagcaactanctgagcaagctaccacacaactgacaacaccagagtctcctcaaaagagcgataccaaagtcgagtcagagaaaaccatcgatccaacaaagggagattcagaaggtggcttgaaagagangaaaaagaacaattaaacaaggattgccaacgtggataatactgttgctaatgtccggtttcggtgtg

SEQ ID NO: 7314 - DNA, 508 bp, Arabidopsis thaliana
  unsure at all n locations
  Clone ID: LIB24-086-Q1-E1-C5
aactgtctcccctggntcgtacaagtccgcaaaattcccgggtcgncccacgcgtccgcggacgcgtgggnnnnnnnnnnnnnnnnnnnnnnnnnnnnnnnnnnnnnnnnnnnnnnnnnnnnnnnnnnnnnnnnnnnnnnnnnnnnnngggatacacaaatgtgtccattttattaggcctgttgatggtctttgttacaccgatggtgttcgcagatgatgtgacaccaatcccagatggtaaaactaagggagcacaagctttatccatgagaatctccggaaattttgctgctttctacaactgcaaattctacggtttccaagacacaatctgtgacgatacaggaaaccatttcttcaaggattgttacgttgaaggaacattcgatttcatcttcggaagtggaacctctatgtacttgggaacacaattgcacgtggttggagacggtattagagtgatagcancgcatgcangaaagagcgcagaagagaagagtggata

SEQ ID NO: 7315 - DNA, 476 bp, Arabidopsis thaliana
  unsure at all n locations
  Clone ID: LIB24-086-Q1-E1-C6
ttcccgggtcgncccacgcgtccgtaanaccaataccaccagagaagggcattttccctttggatcacttgcacgagtgtgatgcggagaagaaagaatatctaggttgtcttaagtcttcagctcacaaatctgaacaatgtagacatctctctaagaaatatctccagtgtcgaatggctaagaacttgatggcaaagcaggatatggctgaacttggattcagtggtgttaaagaacttgattccactgaagataagaatacagagagtatcgaacattgaaaggttgaccaaaaaactttgagcctcattttgtaaaattttggattaacattgggatagcatttgagattttaggtcctaaaacccaactactatgaaagtatatgcttcagattcaccaatttttatacgtatgtattcctgtgtgaaataaagcattatacaaaananaaaaaaaaaagggcggccgct

SEQ ID NO: 7316 - DNA, 493 bp, Arabidopsis thaliana
  unsure at all n locations
  Clone ID: LIB24-086-Q1-E1-C8
gtaccngtccgaaattcccgggtcgncccacgcgtccgcccacgcgtccggagaaaacgaaactaaccggagcatgaagagacgaagatcggcgaagaaatctccggcgatggtgacggttaccgattggaaagggttagattgcggcgaagagacgagaatcgtaaggagattgatgaagttcgaagacttgcctgagtatttgaaggacaacgagtttatacacaaccattatcgatgtcaatggtctctcaaagatacttttctcagtgctttctcttggcacaacgagactctcaacatttggacgcatttaattggatttggtatatttctgtggatgacggtggtgagttgcttggagacgacggagattagtctcgccggcgtttttaacggcatggccggagtgaggatttgcctctcaagcaatcaagactctgcttcatgantcgaacgtgacacatcacatcctcatgtcctaactcacaaa

SEQ ID NO: 7317 - DNA, 506 bp, Arabidopsis thaliana
  unsure at all n locations
  Clone ID: LIB24-086-Q1-E1-D1
gttcgccttncccgtacgcctccggaattcccnaggtcgacccacgcgtccggtttcttccaaacaaagattctttttttttttttccttctgggttttagaaacagagagtcactctaaagattttgtctcctgggttttttgggagagaaatcagtcnnnnnnnnnnnnnnnnnnnnnnnnnnnnnnnnnnnnnnnnnnnnnnnnnnnnnnnnnnnnnnnnnnnnnnnnatattctacaacttcaaggtccttctacctaatggcactagtgtgaaactcacactgaaaaacccagaaccggagatctcgatgcagtcttttgtcaacttggtgaagaaggagtatgataatgcacgaaaagattgtcttttgatgtctaagaggatgaaggttgattggaactcaagcggaaagtttcatctgggagtcaaatggtgggaagatgaaaggcattgttcgctttgctgcgtttaagcctgacttgtgccacataatacgtcntg

SEQ ID NO: 7318 - DNA, 397 bp, Arabidopsis thaliana
  unsure at all n locations
  Clone ID: LIB24-086-Q1-E1-D12
acgcgtccggcaattgcaaagaacactgagagagagagagagtgtgtgtgtgacctttgagagatggaggaaaaacgacgcgattctgctggaaccctagcttttgctggtagctctggagattctccggcatctgagccgatgccggcgccacggcgacgcggcggaggtttgaaaaggaaagcgaatgctcttgggggttctaatttcttctcttctgcgccgtcgaagaggatgttgacgcgtgagaaggcgatgcttgcttctttttctccggtacataatgggcctttaactagagctcgtcaggcgccgagtattatgccctcggcggcggatggggttaagtcggaggttttgaatgtancggtgggtgcggatggagagaagcccaang

SEQ ID NO: 7319 - DNA, 510 bp, Arabidopsis thaliana
  unsure at all n locations
  Clone ID: LIB24-086-Q1-E1-D2
tttcgccttnccctacgcctccggaattcccnaggtcgacccacgcgtccgcgtaaccctaagcggacggagcaatgctctgctagatctatctttctttcaattcttcaccagagatcgtcgagactcaccattgaaatcgaagaaacagcaccaatttccacttcaccaccgaaagagagagacagagaggataataaaaggccgccatggatttagatcaatggatttccaaggttaaagacggccaacatctctctgaggacgagcttcaacttctctgcgaatacgtgaaagaaattcttattgaggaatcaaatgtacaacctgtcaacagtcctgtcaccgtctgtggtgatatccatggccagtttcatgatcttatgaaacttttccaagaccggaggtcatgttcccgagaccaattacatatttatgggggatttcgttgatagaggttacaacagtcttgaagttttcaccattcttttgcttcttaaaagcaagaca

SEQ ID NO: 7320 - DNA, 503 bp, Arabidopsis thaliana
  unsure at all n locations
  Clone ID: LIB24-086-Q1-E1-D5
ctgtnacgcctggcacgtaccnagtccgaaaattcccgggtcgacccacgcgtccgcttctgtggaacagaacattttggtgactggtggtgctggattcattggaacacatactgttgttcagcttttgaatcagggttttaaggttacgatcattgataatcttgataactctgtcgttgaagctgttcatagggttagggaacttgttggtcctgatctctctaccaagcttgaattcaatctgggtgatctaagaaacaaaggagatattgagaaactcttttccaatcagagatttgatgctgtgattcactttgctggtcttaaagctgtgggagaaagtgttggaaaccctcgtcgttactttgataataacttagttggaactatcaatctatatgagaccatggcaaaatacaactgcaaaatgatggtgttttcgtcgtctgcaacagtttatggtcaacctgaaatagtcccatgtgtggaagactttgagt

SEQ ID NO: 7321 - DNA, 508 bp, Arabidopsis thaliana
  unsure at all n locations
  Clone ID: LIB24-086-Q1-E1-D6
aactgttcgcctggcncgtancaagtccgaaaattcccgggtcgacccacgcgtccggccttgttatgattattttcgcaacataatggaggagttcacgactgagaagtctccatctttgacggtttatgtccctctagttgctggggcaatagcacgctccttggcttgtatctcttgttaccctgttgagttagcaaggacacggatgcaggcatttaagggaacgcaaagaaatgtgaaactgcctggcgtttggaagacattagttgacgtcgtcaatccagtgaagggctcaaataatggatataggatgttatggactggtcttggtgctcaacttgctagggatgttccattctctgcaatctgctggtcgatacttgagcctacccggagaagcattcagtcggccatgggtgaagaaccaagggcaggcagtataatangtgcaaacttcgctgctggttttgttgcgggtgcaattgctgcagcagctacttgccct

SEQ ID NO: 7322 - DNA, 505 bp, Arabidopsis thaliana
  unsure at all n locations
  Clone ID: LIB24-086-Q1-E1-D8
ctgttccgcctggccgtacnagtccggaaattcccgggtcgacccacgcgtccgtggtggggttttgggtgaggagggattgccgttgaatggtgttgaagctgatcggccgaagaaagttttgattttgatgagtgatactggtggtggtcacagagcttctgcggaagccattagagctgcttttaatcaggagtttggagatgagtaccaggtgtttattacggatttgtggacagatcatacgccctggccgttcaaccagcttcccaggagctataattttctggtgaaacatggaactctgtggaaaatgacttattatggtacatctccacgcattgttcatcaatctaattttgctgcaacttccacttttattgccagggaaatcgcccaagggttaatgaaatatcaaccaagatatcataatcagtgttcatccgttgatgcaacatgtcccacttcgtgtcctaagatcaaaaggcttgcttaagaaaatcgt

SEQ ID NO: 7323 - DNA, 412 bp, Arabidopsis thaliana
  unsure at all n locations
  Clone ID: LIB24-086-Q1-E1-D9
acgcgtgggctcaagatcaaaaaaaaccttcgtgtgcgtctctcgtcntctaaattgtcnaaaatgctggctaggctcgctgcgaagcgtcttctcgagatccgtcaagttttccgtcaacnaacctctcaggtgactcgtagcttatcgacggccttaaactancatctggattctcctgataacaaacccgatcttccatgggagttttcagaggctaaccaatctaaggttaaggagattctctcttactatccatccaattacaagcantccgcagttattcctctcctagatcttgcacaacagcanaatggangctggctcnctgtttcagcaatgaatgcggttgctaaagttatagnagttgcccctatccgtgtttatgaaggttgcaacattttactcaatg

SEQ ID NO: 7324 - DNA, 410 bp, Arabidopsis thaliana
  unsure at all n locations
  Clone ID: LIB24-086-Q1-E1-E3
acgcgtccggacnagagtatctgcagaaactaacttacctgtgttggnaccaccataaagccattangcacattgacacagtgagggcatacacatttggctctcattattttgtggaggttgatattgttctcccagctgacatgcctctgcaggtggctcacgacattggagaatcgctgcaagagaagctcgagctactanaggagatcgaacgggcttttgtgcatcttgattatgagtacactcacaaacctgagcacgctagatcccactgttanctgtttatcctttttaaagatctctacgtntcnananctttacanattantcttcactgtattgttgtttagtagacaattgtgagataaaggaatacctttgtaactaaganaancncncanaaaagg

SEQ ID NO: 7325 - DNA, 467 bp, Arabidopsis thaliana
  unsure at all n locations
  Clone ID: LIB24-086-Q1-E1-E4
acgcgtccgcccacgcgtccgcagatttcgaaaaagctctcttttttttttctccttcgtgttacacaaccatttctagatatcattttggtgattaagttanttaagaaatggctgatnatttgagtttacgtaccgatcgtctcataacatctgagagcttggactcagagaaagattcagattcttcangagaaagttcttaccggcctcaangcacagacttggcttcttcatctgtgaatganactgaggttccnatagagtactacgcggttgcggatgaggaagaacctcttctccaatctgttgagtgtcntatttgccatanaggaagatagtactaagaaccttgaagctccttgtgcntgtaatggtagtttaaagtatgctcaccgcaagtgtgttcagcgttgggtgtaatgaagaanngcgacataacctgtgaaatatgtcaccagccntat

SEQ ID NO: 7326 - DNA, 460 bp, Arabidopsis thaliana
  unsure at all n locations
  Clone ID: LIB24-086-Q1-E1-E5
acgcgtccggttngactcgttgatcaacgaaagtgtgagtttgaggtgaaagatgacggcgacgatagatcggaggttatcaacgctgaatccaaacgcgccggtgtttgatccggtggaatttcgtgaggtggaggatttttcaccgaaatggtgggatctagtaacgacttcgaaatggttccgtgacttttggctcantgctaactctgagaatgagttcctcggcggcgacgatttctcagttatggaagaagagttcgaggagatgatcgcatcgtctgatggtggatccatggctgatacagttacagaagcagatgtggctagttatttgaagatgcttttgaacatagcggagtctacgaaagagaagatttatagatcgaaggtttcgtcctgttcancaaaagtataatcaagaagaagtacatgaatccgaactttaattgtcnccgga

SEQ ID NO: 7327 - DNA, 499 bp, Arabidopsis thaliana
  unsure at all n locations
  Clone ID: LIB24-086-Q1-E1-C3
ccttgntctacgcctccggaaattcccaggtcgncccacgcgtccggttaagcaanactgagtttaatgtgcttattcttggtatcgacaaagctgggaagacgacatttttgganaaactgaagacgatatactcaatctcggaaggtcttcctcatgatcgaattgttcctactgtggggcttaatattggtcgcattgaantctccaatgctaaaattgtgttctgggatctgggaggtcagcctggtttgcggtctatttgggagaaatactatgaagaagcacacncgttgatatatttgattgatgcagcttgcccaacccgctttgaagattctaaatctgctttagaaaaagccctgcngcatnaggatttgcaangagcccctcttttaatattggcaaacaagcaagacctcacaaatgctgtatcggctgaagaactggaccgatancttgatttaaagaaattggatgaaanagtgtacatgtttga

SEQ ID NO: 7328 - DNA, 503 bp, Arabidopsis thaliana
  unsure at all n locations
  Clone ID: LIB24-086-Q1-E1-A2
atgtccnccgcactacgccccgatatccangtcgcccacgcntccgtaaaacatgtaccaccaganaagggcattttcccttnggttnacttgcacgagtgtgctgcggagangaaagatnatctaggttgtcttaagtcttcagctcacaaatctgaacaatgtanacatctctctaagaaatatctccagtgtcgaatggctaagaacttgatggcaaagcacgatatggctgaacttggattcagtggtgttaangaacttgattccactgaagataagaatacagngagtatcgaacattgaaaggttgaccaaaaaactttgagcctcattttgtaaaattttggattaacattgggatagcatttgagattttaggtcctaaaacccaactactatgaaagtatatgcttcaagattcaccaatttttatacgtatgtnttcctgtgtgaaataaagcattatncaaannangnnaaaaaaagggcggccgctctaa

SEQ ID NO: 7329 - DNA, 482 bp, Arabidopsis thaliana
  unsure at all n locations
  Clone ID: LIB24-086-Q1-E1-A4
ccaaggtngccccacgcgtccggaaaataagaaaaaacanaagatgaaaaccattatcctttttgtaacatttcttgctctttcttcttcatctctagccgatgagacagagactgaatttcattacaaacccggtgagatagccgatccctcgaaatggagcagtatcaaggctgaatggaaaatttgcgggacagggaagaggcaatcgccaatcaatcttactccanaaatagctcgcattgttcacaattctacagagattcttcagacatattacaaacctgtagaggctattcttaagaaccgtggattcgacatgaaggttaagtgggaagacgatgcanggaagatcgtgatcaatgataccgactataaattggttcaaagccactgggcacgcaccttcagagcattttctcgatggacaagaggttggcaatggaacttcacatggtacacaaaagtgttgaanggcactt

SEQ ID NO: 7330 - DNA, 512 bp, Arabidopsis thaliana
  unsure at all n locations
  Clone ID: LIB24-086-Q1-E1-A5
acggtttncctggccctagggccccaaaatccgcanangcccgggtngccccacgcntccggtttagcaagactgagtttaatgtgcttattcttggtatcgacaaagctgggaagacgacatttttggagaaactgaagacgatatactcaatctcggaaggtcttcctcatgatcgaattgttcctactgtggggcttaatattggtcgcattgaagtctccaatgctaaaattgtgttctgggatctgggaggtcagcctggtttgcggtctatttgggagaaatactatgaagaagcacacgcgttgatatatttgattgatgcagcttgcccaacccgctttgaagattctaaatctgctttagaaaaagccctgcggcatgaggatttgcaaggagcccctcttttaatattggcaaacaagcaagacctcacaaatgctgtatcggctgaagaactgggaccgataccttgatttaaagaaattggatgaaagagtgttcatgtt

SEQ ID NO: 7331 - DNA, 470 bp, Arabidopsis thaliana
  unsure at all n locations
  Clone ID: LIB24-086-Q1-E1-A6
acgcgtccgtganaacaccgatccatctctttctttctctctccgtcgactctcgttcttaaagatgaaagctttctacgtattcgttgttgctcttcttctcaccttgaattataggggagaagcaagtggttctgttttcttcattgatggatccaacaatcaatatcttcgtccacgatcatccagtgaggcacttcccatgtcgcctgttgaaatatctgcagcagtgtctgccttgttgggttttgcaccttcagcaactttgacagctgatggctcatccaagttgaacaagattctaaaacctaatccatttgagaggcctcgcgctgcttttgtgctanaaatcgctgggagctgatgatatgcttttgggaaacctccccctaagtcattccttcctgggcaatgccataaaggagcaantattaaagttcngattcgtacaaaagctgataactgaaact

SEQ ID NO: 7332 - DNA, 446 bp, Arabidopsis thaliana
  unsure at all n locations
  Clone ID: LIB24-086-Q1-E1-A8
ttattaataaacnnnnnnnnnnnnnnnnnnnnnnnnnnnnnnnnnnnnnnnnnnnnnnnnnnnnnnnnnnnnnnnnnnnnnnnnnnnnnnnnnnnnnnnnnnnnnnnggattgtgtttaggagttaaaaacttgctttggtccatcatgagattgcttcttagtctcttgtttctcttggctttaaccacctacncaagtgcancttattgtctatgtagagatggtgttggagagaaagatcttcaaacatcgatagattatgcatgtggagttttaaaagattgtaatcctattcatgagaaaggtccttgttatcaaccaaacaccatcaagagtcattgtgattgggcggttaatanttatttccaaagatttggtcaaatctctggaagctgtaatttcncaggaactgctactaccagccaaaatcttccttcaactgtg

SEQ ID NO: 7333 - DNA, 472 bp, Arabidopsis thaliana
  unsure at all n locations
  Clone ID: LIB24-086-Q1-E1-B1
attcgccccaggcctccggttttgttgaattgaagggcatcacactagaaaaccacaggcggctgtgaagcctgatgctttgaaggagcctccatctattgatgtgcctgcattgtcattggatgagttgaaagaaaagaccgataactctggatcaaagtcattgattggtgaaggatcttacggcagagcctattatgcaaccttgaaagatggaaaggctgtcgcggtgaagaagcttgacaatgcagcggaacctgaatcaaatgttgagttcttgactcaggtctctanggtttccaagctgaagcacgataattttgttgagctcttcggttattgtgttgaagggaatttccgcattcttgcgtatgagtttgctactaagggatctttacatgacatcctacacgggangaaaaggatccaaggagcaaaaccaagtcctacccttgactgggatcaaccggtc

SEQ ID NO: 7334 - DNA, 483 bp, Arabidopsis thaliana
  unsure at all n locations
  Clone ID: LIB24-086-Q1-E1-B4
ttccaaggtngccccaggcgtccgaanngagtcncttacgcccagagagagagagagagagaggcttgtttgttttctctcctctaagaaacaatcagtctcataaagtggcaaagatggttgcagaacgatacacagtcgatttgnntaagccacttgtgtttcaggttggtcatcttggcgaagaatatcaggaatggattcatcaacctattgtatgcgttgagggtcctcgttttttcgaaagtgatttttgggagtttttgactcgcacggtttggtgggcaatcccaacaatctggcttccagttgtttgctacgttctttcaatatcggcgaagtaagggacttacgtttccccagatcggtttaatagttgcttttggtgtactcacgtnggacactgctcgagtacacgcttcatcgcttccttttccacatccaaaccaagagttactgggcaaacactgcncactaatcctt

SEQ ID NO: 7335 - DNA, 458 bp, Arabidopsis thaliana
  unsure at all n locations
  Clone ID: LIB24-086-Q1-E1-B6
acgcgtccggccntgttatgattattttcgcaacataatggaggagttcacgactgagaagtctccatctttgacggtttatgtccctctagttgctggggcaatagcacgctccttggcttgtatctcttgttaccctgttgagttagcaaggacacggatgcaggcatttaagggaacgcaaagaaatgtgaaactgcctggcgtttggaagacattagttgacgtcgtcaatccagtgaagggctcaaataatggatataggatgttatggactggtcttggtgctcaacttgctagggatgttccattctctgcaatctgctggtcgatacttgagcctacccggagaagcattcagtcggccatgggtgaagaaccaagggcaggcantataatangtgcaaacttcgctgctggttttgttgcgggttcattgctgcancagctacttgccc

SEQ ID NO: 7336 - DNA, 460 bp, Arabidopsis thaliana
  Clone ID: LIB24-086-Q1-E1-B7
acgcgtccgcacattgtgtcttcatggactggtattcctgttgagaaagtatcaaccgatgagtctgaccgtctcctcaagatggaagaaaccctccacaaacgtatcataggccaagacgaagctgtgaaagccataagccgagccattcgccgtgcacgtgttggactcaagaatcctaaccgtccaatcgctagtttcatattctcgggtccaaccggtgttgggaaatctgagcttgccaaagctttagcagcttactacttcggttccgaagaagccatgattcgtctagatatgagtgagttcatggagaggcacactgtctccaaactcatcggttcacctcctggatatgtcggatacaccgaaggaggtcagttaacagaagcggttagacgtcgcccttacaccgtcgttctaatccgatgagattgaaaaagccatccaagatgttttc

SEQ ID NO: 7337 - DNA, 469 bp, Arabidopsis thaliana
  unsure at all n locations
  Clone ID: LIB24-086-Q1-E1-B9
cacgcgnccggtaacggtcannnattcccgggncgacccacgcgtccnggaattagagcttgctcttccctaggccatcttcttaatgagatttttgaagttgttgtagagccaaagcttgtgcagcccacatttgtcttggactacccaatcgagatatctcctttggccaagccacatcgcggcaatgccggtttgactgaaagatttgagctgttcatctgtggtcgtgaaatggcaaacgcattctctgaattgactgatcccgtggaccaagaggacacggttggaagagcaagtaaggcagcataacgcaaagagagcacaggctgttcgggaatctcctgaaccaaacgcaaagaaagatgatgatgatgatgagtcatacgaagttgacccttgacgaagactttctcactgccttgggaatacngaatgcctccgggcttcgggaatgggggcttggaat

SEQ ID NO: 7338 - DNA, 404 bp, Arabidopsis thaliana
  Clone ID: LIB24-086-Q1-E1-C10
acgcgtccggagaaaacgaaactaaccggagcatgaagagacgaagatcggcgaagaaatctccggcgatggtgacggttaccgattggaaagggttagattgcggcgaagagacgagaatcgtaaggagattgatgaagttcgaagacttgcctgagtatttgaaggacaacgagtttatacacaaccattatcgatgtcaatggtctctcaaagatacttttctcagtgctttctcttggcacaacgagactctcaacatttggacgcatttaattggatttggtatatttctgtggatgacggtggtgagttgcttggagacgacggagattagtctcgccggcgtttttaacggcatggccggagtgaggatttgcctctcaagcaatcaagactctgct

SEQ ID NO: 7339 - DNA, 412 bp, Arabidopsis thaliana
  Clone ID: LIB24-086-Q1-E1-C11
gtttcagggaatggattgcaaaaagttgaaacgcgaggccaagcttaagggaggtttctatgttgaccctgaagctaagctcttgttcatcatccgtatccgtggtatcaatgccattgaccctaagactaagaagattctccagctcttgcgtttgagacagattttcaatggtgttttccttaaagtcaacaaggctacgatgaacatgcttcgccgtgttgagccctatgtcacttacggattccctaacttgaagagtgtcaaggaattgatctacaagagaggttacggaaagcttaaccaccagaggatagctttgactgacaactctattgtagagcaggctcttggaaagcatggtatcatttgcactgaggatttgattcacgaagattctaacagtaggacc

SEQ ID NO: 7340 - DNA, 495 bp, Arabidopsis thaliana
  unsure at all n locations
  Clone ID: LIB24-086-Q1-E1-C2
tangcctccggaaattccaaggtcgncccacgcgtccgcaaaaacaaaacttaagggaaagataatcgtttgtctgtgcagagagagagagagagaaaatgaggttgttcgatccatggccagtgttcttcaagagagaatggaaacgttgctggccattcctcaccggtttcgccgtcaccggcgttctcatcaccaagctaaccgccggactcactgaggaagatgctaagaactccaagttcgtccagcaacacagaaggtgattcactgaagcaaaatgtagaagctgacaaggcatatagatttgggactatagtgaatgcttcagctttgaaacatgttcaataacaaagaagatcattctatatactcttttattttctctgagtttcgaaatcagcttttccttttctgaaacttagcaatggaatggtttttgttcacagtatcttattcccatttgtttggaaatggattttatggcctttttga

SEQ ID NO: 7341 - DNA, 412 bp, Arabidopsis thaliana
  unsure at all n locations
  Clone ID: LIB24-086-Q1-E1-A12
acgcgtccataagaccaataccaccagagaagggcattttccctttggatcacttgcacgagtgtgatgcggagaataaagaatatctaggttgtcttaagtcttcagctcacaaatctgaacaatgtagacatctctctaagaaatatctccagtgtcgaatggctaagaacttgatggcaaagcaggatatggctgaacttggattcagtggtgttaaagaacttgattncactgaagataagaatacagagagtatcgaacattgaaaggttgaccaaaaaactttgagcctcattttgtaaaattttggattaacattgggatagcatttgagattttangtcctaaaacccaactactatgaaagtatatgcttcangattcaccantttttaaacntaagtaatcc

SEQ ID NO: 7342 - DNA, 482 bp, Arabidopsis thaliana
  unsure at all n locations
  Clone ID: LIB24-085-Q1-E1-A12
aacgtctctctgcncgcgcggtcacagtacccgggnccacccacgcgtccgcaagaagttgatgttagggacccgagaaccgggaagagtgtggaacacgacggtgtttccgttggagagatcgttttaaaaggcggttcggttatgcttggttactacaaagaccctgaaggaaccgcagcgtgtatgagagaggacggatggttctacagcggagacgtaggagttatacatgaagacggttacttggaagttaaagaccggtcaaaggatgtgatcatatgcggaggagagaacataagtagtgccgaggttgagacggttctgtatacaaatccagtagttaaagaagccgcggtggtggctaaaccggataagatgtggggagagacaccgtgtgcttttgtgagcttgaagtatgatagtaatggtaatgggttggtgactgaganggaaataaaggaattttgtaaagacgaagn

SEQ ID NO: 7343 - DNA, 496 bp, Arabidopsis thaliana
  unsure at all n locations
  Clone ID: LIB24-085-Q1-E1-A2
taccgntccgaaattcccgggtcgacccacgcgtccgatcnttcaagaacacaaagctagacagaaaaaaaaaaatgtgttcctcaaaattaaaaaatctgacccaagaaaacatttctcagatcaacggccgtccggttcttcaaccgaagtcgaaccaagttccgacattagaccgacgtaactcactaaaaaaatcgcctcctaagcctttgaatccaattgcatcaaagataccctcaccaagaccaatttctctaatctctcctcctttgtctcccaacacaaaatccttaagaaaaccggccggttcttgcaaggaacttcttaggtctagctctacaaaatcgaaaccagtgatatcaccaagagaacagtgatggtggctacaaagaggttatgcctatggtgattgttcaaaagcagcctggaagtatagcagctgccagaagagaagangttgcaatgaaacaaagaagagagaaagaagaaaatt

SEQ ID NO: 7344 - DNA, 501 bp, Arabidopsis thaliana
  unsure at all n locations
  Clone ID: LIB24-085-Q1-E1-A4
tctccctnctctacgccccganattcccaagtcgncccacgcntccgacgntatggtttagcgattggtgcaacagtggctccgtttgtccgtgtcctagtctttatctgcttacctgttgcatggccaataagcaagttgctggactttctattgggtcatcgtcgtgcagcgctttttcgaagagctgagctgaaaacacttgtggattttcatggaaatgaggctggaaagggtggggagttgactcatgacgaaacgacaatcattgcaggagctcttgaactctctgagaaaatggtcaaagatgcaatgacaccaatatcggatatctttgtgattgatatcaatgccaaactagacagagacttgatgaacttgattcttgagaaagggcatagcagagttccaagtatactatgagcagccaactaacataatcggccttgttctggtgaagaacttattaactatcaacccagatgaagaaatacctgtcaa

SEQ ID NO: 7345 - DNA, 487 bp, Arabidopsis thaliana
  unsure at all n locations
  Clone ID: LIB24-085-Q1-E1-A6
tanaagtccgcaaattcccgggtcgncccacgcgtccggaaaaatctgatcagcaatttgtgtctaggggcatgcctactgaggcagctttgaaggttttggttgagaaaatgggatttcccgaaggattgaatgaagcttcatccgatggcaatgtcttacgttgttgtcggctatggagtgaactagaacaacggattgccacccttgagtttgaccgtgaccggaaatcaatgggagttatggtggattccagctcaggaaagaaactgctactggtcaagggtgccgtagaaaatgtattggaaaggagtacccatattcagctacttgatggttccactcgagagcttgaccaatactcaagggatcttattttacaaagcctacatgatatgtccttgagtgcattaagatgtctcggatttgcatactcagatgttccatcagattttgccacttatgatggcagtgaagaccatccctg

SEQ ID NO: 7346 - DNA, 451 bp, Arabidopsis thaliana
  unsure at all n locations
  Clone ID: LIB24-085-Q1-E1-A7
cgnnnnnnnnnnnnnnnnnnnnnnnnnnnnnnnnnnnnnnnnnnnnnnnnnnnnnnnnnnnnnnnnnnnnnnnnnnnnnnnnnnnnnnnnngtgtccattttattaggcatgttggtgatctttgtttcaccaatggtgttcgcagatgatttgacaccaatcccagagggcaaaccccaagtggtgcagtggttcaatacccacgttggtccattggctcaacgtaaaggcttagatcctgctctcgtagctgctgaggctgctccacgtatcatcaacgtgaatccaaagggaggtgaattcanaacactaacagacgcaataaagagcgttcccgcagggaacacaaagcgggtgatcataaagatggctcatggtgagtacanngagaaggtcactatcgacaggaacaaanccttcattacattgatgggacaanccaatgccatg

SEQ ID NO: 7347 - DNA, 485 bp, Arabidopsis thaliana
  unsure at all n locations
  Clone ID: LIB24-085-Q1-E1-B10
cgtttactcngcccggccccggtccgaaaatacccgggtccacccacgcgtccgcaccggttttatcaagcggtgcgggttcgactaaaccgggaagggttggccggtttgttacaatggcgacggcggcgagtcctcttgaaatctgcgttaaagcttctatcaccactcccaacaagctcggagactgccctttttgccaaaaggtgttactgacaatggaggagaagaatgttccttatgacatgaaaatggtggatttgagtaacaaaccagaatggttcttgaagattagtccagaaggtaaagtcccagttgtgaagtttgatgagaaatgggttccggattcagatgttataacacaggctttagaagagaagtatcctgagcctcctcttgctaccccacctgaaaaggcttcagttggatcgaagatcttttccacatttgtcggttttctgaagagcaaagattcaggagatgga

SEQ ID NO: 7348 - DNA, 495 bp, Arabidopsis thaliana
  unsure at all n locations
  Clone ID: LIB24-085-Q1-E1-B3
tgtcnctacgccccgacattcccgaagtcgccccacgcgtccgcaaaaacaaacactatgggacacctcaaaagtctcttcacaattcttttcctaatagctatgtcttcaaccgtaacatttgccggtaaaatacccgcgatcatcgtgtttggcgactcttccgttgatgccgggaacaacaactatatcccaactgttgctagaagcaactttgagccatatggacgggactttgttggtggaaagccgaccggacggttttgtaacggaaagattgcgacggattttatgtccgaagccttagggcttaaaccaatcattccggcgtacttggatccttcttataacatttcggattttgcaacaggtgttacctttgcttctgctgccactggctatgacaacgccacttctgatgttctgtcggtactacctctatggaaacaactcgaatactacaaagaataccaaacaaaacttaaagcataccaa

SEQ ID NO: 7349 - DNA, 493 bp, Arabidopsis thaliana
  unsure at all n locations
  Clone ID: LIB24-085-Q1-E1-B4
ctacggccccggaattcccangtcgacccacgcgtccgctcaagcaagaagaaaaagcaagcaaaacttcagcgtgcagtgaaaagtattaaaagaaagcagcgttcgtcgtctgagaacaccacttcaacattttcacctcttaatcatttaaatgatgcgcagaaattcgcagagaaattgttttcccgtcttcagaccatcaagggcagtggtgaacgtgttgagactaggttgatgatgattaaagttattgctcgcacaattggtcttcacaagttgcatttactaagtttctatccttttcttcaaaactatgctctgccgcatgtaaaggacattacacaaatacttgcagcagcagttcaatcttgccacgatggggttccttctgatgttgtggagccactgttcaagcaaattgtgaatcagtttgtacacgacaagtcacgtcctgaaggctattgctgtcggactcaatgtggtgcgaaga

SEQ ID NO: 7350 - DNA, 472 bp, Arabidopsis thaliana
  unsure at all n locations
  Clone ID: LIB24-085-Q1-E1-B5
ccgggcttnttttcaaaaacaataaaaaaatgtctcaagattctgcaactactactccgccgccacctttaacctccgacgtttcaatgccttccggtgaagaagatgagccaaagcatgtaacatcggaagaagaggcaccggtgacttcggagacaaatctgaagctacctttgatgccggagctagaggagtcaaatcatacggcggaggttgtttcagagaaggtgacgccggagacgatgactttggagtcagaaggtctcaaccacgcggcggaggattcagagcagacacatgaagtgacgccggagacagagactgcgaagctaagaggttctcaaccacacggcggaggattcaagagcagacacatgaagtgacgccggagaaagagactgtgaaatcagagtttctcaaccacgtggcggaggattcagagcagacacatgaagtgacgccggagacagag

SEQ ID NO: 7351 - DNA, 456 bp, Arabidopsis thaliana
  Clone ID: LIB24-085-Q1-E1-B6
acgcgtccgggatcttgtcttggagtcgatcagtcggctgttagtatatttactgaagagatcattcgagctggatctgcagcagcattgtcgtcacttgttaaccgacttgacccagttcttaggaagactgctaacttgggaagttggcaggttattagtcctgtagaggtcgtcggatatgtcattgttgtggacgaattgctcactgtacagaataaaacctacgatagacctacaattatagttgcaaacagagtgagaggagaggaggaaatccctgatggtgcagttgcggtactgacacctgacatgccggatgtactatctcatgtttctgttcgagcaagaaatggaaagatctgctttgccacatgttttgattctggtatcttatctgacctccaaggaaaagatggaaaactgttgagcctacaaccaacctctgcagatgta

SEQ ID NO: 7352 - DNA, 490 bp, Arabidopsis thaliana
  unsure at all n locations
  Clone ID: LIB24-085-Q1-E1-B7
gtacanagtccgaaattcccgggcntnttttcaanaacaataaaaaaatgtctcaagattctgcaactactactccgccgccacctttaacctccgacgtttcaatgccttccggtgaagaagatgagccaaagcatgtaacatcggaagaagaggcaccggtgacttcggagacaaatctgaagctacctttgatgccggagctagaggagtcaaatcatacggcggaggttgtttcagagaaggtgacgccggagacgatgactttggagtcagaaggtctcaaccacgcggcggaggattcagagcagacacatgaagtgacgccggagacagagactgcgaagctagaggttctcaaccacacggcggaggattcaagagcagacacatgaagtgacgccggagaaagagactgtgaaatcagagtttctcaaccacgtggcgggaggattcagagcagacacatgaagtgacgccggagacagag

SEQ ID NO: 7353 - DNA, 456 bp, Arabidopsis thaliana
  unsure at all n locations
  Clone ID: LIB24-085-Q1-E1-B8
acgcgtccgctcaattattgtccccttacttatatctatcgctctctacaaactcgacacattcgaccccgctattgttccttccgatgcattcacatcctctgctanttcactcncgccgcttanaaangacgantttctcaccggagctgagtttatcggtgtcggtcttctcaatatacccgaagatatcgcctaccataaggaatctaatctcatctacactggttgtgttgatggatgggtgaaacgagtcaaggtcnccgactcggttaatgactcagtcgttgaggattgggtcaatactggtggtagaccgctcggaatcgcgttcggaatccacngcgaagtcattgtcgcagacgtacacaagggactgttgaatataagcggtgacggaangaagacggaattgttgacggacgaaatcggacggtgtgaagtttaagctgacgg

SEQ ID NO: 7354 - DNA, 475 bp, Arabidopsis thaliana
  unsure at all n locations
  Clone ID: LIB24-085-Q1-E1-B9
tngcccggcccggtcgaaaatnaacgggtcnacccacgcgtccgcncacgcgtccgcccacgcgtccgctccaatttctctgatcattccctctaatttcggatttttgcatcttctccgatcatcttcaccactatgggtgcttcatcttctacagacgacaaagaatcatcggagaaacgagaaatcgaaagccttgctgcttcaaccggagctcttcctctgcttaaacgatccttctccaaactcgtcgattctcaaaccaatactgttccttttcaatccttgaagcaaagnnnnnnnnnnnnnnnnnnnnnnnnnnnnnnnnnnnnnnnnnnnnnnnnnnnnnnnnnnnnnnnnnnnnnnnnnnnnnnnnnnnnnnnnnnnnnnnnnnnnnnnnnnnnnnnnnnnnnnnnnnnnnnnnnnnnnnnnnnnnnngtttgccaagtggttatgtcaaatgttgtggaagaat

SEQ ID NO: 7355 - DNA, 464 bp, Arabidopsis thaliana
  unsure at all n locations
  Clone ID: LIB24-085-Q1-E1-A11
taccganactaaacgggtccagtcacgcgtccggnacattgttaactctaagattaaaactccagcccaattggaagctgcatttgccttttttgccagtaccggtcctgaggactttaagctgaatgagtttgaagaggcatgtggtgttgggattgaagtttccccagaagatattgagaaagcagttaaaggaatctttgaagagaataagaaaacaatattggagcagcgctatcgaactaatgtgggtgaattatttggacatgtccggaaaagtttgccatgggccgatcctaagattgtaaagaaactcatagatgagaaaatgtatgagctgcttggtgagaaaaccgctgctgataatgaaaaacctacaaaaaagaaggagaagaaggagaagcctgccaaagtcgaggaaaagaaagctgtggtggaaactaccgcagagccatctgaagagg

SEQ ID NO: 7356 - DNA, 348 bp, Arabidopsis thaliana
  unsure at all n locations
  Clone ID: LIB24-084-Q1-E1-A6
agtatacaaacttggctacatggaactggcgattgatgaagacgataatgactgtgtgtcatgtctatgacaaagaggagaactacattccttttgaccggttagcccctgaagaatctcagccaataaccttcctcaagaaagcaatgcctaactacacagcctgattcgccatggtctcaaactagtcttttgaaatctcaatatctttttgcacgtcgccgatgttatatgtaagctttccaagcgatgagcttctctaacacttcaccaacgctttatactgttatcttctttccantcttatcagaagagagaaactgggcaaattaaaaannaaaangaagg

SEQ ID NO: 7357 - DNA, 406 bp, Arabidopsis thaliana
  unsure at all n locations
  Clone ID: LIB24-084-Q1-E1-B4
cttcctctgctccactcattctcctccaccgtcgccacaaaatccaccgcctctagaatcactgccacgccgtcgaaaatccgcttctctgtcataaacgccacgtcggagaatggaaacagcggtggtagtaaaaacgatcgtgatgaggatccatcttttaacccatttggtttcgttacagacaacccgtctanccggagtgcaattcagttaccagagtctccggcggaagacggcaatgtcggccaaatgctctacaggactgangagaanggtaaagngtatggngcaacnatcagatctgggaagcttagnnggtttgtgagagagactggatcaaaggagagtcgtcgaangaaccattgtatttggtngtggatggcctactcagtccttnaccaca

SEQ ID NO: 7358 - DNA, 380 bp, Arabidopsis thaliana
  unsure at all n locations
  Clone ID: LIB24-084-Q1-E1-B7
gaactccagcatatcgagcaggtcttcactcctttggttgagaaatgcaaaaagtacgggagagcaatgcgtattgggacaaatcatggaagtctttctgaccgtatcatgagctattacggggattctccccgaggaatggttgaatctgcgtttgagtttgcaaggaatatgtcgtgaaattagactatcacaactttgttttctcaatgaaagcgagcaacccagtgatcatggtccaggcgtaccgtttacttgtggctgagatgtatgttcatggatgggattatcctttgcagtttgggagttactgaggcaggagaaggngangatggacgggatgaaatctgcgantggaattggggacgcttcttcagtga

SEQ ID NO: 7359 - DNA, 505 bp, Arabidopsis thaliana
  unsure at all n locations
  Clone ID: LIB24-084-Q1-E1-C10
tggttgcctggcctagcggtccggaatccngggtcgacccacgcgtccgaaggaaacaaaaaatggcttctctttggctgaagttaatctccataagtctaatatacctcaatgttatcgctaaatcaactccgcatcaagaaagcgaattcgaatgtgtctctatagacaaacaatctgcactacaacatcctctaatgaagaatcatcgcatacagactagaccaagtcgagagcttctatcaatactctctacgtccaatggtaacatactcagagagattgatttgaagggatcagaagaatgtccaaagggacaagtaccgattcataaacaaaaaaccaacttaaccaatagtcttattcatccccaacaaattcatagagcaggccgtatcctgnnnnnnnnnnnnnnnnnnnnnnnnnnnnnnnnnnnnnnnnnnnnnnnnnnnnnnnnnnnnnnnctcatgattcccttctgcattgttgtctcaaaaaaataaga

SEQ ID NO: 7360 - DNA, 405 bp, Arabidopsis thaliana
  unsure at all n locations
  Clone ID: LIB24-084-Q1-E1-C5
aaatcttggaggagaagaagcaaagaattagactactctgcaacaatggctatttattctgtccataacggcgacaagaaacattggtggttcactcacaagaagattgttgataagtacattaaggacgcaagatctttaatggagagtgaggagcaaaacgacgttgcttcagccattcatttactagacgcggctttatcaatatccccgcgttcggaaactgcgttagaacttaaagccagatctttgctctttctacgtcgcttcaaagatgtagttgatatgcttcaagattatatcccaagcctcaagcttgccgtgaacgaggaagatggatcttattcatacgaaggttcttcttactcttcctcntcntctcagctctcccggnaacttctctct

SEQ ID NO: 7361 - DNA, 400 bp, Arabidopsis thaliana
  Clone ID: LIB24-084-Q1-E1-C8
agttagagttttcgccaatgatccacattttgtgaaggatggtgttgatgtttcgaatcaaccaggttcgaggaaacctttttgtacagaggtgaaggatttggtccgggaagctgatactgtcataaagattcggtcttttcagatcattgtagctcagggagtgacaggatcgtttccttggtctgctctttcttttgcacctatgtggttggaactcattgggttctcacacgggaaaactgcattcttgatgggtcttttcgtggctgcatcttctcttggtggcttgtttggaggcaaaatgggagattttctgtctactcgtcttcccaattccggaagaatcattctcgcgcaagattaagttcaagcctcagcgattccgctcgctgcaatt

SEQ ID NO: 7362 - DNA, 365 bp, Arabidopsis thaliana
  unsure at all n locations
  Clone ID: LIB24-084-Q1-E1-D6
gaanttgagcctatcggtactggttgagattattctccggcggagacaatggaatcttccgtcgctccgtttcctcaccgacncacgcatctgccgaatcganattatcgctctttgctttancacttttgctcgagtttcnatcgggaacctcanatttctcttgccacaccggnagttctccaggagctggtcttacaaacagaaattgctcaagagtctccgggagaaacttgcgaaccgccggagaatttatcaattacggaatcaanactcaatggagtgtctggtgattcaagtggtgagaaggtggnaacaatttcacanganaagaagtttgatgccttggagatatttgtgatggn

SEQ ID NO: 7363 - DNA, 377 bp, Arabidopsis thaliana
  unsure at all n locations
  Clone ID: LIB24-084-Q1-E1-D8
aaagtaaataatgtcttaagagggctaaatggggattagtagatgaatatgtagaatgattanntgagattagtacacttggtaaaggtctctcttccataaccaactttatcttatgattcgaatcattttatcttcatcaagaatttgacattatagctggcttaaaattggcnnnnnnnnnnnnnnnnnnnnnnnnnnnnnnnnnnnnnnnnnnnnnnnnnnnnnnnnnnnnnnnnnnnnnnnnnnnnnnnnnnnnnnnnnnnnnnnnnnnnnnnnaangaaagatgaacaatttgttgtcatgtanttatcaactctcccanatggagccactgtggggataaagttttttggcaatagtcaagtggacttca

SEQ ID NO: 7364 - DNA, 425 bp, Arabidopsis thaliana
  unsure at all n locations
  Clone ID: LIB24-084-Q1-E1-E12
gattatcgtgttttgttggcaatcgccattaaaccttcttccctctaacccaatcaaatttgcggctctttcttttatcttctcgcctcggttttagcaaaccctttagttatcttcttcctcaagcaatttttcttttggattagattggtgttttcttttggtttgtgtggtgatgatgagaaggcaacgagatgaacaacaatctagggttttctacgatctancatctcttgttttgaatcttctccgttctcctcctatgccgatttctttacctgatcatttcnccgatccgcccgctagaattcgtcctcccttttcntcgcancgtttttccgtcttcgncgccttctttggcncaatanttcccccgtccgggattcngcgtcgnttgctgcttgggtaaatctgttggctccnga

SEQ ID NO: 7365 - DNA, 448 bp, Arabidopsis thaliana
  unsure at all n locations
  Clone ID: LIB24-084-Q1-E1-E4
cgcctgcntgtaccggccccaaaaattcncgaatcgacccacgcctccgaaaagaactcnagcatatcgagcaggtcttcactcctttggttgagaaatgcaaaaagtacgggagagcaatgcgtattgggacaaatcatggaagtctttctgaccgtatcatgagctattacggggattctccccgaggaatggttgaatctgcgtttgagtttgcaagaatatgtcggnaattagactatcacaactttgttttctcaatgaaagcgatgcaacccagtgatcatggtccangcgtaccgtttacttgtggctgagatgtatgttcatggatgggattancctttgcatttgggagttactgangcaggagaaggcgaagatggacgggatgaaatctgcgattggaattgggacgcttcttcaggacgggctcngtgacacaata

SEQ ID NO: 7366 - DNA, 401 bp, Arabidopsis thaliana
  unsure at all n locations
  Clone ID: LIB24-084-Q1-E1-E5
ggtttcagttcgctggagaatcctgtggaagaccttgttaggcacttcattgggggaagtctcctacaatatcctcagctttcagccatcagttcttaccagttgtatgtagaggttgtctgtgaagaactagattggattcctttctatccagccagaaaggactcccagccagccgaacaatcacacgggcataaaagcagaccacaagggccacctaattatgatgctcttccacagatattgaatgtttgctcttattggctacagagctttattaagtacagcaaatggcctgagaatccttctaatgtcaaggcagcaagaattcttatccaaaggggcacaacangttaatccagtgccaggaacaactgggaatatcangtttggctgtaaac

SEQ ID NO: 7367 - DNA, 498 bp, Arabidopsis thaliana
  unsure at all n locations
  Clone ID: LIB24-084-Q1-E1-F10
tcgcttgccctagccgtccggaaatcnaaggtcgacccacgcgtccgcttcagtcttccacaacttaacattgctcagggtgttggatctttctagggtaaagtttgaaggagggaagttaccttctagcattggagggctcatccacttgagatacttgagcttatacggagctgtggtatctcatctaccttctactatgcggaacttaaagcttctgctctttttgaacttacgtgttgataacaaggaaccgattcacgtgccaaatgttttgaaagagatgctagagttgaggtacctttccctacctcaggaaatggatgataaaaccaagttggaattgggtgatctaagtgaacctggagtacttgtggtatttctcaacgcaacacagtagtgtgacagacctcctccggtatgactaacctccggaatctcggtgtatctttgaacgaaangtgcaattttgaaactctatccgtcatctctccgtga

SEQ ID NO: 7368 - DNA, 404 bp, Arabidopsis thaliana
  unsure at all n locations
  Clone ID: LIB24-084-Q1-E1-G7
tgcgaaaatggcgtcttcggtttttctatccagtttctcgtcatcgtcttctttgcaactctgctcttcctttcacggcgagtacttagctccgtcgagatgctttctcggagctccggtcacttcctcttctttatcactctccggtaagaagaactcatattcnccgagacagttccatgtttctgcnaagaaagtttctgggttagaggaagccattagaatcagaaaagtgagagagcttgaaactaaatcaaaagttaggagaaatccancattaagacgtgggaagagtancgcctcgtcntcttgtacctgatcacattccaagggctccttatgttgagtcnggtgtattaccggntatatcangtgaagttcnagantccctggtcctgaaaggc

SEQ ID NO: 7369 - DNA, 484 bp, Arabidopsis thaliana
  unsure at all n locations
  Clone ID: LIB24-085-Q1-E1-A1
ganatcccgggtcgacccacgcgtccggtcacttctctgctcgccgatcgttactccgtcgaaatcaccatggcgccaaagaaggataaggttccaccaccgtcatcaaagccggccaaatctgnnnnnnnnnnnnnnnnnnnnnnnnnnnnnnnnnnnnnnnnnnnnnnnnnnnnnnnnnnnnnnnnngtgttgtttgatcaaggcacttatgacaagcttctcactgaagctcccaagttcaagctcatcactccatcaatcctctccgaccgtatgaggattaatgggtctcttgcgaggagggcgattagggagctaatggcaaaaggtttgatcaggatggtctctgcacactcgagccagcagatctacactcgtgccaccaacacctaaaaagcgtgacctttcaatggtttggttctcgactcttttcctgggttttgtcntttgatgtatacattaatcatcaaaaactccttat

SEQ ID NO: 7370 - DNA, 406 bp, Arabidopsis thaliana
  unsure at all n locations
  Clone ID: LIB24-084-Q1-E1-A5
ctagatacgctagcatgaacactcaccttggcattgaacaaagtcgtagagatgatttggagtcacttggattcgttctcatgtacttcttaaaaggaagtcttccttggcaaggactgaaagctggcaataagaagcaaaagtatgagaaaatcagtgaaaagaaagtatcgacatctattgaggctttatgccgaggttatccatctgaatttgcatcttatttccattattgccgttctctgagatttgacgacaagccanactatgcctacctgaaacggcttttccgcgacctgtttantcgtgaaggcttccagtttgattangtanttgnttgggacgatcttgaagtancagcagatcacagatttcnactccncngcctcggtcatcatgnggcctg

SEQ ID NO: 7371 - DNA, 468 bp, Arabidopsis thaliana
  unsure at all n locations
  Clone ID: LIB24-085-Q1-E1-A10
gccccggtccaaanaacccgggtccngccacgcgtccggntcactctctttagcttcgatctctccctcgcttcgatctctctctcgactgctactcctggaatgtacatttgttgatggaagtttcttcagaattgatttcaaaatctctgagctgaagattcttgacttggaacaaatatgcctcacagaacaaggccgttgaagggactcttgcttttcactggaataaactttgtgttggtgcagaccattactccagtctatgactttgtctgcttcttgccttactgggagagaaggagagagcgaatccggcaggancgtgaagccgcagctgcatccttaaactcaacacaaaaagctactcaagcatctgttggatgatgaactcttctctacatcttctcaagtctcttaaatcaaaattcctctttgtaagaaactaagttaccctctgaatactga

SEQ ID NO: 7372 - DNA, 399 bp, Arabidopsis thaliana
  unsure at all n locations
  Clone ID: LIB24-083-Q1-E1-B10
agtaaagactccactgtcgtcttccgtagtgatgcttctttctgcaatcgcttctcagacccttctctcatcaaaccctaatctacacttctccaattctattccaaacnnnnnnnnnnnnnnnnnnnnnnnnnnnnnnnnnnnnnnnnnnnnnnnnnnnnnnnnnnnnnnnnnnnnnnntanatttacacgcggtctccgttacgtaaaccacactgtatctaatgaagaatcagaacccggaggaggagagaccatggttgcttctgcttccgctatagcttccgcgattcgtggagcttcaacaactcctgtagagttcacacaagatgattgagaaagaccatctcaagacnaagattatcttgccaagtcctgattttcaacggntttgtcttg

SEQ ID NO: 7373 - DNA, 501 bp, Arabidopsis thaliana
  unsure at all n locations
  Clone ID: LIB24-083-Q1-E1-B2
tacgcctgcntgtaccggcccaaaatcccgngtcgacccacgcgtccgcccacgcgtccgggaaggtttgggtgcttttcaaaaactgcccatggtcatgccatctattgatttgtatgcttctgctctcaggaagtctaaaagagtccaaccaactaaaggcattgctaatattgctaagcgagaaagaaatagaggtgctaaacagcttgatgcattcatgaaagaactggctctacctttaaaaggctacatggaaagttttcccaggaagaaactcttgcatccatatgaaaggtctcttattgacttgacacttggtgatggaaagtatgaaagaggtgttaaggaaaattgatgttctganngaaaaaaagtgcaatcctgtttgggaaangnanaatgccttccctccggggcccaaangggtttnnccaanaaaaggnnggnccaanggnannccntttaccaaaaggggtttgggaaaaaccnggaaattgg

SEQ ID NO: 7374 - DNA, 412 bp, Arabidopsis thaliana
  unsure at all n locations
  Clone ID: LIB24-083-Q1-E1-B5
cagcaacatggatgatgagcttcttgctgttcttggctacaaggttcgatcttctgagatggctgaagtagcacagaagcttgaacaacttgagatggtcttgtctaatgatgatgttggttctactgtcttaaacgactctgttcattataacccatctgatctctctaactgggtcgagagcatgctttctgagctgaacaacccggcttcttcggatcttgacacgacccgaagttgtgtggatagatccgaatacgatctcagagcaattccgggtctttctgcgtttccaaaggaagaggaagtctttgacgaggaagctagcaacaagaggatncgactcggatcgtggtgcgaatcntccgacgaatcaaatcngtccntggtgctcnttgactctcaaagggac

SEQ ID NO: 7375 - DNA, 484 bp, Arabidopsis thaliana
  unsure at all n locations
  Clone ID: LIB24-083-Q1-E1-B8
gaactgttagcctgccgnaccggtccaaaatcccgggtcnacccacgcgtccgggtacttggagtgatggaaagcttgttactcgaataggaaagaatagtgccaccgttctagcggtgttgaaaacgttggttcgctttggggctcctgataatatattggtcaacggaaagcctcatctaggaacagataagctagttccattactccgtaatttcagacattatcttcaaagtgcgggagtgactatcaagtttggaactcgggtaagatgatcttctggtagaggattctcgtgttgttggagtcagggtttcggattcaacaaaccaattgcagactacctcccagaatttaaaggttgatgcaagttgttcttgcaagttggtcattcagcacgtgacacatanganatgctcattctcgtaaatgtccaaantgantcccaaaaaaaatttgcccgttggggttgcgtattggngca

SEQ ID NO: 7376 - DNA, 413 bp, Arabidopsis thaliana
  unsure at all n locations
  Clone ID: LIB24-083-Q1-E1-B9
cagcaacatggatgatgagcttcntgctgttcttggctacaaggttcgatcttctgagatggctgaagtagcacagaagcttgaacancttgagatggtcttgtctaatgatgatgttggttctactgtcttaaacgactctgttcattataacccatctgatctctctaactgggtcgagagcatgctttctgagctgaacaacccggcttcntcggatcttgacacgacccnaagttgtgtggatanatccgantacnatcncanagcaattccgggtctttcggcgtttccaaaggaagaggaagtctttgacgaggaanctagcagcangaggattcgactcggatcgtggtgctaatcgtcgggacgantcaactcggtccgtgggtgcncgttgactctcaggaaaa

SEQ ID NO: 7377 - DNA, 365 bp, Arabidopsis thaliana
  unsure at all n locations
  Clone ID: LIB24-083-Q1-E1-C10
caaaaccacctaactcaaattgttgtctatatacaagaaacataatcataatgggaaaaggaggaggttatgtgacggtggcggcggaagaagtggaggagttacggaggaggaacggagagttggagagagaaatggaggagatgaagaaagacatggttcagctgtggcggcgtacggtggtggcggaggaggccgaggagagactctgctcgcaactggcggagctagaggtcgagtctttagatcangcgcgtgactatcactctcgtatagtctttctcatggaccaaatctctcgtctctcttcttcctctcttgaagtcgttgttacnaattcgtagatacattaattattantttgt

SEQ ID NO: 7378 - DNA, 396 bp, Arabidopsis thaliana
  unsure at all n locations
  Clone ID: LIB24-083-Q1-E1-C7
gtttctaacctctaggccaccactcatggctactctgttcatgaagctggtgagcttctttctaattctatctactttttgtctcactactgtgaactcggagccacagtgccataatttcaaatcgatcattagtttcggcgattctattgccgacactggaaacttgctcgccctctccgatcctaccaatctccctaaggtcgcgtttctaccgtacggagaaaccttcttccaccatccgaccggccgtttctcaaacggncgcctcatcatcgatttcattgctgaatttttggggttttccgcttgtgcctcctttttacgggatctcaaaatgcanattttgagaaaaggagttaantttgcggttggaggancaacggggaatgggga

SEQ ID NO: 7379 - DNA, 388 bp, Arabidopsis thaliana
  unsure at all n locations
  Clone ID: LIB24-083-Q1-E1-C8
acggtcnaaaatcccgggtccacccacgcgtccgggagagttggtcctaggccatctaacacacggtttaaggagcttaattctgagcctgttgtaccggaaggttttccggggtgggaagaagtaatggactcatggggttacaagatgatatccgcggttgaggttgttgctgaaatggcagcaattgggtttggtttgcctaaggatgcatttacatcactcatgaagcagggtcctcatcttcttgctccaacgggaagtgatcttaactgttacaacgaggaagggacgatatttgcaggatatcactatgatcttaattttctaacgattcatggaagaagtagattccctggtctatatatttggttaaggaatgganaaa

SEQ ID NO: 7380 - DNA, 414 bp, Arabidopsis thaliana
  unsure at all n locations
  Clone ID: LIB24-083-Q1-E1-D10
gaagaatatttgggtgtaaaggaagctatattgttggaccttcttagagtcataagccaccaccgagctcgtctaagctacaccaatccgtacaatccgtaagatgtacacagagactgacntggaaaacacaccatttggggaatcgatgtacggnggtgttacttctcggcggcctttgatgctaattgaacccgcttacaaaatcaatgganaagacaaatcaaaatctcaaaaccgtgcagcaaaaccaaccgcagagcaagaaaacaagggctcgaatccaaactcaaaagaaacgtcttctcctgatctaaaggcgaatgtganagttgggngaatcccctgtttctgataccaacaagagtacctgaagaaacagtancaaagncagtaatcaaagcggtcncaaaa

SEQ ID NO: 7381 - DNA, 371 bp, Arabidopsis thaliana
  unsure at all n locations
  Clone ID: LIB24-083-Q1-E1-D11
ttggcgagtgacggggtttgggatgtaatgacggatgaagaagcgtgtganatggcaaggaagcggattctcttgtggcacaagaaaaacgcggtggctggggatgcatcgttgctcgcggatgagcggagaaaggaagggaaagatcctgcggcgatgtccgcngctgagtatttgtcaaagctggcgatacacagaggaagcaaagacnacataagtgtggtggtggttgatttgaaagcctcngaggaaactcangagcaaacccttgaactgaggcagagagggtcctttttcttaatttttanaatgaatatgggtctctccaagaaaaagtatttaccannaattaagttgtgcctattttttta

SEQ ID NO: 7382 - DNA, 496 bp, Arabidopsis thaliana
  unsure at all n locations
  Clone ID: LIB24-083-Q1-E1-D8
naacgttagcctgcccgaacggtccaaaaatcccgggtccacccacgcgtccgtagaaacattagcttcacgaatactgcgccggctccattgccggggatgcaagggtggcaagcggtggcgtttaggatctccggcgacaaagctttcttttccggctgcgggttttacggtgcacaagacactttatgcgacgatgctggccgtcattacttcaaggagtgttacattgaaggctctatcgactttatctttggtaatggccgctccatgtataaagattgtgagttgcattcgatagcgtcaagattcgggtcgatagcggcgcatggtaggacatgcccggaagagaaaacgggtttcgcgttcgtgggttgtcgggtaacaggtacgggtccattgtatgtnggccnggccatgggacaatactcaccnatcnnttacgccccaanacttactttgangncnccctcgcgcacagggggttttggacana

SEQ ID NO: 7383 - DNA, 412 bp, Arabidopsis thaliana
  unsure at all n locations
  Clone ID: LIB24-083-Q1-E1-E10
annnnnnnnnnnnnnnnnnnnnnnnnnnnnnnnnnnnnnnnnnnnnnnnnnnnnnatttcactagggatatgtcngatgttagtagtancatcaagtgtgatctatgaagcgcanggaacgttcttactaaaccattacttgaagaagaattttccaaaaaaatgcaacgagtttacgccttangctaacaagggtatgataacgttggtgaccgatctcgaaggtagcagtccggccactanagagttcaagactttctttacacagttcangtcttacatgtctttcatcgagacaacatcggcctcaanagaaaatgttgatgccganatgacagntaaatgtgacggtcttttcaaggccatgtctgcattgaatgctagtaaanggcgtcaaatcagcggatgcngg

SEQ ID NO: 7384 - DNA, 419 bp, Arabidopsis thaliana
  unsure at all n locations
  Clone ID: LIB24-083-Q1-E1-E11
tcttcaggcggcggtgcagaaccgcaatgttccactggcttcttccgcctcctactctcgtctccttcgctgcagatctcctgtcgtctccgtagctgctctctcgaagaagacggcagcaatcgtgtgctccatctcccaggtttatggctacggnacggtggactacnagagaaggccgattgtccagtggaatgccatctacaagaagatttcgctgatggagaagccagagcttggcgctgcttccgtcttgaatcagtgggagaaagccggccgcaagcttaccaagtgggagctctgtcgggtcgtcaaggagcttcgcaagtanaagcggtgccaaccaagctctcganggtgtacgaactggatgaacaacagagggcgaaaagtttccggtttgtnctgcaagtgatgct

SEQ ID NO: 7385 - DNA, 411 bp, Arabidopsis thaliana
  unsure at all n locations
  Clone ID: LIB24-083-Q1-E1-E9
acgcgtccgatcaatacaagttggctgggaatactcaagctttaaagatggcaacagggatggctgattacttttatggccgtgttcaaaatgtgataaagaagtacagtgttgaacgacattggctatcactaaacgaagagactggtggcatgaatgatgttctttatcagctatacagcatcactagagattccaagtatttgtttctcgcacatctctttgacaagccttgctttctcggagtcctcgcaattcaggccgatgatattagtggattccacgctaatacacatattcccatcgtcgttggatcccaacaacggtatgaaatcactggtgatctactccataaggaaatcccgatgttctttatggacataagttaatgcntcacacagctatgcaact

SEQ ID NO: 7386 - DNA, 414 bp, Arabidopsis thaliana
  unsure at all n locations
  Clone ID: LIB24-083-Q1-E1-F9
ctctctctccacaaagataagccaacaatggttggtgattacagaggacgctttagtatgccgtcgtttctccgatgactctgacgattcttccgacgatgcttcttccgtggagggagagaccacttcttccatgtactctgcggggaaagagtatatggaaacagaatggactaatgagaagcatagtttatatctnaaatctatggaagcttcattcgtagatcagttatataactcgctcggagctctcgggaagaacgagaatgtatccgaatcaacgaggttcggtagcggtagaaaaccgtctcaagaacagttcaaggttcttcatgatggtttctgggcagaagattaatgtgaaacancctgaacatcggattaacggaagggcacggtggtaattctcatgag

SEQ ID NO: 7387 - DNA, 459 bp, Arabidopsis thaliana
  unsure at all n locations
  Clone ID: LIB24-083-Q1-E1-A9
accggtcaanaattcacgggtcgacncacgcgtccnaagagtcgcaaatttttcctcgacaaaaaatctacctgctttgatccaaatctctatgggtttttatcattaatcgaatttcaaaattgatgaatccataatttttttctctattcgatttatgagaaattgatttttttttttatttttctcccttgtgaaataggttaaagattattgttttgttgctgtttgtagttatgccggtaatgaatccatcattgtgtattggtacacaaacatcggtgtacctcgctccncgtgagaaatcttttacgagtaatggnaactctcaaaggcgttatcctacaagcgtttctaatgcaacgccagccttggagccaaagtaaattcncttcnctccagggatgcangtgcaaccagttgtccgtcctccaangaataaaagaccaagtctttgca

SEQ ID NO: 7388 - DNA, 476 bp, Arabidopsis thaliana
  unsure at all n locations
  Clone ID: LIB24-081-Q1-E1-C5
ccggnacgtaccggtccataattcccgggnccacccacgcgtccgaantcattcgaaaatagagtatgcaaatgttcagaactcaatcgcggcaacctcaagttcttctaagatttctgattctcataaacccagaaacagctcccgcnnnnnnnnnnnnnnnnnnnnnnnnnnnnnnnnnnnnnnnnnnnnnnnnnnnnnnnnnnnnnnnnnnnnnnnnnnnnnnnnnnnnnnnnnnnnnnnnnnnnnnnnnnnnnnnnnnnnnnnnnnnnnnnnnnnnnnnnnnnnnnnnnnnnnnnnnnnnnnnnnnnnnnnnnnnnnnnnnnnnnnnnnnnnnnnnnnnnnnnnnnnnnnnnnnnnnnnnnnnnnnnnnnnnnnnnnnnnnnnnnnnnnnnnnnnnnnnnnnnnnnnnnnngagcgcgctgatccttctctcgatgccaattttgaaaatggtggccacaagactttaccgc

SEQ ID NO: 7389 - DNA, 471 bp, Arabidopsis thaliana
  unsure at all n locations
  Clone ID: LIB24-081-Q1-E1-D2
gtttcgtttgccggccggtccgaaaataacgggtccacgcacgcgtccgcantaaactctgaaccttcaacgttatcttcctctcactagctaagaaacccatttcgattctctctctctctctcgtttccaacatcattccatggntgacgatagcgaattgtatcctcgtttcttcaaagtgttcctcgttgaatcggcttctgaatcgttgatgattccgttgccttttatggcatttcttgctgatccattgccaaagacagtgaagctccaaggtcttggaggaaaactttggactgtgagcttgangaanataagcggagctgcgtatcttactagaggatggccanaattccagaggaacatgagctgaagaacggaganttcatgacatttgtgtatgatggncatcgtaccttntgaangtnagtgtcgttgatcnttgggggtagcanagaggtcagagcc

SEQ ID NO: 7390 - DNA, 480 bp, Arabidopsis thaliana
  unsure at all n locations
  Clone ID: LIB24-081-Q1-E1-D4
angttccttgccggccggtcgaaatacgggnccccacgcgtccgacagtattcccgggaacattcgccggagaaacgtacggaatcaacaaccttccccgggaaagaatccattaccgccgattctatcaattcgtataccgtatttgactacccagccattgattctctctccctctcttcccttttcattgtttctaaaccagctcatctttcctgatccggacgtttttcgaagatcgggtcctaattccccgggaatgggtccttaagttctggaagaaatccgtccgctctgtctggtaatttcattgaaggacggattaagcaagcgtgtgtgaagatcagaaaagacggattcaactatgaagcacccagaagcaagtggtgactattcgggacctggtagatgaagccaagaaacgaattgtaatcgtggtcatatgcgtcgtcggacttccctanctcatgtcctgacaaa

SEQ ID NO: 7391 - DNA, 480 bp, Arabidopsis thaliana
  unsure at all n locations
  Clone ID: LIB24-081-Q1-E1-D5
cgtttgccggnccgtaccgaaccanaattcccgggnccacccacgcgtccgcacctctcctctccgtcgagcttactatctccacaaaatggcgtcgacggtaggagttccatcactataccaagttcctcaccttgaaatctccaaacccaattccaaaaagaggtctaattgtttatctttatctctcgataagcctttcttcactcccttatctcttgttcgtagaactcgtcgtatccattcctcttctcttcttgttccttctgctgttgctactcctaattctgttctcagtgaagaagctttcaaaagtcttggtctttctgaccatgacgaatatgaccttgacggcgacaacaacaacgttgaagctgatgatggtgaagaactcgctatctctaaacttagtttgcctcaacgtcttgaagagtctcttgagaaacgtggtatcactcatctcttccccattcagagagc

SEQ ID NO: 7392 - DNA, 515 bp, Arabidopsis thaliana
  unsure at all n locations
  Clone ID: LIB24-081-Q1-E1-E2
gnttcgtttggccgtggcccggtccgnaaattanangggtcgacgcacgcgtccggcnacatacaccggtactcatctgaccaagctagggtttcgcagtcatcatcatgtaccgtacggcagcttctcgagccaaggcccttaagggcattctaaaccacaattttcgaagcttctccgttatgcaagttctagtgctgttgcaacgagctcttcttcctccagctggctaagtggaggctactctagttcacttccttctatgaacactcccttggctggtgtctctcttccaccaccactctctgaccatgttgagcctagcaaacttaataccactactccttccaantggtctggactatagccactgaagatgtctccgaaatccaagcaagcttccatttggtttatacnttgactgtgggntctannttatgaggacncctcaantccgttggaaccgacngcacttgnttnaaaaggatgngcatttcaaggaagtacnatttgaa

SEQ ID NO: 7393 - DNA, 438 bp, Arabidopsis thaliana
  unsure at all n locations
  Clone ID: LIB24-081-Q1-E1-E4
caacgnatccgcccacgcgtccgcaattnccacnntnngataccagaangttcataagnaacataagcgaancgacagagaaaaaaaatgtcttcgccaaagcaaacgcagngaaatggatangatgaanctgatgatgagcgattataaagtggaaacgatcaacgatggcatgcaagaattctatgttgaattcaatggtcccaaagacagtctctatcaaggaggtgtgtggaagataagagttgagcttccanatgcttatccttataaatctccatctgttggtttcattactaaaatttatcatcctaatgttgatgaactgtcgggttctgtttgtttagatgtgattaaccaaacttggagtcctatgttcgaccttgtgaatgtgtttgagacatttcttcctcagcttcttctgtatccaaanccatc

SEQ ID NO: 7394 - DNA, 487 bp, Arabidopsis thaliana
  unsure at all n locations
  Clone ID: LIB24-081-Q1-E1-E6
gtttggccgnccgtaccggaccanaattcccgggnccacccacgcgtccgcanacgcgtccgcccacgcgtccgcacatttccatttttctctcttccataaaacccaaaagaaactaggaagaggagtaaataatatttgttttaaagaaatgattctccacaaaatggcgttcttggccgttattctcttcttcttgataagcagcagcagcgtttgcgttcatagccgtgaaacgtttgcttgcgatacaaaggacgcagcaacagctacactgagattctgccagctttcagttcctataccggagagagtcagagatttgatcggacggttgacattgggccgagaaagtgagcttgttagggaacactgcggcggcgataccacgtctaggaatcaaagggtacgagtggtgggtccggaggctttacacggcgtttcaaatggtgggacccggtactaagttcggtggggtttaacctgc

SEQ ID NO: 7395 - DNA, 482 bp, Arabidopsis thaliana
  unsure at all n locations
  Clone ID: LIB24-081-Q1-E1-E7
tcntgccgggacgtancggtccacaattcccggggccacccacgcgtccgaaactctccataaatttagttttgatccctctgggttccttgaagaaaaaaacaccaattccattcatattcttcttcatacgttcaataattcttacgaggacgagatcttcctaacgtctttgatcttcttcattaggagataagtctaaactggtcgaagatgttgggagatttcatcatcagactccttgtattgatattagggtacacatacccagcattcgaatgctttaaaacggtggagaagaacaaagttgatatcgaggaactcagattttggtgccaatactggatacttttggcgctaatttcatcattcgagagggttggcgatttttttatctcatggttaccgttatacggagagatgaaagtagtcttccttcgtatatctcctggtaccctaaaacaaaggggaacgagacatgt

SEQ ID NO: 7396 - DNA, 473 bp, Arabidopsis thaliana
  unsure at all n locations
  Clone ID: LIB24-081-Q1-E1-E9
gtntccttgggacgtgccggtccgatattcangggnccncccacgcgtccggaaattgtgcttgatgtgatcaagaatgtcccggcctggcctggacgacatttgctagagggaggagatgatctaagatacttcggtttgaagacggttatgcgaggtgatgttgaattcgaggtcaagagccaaagggaatatgaaatgtggacacaangtgtctcaaggcttcttgttcttgctgctganaggaagtttangatgtgaataaacgttcaatggctgcttggtttaagtgtgagtttttttttaacttatgtggtcaaatttcattagtaggggttcttttaaggtaatgngttttttgggttgggtataggatnaaatggacctaccaagtcnaggtgaggaagcatttggggtaaacnaaacttagtgggggtgatctgtantaaccnatgttcttaggttttttttng

SEQ ID NO: 7397 - DNA, 483 bp, Arabidopsis thaliana
  unsure at all n locations
  Clone ID: LIB24-081-Q1-E1-F12
ccttgccgtgccggtccgaaatcangggtccaccacgcgtccgaaaaaacagagacaaaagaatggngcgaaaatccctaattttcccggtgattttgctcgccgttcttctcttctctccgccgatttactccgccggtcacgattaccngcgacgctctccgtaaaagcattctcttcttcgaaggtcaacgttccggtaaactccctccagatcaacgcttaaaatggcgccgtgactcagcattacgcgacggttcctccgccggcgttgacntatccggtggttactacgacgccggagacancatcaangttcggttttccgatggcgttcacaacaacgatgctttcatggngtataatcnatttcgggtaaaaccatgggacctgagcttagaaacgccggtgaaagctgttaaatgggggaacagattacctccntaaaagcgacngcgattcccggagtaagtcttcgtccaa

SEQ ID NO: 7398 - DNA, 495 bp, Arabidopsis thaliana
  unsure at all n locations
  Clone ID: LIB24-081-Q1-E1-F4
ctgtttcgcttgnccggaccgggtccganaattaacgggtnccacccacgcgtccggangaatgtggcggcgaagtaacttaccggggaannnnnnnnnnnnnnnnnnnnnnnnnnnnnnnnnnnnnnnnnnnnnnnnnnnnnnnnnnnnnnnnnnnnnnnnnnnnnnnnnnnnnnnnnnnnnnnnnnntcgattcgttaagcttgcataaagctctctgtgaactcctgagaagttgtctttgagaaagaacttggcaacttctgatttgccgaattgattgttgttggcttgagtagttttttttgaggagctatagggaatttgattgtggtttgaccataagttggcttcaatattgtagagaggattactacttcaaacaaagctcgaaaaactcatangttgtggtgaagctaaattatgctagggaaaccggtgatgtaactcctggaagcaactctacggaagatatcatcctcctcttgaagatgt

SEQ ID NO: 7399 - DNA, 480 bp, Arabidopsis thaliana
  unsure at all n locations
  Clone ID: LIB24-081-Q1-E1-F5
tccagcctgnacgtaccgtgtccacgaattcccgggnccacccacgcgtccgcnaacgcgtccgcccacgcgtccgcaaaattgttcttcttcggcaagattcctcgattttctccgtgttctgtaatttccgatagattttgacaacnnnnnnnnnnnnnnnnnnnnnnnnnnnnnnnnnnnnnnnnnnnnnnnnnnnnnnnnnnnnnnnnnnnnnnnnnnnnnnnnnnnnnnnnnnnnnnnnnnnnnnnnnnnnnnncaaatcctgctctgctctactatcttcaattcgattcttcatccgaacgaagaagacacaaattggagcttcactggacgttgatgataaagcatgaatcacggagggaacactcaggccgtagcaccaatggaccctaattccattgagaatcgatatggtgttgatggaagccaaacacagaaatattcatatcaatactcaactgggtctgaaagtgc

SEQ ID NO: 7400 - DNA, 463 bp, Arabidopsis thaliana
  unsure at all n locations
  Clone ID: LIB24-081-Q1-E1-F6
ttcccgggnccacccacgcgtccgcnataacttccttggcgangaagaaggtgaggaaggtacagatgttggatggtgtaaccattgttcgatctgagaaggtgaaggatgagattgttcttgacggtaacgatatcgagcttgtttcaaggtcgtgcgctctgatcaaccagaaatgtcacgtgaagaacaaggatatcaggaanttccttgacggtatctatgttagcgagaaaagcaagatcgtacaggaagaatgaatactcatattcccctcttagctcatatttcttgtgtttggaatgttgttagttttgttttatggaccacatccancggtgangtaaaccttgccttttttttgttcganaatttattanacttatgcaccaaggttttggngacaatttngangacccattcactctcacactttttgccanattacctcttcccggatgaa

SEQ ID NO: 7401 - DNA, 476 bp, Arabidopsis thaliana
  unsure at all n locations
  Clone ID: LIB24-081-Q1-E1-C4
acgtttcttggccggccggtccganattnacgggncccgcccgcgtccgganacantcaccggtactcatctgaccaagctagggtttcgcagtcatcatcatgtaccgtacggcagcttctcgagccaaggcccttaagggcattctaaaccacaattttcgagcttctcgttatgcaagttctagtgctgttgcaacgagctcttcttcctccagctggctaagtggaggctactctagttcacttccttctatgaacactcccttggctggtgtctctcttccaccaccactctctgaccatgttgagcctatcaaacttaagaccactactcttccaaatggtctgactatagccactgangatgtctccgaatccagcagcttccattggtttatacgttgactgtggttctatttatgagactcctcaattccgtggagcgacgcacttgcttgaaaggatggcattcan

SEQ ID NO: 7402 - DNA, 448 bp, Arabidopsis thaliana
  unsure at all n locations
  Clone ID: LIB24-081-Q1-E1-A12
cccacgcgtccggnanactaccatgaatgctgctgtttctctcacatcttcaaactcttcttcttttcccgctacaagttgtgccattgctcctgaaaggatcaggtttactaagggtgctttttactacaaaagcaacaatgtagtgacaggtaaaagagtgttttccataaaagcacaaatcacaacagaaacagatactcctactcctgcaaagaaagtanagaaagtgtcaaagaanaacgaggaaggtgtgattgttaacaggtacagaccaaaagagccttacactggaaaatgccttctcaacaccaaaatcacagctgatgatgctcctggagagacctggcacatggttttcagccatcaaggagaaatcccgtacagagaangacaatctgttggtgtgattgcagatggaattgacaagaatggaaagcctcacaag

SEQ ID NO: 7403 - DNA, 439 bp, Arabidopsis thaliana
  unsure at all n locations
  Clone ID: LIB24-081-Q1-E1-A2
ggtccgntattaacggggccccgcacgcgtccgcaaacgcntccgtttctcctttctctgggccaaagttccgactttttgcttctcccagaggctaatcatggacgctgtggcggcgaatttgtttcaatctccttccttactgcgtcaaacttccgaaaggttgatattttcgacgcccaactgtcctggcttcatgcgaattanctccggacctcaatttcgtctcagacaaaactcttctcttanattctcgagaccatttcaaancggaacaacttgtgttaaatctcggagaagctttgtggttaaangcttcagcttctggtgatgcttcaacagaatcaatcgcgccgcttcagttgaagtctcctgtgggacagtttctgtcacagatatangtgagccatcctcatcttgttccagcagctgttgaana

SEQ ID NO: 7404 - DNA, 496 bp, Arabidopsis thaliana
  unsure at all n locations
  Clone ID: LIB24-081-Q1-E1-A4
aactgtttcgtttgcccggccgggtccganaattaacgggtccncgcacgcgtccggaaagaaacacgagagcattatcaattattaacaattacacaagacagcgagattgtgaaagagtaaganagagagaatggcangagaggcagangctttggccacgacggcaccgttagctccggtcaccagtcagcgaaaagtacggaacgatttggaggaaacattaccaaaaccatacatggcaagagcattancagctccagatacagagcatccgaatggaacagaaggtcacgatagcaaaggaatgagtgttatgcaacaacatgttgctttcttcgaccaaaacgacgatggaatcgtctatccttgggagacttataagggatttcgtgaccttggtttcaacccaatttcctctancttttggaccttactcataaacttagcgttcagctacgttgcacttcccagttgggtgccatcaccattaatg

SEQ ID NO: 7405 - DNA, 459 bp, Arabidopsis thaliana
  unsure at all n locations
  Clone ID: LIB24-081-Q1-E1-A5
ttcccngggccacccacgcgtccgcangaaaatcgtaacaacacaaccttcaacaacaacaacatcatccattgccgttatcgatagcccaatgtcctcccataagctatctgataggagagaaatatggagagttatcccaccatctacctattgtctcaaaatcgaatctttcataaaattcgccacttctccaaacgccgagaagtacgaatcccgtccttttgaatccggtggatacaactggacacttattgtctatcctaaaggaaacattaaggaaggagctccacttaattacgtttcaatgtacgtccaaatagacaattcaacactccttaactctccaaaagaagtttacgcagaagtcaaattcttcatttataaccggaaagaggacaagtacttaacatatcaagagacggatgcaaaacgcttttttctgttcaaaccatattg

SEQ ID NO: 7406 - DNA, 490 bp, Arabidopsis thaliana
  unsure at all n locations
  Clone ID: LIB24-081-Q1-E1-B10
ctgtctcgcttgcgccgtaccgggtccgatattcacggggcccccccacgcgtccgcaaaaaacttaaaagatccaaacttcgaacaattttggtgtctgctatacagaatccaaatccaccttctccgattaaaaatcccttctctttcgatcatggatgtgtctaaagttgtcagcttttcccggaatttcgccgtcttggtcaaagtcgaaggccctgatccaaagggattgaanatgaggaagcatgcttttcatcaataccattctggcantgcaacactttcagcttctgggatcttgcttccaanagatatttttttgagtggtgaggtcgctgctaaggttctgtttgaagctggtcaggacatggccctggttttgaccgttgcatctgttgttgagccattcttaacattaggtcacagaactaagtaantagtatctctcaggatccggtgaagcttattccgggtgctatgattgaaa

SEQ ID NO: 7407 - DNA, 474 bp, Arabidopsis thaliana
  unsure at all n locations
  Clone ID: LIB24-081-Q1-E1-B11
tgccgtccntattaaggggccccnacgcgtccgcaaacgcatccgcccacgcgtccgagtactgagaatcttggagaagtgcttcggggtgaccggattgagaatgccccatactcgtttaaaatgcgggaggcacanatgtgcaatattctcggccgggtcactcttgatgccaagacagctaaagcgtttaaagaaaagatcgatgatgagtaccgggtcaacatgatcctcgacaaccttcctctggttgttccaattgaaagagtcgaccagngttctccctctgttgtttatcatcttggttatcatgttggtcttaaaagccagtacgangggagcanagancagaagttctttatgcacantcacntggcatttacagtccgctatcacaagagatatccaaactgatgctgcaatgaatcntgggatttgaggttcaaccttacantgttgaatcatgantatgag

SEQ ID NO: 7408 - DNA, 478 bp, Arabidopsis thaliana
  unsure at all n locations
  Clone ID: LIB24-081-Q1-E1-B3
gtgcccgtccgataantcaaaggggccccggacncgtccgcaatcaaaaagcaagtcgtgttacttgattacgtaaccggtttcgccaaggaatccgaccttgtaatcacctccaccaccatcgatcttagggtgctaaagggatctatgacggcgttggtgaagaatctctacttgtcttgtgatccttacatgcgaaatcgtatgaggaaacctgatcctctgagccctgctactgctcagtccttcactcccggcaagcctatctcagggtttggagtgtctaaagtgatagattctggacactcacnattacgaacgaaggtgacttaatttggggagcagtaggatgggaagagtacagtgttattacaccaattcctaatcttcacttcaagatccatcataccaattttcctttatcttactacacaggacttcttgggtatgcctggnatgaccgcntatgttggggttt

SEQ ID NO: 7409 - DNA, 483 bp, Arabidopsis thaliana
  unsure at all n locations
  Clone ID: LIB24-081-Q1-E1-B4
acgttcttgccggccggtcgaaataacgggnccngcncgcgtccgccnacgcatccggctgaggcattaanggtttgtgggggaacttgtcacagtantacgcccaagtactgcgggaatgggctttgattttaaaccgtttgttcatccaatctacaatgcgataatgtcccgcttgacaaatcaagatcaggaccaggaggtcaaggagtgtgctatcacctgcatgggtcntgtgatttcaacatttggtgatcaactgagggcagagttaccttcatgccttcctgtgcttgttgatcgantgggaaacgaanatcactcgcctcactgcagtaaangcattttctgtcattgccacttctccgcttcacattnatctatcatgtgtcttggaccatttgattgcagaactaacangattcctacggaagggctaatccggttctaanggcaagcaacactgattactatgaanacctt

SEQ ID NO: 7410 - DNA, 464 bp, Arabidopsis thaliana
  unsure at all n locations
  Clone ID: LIB24-081-Q1-E1-B5
accaaaaatccccggnccacccacgcgtccgaaaatggcgaaaatctaccggaagttgacaggctacggtggtgaaggagggcgtgaatgggacgatgatgtatatgagggtgtaagaaaagtgtatgtaggacaagatatcaatcgtatcacttacgtcaaattcgagtatgtgaaggaagacggccaagtcgtaacaactgaatatgggaaaatcattcaacaacccaaagagtttgtacttcaatatccggacgaacatatcatagcggtggaaggaaactatcgcggagtggctctatgtgccacagaggtgatcacaaacctcgtcttcaagacctcaaagggtagaaagtcaccactgtttggtccaaacttgcttggaattacgaccggtacaaagttcgttattgangatgggaggaaagaagatcgtanggtttcatggacgtcgggtaatgctc

SEQ ID NO: 7411 - DNA, 487 bp, Arabidopsis thaliana
  unsure at all n locations
  Clone ID: LIB24-081-Q1-E1-B8
gtcagcctggacgtacgaccataatcccggggccacccacgcgtccgcantatttctctttagtctctctacggaacctgtcttcttgtcttgtccaaaatcggatttttaagagtacaagtgagtttattttgggggccgaaatctgtcctggaggatacagaagcaagatgaagttaatagatcgaagaatgaggttaacggagctgctcttacggtgctccatcagtgtcttcgctctcctcgcgcttattctagttgtgacagacactgaggtcaagcttatcttcactatcaagaagacggccaagtacacggacatgaaggcggttgtgttcttggtggtggctaatgggatagctgcggtttattctttgttgcaatcaagttccgttgcgttggtggggtacgatgaaaggaaaggttttgtttagtaaagcctcttgccttggggccttttctcctgggtgatnaaggcgatgggcgt

SEQ ID NO: 7412 - DNA, 498 bp, Arabidopsis thaliana
  unsure at all n locations
  Clone ID: LIB24-081-Q1-E1-C1
actgttcgtttgccgggccggtccgaaattanagggtcnacggacgcgtccgcctctcatctcactgccgcatcttttcttagggttcttgtttcgctatctcttaaacacaaacagctctgtccgaataatctctcttcaagtacctcttttttctgattctgtatatcgccatgaantactgatttccctctctatanacccatcanagtaaaccaatttctcctgtgacttgtacctaactcgatcttaccanactggtgatggcgtctttgaaccctttcgatcttctaggagatgatgctgangatncaagccagctcgctgtggntttgtcgcanaangtcnagaaaagctgctgctgctgttcaagccctcctaaggncngctaagttccnaaacaagncggntcctccttctcaagcaactgacgggantcnaaggaatgcctcctncaagggacgtccgtggntgggactgggnggacgttgttggaat

SEQ ID NO: 7413 - DNA, 469 bp, Arabidopsis thaliana
  unsure at all n locations
  Clone ID: LIB24-081-Q1-E1-C10
gtnccgggtccgaaaattcacgggnccacccacgcgtccgcaatggtggattggtctacactaccgaaggatcttttagacctaatttcaaaatctctagaatcttccttcgatctcatccaattccgttccgtttgttcttcatggcgatccgccgccgagccgaaaagtcctcttccaacacatcatcncccgatcctccccgataacggggggagtcncntccctgattccgccgttggtttccgtctctcgcancggagtatcttacntatcaagcctcatgaaccgtgtatcgaancggattcgtttggatggttgatcaangtcgaggaanatcntaatgttcctcntaaggtgactcttttagatcngtnangtgatacnagaaacncaattcctgagaatttccctcgtgttctcgatatgtccaantttaangttcgagaattgggtcgtgaattcaagc

SEQ ID NO: 7414 - DNA, 469 bp, Arabidopsis thaliana
  unsure at all n locations
  Clone ID: LIB24-081-Q1-E1-C3
gtccgaaattanagggtccacgacgcgtccgcncattaacccttctctgttgttacagaagtcgacggcgagtagcttcaaccaaaaagaaacaccagtatctgtctcagcaatggnatttttccagaaagcaaaagctattcgaatgcgtaacagtcacaacaagtatctaacagcagacgacgatgaangaaaccgtaactcaaaaccgtaacggatctaccaaaaacgctcgatggaccgtcnaaccggttcgtgattctttccatgttattcgtcttaaaagctgttacggtaagtacttaaccgcttctaacgagcggttcttgctcggggctacggggaagaaagtgattcanttgaaactgagtcgggttgattcgtctgttgagtgggaaccgcntagaggaaggggtcctaagattaancttatgactagatctggtaactatttacgaggtaatggtng

SEQ ID NO: 7415 - DNA, 455 bp, Arabidopsis thaliana
  unsure at all n locations
  Clone ID: LIB24-081-Q1-E1-A11
gccccgacgcgtcngcaaaagatgagcaacgacaaggatancttcaacgtctccgatcttacngctgcncttaaggacaaggatcnagctggccttgtcaatgctctaaagaacaagctgcagaatctggctggtcagcgttctgatgtgctcgagaatctgactcccaatgtgagaaagcgcgttgatgccttgagggatatacagagccaacatgatgaactanaggcaaaattccgtgaggagagagctattcttgaagccaagtatcaaacgctgtatcagcctttgtatgtcaagcgttatgagattgtgaatggcactactgaagttgaactggctccacangatgataccancgtggaccaaggagangagaaaactgcagaagagaaaggagttccaagtttctggctgacagctctgaaaaataacgatgtnaattccgaaggagg

SEQ ID NO: 7416 - DNA, 389 bp, Arabidopsis thaliana
  unsure at all n locations
  Clone ID: LIB24-080-Q1-E1-D9
ttcttctcattcgtcatctagtcncattctctgtccataacaatgaatatcaattgttctccattagggtttctaatttcactcttcttcattgttacttttcttgcaccacaagtcanatctagggctttctttgtctttggtgactctctcgtcgacaatggnaacaangactacctcgtcaccactgcncgtgccgacaattacccgtatggtatcgactacccgacccgtagacccaccggacgtttctcgaacggccttaacattcccggacattatcagtgaggctataggcatgncgtcgactttgccgtangttagnccggcatctcaccggaagaaaatcttcnaggtcggtgctaattttgcctccgnaggaatttgga

SEQ ID NO: 7417 - DNA, 414 bp, Arabidopsis thaliana
  unsure at all n locations
  Clone ID: LIB24-080-Q1-E1-E7
cgtgaaaaccatatatcgcatcttctcattcttctttcattgccctcattaaaacacacatcatatcgcccccaaaattttgatttgattagagaggtgtgtggaaaatggcggaagagtatgccgagtgtttgctagagaagaacttccatgaggattgttctggctgcaaggttgatcagatgaagaggcttcgccgtggatttcccttctgggagctttttaccgtttggatcatcgttctttgcaccgctttgcccatttcttctctattcccctttctcnactttatgattgatgatttcaacattgcaaagaatgaagaggacattgggttctacgctggatttgttggttgctctttcatgctcggacgagcttttacntctgtggcatgggggacctggttgccng

SEQ ID NO: 7418 - DNA, 413 bp, Arabidopsis thaliana
  unsure at all n locations
  Clone ID: LIB24-080-Q1-E1-E8
tccatgaccgattgaccacgttctcgtcttcccccaaatctaaaaccctaaattctcaattgctcgtcacacttcgtcactccaccagcgacaatcgccgcagaaacctctacgaaacttgctacaatggagttttcatcacaagacgacgattttggaggagacgattccgctgctaatgccaccagggcttcaggtaatanaagaagcttcggtgatcttgangacgatgaagatgatattttcggatcaacaacggtagcgcctggtgttagaactgggatgattttgtctctccgaggaagtcttaagaattgtaaagatgatcttgcttcatgtcanaatgagctcgagtcagcaanancagagattcaggaagtgggagtcagcntttcagaagtgngtccctttgg

SEQ ID NO: 7419 - DNA, 350 bp, Arabidopsis thaliana
  unsure at all n locations
  Clone ID: LIB24-080-Q1-E1-E9
cangtaaaagtcaagaattcccgggtcgacccacgcgtccncccacgcgtccggtcttgctgctctgtgttgttgctgtctcttggatgcttgcttctgattggagtctctctctctctgcataaagcttcgggatttatttgtaaganggttttggttaaacaaaaaccttaattgatttgtggggcattaanaatgaatctctcnatgattctctttcgttttatgtgtaatgttcttcggttcataacattttaactattgtctancgacgttctgccttagtttgtatttgattatgggaatgtaaattggttgggagacactattctaaanaaaaanagaaaang

SEQ ID NO: 7420 - DNA, 409 bp, Arabidopsis thaliana
  unsure at all n locations
  Clone ID: LIB24-080-Q1-E1-F2
ttcntcctcttcacctgtaatctctccaaaatcagaaaaatgacttcttcagtactaaccccaagcttaaagcttttagctatgacgaattcttcctcttcgacccttttttgtattccttctatcttcaacatctcgtcctctgaatctcaccgcttcaatttttccttatcctcacgacncgttaatctcacactctctctcaaatccaaaactcttcgtaactcatctcctgttgttactttcgtttcccaaacttcgaattgggctgaggaagaagaaggtgaggatggaaggcatcgngaggtacttcagtcactgtagatgaagagtttcgagtctgaangacggtgttggnttccggagccancggnagaggntaaattaatcggtcggnaactttgcgtac

SEQ ID NO: 7421 - DNA, 418 bp, Arabidopsis thaliana
  Clone ID: LIB24-080-Q1-E1-F3
cgataacatccaatctctctttatattccttccttccattgtggcaataagtaacaaaccttgccctctacttcattccctccttgttttgatttcatcgtctttgttagctctcctctgtttttttttcttagtcaatcgatggcgaaggagcttgctgataaggctaaagaggctttcgtagacgatgacttcgatgttgctgttgacttgtactccaaagccattgacttggatcctaattgcgctgagttcttcgctgatcgtgctcaggcctatatcaaactcgaaagcttcactgaggccgtggcagatgcgaacaaagcaattgagttggatccttcattgaccaaagcttacctaagaaaagggaactgcctgtatgaagcttgaaagagtatcgggctggctaaaacag

SEQ ID NO: 7422 - DNA, 419 bp, Arabidopsis thaliana
  unsure at all n locations
  Clone ID: LIB24-080-Q1-E1-F5
acgcgtccgcggacgcgtgggttctcttttagggattgtttttttaacaatttttgccttgccataagcaatacaaccatggcaaggatctctctgttgttctcattagcctttgttttagccctcggctcagtgttcctttccgtttccggtcacgctcctcccgtgacaccgagaaaatcagcatgtccaaaaacagtatccgaactccagaccttaccttttaccgaaatcactgagatcctaaaccgaaaagagcggtctgccccgaaaacccctgagttcaaggcaatgttcacaatgtgcaaaggctacgtgacatacctcgagagcctctacaagtttgangaatcncattggtagatgttttaggaattgccaagaccaagatacacccctgangaacaagggcaattcct

SEQ ID NO: 7423 - DNA, 387 bp, Arabidopsis thaliana
  unsure at all n locations
  Clone ID: LIB24-080-Q1-E1-F7
gggctaatctgaatacaactattactaacaataattcacttatctaaagaccatcatctgactgactctacgctgaatcatcacgaggaagacttgaatcgaccggngaagagatacgtgtagagatctgattggctcaccggagagaacaaancangaaatggggaggacgacgtggttcgacgttgacgggttgaggaaaggagagtggacggcggaggaagaccggaagctcgtggtttacatcaacgaacacggtctaggcgagtggggttcactgcctaagagagccggtctacaaagatgtggaaagagttgtagattaagatggctgaattanttgnggcctgggattanaangaggcaagttcacncctcacgaagaag

SEQ ID NO: 7424 - DNA, 364 bp, Arabidopsis thaliana
  unsure at all n locations
  Clone ID: LIB24-080-Q1-E1-F8
acgcgtccncccacgcgtccggctacacataaactgctgaccgatcccaaaggttgaaagattctttggcgctaaaaaatccccagttcccaaatcggcgtcctcgtttgaaaccctaattcctgaatcgaagcagatcctgatcgaatcgaangtgttcgaatgatagctacccagtaaattcagaaccctaattaacaatgggcggtacggacgcgaaggacattcncgggttgccgaanactccactgtctttaactcaggagaagaaatctcgancccagaaagagtcccatanaaaacccnatggcatttctcgcgaggtttatgcgcttaccggnggcgttgcacctcttangccttg

SEQ ID NO: 7425 - DNA, 395 bp, Arabidopsis thaliana
  unsure at all n locations
  Clone ID: LIB24-080-Q1-E1-G10
tatttcattgcacccgctctcgccttctgcaactcttatggaacggggctcacagactggagcctagcatcaacctatggaaagatcggtcttttcataatcgcttccgttgtaggaagtgatggtggtgtcattgcgggtttagctgcctgtggtgttatgatgtcaatcgtctccaccgnagctgatctcatgcaagacttcanaacaggttacctcactttancanctgcaaagtcnatgtttgtaaagccanctcgtgggaaccgnaatgggctgtgtaatcgctcnactcangattctgggtgttctggactgcctttgacattnggaggatccnaatgggcccgtanaaagcaacttaagnaagngnttttccgtgaaaattggggnat

SEQ ID NO: 7426 - DNA, 426 bp, Arabidopsis thaliana
  unsure at all n locations
  Clone ID: LIB24-080-Q1-E1-G3
acgcatccgcccacgcgtccgcccacgcgtccggggtttttgtctctagcctcctcaagctttgcaaacaatcatggcgacccagatcagcannaagagaaagttcgtagccgatggtgtgttttacgctgaactcaatgaggttctaaccagagagcttgctgaggatggttactctggtgttgangttcgcgtcactcctatgcgtactgagatcatcattagagccactccgtactcaanacgttctcggtgagaagggaangaggattagggaattgacatcncttgtacaaanngagattcanatttcctcagagacagtgttgagctttatgctganaaagttgcgaacanaaagtcnttgttgcgattgnacaggcngagtctctccgntagaaggcttctttgcgnggtccttgcctg

SEQ ID NO: 7427 - DNA, 437 bp, Arabidopsis thaliana
  unsure at all n locations
  Clone ID: LIB24-080-Q1-E1-G7
aattcccgggtcgacccacgcgtccatctcgttctgattaccatgaagaggttatcgaacttttcaaacacatgcttcaatcaaacatccgccctgataagtacacattcgttagtatcttaagtttgtgttctaagctctgtgaccttactcttgggagttctattcatggtttgatcaccaaaacagatttcagctgcgctgacacatttgtatgtaacgtactaattgacatgtatgggaaatgcggaagcattaggagtgtaatgaaagtctttgaagaaacaagagagaaaaacctcattacatggacggcattgatttcgtgtcttgggcatccatggatatggacaggaggcacttgaaaagtttaaggaaacactgtctttgggttttaagccaagatcgtgtctcgttcatcnctattccaactgctt

SEQ ID NO: 7428 - DNA, 431 bp, Arabidopsis thaliana
  unsure at all n locations
  Clone ID: LIB24-080-Q1-E1-G8
aggtaccggtcanagaattcccgggncgacccacgcgtccngtaacattaccaaaacgaaaccttccttgtggattcccacttctttcttctgttttcttcttcctcttctttaaattggatgttttgggcaagaaacagagagaaacacgttaatttgagagtttgtcattgaatatttggtttgcaatggaaagagattttctgggtttgagcgacaagcagtatctaagtaataacgttaagcatgaggttaacgatgatgctgtcgaagaacgagggttaagtacgaaggcagctagagaatgggggaagtcaaaggtttttgctacttcaagtttcatgccttcttcagatttccaggaggctaaggcgtttccgggtgcataccagtggggatcagtttctgcggccaatgttttccgcagatgn

SEQ ID NO: 7429 - DNA, 480 bp, Arabidopsis thaliana
  unsure at all n locations
  Clone ID: LIB24-081-Q1-E1-A1
gttccncgactcccgggggcccccacgcgtccggaangtggttcggacaacagtagcatgcgagtgcgtgtatgtccgggcaatggttatcaaagcattgatatggatgcaaagtccagatgaatcattggatgagttaaaatcaatcattgcctcggagctttcagatcctggttggcctgcagctctagtcaatgatgttttgcttactttgcatgcccgctttaaggcaactccagatatggctgttattcttctcgaaattgccagaatatttgccaccaaagttccagggaaaattgacgctgatgtctacagctgctatggaagacatgtccttgttggagcctgggtcctgacgggaaacacacanctctgggaagcantcacgaatagtacnccatctaacaactccaacaaccgggggtccaatggcttggactgacatcaaattgatagggnctctgcatcaaattccta

SEQ ID NO: 7430 - DNA, 486 bp, Arabidopsis thaliana
  unsure at all n locations
  Clone ID: LIB24-081-Q1-E1-A10
ctgtctcgcttgncctgccggtccgatattcacggggccccccacgcgtccggaaaaggactcgccggtcccatggtacttacctcttgacaaaatgcctcnangctctgaagcaggccggttttgaagtgatatgggaaaaggatctggccaaggactcgccggtcccatggtacttacctcttgacaaaaatcatttctcactcagtagcttccgccttacagctgttggacgattcataaccaaaaacatggtcaagatccttgaatacataaagacttgcacctcaangaagccaaanggtctcaaatttcctggagcangctgcggaangattagtccgacggtggaaggagagagattttcacgccaatgtatttcttcttggnccggaagccagagtaagcggatgagagatggcgatggtcatcgtaggtcgaatgaagtgacanaatttctcaatttgcagtcttattttctatgtt

SEQ ID NO: 7431 - DNA, 394 bp, Arabidopsis thaliana
  unsure at all n locations
  Clone ID: LIB24-080-Q1-E1-D8
gggcggacgcgtgggttcgagatcgccggggagtgattctaatgcgtcgattgttggggatcttctggattatcttaatgaatcctggacacagtttcacgccactgctgaggcgaagagacagcttttggctgctgggtttgatctcctcagtgaaaacgaagactggaatctgaaacctggtggccgttacttctttacacgaaacatgtcctgtttggttgcttttgctgtcggagaaaagtatgtgcctggtaatggttttcatgccatagctgctcacaccgatagcccgtgtcttaaacttaaaccgaagtctgcttcatccaagtctggcnatctcatggtgaatgttcaagacttatgggaggtggtttgtggcacacatggnttt

SEQ ID NO: 7432 - DNA, 462 bp, Arabidopsis thaliana
  unsure at all n locations
  Clone ID: LIB24-079-Q1-E1-A7
aaacgaagaaaaacctagaaaacagttgaagaaagaaaatcacaagagaagccatggccggaattggaccgattactcaggattgggaaccagttgtgatccgcaagagagctcctaacgctgcagctaagcgcgacgagaagactgtcaacgccgctcgtcgaagcggcgccgatattgagaccgttcgaaaattcaatgctggatcnaacaaggctgcatcaancggcacctccttganacacaaagaagctagatgatgatactgagaacttatctcatgatcgtgttgccactgaattgaagaaagccatcatgcaagctannaggggagaagaagctgactcaantcccaanctttgcncatctgattaaatgagnanccacaagtgatccannnaatacgangtctngggaaangcaaatcccgaancaacaagattcttttcaaagctggagang

SEQ ID NO: 7433 - DNA, 445 bp, Arabidopsis thaliana
  unsure at all n locations
  Clone ID: LIB24-079-Q1-E1-A9
tacgganatcggccgtcgacccacgcgtaangacaaaactgtagagatncacagtttgctacaaaagttgggtagaaagattgttcgtgatgaatcctttggaaatcctggaaaacgccggttcttgttggatgctgangatatttgtgatgtatttaccgataataccggcacacagantgtactagngtatatctcttaacacattggaaatcaacggggacattgtctgtagatgataaatcattccacggtatgcataatctccaanttcttaaagttttcgangaattgggcggcgggggaatggtgaangcatattgtccttacctcaaggcctcanattctttgccccgaaanactcagactacnancactggtataaattcccgttgaggtgtatgncttctaacntcaagggccgaagtatctgggttaaccaana

SEQ ID NO: 7434 - DNA, 503 bp, Arabidopsis thaliana
  unsure at all n locations
  Clone ID: LIB24-079-Q1-E1-B1
tggttttctggccccacggtccggaaaaccgggtcgacccacgcgtccgcactgcnccacggagctctcggaaatttgtcttccccttgtcgtcgtctccctatctactgcttcttcttcgttttcgtcttctttatcaaggaatgctgtttaattggaatcaacaatggagaatttgacggaaatagaatcaacgatggagagtttaacggaaatggagagtgagagagttgaacagggtaccgataaggaaattggaagtggagagaaaaggcaggatgatgtaaaggaaacggagaatgagaattctgggagagagagtangagaggaagctcctgtcagggaacatgaaagattctccatgtctcattgttattgaagaangtacttccctaacttcccttgaagaagtgaccaatgctgatgatctgccgaaagattgatgatgagaaagaantcccaanttgaaacaagcccgcatccaagtccctctccntcaata

SEQ ID NO: 7435 - DNA, 450 bp, Arabidopsis thaliana
  unsure at all n locations
  Clone ID: LIB24-079-Q1-E1-B10
acgcgtccnccgaggcccaaatctttctcttttctataatcactcactgtttggttttttatatttgttttcaaaaactttgggaatttcgtcaatggagcctgacgtggtggagatccctcctcctcctctgatcgcttcgggttctagaactcgtaaacccagaaaggctgttcctgaagtgattgatgtggaaagttatgaattccgcaatgttggtgttgttaaggataacaatgttgttgataagaagaacaaagggaaggcaatacaagttgactccttttctttcaacaacgttcaatctcancatcatggatcgtcgctgnttaacttagagacgttccaagactattanggtcataagaacatcccttttagtgaatttgctnantcaaccaattgancgttgatgactantcantgtagcaagacgttctaaattctaan

SEQ ID NO: 7436 - DNA, 453 bp, Arabidopsis thaliana
  unsure at all n locations
  Clone ID: LIB24-079-Q1-E1-B3
cggtccggaaaacngggtcganccacgcgtccgaaaaaaggaccagctcagatgagtctggagtttccaagtttaaaacctctctacctcgatttgagcaaatcctgatttactctcatcctcatcatctctcatcatcgagattcatagtctcttttgccgcttggattcttccaaggttagtgagctgctatggcaactcatcagcaaacgcaacctccttccgattttcccgctcttgccgatgaaaattcccagattccagaggctactaagcctgctaatgaggttcagcaagctaccatagctcacgatcctccaacatctgtgtttaagaattctgaancaaatacgggaagattaaanttcagaaacgcctatcaaaattccctttccanccgangggttanaggntccccctggtaaaacatagaaaattctttccttggnaag

SEQ ID NO: 7437 - DNA, 457 bp, Arabidopsis thaliana
  unsure at all n locations
  Clone ID: LIB24-079-Q1-E1-B7
acgcgtccgccancaaaaacgagagtctcttcacggtcaaagaactaaacgacatggtatatctacaagcagcactttcagaaacaatgagactttaccctccaataccaatggaaatgaaacaagccatcgaagacgatgtgtttcccgatgggacattcatacgtaaaggctcacgggtttactttgcgacttacgccatgggaaggatggaatccatatggggaaaagactgtgaatcattcaaaccagagagatggatccaatcagggaatttcgtgaatgatgaccaatttaaatacgttgtgttcaatgctggaccaaggctgtgtttagggaaaacatttgcttacctacagatgaagacaatcgctgcttcagtcctgtctaggtactcaataaaggttgctaaagatcatgtanttgtcccccagaagtaactacaaccttgtanatg

SEQ ID NO: 7438 - DNA, 456 bp, Arabidopsis thaliana
  unsure at all n locations
  Clone ID: LIB24-079-Q1-E1-B8
acgcgtccgctaaatttcagtacctgcaactcctttttctcaactttccgatcatatttctcaatcggagaaactgattcgacgaacatcatgagtcgctacgatagccggaccggcgattccacctcgtaccgtgaccgtcgaagtgactcagggtttggtgggacttcatcatatggaagctcaggtagtcatacatctagcaaaaaggataacgatggcaatgaatctccaaggaagctagatttagatggtttgactccttttgagaagaatttttatgtcgagtctcccgctgtggcggctatgacagacacagaagtagaggaatatcgaaagctaagggaaattactgttgaaggcaaagatattcnaaaactgtcaagagttttcgtgatgttggctttccnnattatgttttggaangaagttaagaaggctggtttttactgaacc

SEQ ID NO: 7439 - DNA, 490 bp, Arabidopsis thaliana
  unsure at all n locations
  Clone ID: LIB24-079-Q1-E1-B9
tggcctaccganacgatatcccgggtcgacccacgcgtcngcggangcgtgggaaaaaacatgaaaatcctctcactttcacttctcttgctcttggccgctacggtctcggcatccgttccagggctcatcgaactcgtcgattcgaaaaccatctttgggaacgtanccgaactcttagagaaagagaaactttccatcaactacgccaactgcagaagctggcaccttggtgttgagacctctaacatcatagacttcgacacggtgcccgcaaattgcaaagactatgttgaagactacttgatcacttccaaacagtaccaatacgactccaaaaccgtgtgcaangaggcttatttctatgccaaaggacttgccctaagagaacgacaccgtcaatgtttggatctttgacctanatgatacnctcctctctantattccctacnacncanagtatgggatacgggacagagaaggaccgncc

SEQ ID NO: 7440 - DNA, 520 bp, Arabidopsis thaliana
  unsure at all n locations
  Clone ID: LIB24-079-Q1-E1-C1
ctggttttcctgcgccccacgggtccgggaaaaacccggggtcgacccacgcgtcccgaagaaaaaacttccatgggactgtgctatgtccgtcgggcgacaacatcgacactgaccaaatcattcccgcggagtttctcactctcgtcccttcgaatccagaggaatacgaagaaactcggttcttacgctttagttggtcttccagcttcttacaaggaacgattcgttcanccaggtgagatgaagacgaagtactcaatcatcattggcggtgaaaactttggatgtggatcgtcacgtgaacatgctccggtttgtttaggagcancgggagctaaagcagtggtggctcantcntaagctagaatcnttttcaggaactctgttgctactggtgaagtttaacctttgggattccgaaattaaggtttgtgatgaattgtacaactgggtgatgttgccaactggttgaatttaagggaaagggagatagtaattttgatnaatcatacgactg

SEQ ID NO: 7441 - DNA, 462 bp, Arabidopsis thaliana
  unsure at all n locations
  Clone ID: LIB24-079-Q1-E1-C10
acgcgtccgcccacgcgtccgcaaaagtgctcgagagagagaccttgaagaagaaagaagaagagacgagtttgatatctaaaggaatcatttttgacggatttaggatctaagtaaaccctagattgaccgaatatgagtactcaagcgacgggtccttcttcaacatcagggaggagaagcaattctactgtacggcgaggaccaccaccttctaagaaaccagtacaatcagagaatggaagtgttaatgggaacacctcaaaacccaattcacctcctcctcaacctcaatctcaagctccttctaatggagagagaacagtgaagaagcttaggttatcganagctcttactattcctgaaggaactactgttttcgatgcttgtcgaagaatgggctgctaggcgtgttgatgcttgtttgttgactgantcaaggtgcgcttctttccggggatt

SEQ ID NO: 7442 - DNA, 494 bp, Arabidopsis thaliana
  unsure at all n locations
  Clone ID: LIB24-079-Q1-E1-C12
cgtttgcctggncctacggancgganatcccgggtcgacccacgcgtccgcccangcgtccgctctctttcgctctttcttcttccccgcagttcccggagacgacgccggaggaaaatcgtacggaaactttgcttcgacttcacgtggccgctccacgaagcgcctttgggtttcgtcttccccgtttctctttctctctcttcttttgcctttgttaccacgaatagaacgagaggagagagataggaggagagttttgggatattggtggagagcgattatcgggagagccagagaaaaaaataagcagcttcttcctccctcatcgttgggaccgtgacttttgttttcttcagctttaagcanacaagaanaaaagatgaccggcgttggcgangaatcagcttatctccattcaacctgatgaactcaantttctctttgaacttgaagaagcanagctaactgtgatcgtaaagttgccaattana

SEQ ID NO: 7443 - DNA, 485 bp, Arabidopsis thaliana
  unsure at all n locations
  Clone ID: LIB24-079-Q1-E1-C2
accggtccggaaaaaccgggtcgagccacgcgtcccgctaaaaactanagtaatccntanatcaatgtcnncagagatgacaaagactcntctcatggtctacgcctcgtgtctatagtaatgttttacatgngctcgtccaaattttctcccaagaaattgatccatattcgctagaggtgctagaanatgtggccttancttcatcttcaaagtttaatatttacgttgaagctcccgatgaagctctattcggaagaagctgattcacccgcaatagaatatgacaaggaccggtacaaaatacccgattttattgcggcttgcgcnatgaagcanacctggatatgcttaaatgtggttttcgaanacatgaaagatgagattangccanttagaaatgaatgttgtcgtgaaatattganaatgggcanagattgccatttcagattggttgaagggctggtccgccatgttatgtgtaa

SEQ ID NO: 7444 - DNA, 439 bp, Arabidopsis thaliana
  unsure at all n locations
  Clone ID: LIB24-079-Q1-E1-C5
gggcggacgcgtgggtttccattaaccctccaattttcccgcctttgtctcactctcttcccgccttgcactcgccggggactccatggttcanaagcancaagcctccgccggtccgggtacngagcctaagaagcgtcgccgtgtcggattttctcccgccgatactggtgtcgaggcnaacgagtgcatcaaaatttatctcgtttcaagcaaagaggaagttgattcctctgatatttccagcgtgaagccagttgacntgaatgatttctttgatggagatggcaagatttatggttaccaaggtttgaagataaatgtatggatcaatagcatctcattacattcatatgctgatatcacataccagagcaccattaacgganacaaangcatcacggacctcanatctgctttacagaacatatttgctgag

SEQ ID NO: 7445 - DNA, 481 bp, Arabidopsis thaliana
  unsure at all n locations
  Clone ID: LIB24-079-Q1-E1-A5
cggtccgganatcccgggtcgacccacgcgtccgctgaggtcaagcttatcttcactatcaagaagacggccaagtacacggacatgaaggcggttgtgttcttggtggtggctaatgggatagctgcggtttattctttgttgcaatcagttcgttgcgtggtgggtacgatgaaaggaaaggttttgtttagtaagcctcttgcttgggcctttttctctggtgatcaggcgatggcgtacttgaatgtggcagccattgcagcaacagcagagtctggtgtgattgctagggaaggagaggaagatttgcaatggatgagagtgtgtactatgtatggaaagttctgcaaccaaatggctataggagtctctagcgccttgttagcctccattgctatggttttcgtctcctgcatttctgcttttagtctcttccgcttgtacggtgccaccaaagaccgcagaaccacgccgtggt

SEQ ID NO: 7446 - DNA, 490 bp, Arabidopsis thaliana
  unsure at all n locations
  Clone ID: LIB24-078-Q1-E1-F8
tanaagtccgaaaattcccgggtccacccacgcgtccgcncacgcgtccgcggaattttcccaaaagaaaaacagagaatgatgaagctgcaagggggacttctccagtggagtcgtagcagcttaatcccgtcgatttatacgccaatcaacaaaacccaattctctatcgccgcctgtgtcatcgagcggaaccaccagcttacggcgaaggagagacggcagctccggaacgagcggcgggagagtaaattggggtatagctggcgagaagaagttgaagaaaagttgattaagaaaccaaaaaaacggtatgcaacgtggacggaggagctgaatttggatactttggctgagtcgggtccgcaatggtgggcggttagggtttcgagacttcgtggtcatgagactgctcaaatcttaactcgagctctggctcgtcaattccctgaaatggaattcacggtttaagcaccatcctgttcaagtg

SEQ ID NO: 7447 - DNA, 408 bp, Arabidopsis thaliana
  unsure at all n locations
  Clone ID: LIB24-078-Q1-E1-G10
agatttgctcaanaggttgtccaacatggctatctccttctacaacgacaanacggggataaaactggaacttgtcaaggttttgagagcaanttttcacccatctgctgcaatcacactctacatcacgtttgaagccaatgacccttcagatggtaaccagactaaacgttaccaagcagtggttcgatacttgtcctttgatatcgaagtttgctcttgcaatcctgaancatcttcttcttgaattctcttctgaaagttttccaccggcgagnnnnnnnnnnnnnnnnnnnnnnnnnnnnggggaagcataagggcactagcaagtttcaatttgttccttgaacttctctatttgaaattaagttgtanttttatgcccaaatgtnggtctctcggtgtttt

SEQ ID NO: 7448 - DNA, 498 bp, Arabidopsis thaliana
  unsure at all n locations
  Clone ID: LIB24-078-Q1-E1-G3
tagccgtccgaaatccanggtccacccacgcgtccgtgagaaggcaatgcagcttcttgagagtggtttgaaagttaaggagtatgagcttcttaggaggaacttcagtgacactggttgctttggatttggtatccaagagcacattgatcttggaatcaagtacgatccttccactggtatctacggaatggacttttacgttgtccttgaacgcccaggatatcgtgtggctcgccgccgtagatgcaagactcgtgttggtattcaacacagagtaaccaaggatgatgcaatgaaatggttccaggtcaagtatgaaggagttatcctcaacaagtctcagaacatcactggttaaaaagtgttttgatctttaaagatttttgttgattccaagcttaatttaaagttgttaacctttgggatgttaaaagaatttcctggtggtagtaaatccttttgacatcagtttgggaanaatcctaaaatcctcca

SEQ ID NO: 7449 - DNA, 495 bp, Arabidopsis thaliana
  unsure at all n locations
  Clone ID: LIB24-078-Q1-E1-G4
tgttcccctgcncgtagaagtccaaantcccggnncccttccgaaattatggncaanctccggaaacttaaccttctcncngtcncncnaaccataacctttgncnctcttaccatanccaccaacttacctttctttgaagtgaaatatcccaacaacaacccttttgggatgttactacggccgacaccgatcaagaaccaatccttgggtctaccggctcatgtcgggtcagatgagtgtcgggtttggaccaaagcatgttctgatgagattcttaggctgacttatcagccggataacgttgcgtggcttaaacgcgttaggaggacgatccatgagaacccggagctagcgtttgaggagtatgagactagtaggcttattangtcggagctggaccgtatgggtatcatgtatagatatccgttagcgaaaacggggtattcgggcttggatcggattcggtggancgccttttgttgcggttcgggc

SEQ ID NO: 7450 - DNA, 515 bp, Arabidopsis thaliana
  unsure at all n locations
  Clone ID: LIB24-078-Q1-E1-G8
ctgtttcgcctgccgtaggccgtcgaaancccaaaattnccggggccncccacgcgtccgaaacagaggaaccaccactcaacacacaccagcagcacccagaagaagttgaacatcatgagaatggtgcgactaagatgtttaggaaagtaaaggctagagctaagaagttcaagaacagtctcactaaacatggacaaagcannnnnnnnnnnnnnnnnnnnnnnnnnnnnnnnnnnnnnnnnnnnnnnnnnnnnnnnnnnnnnnnnnnnntcgatgcaccaggcgtaacaggtaaacctagagaaactaatgttccagcatcggaggaaattattccaccagggacaaaggtgtttcctgtcgtgtcttccgattacaccaaacccactgaatctgtaccaagtacaagangccccttacggacacgatgcaccggctcattctgtaaggacgacgtttacatcggacaaggaaagagaacagagatgttccgattcatcatcctcctgtcc

SEQ ID NO: 7451 - DNA, 506 bp, Arabidopsis thaliana
  unsure at all n locations
  Clone ID: LIB24-078-Q1-E1-H1
antgttagcctgccgtagccgtccgaaattccagggtcgacccacgcgtccgctctggccctctctctcttctctctctcaaaattttcagagagagaatcaaaccaaaattttcgacgacggtaaattgatgtcgtcggtgatggttgaattgccgtccggtgtagtatccggctttcgtctgacatatattggcttccacagcagtacatggtcggcccttgtctagcatcatcggctctttcagcggtgatggctagctcacggtgttaatccggcgtagttcggttttcttttccttttggtttatatcacggttacgtttcgaccgttgattgtctttagatcagaattcattgggtatgtgtgttggtgatggcgttggttttcaagtccaagcttgcttaattagatctaattccaacctatcctttgagtttaaggtttacggataataattaagcagtttgcgtttttgagatgaaagattcaaaagctccttcctc

SEQ ID NO: 7452 - DNA, 497 bp, Arabidopsis thaliana
  unsure at all n locations
  Clone ID: LIB24-078-Q1-E1-H2
gttgccgtggccgtccgaaattcangggtcgacccacgcgtccggtttagtgaagccaagtaagcaaagccccttgtttttgacggacattatatctcctcctcttctcttctataaattgggcacctttttccaattttacgcacagtcacggagatagatagtaagagagagctatggcggaggagcacttcgacgttctgactaaatccggtgagaagaccggtgtgtccaaacccaggggagaggttcacagagatggagattaccatcgtgctgttcatgtctggatttttgtggagactactcaacagctacttctccaacttcgatctgatgataaagattcttggcctggtcaatgggacatctctaagtgctggccatatatcagctggtgatacatcgcttctatctgcacaacgggagcttgaggaagaacttggcgtaaaaccccaaaggatgcatttgaaaagatctccgtttccgcangaatg

SEQ ID NO: 7453 - DNA, 499 bp, Arabidopsis thaliana
  unsure at all n locations
  Clone ID: LIB24-078-Q1-E1-H3
ttagcctnccgtagccgtccgnaattccagggtcgacccacgcgtccgattttctcttacatcacttaatttataatttccttttcccattttttttcaaaaaaggaactatgatttctgtttctgaatttgttctctgcatagatgacaatgttagtggtacgtgcatgagaggtaaggtcgttatcagtgatcaagcatttgtgtatgctcaatctgtttatgtagaagacggtgacaacgatgatgacgatatctatgattatgctccagcagcatgaatggatcatatgaaacatgattttgtacctttatatattaatgattttttgccctagggtttctttatgttagttgatttaataccttcagtctttcactataaatcctttaatatttgcttctatacacaagctctttgtttcacgttatagaaagcgatcgaacgaaaaattcaaagcaataacgttttaataagcgcattgagatnattactaat

SEQ ID NO: 7454 - DNA, 489 bp, Arabidopsis thaliana
  unsure at all n locations
  Clone ID: LIB24-078-Q1-E1-H4
ncgtcggaattcaagggtcnnccnacncntcnggaaacantganccattacaatcaacctcccgttggtgttccncctcctcaaggttatccaccggagggatatccaaaagatgcttatccaccacaaggatatcctcctcagggatatcctcagcaaggctatccacctcagggatatcctcaacaaggttatcctcagcaaggatatcctccaccgtacgcgcctcaatatcctccaccaccgcagcatcagcaacaacagagcagtcctggctttctagaaggatgtcttgctgctctgtgttgttgctgtctcttggatgcttgcttctgattggagtctctctctctctgcataaagcttcgggatttatttgtaagagggttttggttaaacaaaaaccttaattgatttgtggggcattaaaaatgaatctctcgatgattctctttcgttttatgtgtaatgttcttcggttcataacat

SEQ ID NO: 7455 - DNA, 460 bp, Arabidopsis thaliana
  Clone ID: LIB24-078-Q1-E1-H7
acgcgtccgatcctccgcaatttcgcaattttgtgaaggagccgccggctaaatttgatggcagaccaaagttcggagatcgtcaatgctctgtcgtcggagatggaagctgtttccgtttcatcaactcaggcatcttcttcgtccgatggattccagatgagtgaagaagttgagaagagatacaaaattgttaggagtatcggtgaggaatgtatacaagaggaagagctaaagaatcttcttgctaagaaggctgctccgatttgctacgacggctttgaaccatcaggaagaatgcacattgctcagggagtgatgaaagtcatcaatgtgaacaaaatgacttcagctggttgcagagtgaagatttggattgctgattgggtttgctcagttgaacaacaaaatgggtggtgacttgaagaaaatcagagtgggttggagaatactttcaaga

SEQ ID NO: 7456 - DNA, 457 bp, Arabidopsis thaliana
  unsure at all n locations
  Clone ID: LIB24-078-Q1-E1-H8
acgcgtccgggaatgttgatgttattgggaagcctgatttcgcgtatcagagaggatcgtctccgatggcttctacgcttcatggtgcttcgattcttcttagattgtcaggaacttgggattggtttgttagtattantgttgatgattatcctctcgttactcaagatgagcttcttcatattatgtcacatttgcctaaggacttgaattttgtgaaccacactagctacattggttggaaagagtccaggaagttgaagccagttattgttgatccagggctctatcttgtggagaaaaccgatatgtttttcgcttcgcagaaacgagagttgcctaaggctttcaagttattctcaggtccatctttctccatcttaagccggaatttcatggagcactgtgtcttaagcactgacaacttccctcggactctactcatgtacttgtccaa

SEQ ID NO: 7457 - DNA, 416 bp, Arabidopsis thaliana
  Clone ID: LIB24-078-Q1-E1-H9
tttgtctcgttcgtgcagagtattcagcctcactttgatgctgtgagctttaacaatgttcaaggagactgtgtggcgacttaccttgctgaaaagcagaatgtcatgaagtctttagaagggattcctggacgcttctgtctaacgctcgacttttggacctccaagctaactcttgggtatgtgtttataactgctcactacattgacagcgattggaaagatacaaaagaagcttctcaatgttttgatggaatcgtatccaagaagctgacgaagccttgagtctcgcggttgcaaattgtgtttctgaatggggtctggagggaaagttgtttaacgtcacctttaaccacccggcgaagtaactctgcggttgaaaacatcagacctcaactctgcatcaagaaccctgg

SEQ ID NO: 7458 - DNA, 495 bp, Arabidopsis thaliana
  unsure at all n locations
  Clone ID: LIB24-079-Q1-E1-A11
cctagcganacggaaattccnggctcgacccacgcgtcagggttgataaaaaaagaagaccacatgtttcaagaggagaagagaaagacaaactatggagcaattggcttggcttgcttcatttcttgtttctttgcattccaattcatgaaaatcgtaacaacacaaccttcaacaacaacaacatcatccattgccgttatcgatagcccaatgtcctcccataagctatctgataggagagaaatatggagagttatcccaccatctacctattgtctcaaaatcgaatctttcataaaattcgccacttctccaaacgccgagaagtacgaatcccgtccttttgaatccggtggatacaactggacacttattgtctatcctaaaggaaacattaaggaaggagctccacttaattacgtttcaatgtacgtccaaatagacaattcaacactccttaactctccaaaagaagtttacgcagaagtcaaa

SEQ ID NO: 7459 - DNA, 507 bp, Arabidopsis thaliana
  unsure at all n locations
  Clone ID: LIB24-078-Q1-E1-F7
taactgtcncgccgggtcgtacaagtccgccnattcccgggtccacccacgcgtccgcactatcacaatcataaccacaaaaacaaacactatgggacacctcaaaagtctcttcacaattcttttcctaatagctatgtcttcaaccgtaacatttgccggtaaaatacccgcgatcatcgtgtttggcgactcttccgttgatgccgggaacaacaactatatcccaactgttgctagaagcaactttgagccatatggacgggactttgttggtggaaagccgaccggacggttttgtaacggaaagattgcgacggattttatgtccgaagccttagggcttaaaccaatcattccggcgtacttggatccttcttataacatttcggattttgcaacaggtgttacctttgcttctgctgccactgggctatgacaacgccacttctgatgttctggtacgggacttttctctcccttgtatttattaaattgataangtta

SEQ ID NO: 7460 - DNA, 459 bp, Arabidopsis thaliana
  unsure at all n locations
  Clone ID: LIB24-078-Q1-E1-C7
acgcgtccgcangtgggtcgggtcaaaccatggttgattcgggttctgaatttactcacttagtcgacgtggcgtatgataaagtcaaagaagaaatagtgaggcttgtgggatcaagattaaagaaaggttacgtgtacggttcgacagctgacatgtgttttgatggtaaccattcgatggagatcggacggttgataggcgatcttgtgtttgagtttgggagaggtgttgagatactcgttgagaaacaaagccttttggttaacgtaggaggtgggattcactgtgttggaatcggacggtcaagcatgcttggtgcagctagtaatataatcgggaacgttcatcagcaaaatctttgggttgagtttgatgtgaccaataggagagttggttttagtaaagctgagtgtagattattgccgtgagtangtgaatattcttctacggtcgtgc

SEQ ID NO: 7461 - DNA, 475 bp, Arabidopsis thaliana
  unsure at all n locations
  Clone ID: LIB24-078-Q1-E1-C9
cttttacgccggtcngtagcctcaanaattccaanggtcgacccacncgtccgggacaaccttatccttaaaatctcaccggtactccaactcccgttcaccggagctctgactctctgtaaagaagaagggagaaatagataatgagcagtanaaacggcaatgagagattaagaacagtgtggacacctgaaatggatcagtatttcatcgagcttatggtggaacaagttagaaaaggcaacagatttgaagatcatttgtttagtaaacgagcttggaagttcatgtcttgttccttcactgccaanttcaagtttctttatggcaaagatgttttgaaaaacangcataagacattgaggaacttgtttaaatctgtgaataatcttttgatagaagatggntttanttgggatgatactanacagatggttgttgccgataactgcgtttgggatgagtatcttaagaa

SEQ ID NO: 7462 - DNA, 408 bp, Arabidopsis thaliana
  Clone ID: LIB24-078-Q1-E1-D10
gcgtgcaaaaaaaagtcacagtcgcgagataaaatccgaagctagcgaaaagcttcgatttccagcgatcctagtgttggattctacgattttagggtttaaatcttgagatgtgttcgttatcaatgcaattctcgctcttgcaatcaccaccatctcgtccttgtccgtcttttttagccaaccatgaacctaaactctctactacttcctcctctgtgaccttccccttgaagacgaacacttggaagtgtagcggaactgggaatttgttggttttgagagttaaagcttatggttcttcttctgattcctctgcagattcctccacgcctcccaatggcactcggcagcccaaaagcagaagggatattctactgggagtatgttcaagaatgtgaagccaag

SEQ ID NO: 7463 - DNA, 407 bp, Arabidopsis thaliana
  unsure at all n locations
  Clone ID: LIB24-078-Q1-E1-D12
acgcntgggcggacgcgtgggttcggacaaaaaggaagaaggtgttgactgattcttaagatgggtttgtgttaagtttgtgagtatagttgaaagtttcagttcaatttcaatggagcctccaataggatttcgagcttctttattccaattcttactcttccttccttatttcattggattgctatttctgggtttcatcaaaggtattgttttgtgcccactcggtatgcctcgttgtgactataggcaactccgcggtcatactgagtcttctaccagtccacatcgtttggactttctattcaatcgtgagtgccaaacaagtaggaccaatcttgaagatctttccatgcttatgtcttcctgctgccatcaatctcngggcctaaatgttgggattttaa

SEQ ID NO: 7464 - DNA, 514 bp, Arabidopsis thaliana
  unsure at all n locations
  Clone ID: LIB24-078-Q1-E1-D3
ggaactgtctgcctgtttcgtaggcccgtccacgattcaaggggccnccgacccgtcngcaaaagtcnagcaatgtcgtcgtcttggtcctgcaacaaatgtactttcctcaattctgcgtctcagaaactcaattgcatgatctgcttggctcctgtatctctcccttctttgtctcctcctccaccttctctctcaatttccgcgaacgatgaagctaaatgggcttgcaaggcctgtacttttttgaacacgtacaagaactcaatctgtgacgtctgtggaacacgatcgccaacgtcttctctcttgggatttcaggatttgactgattcgggtctcgagagtaacgacgctgattcctccgtcgggtctgttttctttcctctgcggcggtgtatcaagcgtaaagctatggatgatgacgtcgtcgangtcgatggtgcttctgttgtttgctctgaaatcgcaaggtgtcatgaanaagaacanaggagattgaaacgaaaggggg

SEQ ID NO: 7465 - DNA, 500 bp, Arabidopsis thaliana
  unsure at all n locations
  Clone ID: LIB24-078-Q1-E1-D4
cgtagcccgtccgaaattcaagggnccaccaacccgntcngctnnaccatttncnctncttcttctcnanaaaaanactgaaaaagaaatggggttccttaagccaaccatggcgattctttttctancgatggtcgccgtttcatcagccgtggncatgtcaatcatctcctacgacgagaaacatggcgtctccaccaccggtggccgtagcgaagccgangttatgagtatctacgaggcatggttggtgaaacacggcaaggctcagagccagaactctcttgttgagaaagatcgacggttcgagatctttaaagacaatcttcgtttcgtcnatgaacataacgagaagaatcttagttataagattgggtttgactcgttttgcggatcttactaacgatgagtataagatncaagtatcctgggtnctaagatggagaagaaaggtgagagaaaggactaacctacggtacgaaggctcgtgtcngtgatga

SEQ ID NO: 7466 - DNA, 482 bp, Arabidopsis thaliana
  unsure at all n locations
  Clone ID: LIB24-078-Q1-E1-D7
gtccacnattcccgggtccacccacgcgtccgcaaaaaccaatcccagatctgaatctcaacctaaacctcagattcatcatcatggcttcttcttctaactacgatggaatccttctcggtatgggtaacccactcctcgatatctctgccgtcgtcgacgacgaatttctcaccaaatacgacatcaagttgaacaatgcgattctcgcggaagacaaacatttgcccatgtatgatgagatgagtagcaagttcaatgttgaatacattgccggaggtgctactcagaactcaatcaaagtggctcagtggatgcttcaaattcctggggcaaccagttacatgggatccattggaaaggacaaatatggagaggccatgaagaaggatgctacagcagctggtgttaatgttcactattatgaagatgagtcggcacctactggaacttgtggtgtctgtgttgttggtggagaaang

SEQ ID NO: 7467 - DNA, 488 bp, Arabidopsis thaliana
  unsure at all n locations
  Clone ID: LIB24-078-Q1-E1-D8
gtacaagtccgaaaattcccgggtcnacccacgcgtccgtncattctctctctctctctcaacaattagatctgtttcgataatcacgaggtttccctcacttcctttccattgctaaaccaggatttgcctcctgcatttggaaatggacgcttctatgattaccaattccaaatccattacttctccaccctctttagccttagggaagtcaggaggaggaggagttatcagaagttcactatgtaacttaatgatgccaagcaaagttaacttccctagacaaagaactcaaactctaaaggttagccagaagaaactcaagagagctactagtggtggtcttggtgttacatgcagtggtggtgataagattctcgtagcgaatcgaggtgaaattgcagttcgtgttatcagaactgctcatgaaatggggattccttgtgttgctgtgtattctactatagataaagatgctcttcatgtta

SEQ ID NO: 7468 - DNA, 395 bp, Arabidopsis thaliana
  unsure at all n locations
  Clone ID: LIB24-078-Q1-E1-E12
aaagcgaagaatacgcagaatccatccaatttagggttagggctgcccctaatctggaaacctttgcctcgtttctgatctgttttccggatccgacttgangggaaagaagacgacgacgcactaccaaaaacatgggcgcgaattcgcttccaacggatgcaaccctcgatctagatgagcagatctcgcanctcatgcngtgcaagcctctctcngancaacacgtcagancattatgtnaaganagctaaggagatcttaacggacgaaaccngcgttcaagcctgtnaagtagccctgtgacaatctgcggtgatattcatggacagttccatgatcttgcanagcttttccgtatcgggggaaagtgtcctgatancagctatctgttt

SEQ ID NO: 7469 - DNA, 514 bp, Arabidopsis thaliana
  Clone ID: LIB24-078-Q1-E1-E2
aactgttcgccttgccgtagccgtccgaaattccagggtcgacccacgcgtccgctcaccagccgccattcaacgccggcgctaacggtaacagtcagtttcctcctccatctaccggtgcgccgattcctccgccatatcctcaggctaatcaggaatggggcaatccaaattgggggtatcaacaacaacaaggtcacacccctcaagctaatagcaacgtcgaggactgggctgtgaaagccaaagaatgggcagctgcgaacaaggatcagcaatcacagcagtctgcaccgaaccaacctagcggacaagtctaccagcagcagtatcctactcatggctatcaagattttcatcaacaggcagttccaaggagtaagctatcagcagcatcagcagtttccaagttccacccacaacacagcccgagagatatccaaattacgcaacaaggaaacgaagagctttcctggagttggattgccccaagaaaacctgcctaccaattctg

SEQ ID NO: 7470 - DNA, 493 bp, Arabidopsis thaliana
  unsure at all n locations
  Clone ID: LIB24-078-Q1-E1-E3
gtagccgtccgaaaattcaagggtccacccacgcgtccggttttgtctcgttcgtgcagagtattcagcctcactttgatgctgtgagctttaacaatgttcaaggagactgtgtggcgacttaccttgctgaaaagcagaatgtcatgaagtctttagaagggattcctggacgcttctgtctaacgctcgacttttggacctccaagctaactcttgggtatgtgtttataactgctcactacattgacagcgattggaagatacaaaagaagcttctcaatgttttgatggaatcgtatccagaagctgacgaagccttgagtctcgcggttgcaaattgtgtttctgaatggggtctggagggaaagttgtttaacgtcacctttaaccacccggcgaagtaactctgcggttgaaaacatcagacctcaactctgcatcaagaaccctgggattctggatgggtcagttggtaataaggaantgtgtt

SEQ ID NO: 7471 - DNA, 510 bp, Arabidopsis thaliana
  unsure at all n locations
  Clone ID: LIB24-078-Q1-E1-F3
aactgtntccctgctcgtagccgtccganattccaagggnccacccacgcgtccgaaacgtattcttaanagcaaccattggtgtgattgactctataagagaattcgtcagcgtgangcantctccaatctaatcgcagcatatcttctccgattcctattcgtctctgcaattgaatcttccggtaggcgaagatggcgacgtctgcgaggatttgttgcggaggaggaagtgcatgcgccgttcgttgtgatcgtcgcacgttaaatttgaattctcgatcgtcatgtgttgttccagtgacgaatcgacggnatatgtgtgcgatcgggaagatttcgatgtcgatggaggatttgtcaccaccgtctgcggcggtgaagattgaaaggatcggtggaaggaaacgcggtggatctgttgtgtcgagggagaagctagatgtgtggntgagagattcggtgggttgagatcgtgaagaatccttanagagtccccggttattgatg

SEQ ID NO: 7472 - DNA, 494 bp, Arabidopsis thaliana
  unsure at all n locations
  Clone ID: LIB24-078-Q1-E1-F4
gtgccntcggaattcaaggntcanccaanccttcggctttncaaaantncnttttttnaaccanttcnnaaccacttttnatngatcnacacccgcgtgggtnctccgtttcgtgcttagatcagagagctccctcccgtgattccgagctttaaggtcggaaatggcggctcatgtttctactggaaacattcataatttctatcttgcggggcaggtttacaggggacaagctttttcatggagttctgcttctactttcatggcaaatccattcaaagagccctcttggtcaagtggggtatttaaggctctaaaagctgagagatgtggttgttactctcgtggtatttcccccatcaagtgagacctcaaaacctatcagggctgtttcggtatccttcttcaacaaaagtattatgatttcactgtgattggtaatggaantancgggtctgcgttatgccttagaaattgcaaagcaagggaacagt

SEQ ID NO: 7473 - DNA, 494 bp, Arabidopsis thaliana
  unsure at all n locations
  Clone ID: LIB24-078-Q1-E1-C5
ccgnacgtacaagtccagaatcccgggnccacccacgcgtccgaaaagattagagactacagagacagagaagatgggcatggcaatgaagtcagtttctaacttcgcaatctttttaatcctctttttggtcacctctgaaatatctgagatagaagcgaaagataaggaatgtctaaaaggatacattgatgcgcctttaagctattgtatggctaggatttatccgtcgttgtgttatcgaaattgtcgtttttacaagggcgcgaaaggtggaaaatgcgacggtcttaagtgcttctgcgacttctgcagcgacaagcctttttagtcagtttctgatgagaaatgtttgaatcttggcatgtataatggtttgtgnnnnnnnnnnnnnnnnnnnnnnnnnnnnnnnnnnnnnnnnnnnnnnnnnnnnnnnnacgctagactttgattgtgttatcactaaaataaatgaagataagtgggacttcggt

SEQ ID NO: 7474 - DNA, 417 bp, Arabidopsis thaliana
  unsure at all n locations
  Clone ID: LIB24-077-Q1-E1-A4
gagatcttggtgtcctgtcttggagatgaagaggggaatgctaaggggaatgggtttcttcttcttgactctgattttaacatcaagaataggtgggagaaaccaggacatagtcctttgtatgggtatgatttttggtaccaacctcggcacaagaccatgatcagcacatcttggggagcacctaaagccttctctaaaggtttcaatcttcagcacgttgctgatggcttgtatggaagtcatctacatgtttatagttggccaggaggtgaaataaaacaattaattgaccttggaccgactggtctcttacctttggagattagattcttgcatgatccatctaaagatacaaggtttgttgggaatgcttgtccaagttatatgatnagaattttcaaggaacanttatta

SEQ ID NO: 7475 - DNA, 464 bp, Arabidopsis thaliana
  unsure at all n locations
  Clone ID: LIB24-077-Q1-E1-A8
ccttacccggcantaccggtcangnattcccgggtcgacncacgcgtccggtcagtagcagtctccgccgggaatattttttttccggtagctatgctccgaaccgtctcttgtttagcttcgcgcagctcgtcctctctattctttcgcttctttcgtcagttccctcgctcttacatgtctctcacatcgtcgacggcagctctccgtgtccccagtcgcaatcttcgccgaatttcctctccctcagtcgccggtagacgtcttttgctccgacgaggtttgaggattccctccgccgcaagttcgcagtgtcaatgggcagttctctcgcctctctgttcgcgccgtcgccacacaacccgctccactttatcctgatgtaggtcaagatgangctganaagcttggatttgaaaaagtgtccgaagaattcatnctcaaagtgtaaatcnaaaggggaa

SEQ ID NO: 7476 - DNA, 462 bp, Arabidopsis thaliana
  unsure at all n locations
  Clone ID: LIB24-077-Q1-E1-A9
gtaccganaccaaaaattcgccggtccacccacgcgtccgtctttgtcgtggttttctgctgtcttcttctccgtcgaacttctccgaccacttcgtatagagagagagagtgacgaagagtttacggaatcgaatccaataatgagtactgcgtcggcttttagttcaatccaaggatgctggttcaagggcgaaaggaaaattcgtgtagcggataagcgagccaagaggcttactttgggatcccatgtggcttcgccatcttcaatgagcttcagagtttcagctagtaagttctgttaaacctgaaaaggatattaggattggtcttcttggtgcaagtggctacactggtgctgagatcgttaggcttcttgcaaatcatccgcatttccaggtcactttgatgactgctgatagaaaagctggccagtcaatgggaaagcgttttcncacacctg

SEQ ID NO: 7477 - DNA, 474 bp, Arabidopsis thaliana
  unsure at all n locations
  Clone ID: LIB24-077-Q1-E1-B1
cgttacgccgcctntaccgnccagtantngtngaagcgacccacgngncnggagcgagtgaagattagccacaatgtatcttcctctcctctatcttctgtttctggcttcttgcttgacacatcaagctttaggccgtggtcgtggccggccatcaccggaaggaagcttggatccttcttctcgcatcaccgtagtcggngttgtctactgtgacacntgttctaacaacactttctcaagacanagctatttcttacaaggtgtggaagttcatgtgacatgtagattcanagcaagttcaccaaaaacagcagaggaagtgaacatatcagtaaacagaacaacacacagaagtggcgtgtacaagctcgagatncctcacgtagatggcatcgattgngtcgaaggaatcnccatatcatcacaatgcantggcccaagatnacgnaacctcctctnaaagaaaaaagg

SEQ ID NO: 7478 - DNA, 467 bp, Arabidopsis thaliana
  unsure at all n locations
  Clone ID: LIB24-077-Q1-E1-B11
gtaccgaaaccanaaattcncgggtcnacccacgcgnnnnnnnnnnnnnnnnnnnnnnnnnnnnnnnnnnnnnnnnnnnnnnnnnnnnnnnnnnnnnnnnnnnnnngatcaaacttgtgctttgtcttcgtaagaaccttcacttcgaaaacgtagccagaaaagtagttctaatcaccggagcttcctctggcatcggagagcatgtggcatacgaatacgcaaagaaaggagcatatttggctcttgttgctcgaagaagggatcgtctagagattgtagcagaaacatcacgtcaattaggatctggtaatgtcatcatcatacctggtgatgtttctaatgttgaggactgcaagaagttcatcgatgagacgattcgtcatttcggaaaactaagaccacctgatcaataatgctggtgtatttcaaactgttcttttcgaagatttcacacaaattcaaga

SEQ ID NO: 7479 - DNA, 445 bp, Arabidopsis thaliana
  unsure at all n locations
  Clone ID: LIB24-077-Q1-E1-B12
ggtcnacccacgcgtccgcccacgcgtccgaaaagagatggtgcgtctctatgtatggcagtggcaggcaaacaacaggcgttttccctcaggatgtgtggcactgtgagatatgtaaccgaaagcctggacgtggttttgaggcaaccgccgaagtccttccgcggctgtttaagattaagtatgagagtgggacgttagaagaactgttatatgtagatatgccaagggagtcccagaattcatctggccaaattgtcctggagtatgcaaaagcaacacaagagagtgtctttgagcatcttcgggttgttcgtgatggccaacttcgaatagtcttctcgccagatcttaagatattctcctgggaattttgtgctcggcggcatgaagagcttattccacgaagacttttgataccgcaggttagtcagcttggatcggc

SEQ ID NO: 7480 - DNA, 473 bp, Arabidopsis thaliana
  unsure at all n locations
  Clone ID: LIB24-077-Q1-E1-B4
accggcccaanaattcccgaatcgacccacgcctccgcccacgcgtccgggtttttgagcgcctgattgaaccgttttgttcaggtgtttatgctggtgatccttcaaaactgagcatgaaagcagcgtttgggaaggtttggaaactagagcaaaatggtggaagcataataggtggtacttttaaggcaattcaggagaggaaaaacgctcccaaggcagaacgagacccgcgcctgccaaaaccacagggccaaacagttggttctttcaggaagggacttcgaatgttgccagaagcaatatctgcaagattaggtagcaaagttaagttgtcttggaagctctcaggtatcactaagctggagagcggaggatacaacttaacatatgagactccagatggtttantttccgtncagaacaaaagtgttgtaatgaccgtgccatctcaagnttccaattgggcccct

SEQ ID NO: 7481 - DNA, 436 bp, Arabidopsis thaliana
  unsure at all n locations
  Clone ID: LIB24-077-Q1-E1-B9
acgcgtccgtgtttttctcactcactcgccgcttcctcttctcttcttctggttcacttctctcctaagtaataacaccactgcatgtttctctcttgagacactccaaaccatttctctccgaaaatgtctgctccttctggcggtggcgaaggaggaggaaaagaatcagctgctggtggagtgagttcatcgtctcttgctccgtcgtctctaccaccgcctcgtccnaagtctccancagagtatccagatttgtacgggaaacgcagagaggcggcgagagttcagatgctcgagagagagattggttttctcgagggcgaaattaaattcatcgaaggcgtacaaccggcatctagatgcatcanagaagtctctgattttgttgttgcaaattctgacccattgatccctgcacaacgaanaagtcgaa

SEQ ID NO: 7482 - DNA, 436 bp, Arabidopsis thaliana
  unsure at all n locations
  Clone ID: LIB24-077-Q1-E1-C10
acgcgtccggaaaaaaccatagcgaaggagtaaaaaacgaaggccggaattatcagaacgggacagtgacaagggtttccctgagctgacggaccctttcaattattcatcctcgaaagttccacactttcggcaacttgaagtagcagcacgatttacattaagtccagagaggatgggagcagtagagcttatgagtgatccatcgagcttatgcacagtcgagaactatgtggacaacgttgatttatctgatacgcaattggtgcagaccgtgagaaaggctcttacatctgtcaaaactggggactcagacctttatagtgagatggttggagttatggcacgggacatcaaagaatttaaggatcctgatgtagtggcgcagcttgagacagtcttgaaagctctatcangcgctgtggcttgcataaat

SEQ ID NO: 7483 - DNA, 437 bp, Arabidopsis thaliana
  unsure at all n locations
  Clone ID: LIB24-077-Q1-E1-C3
anagttnnagagcgagaaanaatggcaaccatgtctgctcttcagagctcttttacttctctttctcnatctcccagctcttccttcctcggccagcgtttaatttccccgatttccctctccgtcacttctccggtcaagcccgctgagaacccatgtcttgttcntgcaaagctcaagcgttgggaangaaaagaatgcanaccanacagtcttcngantctccacaaaatgcatgtcaagtttggagatacagtcaaagtantatctggacncgacaagggtaaaatcggagaggttactaagattttcacncacaacagtaccattgtgatcaaagatgtgaacctcanaacaaancacatgaagagccganaaganggagagcctggtcaaattggtcaatatttgaagccctattcccangtcaaatttgg

SEQ ID NO: 7484 - DNA, 452 bp, Arabidopsis thaliana
  unsure at all n locations
  Clone ID: LIB24-077-Q1-E1-C7
tcccgggtcgacncacgcgtccngccacactttgcagtcccttcgcggtattaagtacctctacaagtacaatgtgttccagatcgggtttgttgtcctcgctggattgacctttttatattacattgcctttggatggagaagaaaaaagccgagcggcagattccagctctctacctaatgtaaatctcttcttttgattttatcgtttatgtttcctcgtctctgggatcgatcgcgtgccactgaggattgctgtgtccacaattataccgagattggtctcatgatctgtgcaagtggtcttatatcataagaacaagcacctgcccaaaaagcttctctttcttctgcttctctttgctgctgaggtttgttttcatttcacttgaatgtaaaattaatcctctttttctcgtaacttttcccctgtatccantgcttaaattttg

SEQ ID NO: 7485 - DNA, 461 bp, Arabidopsis thaliana
  unsure at all n locations
  Clone ID: LIB24-077-Q1-E1-C8
agtaccggtcangaattcccgggtcgacncacgcgtccncgccgtctcccggagtttaaattctggtactccatgactaaggcattctgcatagcctttcttatgacattcttctcggtgtttgatgttcccgtcttctggcccatactgctttgctactgggtcgttctctttgtcctcaccatgagacgccaaatagcccacatgatcaagcacaagtacattcctttcagcatcggaaaacagaaatatagcggccggaaatcttctgcgaacagcggcggcggctctcgtgctgattgatttcaacttgcagccacattttctgcagaaaaagaatgaaaaaaagttgggttttcacgttggaacgttttgtagtgatgaattactagtattgttatgcttctacaatgaagaagaangaaacagaaaagggtcattaatttttaagttgcaagaan

SEQ ID NO: 7486 - DNA, 477 bp, Arabidopsis thaliana
  unsure at all n locations
  Clone ID: LIB24-077-Q1-E1-C9
ttcagccggtcgtaccgaaccanaaattcncgggtcnacccacgcgtccgcacacgcgtccggaagaacacaacagtcagatactttttcttcttattttgtccgtaccgaaatcggaaaatggacattactgttcgaatctccggcttaaaatcctccaatctaatccggataacccctagattctcatcttcctctagattccgttgctccaacaacgaacctcctcgaaagggaaacgagtccaacggtggtggtggtgataaagcgtcgacggactgggacaaggcgtggaagaatttcaagaagcagagcaagaagtcattgttctcgcaattcaacgtggacaagtacgtgacttggaatcctcccagatcggagtttgatttgtcggaagaagtcgatcctataaaaagaacagagagatccaatctcatgctctggacaagtccaaggttcacacttgttggagccatc

SEQ ID NO: 7487 - DNA, 491 bp, Arabidopsis thaliana
  unsure at all n locations
  Clone ID: LIB24-077-Q1-E1-A3
aacgttagccgcccttacccgccaatattcgcnaancganccacgcntcngtgttatgctgagtttggagttgagattcctgtcgctggaggttctttctcttatcttagggttgaattgggggattttattgcctttattgctgctgggaatattcttcttgaggctatggttggtgctgctggattagggaggtcatggtcttcgtatctagctagtttggtcaagaatgattctgattattttcggattaaagtcgattcctttgctaaagggtttgatcttttggatccggttgctgttgcagtgcttttagttgctaatggtattgccatgactgggaacaaagaggacttcttggttgaatttgattacttccatggtcactgtttgtattaantgtgtttaancgtcnttgtggggtttaatcattcaaaaacctcaaattgggtccctttttcccctanggnnccaaaagggtngggccaact

SEQ ID NO: 7488 - DNA, 417 bp, Arabidopsis thaliana
  unsure at all n locations
  Clone ID: LIB24-076-Q1-E1-F2
aaagttttcgcctttaccgtcaaaacgaatcattgtgttgaacaaaatggaactcgcggatcctttggagttgaagaagtgtatagattactttgaagagagaaactatctttcgtatgcagtgaattcacataacaaagattgtgtcaattactgaactttttgcagagtcaagttagggaattgcataaggctggtcattctggtcatactactactatgatgcttcttgggattcctaatgtaggaaagtccgctctttcaaattctcttcatcatatcggaaggattagtgctgcagagaaaggtaagctaaagcatacaacagttagctccaagcctggagatactaaagacattatgnagcttgaagatnggtancatcccaatgtcaagtactggaaacgcctggaantt

SEQ ID NO: 7489 - DNA, 482 bp, Arabidopsis thaliana
  unsure at all n locations
  Clone ID: LIB24-076-Q1-E1-F3
gttacgcctgccngtagcggtccgnaaattcncgggtcgacccacgcgtccggtttttgtgttcttcgatattatctcttattactattaggctattatcatcgccttattggggaaaaagcttcaaacttttatataaagtctcttcctttttctttctttctcggtggaatttgcagcaatggaagataaaccattagggattctcagggttcatgtcaaaagagggattaatcttgctattcgtgatgccaccaccagtgatccttatgttgttatcacattggctaatcagaaactgaagacgcgtgtgattaataataactgtaatccagtgtggaacgaacaactgaccctttccatcaaagatgtgaatgatcctatccgtctgacggtgtttgataaagatagattctcgggagatgacnaaatgggtgatgcanaaatagactttaggccgttcctaaaagcgcatcaaatgg

SEQ ID NO: 7490 - DNA, 441 bp, Arabidopsis thaliana
  unsure at all n locations
  Clone ID: LIB24-076-Q1-E1-F4
acgcgtcnggntnancgcngggaaacnacacnantcncaanggcnaaaacncnancccgatcnaccgcctcangcgtcgctaagcgtnnnnnnnnnnnnnnnnnnnnnnnnnnnnnnnnnnnnnnnnnnnnnnnnnnnnnnnnnnnnnnnnnnnnnnnaccgacgatcttccacgccgtcggatacatcccagctttgacccgcttcacaacgatccggacccggatggataggtctggcggctcatattcgccgcttaaatccggatcaaacttcagcgatcgaccacccactgaaatggcacctctatttcctggttgcgattacgagcattggcttatcgtcatggagaagcccggaggtgaaaatgctcaagaaacagcaaatgatcgattgctatgttcaaaccctagctaaaattgttggcaatgangaaaaagg

SEQ ID NO: 7491 - DNA, 436 bp, Arabidopsis thaliana
  unsure at all n locations
  Clone ID: LIB24-076-Q1-E1-F7
acgcgtccgcccacgcgtccgattagttttgttcaaacaaattttggtcgtctccactcattgagtttagagaaatctcccagaatcatcaaaaggtctttactttgagattgtcactatgaattgcgcaatcacagaggatgatttgatcnnnnnnnnnnnnnnnnnnnnnnnnnnnnnnnnnnnnnnnnnnnnnnnnnnnnnnnnnnnnnnnnnnnnnnnnnnnnnnnnnnnnnnnnnnnnnnnnnnnnnnnnnnnnnnnnnnnnnaaagcagatcctatctctcttaccttcaatccaaactctgacttctgcaagtttattgtctccaagtgtcgtctccttcatggacgatactttcctacgttctggctttcaagccctcatcttcaaacaagctttccttaacctttttggaaagtctcctcctttctc

SEQ ID NO: 7492 - DNA, 438 bp, Arabidopsis thaliana
  unsure at all n locations
  Clone ID: LIB24-076-Q1-E1-F8
ctttganaaaaaccagaggttgaagaatatagaacagagtttttcaagcttgttgtgggaactctatcggtcccgatcgatatcccgggaacgaattaccgcagtggagtccaagcaagaaacaacatcgataggttattgacagaactgatgcaagaaagaaaagagtctggagaaactttcacagacatgttgggttacttgatgaagaaggaagataaccgatacttgttaaccgataaagagataagagatcaagtggtaacgatcttgtattccggttatgagactgtctctacaacctccatgatggctcttaagtatctccatgatcatccaaaagctcttgaagaactcagaagagaacatttggctataagggagagaaaacgacctgacgaaccgctcactctcgacgatattaaatcgatgaaattc

SEQ ID NO: 7493 - DNA, 399 bp, Arabidopsis thaliana
  unsure at all n locations
  Clone ID: LIB24-076-Q1-E1-G12
aacttgggcaggagatattggcaacagttggagaacaacaggagatatccaagataattggaaaagcatgacattgatagcggatcagaatgatcgatgggcatcttatgcaagaccaggatcgtggaacgatccanacatgcttgaagtgggaaatggaggcatgactaaggaagaatacatgtcgcatttcagcatctgggcattggcaaaagctcctctgctgatcggctgcgatcttagatcgatggacaaagttacatttgaattgcttagcaacaaagaggtgattgctgttaatcaagacaaacttgggatccagggaaagaaagtaaagaaagaaggtgatcttgaggtatgggcaggtccactaagcaagaaacgagtagcggtcatcct

SEQ ID NO: 7494 - DNA, 419 bp, Arabidopsis thaliana
  Clone ID: LIB24-076-Q1-E1-G4
caaaactcgccgccgcgaactcgctgccgactcgttttcccgatttctgctccgccgcgaatctcttctgttttcctgatttaggagcgagtctcgagaaacacgacgacgacgttaaattctccgtttatgaccagaagaacttcactaactacggcaatgctcgtgccggaggagcagattcgttcaaaaactactcgaaagacggtaatgtcgtaaccgattcgttccggagatacagccgtaacgcggcgggtcacgacgataaattcactgtctacggtgaaaacagtaacgtggtagaggaaggattcaattcatacggaacattcggaaccggcggcgccggagatttcactaactaccaaaacaacgtgaacaatccaacgagtcgattcacggggtattccgacggaggt

SEQ ID NO: 7495 - DNA, 424 bp, Arabidopsis thaliana
  unsure at all n locations
  Clone ID: LIB24-076-Q1-E1-G6
gaatcaaagataaacggaggagaagagagcttcgtcgtcttcttcttcttcgcctccatgaatctcctcaagacgattcattaccagtctaccattactcgattttaccgttttgcccctacacgctcctttgcttcttctgtgtcactctctccacagagacacataatctctctcgtttctatctctaatcgtggaaggtgcttcgcattctcgagcgtctctggtgcttcgctttataataatcaagaggatgggaagaaagaagaatccgagagaaattacgcttcgacgaaggaaggagatgaagtggtttaccagaaaacgctgagattagtagaatgtgccatgttcgctgctgtgacaggcctcgtttactttctcagcaattctctcgccattgagaactacnttgggtgtttcc

SEQ ID NO: 7496 - DNA, 425 bp, Arabidopsis thaliana
  unsure at all n locations
  Clone ID: LIB24-076-Q1-E1-G7
acgcntccgcaactttccantttcttancannnancancaaccacancannagtanacaaagactaaanaaaaaaagccagcatcttcggagttggtgggagagagacagatatggagaggagaaagattgtgatgtgtggtgttttatttcttcttggtttattatcagctgttactgccttcgtcgctgaagctactcgaatcaanagatctcaggtcacggttaccgtttcggattcaatcacaaaatgcacttatccancaagtccagctttcaatctcggcttcacttcagctcnctttctnatgatggctcagataatactcantgtcncaagcggttgtttctgttgtacaaanggtcctgctccttcaaggtctaattggattancnccntaatctgctttgttgtttcctgnttca

SEQ ID NO: 7497 - DNA, 414 bp, Arabidopsis thaliana
  Clone ID: LIB24-076-Q1-E1-H10
aatatttggttctactcctgcacatgggtcaactccaggatttagcattggtggatttaacaacagtcagtcatctccgctgtttggttcaaacccctcatttgcacaaaataccactcctgcattcagccagactagtcctttgtttggacagaataccactcctgcattaggacagtctagttctgtgtttggacagaataccaatcctgcacttgtacagagcaacactttcagtacaccttccactggctttgggaacacgttttcaagctcttcatccttaactacaagcatctccccctttggtcaaataacgcctgctgttacgccctttcaatcagctcagccaactcaaccattaggtgcttttggtttcaacaactttggtcaaacccaaataggtgcaatggg

SEQ ID NO: 7498 - DNA, 398 bp, Arabidopsis thaliana
  Clone ID: LIB24-076-Q1-E1-H11
cttgggcaggagatattggcaacagttggagaacaacaggagatatccaagataattggaaaagcatgacattgatagcggatcagaatgatcgatgggcatcttatgcaagaccaggatcgtggaacgatccagacatgcttgaagtgggaaatggaggcatgactaaggaagaatacatgtcgcatttcagcatctgggcattggcaaaagctcctctgctgatcggctgcgatcttagatcgatggacaaagttacatttgaattgcttagcaacaaagaggtgattgctgttaatcaagacaaacttgggatccagggaaagaaagtaaagaaagaaggtgatcttgaggtatgggcaggtccactaagcaagaaacgagtaccggtcatccta

SEQ ID NO: 7499 - DNA, 438 bp, Arabidopsis thaliana
  unsure at all n locations
  Clone ID: LIB24-076-Q1-E1-H6
cacgcgtccgatcantanttggttctactcctgcacatgggtcaactccaggatttancattggtggatttaacaacagtcagtcatctccgcngtttggttcaaacccctcatttgcacaaaataccactcctgcattcagccagactagtcctttgtttggacagaataccactcctgcattangacagtctagttctgtgtttgganagaataccaatcctgcacttgtacanagcaacactttcagtacaccttccactggctttgggaacacgttttcaagctcttcatccttaactacaagcatctccccctttggtcaaataacgcctgctgttacgccctttcaatcagctcagccaactcaagcattangtgcttttggtttcaanaacattgggtcaaacccaaataggtgcaatgggaacttttacc

SEQ ID NO: 7500 - DNA, 419 bp, Arabidopsis thaliana
  Clone ID: LIB24-076-Q1-E1-H9
tcttcttcttcaaaatctctctcttcaccaaatcctcagaagatgagcaacgacaaggatagcttcaacgtctccgatcttactgctgctcttaaggacgaggatcgagctggccttgtcaatgctctaaagaacaagctgcagaatctggctggtcagcgttctgatgtgctcgagaatctgactcccaatgtgagaaagcgcgttgatgccttgagggatatacagagccaacatgatgaactagaggcaaaattccgtgaggagagagctattcttgaagccaagtatcaaacgctgtatcagcctttgtatgtcaagcgttatgagattgtgaatggcactactgaagttgaactggctccaagaggatgataccaaggtggaccaaggagaagagaaaactgcagaagagaaaa

SEQ ID NO: 7501 - DNA, 482 bp, Arabidopsis thaliana
  unsure at all n locations
  Clone ID: LIB24-077-Q1-E1-A10
tttctangcccggtcgtaccganacanaattcnngggtccacccacgcgtccgcactcgtcagagtcacttcgaccactgtttgcatgtgatccagcaaacgggttaacccggacgctccggttctgtcgggccaatgtaccgatccatgtgagagttcaagatttgctcggaaggctcacgttgcaggagaagatccgcaacctcgtcaacaatgctgccgccgtaccacgtctcggtattggaggctatgagcggtggtccgaggctctccacggcatttccgacgttggtccaggcgctaagttcggtggtgcttttcccggtgccaccagcttccctcaggtcatcaccaccgcagcttctttcaaccagtctctatgggaagagatcggacgggtggtgtctgatgaggcaagagctatgtacaatggtggccgtggccggtctganatattgggagtccgaatgtgaatatcntga

SEQ ID NO: 7502 - DNA, 417 bp, Arabidopsis thaliana
  Clone ID: LIB24-076-Q1-E1-E9
aagcgtagtaagagaaaatggggggctatggttataatcaaatctttgcagtttcttccaagtataataagtgcagcattgagagaaacaaagcacaacgactatgaaactgccggagctcctttatctggcaatatgatgcacattgctattgtgggcatcaacaaccagatgagtctgcttcaggacagtggggatgaagaccaagctcaggaaagagtaaacaagttggccaaaattcttaaagaggaagaagtgagttcaagcctctgttctgccggtgttggtgtaatcagctgtataattcagcgagatgaaggacgaacacccatgagacattctttccattggtcgttggagaaacagtattatgtagaagagccgttgctgcgtcatcttgaacctcctccgtccatt

SEQ ID NO: 7503 - DNA, 436 bp, Arabidopsis thaliana
  Clone ID: LIB24-076-Q1-E1-A6
acgcgtccgataccataaaaaacatgaaaatcctctcactttcacttctcttgctcttggccgctacggtctcggcatccgttccagggctcatcgaactcgtcgattcgaaaaccatctttgggaacgtagccgaactcttagagaaagagaaactttccatcaactacgccaactgcagaagctggcaccttggtgttgagacctctaacatcatagacttcgacacggtgcccgcaaattgcaaagactatgttgaagactacttgatcacttccaaacagtaccaatacgactccaaaaccgtgtgcaaagaggcttatttctatgccaaaggacttgccctaaagaacgacaccgtcaatgtttggatctttgacctagatgataccctcctctctagtattccctactacgcaaaatatggatacggaac

SEQ ID NO: 7504 - DNA, 425 bp, Arabidopsis thaliana
  unsure at all n locations
  Clone ID: LIB24-076-Q1-E1-A7
ctctttactttggtcgtccacaatgaaaggaggcagcctctcgtttctcttcgttctcctaatcgccaccatcacttccgtcatttgcttcagtgacgggatgttaccaaacggcgactttgaactaggaccaaaaccatcggacatgaaaggaacgcaagtaataaacaagaaggcgattcctagctgggagctttcaggcttcgtcgaatacatanagtccggtcaaaaacaaggagacatgcttctcgtantcccggccggaaagttcgcaatccggctaggcaacgangcatcgatcaaacaaagacttaacgttacaaanggaatgtantacncactgacgttcagtgncgcanggacatgtgcccaagacgaacggctcaacatatnggtgggcaactgaccaggcgttaancctaaac

SEQ ID NO: 7505 - DNA, 427 bp, Arabidopsis thaliana
  unsure at all n locations
  Clone ID: LIB24-076-Q1-E1-B2
aacgattgaatcttttcttcttcgttggttccaaccctaatctanggttactctcnctctcgcttccttctgttcttcgttcttaccgagttccacgagcattagcttcagagaccttgaattggagtgcggttggatcaaaaacagttgagcgaagatgaggattatgattaagggaggtgtttggaagaacaccgaanatgagattctcaaagccgccgtgatgaagtatggtaagaaccaatgggctcggatctcgtctcttctcgttcgtaagtctgctaaanantgtaaagctcgctggtacgagtggctcgatccatctatcaaaaagactgaatggaccaganaagaagatgagaagcttctacatcttgctaaacttctgcctactcaatggagaactattgctcccaatgtgggtcct

SEQ ID NO: 7506 - DNA, 390 bp, Arabidopsis thaliana
  unsure at all n locations
  Clone ID: LIB24-076-Q1-E1-B5
gttgccagagagagtttgacggcggagagatatggcggcgttgatggagtcagtcgtcggccgagctctaaaattctcatcgacggcgaatttcaggtcaatccgacgcggcgaaacaccaacactctgtatcaaatcattctccaccattatgtcaccaccgtcaaaagccatcgtctacgaagaacacggctctcccgattccgtcaccagattggtgaatctcccgccggtggaagtgaaagaaaacgacgtttgtgttaaaatgatcgccgctccgatcaacccctccgatatcaatcgaattgaaggtgtgtatccggtgaggccaccggtaccagcggttggtgggttatgaaggtgttggtgaatttatgcanttggcccaat

SEQ ID NO: 7507 - DNA, 415 bp, Arabidopsis thaliana
  unsure at all n locations
  Clone ID: LIB24-076-Q1-E1-C10
gcttcaatctttgataatgtcnaggaacangggtttggctgancaagatcttaaaaaattggatgtaactgtgctacatcctctgtctcctgaggtcatttctcgccaggccactattaatatangaaccattggtcatgtcgctcatggaaagtccactgttgttaaagctatttctggtgtccagactgtccgttttaaaaatgaattggagcgtaacattaccattaagcttggatatgcangacgccaagatttacaaatgtgaggatganaaatgccctanaccaatgtgctacaaggcctacggaagtggaaaggaagacactcccaattgtgatgtccccggatttgaaaactccantatgaaactattgaggcatgtctcattcgttgattgcccgggtcacgatat

SEQ ID NO: 7508 - DNA, 417 bp, Arabidopsis thaliana
  Clone ID: LIB24-076-Q1-E1-C12
tagatgagatcggacagaacactgaggcggttcggacttctgtctccgacctcagtcgctttggccgtgttgttcagctcacagcgtttcatccctttgagtctgctctcgatgctctcaaccaagtcaacgccgtctctgaaggtgttatgactgatgagcttagaagttttctggagttgaatcttcctaaggtcaaggagggaaagaaacccaagttcagtttaggattggctgagcctaaactcggttcacatatatttgaagctactaaaatcccatgccagagcaatgagtttgttcttgagcttctcagaggtgttcgccagcattttgataggtttatcaaggacttaaagcctggtgatcttgaaaaatctcaacttggattagctcacaagctacagcaagagccaa

SEQ ID NO: 7509 - DNA, 438 bp, Arabidopsis thaliana
  unsure at all n locations
  Clone ID: LIB24-076-Q1-E1-C2
acgcgtccgctgaaagagaatgtcagaaattgtaaatttgtcatcatctttgagatctttaaacccaaagatctcacctttggttcctccatatcgccaaacctcgagctctttctctcgaccgagaaacttcaaatatcattcttttaccgataaaatctgtttggcagcggagagaatccgagcagtcgatatccagaagcaggacggtggtttgcaagagctcgatgactcgccggtgtctgttgagctcggacctatctgtggtgagagccacttcgatcaagtgatggaggatgctcagaagctcggtgaatcagttgttattgtctggatggctgcttggtgcangaaatgtatttacttgaaaccaaaactcgaaaagctcgctgctgaattctatccaagactgcggttttatcatgttgatgtcaaccc

SEQ ID NO: 7510 - DNA, 429 bp, Arabidopsis thaliana
  unsure at all n locations
  Clone ID: LIB24-076-Q1-E1-C4
atatataatcaaaaagcaaatcgagttattttctctctcaattcatcccaaaccgtcgtnaccattcnctttcgtttcgtttcgtntcntctctnttaaaaacctttcttcgaaangatgacnatctctgttgagaagccnatttttgaagaggtttctgcattcgagaagagtggggacaatatcggagagttgaaattggacggaggattttcgatgccgaaaatggacaccaatgacgacgaagcttttttggctcctgagatgaatgcatttggccgccaattcagggactacgatgttgagagtgagaggcaaaagggcgtcnaaagagttttacagattacaacacatcaaccaaactgtcgactttgtgaaaaagatgaagggctgaatatggaaaattagattaaatggtgatgagcantt

SEQ ID NO: 7511 - DNA, 417 bp, Arabidopsis thaliana
  Clone ID: LIB24-076-Q1-E1-D11
tctttaacatgggtttttccggtttaaagtagttgtatctttgtttcccctttaaaccgggtttaagctcaatcttttcttagaacaactccaactgtttgacgatttgactgagagaaaacagagtcatggaagagacttttgtgccgtttgaaggaatcaagaatgatcttaaaggaagattgatgtgctataagcaagattggactggtggattcaaagctggatttaggattctggctcccaccacttacatatttttcgcttctgcgattcctgtcatctcatttggtgaacaactcgaaagaagcaccgatggagttctcacggctgttcaaaccttagcatctacagccatttgcggtatgatacattcgattatcggaggtcagccactgcttattctcggtgttgcaa

SEQ ID NO: 7512 - DNA, 478 bp, Arabidopsis thaliana
  unsure at all n locations
  Clone ID: LIB24-076-Q1-E1-D4
agcctgccgtgccggtccgaaaattcncgggtcnacccacncgtccgtgcaggtacaatgaantgatacaaanctggcaactttgtttcaattgggaacaagggtttgactttcaggtccacacggttcgcactcggatactaacagacatggcttgggtcaccatgaaggcatacctgaacgtggatggtggtccattcctaataaccaatgtgttcgagttccacaatggaaggtggcacatggttcatcatcacagctcagtgatgctcatcgatgatcaacaagttgttgttcattgatgaatgatgataatatcttttagttttggtttccttctcttcttttattttcatggggacaacaaataaagaagaagaaagaaactgcatattggagaaattggcttattanatttttaagtggttattatttaagttttaactacatgtactgaatgttctantttttttttttt

SEQ ID NO: 7513 - DNA, 398 bp, Arabidopsis thaliana
  unsure at all n locations
  Clone ID: LIB24-076-Q1-E1-D5
caaagcaaaatcatattttgcttaaannnnnnnnnnnnnnnnnnnnnnnnnnnnnnnnnnnnnnnnnnnnnnnnnnnnnnnnnnnnnnnnnnnnnnnnnnnnnnnnnnnnactaactctgatatcatattatcaatttttccttttcaacacccaaaatcacaatctttcagctttattctgtttttccttgcttgagaattgtgttcgattcatgtctacgaactgaaatcacaaattttgccaacgttttatgattcctggttccgtatttttttttttgtaatcaatagttagctcatttcgaataatcaaactcaattttattgttcatgatttgttatctgggataaaagagagtaatgtgctaattatgtatactcaggtattgcttggtgt

SEQ ID NO: 7514 - DNA, 415 bp, Arabidopsis thaliana
  Clone ID: LIB24-076-Q1-E1-E12
gaagactaatcactgaagcagatctattatacggaggacgaagaagatgtatgagcagcagcaacatttcatggatttgcaaagcgattctgggtttggggacgatagctcctggctcgccggcgatgacgatcttcgtctctctcctcaccaatctgccgccggtacgaactccggcaatgagaatctagatcgtcgtctcttaaaagatctcgtcgagatggttccccttatcgagcattacatggaacataaagaaaggagttcgtttaagcggcgtggttccatgatctacactaagatgccttcaaaagaatccttgtcccgaaggggaagaaatgcttctcaaacagtcccaggaagaaagaagagagaccaagagggaaatgacgatgttatgaacaattctagggaa

SEQ ID NO: 7515 - DNA, 480 bp, Arabidopsis thaliana
  unsure at all n locations
  Clone ID: LIB24-076-Q1-E1-E3
aagcgtgccngtagccgtccgnaattcacgggtcgacccacgcgtccggctaccaccactgcagcagcagcctcaggtatttttgggatccggattcaagatcctagacctggaaccggtagggtccaagcccggttcgggttcagtttcggaaaaaagaaaccggctccaccgccaaagaaatcaaggcaggtccaagacgatggagacagactagtttggttccccggcgcaaacccgccggaatggttggacggatcgatgatcggagaccgtggatttgatccgtttggtttaggtaaaccggctgagtatcttcagtacgatttcgatggacttgaccaaaaccttgccaagaacgtggcgggtgacatcatcgggatcatccaagaatcttcggagatcaaaccgacgccgtttcagccgtacactgaagtctttgggattcaaacggttcaaaaaatgtgagctgattcaatg

SEQ ID NO: 7516 - DNA, 422 bp, Arabidopsis thaliana
  unsure at all n locations
  Clone ID: LIB24-076-Q1-E1-E6
ccgcccacgcgtccgcttggctctctgcggaggaaaaagagctagtgaggaagaagcgagaggagattgaagaagctgaacgagtaaaaaagagcaaagtggttatgacatttgatttaatcggccgtaaggttctgttaaatgaagatgatatctcagaactagaatcagggaacaggattctgggaccacctgagactaaaaacgtgaacagaataaaaccgaacccgactgcaagactcgttccaatcttcttagacccaggaccaaccgagaagaagccaaacagcaccaccaccaagaaagacaacaagaaaaaccgaaacggtttgtgtctanagatnncaggaagggtgcaacatgacagaagtgaactcaaatacttancaagccgattcaaaatccggacggtaatcttggcc

SEQ ID NO: 7517 - DNA, 429 bp, Arabidopsis thaliana
  unsure at all n locations
  Clone ID: LIB24-076-Q1-E1-A4
cattgaaacgatgcttctggaaaggacagatcgctggaagtggttatggtgtagctcagttctgtctttatgcatcttatgctcncgggcnatggtacgcatcatggcntgtgaaacacggcatctctgacttctccaaaaccataanagtcttcatggttctgatggtctcagccaatggtgcagcagagacactcacnctggctcctgatttcancaaacgtggtcaagctatgcggtctgttttcgaacttcttgancggaaaaccgagattgaacctgatgatcctgataccaccccggtcccagaccggttacgtggtgaagtcgagctcaaacatatcgatttctcttaaccttcaaggccagacatccanattttccgtgaccntagccttcgtgcctagaactgggaaaaaccctaagctc

SEQ ID NO: 7518 - DNA, 473 bp, Arabidopsis thaliana
  unsure at all n locations
  Clone ID: LIB24-074-Q1-E1-F7
acgcgtccgcttctccgtcgcggaaaagatggggaccaccaccaatctgagatcttggctgtatctcattcttctcttcatcgtcgtcgtcggcgtcaacgctcagaatcggagacctaagaatgttcaggtggctgttaaggctaagtggcagggtactcctcttctccttgaggctggtgagttgatttccaaagaatcgaagcagttgttctgggagtttactgatgcttggcttggttccgatggagatgattccgattgtaaatcagctagagattgtcttcttaagatatctaaacaggcttcgactctgttagctcaaccaagtggcttctctcttccatttctcacttactctgagatctgcttcgcctangcttgtgctttaccgtcaattggctgatgagtctctatcctccttccctcatggtgatgattccctcctgcgactgggctgctgttggggttga

SEQ ID NO: 7519 - DNA, 455 bp, Arabidopsis thaliana
  unsure at all n locations
  Clone ID: LIB24-074-Q1-E1-F8
acgcgtccgcccacgnnnnnnnnnnnnnnnnnnnnnnnnnnnnnnnnnnnnnnnnnnnnnnnnnnnnnnnnnnnnnnnnnnnnnnnnnnnnnnnnnnnnnnnagatgctggttccatcggagtaaactacggccgaatctccgacgaactcccctccgcattcaaagtagtccaantactaaaatcccaaggaatcacgcgagtcaaaatcttcgacgcagacccatcagttctcaaagcattatccggatctggaatcaaagtcaccgtagatctccccaacgagttactcttctccgccgccaaaagaacttccttcgccgtctcatgggtcaaacncaacgtagcagcttancatccttcaacacagatcgaatcantanctgttggtaacgaaggtcttcgttganacacacaacactacaagcntcttgatccctgcaantgagaaacat

SEQ ID NO: 7520 - DNA, 421 bp, Arabidopsis thaliana
  unsure at all n locations
  Clone ID: LIB24-074-Q1-E1-F9
gggttggctcattcgattantataggangaaaccatggagctaaggaaatctcaagtggccatgcctgttttcttggcaataatgagtctaatggtgagtcaagtggtcttcgccnagaaagattcaggttcaatgtcccctcatgatcgggcattagcanaantgcaagcccttaaagcttcattggttcggcgaaatctaccggcnttggtanctcctcctcctanccctcctcaggccgtacccggtccgcgcgtgtaccaagtgatatcatatggtgccgatcccacagggaaattggataacacggantcannattanaagcnatggaagaancatntgatggtccaaatcatggagttttgangcaaggtataaangatctcgggaggancaagaantggttcttcaagtgggaa

SEQ ID NO: 7521 - DNA, 446 bp, Arabidopsis thaliana
  unsure at all n locations
  Clone ID: LIB24-074-Q1-E1-G1
tcttcttcttcacagctttctcgatatttttgagagtttttaaccaaattagacatttttaatcaatttttttttgtgttgagcaagacgaaaagagtctaatccaatcatgggatgtgtacccagaattgaatttggttgttcaagccaaagccttactctttcatggaacttaagagcatggaatttgtgtagattgaacacaatctcccatttccagaaacttccttatcctttggtagcttctactcgaaaacattacaagaacagtttgcttttgaagagatttttaagttggtgttggcactgaggaatcatcactgtcagaaagatttactaagatgaatctctttctcgaactctcactaagtgatgaagttgaagtcactgctcattgatacaagaagagatnaaagcntgttaaaaaaattgagtgaagctaatca

SEQ ID NO: 7522 - DNA, 356 bp, Arabidopsis thaliana
  Clone ID: LIB24-074-Q1-E1-G11
cttatctcttcttgttttagctatgaagaagcaatctcaattcagatccaatcatacccttctcttctttcatctctgatcattaacaacaacaacaacgactcgggttctgtaaattcagttattggagagaaaatggcgatgttagttgagccaccaaatgggattaagcaacaagggaaacattactactccatgtggcaaacattgttcgaaatcgatacaaagtatgttccgattaaacccattggaagaggagcttatggtgtggtttgttcttctatcaatcgtgaagactaatgagagagttgctattaaaaagattcacaatgtgtttgagaatcgtgttgatgctt

SEQ ID NO: 7523 - DNA, 455 bp, Arabidopsis thaliana
  unsure at all n locations
  Clone ID: LIB24-074-Q1-E1-G12
aattcccggnacgacccacgcgtccgcggacgcgtgggcggacgcgtggggtactgatgctcttgccaacatccgttccaaggtttatctttctcctaagctttggtacctcagggttaatgtaattgaagctcaagatttgataccaactgataagcaaagatatcccgaggtttatgtgaaggctatagtgggaaaccaggcgttgaggactagagtatcgcagagcaggactattaatcccatgtggaatgaggatttgatgtttgtcgcagcagagccatttgaggaacctttgatcctcagcgtggaagatagagttgctccaaacaaagatgaagtcctggggaaatgtgcgatncccgttgcagtatttggacaaaaaatttgaccanaaaccggtgaaacagcaggtggtacaatctccagaagcatattatggtccnatgggagag

SEQ ID NO: 7524 - DNA, 490 bp, Arabidopsis thaliana
  unsure at all n locations
  Clone ID: LIB24-074-Q1-E1-G2
acgcgtccgaggatctcctccgaagatttccactattactggaagtgatatagatacgttgcaacaaagaagaccacacaaaaacgttattgagcagccgtgaaatcgatttaccaattgaagcttccccccatgatttgactttccctgatgctcgtttgtgggaaagggtttctaaagtgcagagcacctggagttccattcttttgtgacaaaagaaaatccttcttcactaaaactaagaggggctttcacagtttacctttgggcactggggtccgtgtttatttcaacaacaatcttaggtactcaagcaattcaatagaagttgtggagaaagctgccattaatatgggttcaaaggaagacaaggnaagataatccagctttatcctcataatgatgatgccatgggaaagctccgtcgactcctaattcctcgtcgaaaaccgtgggggatccacaacctactaaaaggaaatccgtgaca

SEQ ID NO: 7525 - DNA, 475 bp, Arabidopsis thaliana
  Clone ID: LIB24-074-Q1-E1-G3
acgcgtccgcaataatctagaaacaaagataaaaagtaattatcgtccctatggtatggactttaaattcagagttgcaactggtagattcagcaatggaatggttgcttccgattatttagccaaatacatgggagtaaaagaaattgtaccggcatatttagacccgaaaatacaaccaaacgatcttcttacgggagtatcttttgcatcgggtggtgctggctacaatcctactacatccgaagcagcgaatgcaatcccaatgctggaccaactgacatatttccaagactatatagagaaagtaaataggttagtaagacaagagaagagccaatataagttggcaggtttagagaagaccaatcagctaatatccaaaggagtggcaattgtcgtcggggggaagcaatgatctgatcattacatattttgggagtggtgctcaacgactcaaaaatgacatcgaccc

SEQ ID NO: 7526 - DNA, 468 bp, Arabidopsis thaliana
  unsure at all n locations
  Clone ID: LIB24-074-Q1-E1-G5
acgcgtccgggaaccggcgaaggagagcttaaggaatgggacagagtatatgactatgcttactacantgatttaggcgtcccaccaaagaacccacggcctgtacttggagggacacaggagtatccttacccangaagaggaagaaccgggcggaaaccaactanagaagatcctcaaaccgagagcaggctaccgatcacatcgagcctaagacatatatgttccacgagatgagagatttggacacttgaagatgtcngatttccttgcttatgctctaaaagcgattgctcagttcatccaacctgcacttgaagctgtattcgacgatactcctaaagagtttgattcttttgaagatgttcttaanatctangaaganggaatcgatctaccannccaagctttgaattgatagtatcnttaagaatataccgncttgagaagttaaaaggagatattcag

SEQ ID NO: 7527 - DNA, 483 bp, Arabidopsis thaliana
  unsure at all n locations
  Clone ID: LIB24-074-Q1-E1-G6
acgcgtccggagaaaaaaaaaatccatccgatcttcaaaaaaagtcaccccctttaacattcttctccaatctctctacaaaccctaatctcagccatggatctcgctgcagaagagcttcaatttctcaacattcaaggcatattacgtgaatccacaacaatccccaaattttccccaaaaaccttctacctcataaccctaaccctaattttccctctctccttcgcaatcctcgctcattccctctttacccaaccaatcttagctcagctagatgcaactcctccttcagatcaatctaaaaccaatcacgaatggacccttcttctcatttatcaattcatctacggtcatcttcctcttcggccttctctcttctctcaacagccgccgtcgtcttcaacgtcgcttcgctttacacgggaaagncaagtttccnttctcttcaacaaatgtcangcgaatcctctggntttgaag

SEQ ID NO: 7528 - DNA, 469 bp, Arabidopsis thaliana
  unsure at all n locations
  Clone ID: LIB24-074-Q1-E1-G7
gcgtccgatcggcgaccaaaattggaaaatgtactcagcgattcgctcgcttccactcgatggtggacacgttggtggtgactaccatggacctcttgacggaaccaatcttcccggtgacgcttgtttggttttaacgactgaccctaaacctcgtctccggtggacaactgagcttcatgagagattcgttgacgccgttactcagctcggtggtcctgacaaagcgactcccaaaactattatgagaacaatgggagtgaagggtctcactctctaccacctcaaatcacatcttcagaaattccgcctaagggaggcaagctggcaaagaatcaactgagaactctaaagatgcttcttgtgtaggggagagtcaggacacangttcatcttcgacatcatcaatgagaatggcgcagcaggagcagaacgaaggttaccaagtcaccgaagctctacgtgctca

SEQ ID NO: 7529 - DNA, 479 bp, Arabidopsis thaliana
  unsure at all n locations
  Clone ID: LIB24-074-Q1-E1-H1
acgcgtccggttcaacgttgcgaatccaactactggatgccagaagaagctcgagatcgacgatgaccagaaactacgtgcgttttacgacaagagaatctctcaagaagtcagtggagatgctttgggcgaggagttcaaaggatacgttttcaagatcaagggtggttgcgataagcaaggtttcccaatgaagcagggagttttgactccaggccgtgttcgccttttgcttcaccgaggaactccttgcttcagaggacatggaaggagaactggtgagaggagaagaaagtctgttcgtggttgcattgtgagccctgatctctctgttctgaaccttgtcattgtgaagaagggtgagaacgatcttcctgggcttaccgatactgagaagccaagaatgagaaggaccaaaagagagcctccaagatccgtaanactgtttaacctcaaagaaggaagatgatgtcaggacc

SEQ ID NO: 7530 - DNA, 478 bp, Arabidopsis thaliana
  Clone ID: LIB24-074-Q1-E1-H12
taccctgcagttaccgggccggaattcccgggacgacccacgcgtccgcccacgcgtccgcggacgcgtggggaacgtttagcaatgcaatctgttagatctcttttctcgaaagagatactagatgttatagcaaccagcacagctgatttgggtcctcttagccttgattcttttaagaaaaacaatttgtctgcatcatggcggggaaccggagtagacccctcctttagacattctgagaatccagcaactcctgatgtcaaatctaataacctgaatgaaaaacgtgacagcatttcaaaagatagtatccatcagaaagttgagacacctacaaagattcacagaaggcaactaagagagaaaaggcgtgagatgcgggcaaatgagttagttcagcacaatgatgacacgattttgaaactcgaaaatgctgccattgaacgctccaaagtctgttgattctgcaagtccc

SEQ ID NO: 7531 - DNA, 476 bp, Arabidopsis thaliana
  unsure at all n locations
  Clone ID: LIB24-074-Q1-E1-F6
acgcgtccgcccacgcgtccgaaaagagttaaagaaaaaatgggaatgggaaggtatcagaaatctgcaacttctggtgtttcagctagatgggtttttgttctctgtatttctagcttccttcttggtgttcttgtcgttaacaggcttttggcaagttttgaaaccgtagatggcattgagagagcttcacctgagcaaaatgatcaatctagatcacttaatcctcttgttgattgtgagagcaaggaaggagacattctatctcgagtttcgcatactcatgatgttatcaagacattagacaagacaatttcttctcttgaggtagaactagctacagctcgagcagcaagatctgatggtagagatggatctccagctgttgcaaaaacagtagcagaccantcgaagattcggcctcggatgttctttgtgatgggaatcatgactgcnttcagtagcagaanaacgaa

SEQ ID NO: 7532 - DNA, 473 bp, Arabidopsis thaliana
  unsure at all n locations
  Clone ID: LIB24-074-Q1-E1-C6
acgcgtccgtgataatggcgtgatacctttttctctcctctcaacaaacgcgcctctaatcnnnnnnnnnnnnnnnnnnnnnnnnnnnnnnnnnnnnnnnnnnnnnnnnnnnnnnnnnnnnnnnnnnnnnnnnnnnnnnnnnnnnnnnnnnnnnnnnnnnnnnnnnnnnaccaaatatgggaacctgcttctccagctcaactaaatccacggctgagatctctccctttgacctcgtcgtcaaacctcctcctccttccgccgccgccaccgcaccaccaacccaacgaatccccaccgcgaaaacagaaacatcgacggtgagcttcaccgcaacagtgagattatacggaccacctaacagtctaagtgacgtcgtatctccgtttcgctcttctccacangaaagttccgctccgtttcgttccatcggaagaccanaaancgacgattcaaagtcggatnggagactg

SEQ ID NO: 7533 - DNA, 499 bp, Arabidopsis thaliana
  unsure at all n locations
  Clone ID: LIB24-074-Q1-E1-D1
gtaccgntccgggaattcccggggtcgacccacgcgtccggtcatgaccctcacaaattgttggaagggtgtttgattgctggtgttggaatgagagctagtgctgcgtatatttacatcaggggtgaatatgtgaatgagcgtttgaatctagagaaggctagaagagaagcgtatgcagctggtctcttggggaagaatgcatgtggttctggttatgattttgaagtttatatccactttggtgctggtgcgtacatttttggtgaagagactgcgcttcttgaaagccttgaagggaagcaaggaaaacctaggttgaaacctccgttccctgctaatgctggtttatatggttgtcccacaactgttaccaatgtggaaacagtggctgtttcgcctancaantttaagggcgtggacctgagtggttttctaatttcggtagggaaaaataaacnctggggacaaaactccntttgtataacaaggccatgnt

SEQ ID NO: 7534 - DNA, 408 bp, Arabidopsis thaliana
  unsure at all n locations
  Clone ID: LIB24-074-Q1-E1-D10
aaatacctttgagttatgtttctgaaacagagagacagcatgctgtcccatcacaggtacagcgacatgtacttgcaggtatagcttctgctttaggcggtgtaagtgcaccatatgaaaagacctcacacgcgcatgaaagacctatcaccaattggctttgggcagccggttgtcacccgtttggaccattctcaaacgtctccctgatcagtcaaatgcttcaagatgttgcactgaggaatactatttatgctcgggttgattctgctctacgcaaaatccgtgaaacatcanaggcaagtacaaaactttgcatccgaataccttaagactccacttggcgaagccagtgaaagataaaaagaacanaaccaaaacggagctatgggtcgagaagttctacaa

SEQ ID NO: 7535 - DNA, 421 bp, Arabidopsis thaliana
  unsure at all n locations
  Clone ID: LIB24-074-Q1-E1-D11
caattcaaagacaacatcaacgatgatccgtacaacagtttagcttcttgggtctctaatgctgacctctgtaacagcttcaatggtgtatcttgtaaccaagaaggattcgtcnaaaagatcgttctttggaacactagtctcgccggaaccctaacgccggcattgtctggtttaacttctttaagggttttgactctgtttggcaacaggattacaggtaatttacctttggattacttaaagttacagactttatggaagatcaatgttagttccaatgcattgtctggtttggttcctgaatttatcggtgatttgcctaatttaaggttcttggatttgtcgaaaaatgcgttctttggagagattccaaattctctgtttaaattctgttacaagacaaagtttgtttcattgt

SEQ ID NO: 7536 - DNA, 472 bp, Arabidopsis thaliana
  Clone ID: LIB24-074-Q1-E1-D8
acgcgtccgattctctccgtgtttccttctgcttcaggtgatattttaacaaagttcttagtacaatgggatctgttgatgctgctaatggaagtgggaagaaacctacagttatatttgttcttggtggtccaggaagtggaaaaggtacccagtgtgcttatattgttgaacattatggttacacacatctgagtgctggagatcttcttagagctgagattaaatcaggttctgaaaatggaactatgatccagaatatgattaaagaggggaagattgtaccttctgaggttactatcaagcttctacagaaagctattcaggaaaacgggaatgacaagttcctcattgatggtttccctcgtaatgaggaaaaccgagcagcatttgaaaaagttactgagattgaaccaaagtttgtcttattcttcgattgtcctgaggaagagatggagaagcccctgttggg

SEQ ID NO: 7537 - DNA, 415 bp, Arabidopsis thaliana
  unsure at all n locations
  Clone ID: LIB24-074-Q1-E1-D9
aaattaccagacaagagtnnnnnnnnnnnnnnnnnnnnnnnnnnnnnnnnnnnnnnnnnnnnnnnnnnnnnnnnnnnnnnngaaaatctanaagaagagaaagctacaaaaatctcaacatcgagtcttgttgggatgtgaaacacatgattttcgaggagtagagagagacagagagaaattaagggaaagagctcacttgtgtgacttgttctgtaagagttttggctacagagcaaccatgctaacttgcgccttctcccaaaatcttatccactaatctcggtaaggaaagtgatgttggcaaaatggtgaagaaaggaaattggttttctgctatcaanannggtttttactccacattccaaagagaagctagccaatcaggaancagagagaaagagtggcaanagaa

SEQ ID NO: 7538 - DNA, 423 bp, Arabidopsis thaliana
  Clone ID: LIB24-074-Q1-E1-E10
aaatttggaaacaatgaggagttgtcatcccatgttttttgcaaagagaatgactgaggttgcttcaaatgatcctgttgattggatggatcagccgtctgctggccttgctatccagggacttttgagtcatatcttagtggaagattattcagatatccaaaagaaacttgctgatagcaattctacaactaacggaaacaaggatgcagaaaacttagtggacaagcttgaagacaatagtaaggcaggtggtgacgaatctgagatagattcatcacaggatgaaaaagcaagaaatgtggtggcgttttacaagctgaagatgataagaattcagcttatcacagcacaaggggatcagactgaagttgaggtggaagatgtcagaaaagcacaacctgatgctattgctcatgcatc

SEQ ID NO: 7539 - DNA, 430 bp, Arabidopsis thaliana
  unsure at all n locations
  Clone ID: LIB24-074-Q1-E1-E5
ttctctcctctgctctccaattccatcttcccatggcgatttcggnnnnnnnnnnnnnnnnnnnnnnnnnnnnnnnnnnnnnnnnnnnnnnnnnnnnnnnnnnnnnnnnnnnnnncgccatttccanctctggtaaantcaaaancctaactctctcttcctcagatncatcactcttgaggtctctctccntaagtcgactcaacgccggagctcctgagttcgttcctggtcgaactactcctccgcngcctcnacctccgaggatgattatcgcgcnacctccgggcgcacngtatgcttcatatgtatcaccagncaacctccgttcaatantccagttcttggtcctgttccaatccatggcanagttggttcctggttcaaaaatcancancgctcatnagcgctttcatcaggaatcantcat

SEQ ID NO: 7540 - DNA, 479 bp, Arabidopsis thaliana
  unsure at all n locations
  Clone ID: LIB24-074-Q1-E1-E8
acgcgtccgattcaaaagccctaattcgaaaattcccatttctcaaggtttttaaaagagtattgcaaagatgtcttctgattcgtcccgggaagagaatgtgtacttggccaagttagccgagcaagctgagcgttacgaggaaatggttgagttcatggagaaagttgcaaagaccgtggagaccgaggaacttactgttgaagagaggaatctcttgtctgttgcttacaagaacgtgattggtgctaggagagcttcttggaggattatctcttccattgagcagaaggaagatagcaggggcaacagtgatcatgtttcgattatcaaggattacagaggcaagattgaaactgagctcaagcaagatttgtgatggcattttgaaccttcttgaggctcatctcattcntgctgcttctttggctgagtccaaaagttttttacctgaangatgaagggaagattatcatccg

SEQ ID NO: 7541 - DNA, 459 bp, Arabidopsis thaliana
  unsure at all n locations
  Clone ID: LIB24-074-Q1-E1-E9
gtgccaaattccgggaaaacccacgcgtccgcttaattccttnattaagaaaccccagaaaaaccctaaacccttgaagcgtctccttctctagttctttgcaagcggaaatgtatcgagtgctatcaaagttatcttcttcaattggctcgtctacttccaggaaactggtttctgggcggattataagtagcagaaactatgcggccaaggatatcagtttcgggatcggagctcgggcagctatgttgcagggtgtatccgaggttgcagaagctgtgaaagtcactatgggaccaaagggaagaaatgtgataattgaagagcagttatggcggaccaaagatcacanaggatggtgtcaccgtggcaaaaagcatatcatttcaaagctaaagctaagaacattggtgccgaactcgtcaaacaggttgcaagtgccactaacaangttgctgg

SEQ ID NO: 7542 - DNA, 439 bp, Arabidopsis thaliana
  unsure at all n locations
  Clone ID: LIB24-074-Q1-E1-F11
acgcgtccgtgaaaattagggttttttgggggattctcgtgtggataaagccatggctgaacgagaagacgcagcagaggtttctctttcagtgagaaacgaggaagatctttctcctgaatgtgtagcttgggctgattcttgcatcatcagttttctagatgattcagacaacaataattggggaacttttagagatgctttaacagaaatcatcgatatccatcccgagatgtttgttttttcatcaacaacgggaacaagangtgtcctgtctccagacgaggttatgactgaatccgagactattgatctacggagatctgaaccagcagctggttcagcgaacagtagaactaattcatcgaaatgaagaagttagcgaagaattaaccccaanggcaaacttttgaatcagacccgtcaaagaattgcttag

SEQ ID NO: 7543 - DNA, 433 bp, Arabidopsis thaliana
  Clone ID: LIB24-074-Q1-E1-F12
acgcgtccgggaagcgagtggacattgtccggcttcctgttgtgggcggagacgtttcggtacatgactctgagggacacgaagttgagtctcaacttgttccatttactgatgaatatgtggccttaaggaaatatcatgtagaggcatacttaggtcaaagccctacacaggtgccaaagtattggcttgtgttttcagtaactgtgcctcctcttggcttcactacttacactatctccactgctaagaaaacagatggatattctagcaaatcatacgtctccaatatcctaaaaggcgaacagtcaataattaacattggtcatgggcatctgaagcttaatttttccactgatcaagggacagcaatcaattatgttaacggcagaacctcgatgacagaaccagtcaaacagacatttaactacta

SEQ ID NO: 7544 - DNA, 480 bp, Arabidopsis thaliana
  Clone ID: LIB24-074-Q1-E1-F2
acgcgtccgaaaaatggcgcctcatgaaattcgccgtcctttcaagcgacgacctatctccgatcaacagaaacgccgagagctttctcttattcgtcagactcagcatcgcagtgatgctcagcagcgagcccgaaacctcgcctcttccttaatctcgctccaatcctcctctcccgatgtcgacccagagatactatctgaagccgtgcctgagcttgtaggaaccgaatcggaatcgagtagctttgacgttcgtcaagcttcgaggctcagaggacctgaggcacgcaagtggttcgcaaagcagctaatgttacctgaatggatgatcgacgtccctgataatttaagccaagattggtatgtgttagcaagaccagctgggaaaagatgttttgtagtttcatctgatggaacaactgttagtagagtacgaaatgggtccactttgcatcctttcccttccgcattaactgg

SEQ ID NO: 7545 - DNA, 474 bp, Arabidopsis thaliana
  unsure at all n locations
  Clone ID: LIB24-074-Q1-E1-F3
acgcgtccgcttcaattcaaagacaacatcaacgatgatccgtacaacagtttagcttcttgggtctctaatgctgacctctgtaacagcttcaatggtgtatcttgtaaccaagaaggattcgtcgaaaagatcgttctttggaacactagtctcgccggaaccctaacgccggcattgtctggtttaacttctttaagggttttgactctgtttggcaacaggattacaggtaatttacctttggattacttaaagttacagactttatggaagatcaatgttagttccaatgcattgtctggtttggttcctgaatttatcggtgatttgcctaatttaaggttcttgggatttgtcgaaaaatgcgttctttggagagattccaaattctctgtttaaattctgttacaagacaaagtttgtttcattgtctcataacaatctctcaaggatnaatccctgaatcaatcg

SEQ ID NO: 7546 - DNA, 443 bp, Arabidopsis thaliana
  unsure at all n locations
  Clone ID: LIB24-074-Q1-E1-C4
gcaactgttatctgcattttggatacaatcagcacttcctgatatcttaccttcaaacattgaagctattgctcattcttttagcttggtgcttctgtccttgcgactaaagaatcctgatgacgggcttgttgttcgagccttccagcttctcttctcattgaggactctttcgttggaccttaataacggcacattaccctcagtttgcaagcggttgatccttgctttatccacaagtatgctgatgttcgctgccaaaatatatcagattcctcatatttgtgaaatgttgaaggcccaacttcctgggtgatgtggatccttatcttttcattggagatgacttacaacttcacgtaagaccacaggcaaatatgaaaagattttgggtcctcaagcgatagccaaatggctacntcaaatgctgtttgagatgcgaa

SEQ ID NO: 7547 - DNA, 516 bp, Arabidopsis thaliana
  unsure at all n locations
  Clone ID: LIB24-074-Q1-E1-A8
ctggtancctggacgtaccggtccggaattcccgggtcgacccacgcgtccgcccacgcgtccgcagatagtgaagcgacttcatgcattgagctaccacatgaggagctacttttggctagacttgaagcagcttaatgacatttaccgatataagacagaggaatactctcacactgctgtcaacaagttcaacgtaatccctgattctcttccagaatgggttttcgactttatgccgcctcacggagggttctttattggcaacgttagccctgcaagaatggatttccgttggtttgctttgggtaattgtatagcaatattgtcttccttggctacacctgaacagtcgacagcaattatggatctgatagaatctcgctgggaagagttggttggagaaatgccactgaaagtttgctatccccgccatagaaagccatgaatggagaatagtaactggttgtgancccaaaaacactcggtgggagctaccacaatggagggatcgtg

SEQ ID NO: 7548 - DNA, 478 bp, Arabidopsis thaliana
  unsure at all n locations
  Clone ID: LIB24-074-Q1-E1-B1
aatagtaaattgcaaaagaaagaaaatcgaaaaggttgtttgtaaaataattacaaaacataattagtggtgagaataaatctaaatataaggtacaagggggtgaaggggtgtgtgtctatatatgttggatgattagtttctgccatgtgctatggaatcaacctcttatgctttatgttctgtttagctcctaccttatactataactttaattattcatcaataattctaattctccttcgttttttaatatactagtgtttcatataaatactcgctctctctactcattccctccataacatatatttcttcttcgtttcattcataatccgtcttataaccacaagattctaaaacatgggagaagaagtanaaccagaggcaaangaggcaacctctgctccacaagccgtccccgctgaagaaggaggagaaagaagaaagatgtngcggaggagaanaaagtggcggc

SEQ ID NO: 7549 - DNA, 439 bp, Arabidopsis thaliana
  Clone ID: LIB24-074-Q1-E1-B11
acgcgtccgcttccgagaacaaccctagattccgatgatgaggggtctcgtttccggcgccaagatgctatcatcaaccccatcgtcgatggcgacaagcatcgccactggtagaagaagctacagtctgattccgatggttattgagcactcatcgcgaggagagagagcttacgacatcttctctcgtttgctcaaggagcgtattatctgcatcaacggtcccattaatgacgacacatctcacgtcgtcgtcgctcagcttctttacctcgagtctgagaatccttcgaagccgatccatatgtatctcaattcccctggcggccatgtcaccgccggtcttgcaatttatgatactatgcagtacattcgttctcctattagcacaatttgtttgggtcaagctgcatcaatgggcttctcttctgttggcagc

SEQ ID NO: 7550 - DNA, 395 bp, Arabidopsis thaliana
  Clone ID: LIB24-074-Q1-E1-B12
aaatgcggatgatgaggatgagactactgaagaaactactgaatcgctagacagccaatccacaagatacataaaaggatgtctcctgagcacatgtgggacttcccttacagtattccttcttcgtgaaacttcccccttatataagattactgaagttgcaagcaccgttgtaagatctgatgaagaagctaggaatggagacattcgtgagagcagagaatatggaaaagctttatttttgtcagcaaaagattttgtgagtgggaatgatactgaagagtgaggagagagtggtgtaaagacggagggaagaaggaagcgaaagcagtgttccaagatggatgtctctgtttctgacaaaagctttgcatattctgagccaaagactaagc

SEQ ID NO: 7551 - DNA, 474 bp, Arabidopsis thaliana
  unsure at all n locations
  Clone ID: LIB24-074-Q1-E1-B2
acgcgtccgatcgaatcataaacacttacgcagaaacaaaaactaaactttggatcttttaaccgaccatagagattcgtgggttcttcttagtttcgacagattcttgatccgttttagttgttacgctcatctttgcttttatacatcagacccttctcttctcttccttctttatctaagaaacattagggttctttgaaatcttgctaaaaaaaatgggtgttgagaaaatggtgtgtttagcttctcgtacgggtcgtcagtttcagagatacaacaaaggtcgtcgtcaagtcgttggatgtgttccttacagattcaagctatctaatgatggtaaaataagtgatgaagtagaagttcttgttatctcttcccaaaaagggcacgccttaatgttccccaagggtggttgggaacttgatgaatctgtagaagaaactgcatcaagagaatgtcntgaagaaactg

SEQ ID NO: 7552 - DNA, 424 bp, Arabidopsis thaliana
  unsure at all n locations
  Clone ID: LIB24-074-Q1-E1-B3
gcaactgttatctgcattttggatacaatcagcacttcctgatatcttaccttcaaacattgaagctattgctcattcttttagcttggtgcttctgtccttgcgactaaagaatcctgatgacgggcttgttgttcgagccttccagcttctcttctcattgaggactctttcgttggaccttaataacggcacattaccctcagtttgcaagcggnttgatccttgctttancacangtatgctggatggttcgctggcaaaaatatatcagaattcctcatatttgtgaaatgttgaaggcccaacttcctgggtggatgtggttccttaacctttncattgggaaggacttanaacttcacgntaaggaccacaagggaantttgaaaggatttnggggccccaagcaattagccagang

SEQ ID NO: 7553 - DNA, 476 bp, Arabidopsis thaliana
  unsure at all n locations
  Clone ID: LIB24-074-Q1-E1-B4
acgcgtccgaagctacagtgtacagaagaaaatgagaggactctccagaaactccggcgcggcggcgatattcgcgattctactcattctcgccgttcataactggtccgtcgccgtatcttctcaatccaccgaattcgccggagatttccctccattcgaaacagagtgccgcggtacaattgccgagtgctctgtttccgccgccctcggagacggaggagatctattctacggcggaggagaaatgggagaggagttcgagatggactcagagatcaaccggcgcatattagctacgaggaggtacatcagctatggtgcgctgaggagaaacacaattccgtgctcacgtcgcggngcatcttactacaattgtcgacgtggcgctcaggccaatccttactctcgtggctgcagcgccatcactcgctgccggcgctcatgaatctatcactgtcagtctcactgnaatt

SEQ ID NO: 7554 - DNA, 438 bp, Arabidopsis thaliana
  unsure at all n locations
  Clone ID: LIB24-074-Q1-E1-B5
tcatcacttctcagatttcgatattcccaataaataataaatactctcagttcttctcttctccaagaacaaaaaaaaaaaaatgaattcagaatcgctagaaaatcttcaccgtccattaatcgaatcatcgaagtcgttcgtcgattatcgtctcgagactgtgttaacagatcgagagttaccgtattttcgccggatttatctagcgatgatgattgagatgaagtttctctttcatctggcggctccggcgatctttgtttacgtcatcaacaacggcatgtcaattcntacacgtatcttcgctggacacgtaggaagcttcgaactcgcccgccgcttcacttgggaaacagtggtttcaacatgttcacctaagggacttctgcttggaatgggaagttgcagtgggaaacattaaggtgggtcaagcac

SEQ ID NO: 7555 - DNA, 472 bp, Arabidopsis thaliana
  Clone ID: LIB24-074-Q1-E1-B7
acgcgtccgcagagaactcatcaaagacatcaactcttcccaagtctcctgagaaactaaaagctatgaatttcccaatctccacgatcaagattggcgactgtgtcttcgttgccaaaaaccctgatgacattgtggccaaattctattttgcaaagaagaaacttttatgggagtttctcttcggagaaccagtggctaacatgccgaggctgaagagtaagatcgagattcaatggaatgatgtctcatcttttgaagagagtattaattcacgtgatgaaactggaatcctcaaaatcgagttgaaaaaacgtccaacattcttcacaagagactaatccacaggcaggaaaacacactcaatggaaacaattggattacgatttcaccggagatcaggcttcttattacaggagacatacacttcattttcctcccgggagttctgcaaaagaactgggagaaacct

SEQ ID NO: 7556 - DNA, 472 bp, Arabidopsis thaliana
  unsure at all n locations
  Clone ID: LIB24-074-Q1-E1-B8
acgcgtccgattttttgcttatcactttcaaggtggtttaagacaacactgattacatgattttgtattaacctatagtctaactgaaatggcataaaattaggtgtcttgacaaagccgcggtggttatagaaggtgacctaacacccgagggacctcccgcagacaagtggcggttatgcagcgtccaagaagtggaagaagtgaagtgtttgatccgaattgttcctatctggtcggccggaataatctcactcgcggccatgacaacacaaggcactttcacggtctctcaagctttgaaaatggatcgaaacttaggtcctaaattcgagattccggctggttcactctccgtcatctctctcctcacaatcggcatctttcttcccttctacgancgcgtttttgtaccattcatgcggcgaatcaccggccataaatccggaatcacactcctccaaaggatang

SEQ ID NO: 7557 - DNA, 436 bp, Arabidopsis thaliana
  Clone ID: LIB24-074-Q1-E1-C10
acgcgtccgcccacgcgtccgcccacgcgtccggcacggatgggcaaaacaaacaggatgtggagacagctatctccatggtggaagctctagctgtgaagttaactcagaatgaaggtgaattgattcaggagaagtttgaagtgaagaaactaggaaacttcctcaagcagacttcagaagatgcaaagaaactggtaaatcaagaaaagtcattctcttgtgctgagatcgaaactgcaagggccgttgtgctgagacttggagaggcttttgaagaacaagaacggatttctgaagcttctagagctcaggggccggatgtggagaaattggttgaggaagttcaagaggctaggcaaatcaaacggatgcatcacccaacaaaggtactacatcaattcattgcactttaacttcataatttgatgtgcca

SEQ ID NO: 7558 - DNA, 437 bp, Arabidopsis thaliana
  unsure at all n locations
  Clone ID: LIB24-074-Q1-E1-C11
acgcgtccgggtgttcccatggtgaggagcgggcttcatgataattgggatgatgcagagggttattatagctatcagtttggcgagttacttgatggtanatatgaagtcattgcnactcatggaaaaggtgtcttctctactgtggttcgtgctaaagacttgaaagctggaccagctgaacctgaagaggtggcaataaaaattatccgtaacaatgagacgatgcataaagctggaaagattgaggttcaaatattgaagaagctggcangcgctgaccgagaagacangcgccactgtgttcgatttctttcaagctttaagtaccgtaatcacctttgcttggtgtttgaagtcgctccatttgaatcttcgtgaggtcttgaagaagtttggtcgcaacattggtctccaactctctgctgttagggctt

SEQ ID NO: 7559 - DNA, 398 bp, Arabidopsis thaliana
  unsure at all n locations
  Clone ID: LIB24-074-Q1-E1-C12
agaactcatcaaagacatcaactcttcccaagtctcctgagaaactaaaagctatgaatttcccaatctccacgatcaagattggcgactgtgtcttcgttgccaaaaaccctgatgacattgtggccaaattctattttgcaaagaagaaacttttatgggagtttctcttcggagaaccagtggctaacatgccgaggctgaagagtaagatcgagattcaatggaatgatgtctcatcttttgaagagagtagtaattcacgtgatgaaactggaatcctcaaaatcgagttgaaaaaacgtccaacattcttcacagagactaatccacnggcaggaaaacacantcaatgganncaattggattacganttcaccggaagatcaggcttctta

SEQ ID NO: 7560 - DNA, 426 bp, Arabidopsis thaliana
  unsure at all n locations
  Clone ID: LIB24-074-Q1-E1-C3
nnnnnnnnnnnnnnnnnnnnnnnnnnnnnnnnnnnnnnnnnnnnnnnnnnnnnnnnnnnnnnnnnnnnnaaaaaaaaaaaaaaagggcggccgctctagaggatccaagcttacgtacgcgtgcatgcgacgtcatagctcttctatagtgtcacctaaattcaattcactggccgtcgttttacaacgtcgtgactgggaaaaccctggcgttacccaacttaatcgccttgcaagcanatccccctttcggcaagctggcgtaatatcgaanaggnccgcaccgatcgcccttcncaaaagttgcgcagcctgaatgggcgaaatgggaacgcgccctgtaacnngcgcaataaagcgcgggcggggtggtggtggntacgcgcaagcnnggcccgctaanacnttgccagcgccccnaggcgc

SEQ ID NO: 7561 - DNA, 471 bp, Arabidopsis thaliana
  Clone ID: LIB24-074-Q1-E1-A5
acgcgtccgcccacgcgtccgccggaacagaaggacaaacgatccagaatttgtgctagatcttgaagagatatatgttattgattccaagacaaagtcaatcaccaagagccagagttctggtgacagttccgggaggaagaaaaagggataggaaggatgacttgcttgtgatacgagataatggaacctcctttaagatcatacacgtggtgaaagagatgacccaacaacggtaatagaaagagaagagtggaccaagactagagaagacatggagaaacatctcaggaagctacgagacttcagtgtctcaaattggttctaagaagaactcgagagacaccaaacgacaagtcagcataactttcttcctgagatggaaaacgagagcagatgatctaaatcgatgatatggtggagggtatacaattttggtgacctcaggtactgcactagcaacagagatgg

SEQ ID NO: 7562 - DNA, 483 bp, Arabidopsis thaliana
  unsure at all n locations
  Clone ID: LIB24-071-Q1-E1-G3
naaattcaggggccaaccaagcctncgncggcnccttggnngnaaatttcccccnatttggttccnattnncccgnnangggnaacaacaangaatggcggcggttnccccaaaacctnnaaaccctcctcctttcccggctaaaaatttgtgcattgctcctgaaagggatcaggtttactaagggtgctttttactacaaaagcaacaatgtagtgacaggtaaaagagtgttttccataaaagcacaaatcacaacagaaacagatactcctactcctgcaaagaaagtagagaaagtgtcaaagaagaacgaggaaggtgtgattgttaacaggtacagaccaaaagagccttacactggaaaatgccttctcaacaccaaaatcacagctgatgatgctcctggagaaaactggcacatggttttcaaccatcaaggagaaatcccgtacagagaaggacaatctgttggtgtgattg

SEQ ID NO: 7563 - DNA, 489 bp, Arabidopsis thaliana
  unsure at all n locations
  Clone ID: LIB24-071-Q1-E1-H1
tgttagcctgccgtagccgtccgaaattcaagggtcnacccacgcgtccgctcatcctaagagagctgaaaaatggaggttggattcaaggcattgctcgatgatcttgacgttctcgagaaatctctctcagatccggctctgatcaacaaggtctgcgatcacatgttgagaatctagccactctgtctaaatgtaatcctcaccggcgttccaaagtcaaggaactaagctcggaagtggtagatagtaatccttacagtaggcttatggcacttcagcggatgggcattgtggacaactatgagagaattacagagttttccgtcgccattgttggaattggtggtgttggaagtgttgcggctgagatgcttaccagatgtggtattggtcgtcttttgttgtntgactatgacactgtcgaactagctaacatgaacagactgttttttagaccggaccaggttggtatgacaangactgatg

SEQ ID NO: 7564 - DNA, 440 bp, Arabidopsis thaliana
  unsure at all n locations
  Clone ID: LIB24-071-Q1-E1-H10
ggtttagtgaagccaagtaagcaaagccccttgtttttgacggacattatatctcctcctcttctcttctataaattgggcacctttttccaattttacgcacagtcacggagatagatagtaagagagagctatggcggaggagcacttcgacgttctgactaaatccggtgagaagaccggtgtgtccaaacccaggggagaggttcacagagatggagattaccatcgtgctgttcatgtctggatttttgtggagactactcaacagctacttctccaacttcgatctgatgataaagattcttggcctggtcaatgggacatctctagtgctggccatatatcagctgggtgatacatcgcttctatcctgcacagcgggaagcttgaggaagagcntgggcgtaaaaactcccaaagggatgcatttgaaaaga

SEQ ID NO: 7565 - DNA, 497 bp, Arabidopsis thaliana
  unsure at all n locations
  Clone ID: LIB24-071-Q1-E1-H4
agcctccnaaattccagggtcgacccacgcgtccgccagcttgcttttatgcactggctaagaaactgggagacttctcgtgcataccgaagctgaagaaaaacttgggttgaacagtttggagtttggattggagacagaagattatctcactggaatttgtttcatgtcaaacgatttgcctaggtacgtggttaatcgagtgacagcaggagactatgactgcccaagaaaggtgatgaatttcctgacagatcttcatgcagcctttcgcatgctcaatctcaggaacgatttcctgcgcaagaaattcgacagtatgaagtacgacctaagaagagtggnagaagtttactatgatgtcaagatccgaggtttgatttccggcggagattctcctgggcgtccaaagcatccaagggcaatcctaaatgtcctcggctctttttaagtttttaatgtataactttggtttagctagcatgaaaacgtcaagg

SEQ ID NO: 7566 - DNA, 463 bp, Arabidopsis thaliana
  Clone ID: LIB24-071-Q1-E1-H6
acgcgtccgcccacgcgtccgcccacgcgtccgcggacgcgtgggatgagtttaagatggagagaacttgtgcggccagaccaaaatctccagaatgtcaaaggcccagagacagatgttgccatttttagaaacgctcggatatgtgacaaaaagcttagtgataacaaggttagctacggagttttctttggaaatcaaaagcatctgccatcacgcgtcatgaagaatataatggaggtcgagaaaacccaagatagaaatgaaaagtattggttacaagaagcccatgttcccctatacttgatcaaagaatttgaagagagcttgcatagagtacaaatgccttcttcaaccaagaagccatccaagaaattatcaaagcttcagagaaagcagctgaaagcttccctcatggacatattttcatatatagcctcaaggagggacaagatggagaaat

SEQ ID NO: 7567 - DNA, 189 bp, Arabidopsis thaliana
  Clone ID: LIB24-071-Q1-E1-H7
tgttacgccggccggtaccggtccaaaattcccgggtcgacccacgcgtccgcccacgcgtccgcataactcttggactagagaatatgtgcaaataagattggtctgaaatagtagtcatgtggattcacaatgaaagaatgggattggaaaacatgaaatcaaagattacaaaaaaaaaaaaaaagg

SEQ ID NO: 7568 - DNA, 474 bp, Arabidopsis thaliana
  unsure at all n locations
  Clone ID: LIB24-071-Q1-E1-H8
acgcgtccgggatnctacccacaaccaacagaagaactctgcaaccgttggatcgaagtaggcgcgttttacccgttttcaaaanatcacgccaattactactcaccaagacaagagctttaccaatgggacacagttgcagactcagctcgtaacgctcttggtatgagatacaagatccttcctttcctctacactcttaactacgaagcgcatatgactggtgcacccatcgctagaccgctcttcttctcattccctgaatacaccgaatgttacggcaacagcagacagttcntgcttggaagcagcttcatgatatctccgggttctcggagcagngcaaaaccgaanntagaggcaattgttcgcaanaaggttccttggnacgcaaggtgttcggcattgactnaagcantagtgtccanagaancgggaaacgtgtaactctcccanctccttttgaactttgtg

SEQ ID NO: 7569 - DNA, 441 bp, Arabidopsis thaliana
  unsure at all n locations
  Clone ID: LIB24-071-Q1-E1-H9
acgcgtccggtcgtttaaagtctgatccttttcatttttctttagtgtgtgaaaagagaaatacagttatggcggagatctcgggaaacggtggtgatgctagagacggagctgtggtggtnnnnnnnnnnnnnnnnnnnnnnnnnnnnnnnnnnnnnnnngctattcataaacccttgaagaaacaagactctctcctctctatctctgtccctttcttacaaaagttgatggcggaggttttgggaacatacttcttgatattcgccggttgtgccgcggtggctgtaaacacacaacatgacaaaanccgtgactcttccagggatcgccatcgtttggggacttaccgtcatggtccttgtttactctctcggtcacatctccggtgctcatttcaatccggccgtcacaatcgcattcgcttcntgcggccgtttc

SEQ ID NO: 7570 - DNA, 432 bp, Arabidopsis thaliana
  unsure at all n locations
  Clone ID: LIB24-072-Q1-E1-A4
tgnattaaganataganncaatagtttttggggganaagcccggccgacgaatcggcggcgagacgttctttgtcaccgattgacatattcaaaaacgacgaagctaggtaaaggaacggagagaagagtcnataatacaagcgtagagatgggaaatcagaagctcaaatggacggcggaggaagaggaggcgttactcgccggagttaggaagcatggccctggaaagtggaagaatattctccgcgatcctgaattatctgagcagctctctagtcgctctaacatcgacctcaaggataaatggcgtaatttaagtgttgctcctggtattcaaggctctaaggataagatacggacaccaaanatcaaagctgctgcttttcatctggctgccgctgctgcctgcccgctattgttaactcccaact

SEQ ID NO: 7571 - DNA, 426 bp, Arabidopsis thaliana
  unsure at all n locations
  Clone ID: LIB24-072-Q1-E1-A6
gtttataaatctttttattttctatctgtcttgatttagttttatcttttttggaatcggtctgaagttggacaaaagaatccgccattttctcctcggtctctctgctcttctcttcagtatcggatctgggtctccttcgctttcgtttcaagattattttgggagacgaggaggcgttagctgtaattcattgtatacttgctttggctattaaagccgtcacacaaaaaaagtaaaagcaacacacacacataaatagacacacttttttacgtatatgtgtgtcttctttcgtctctgttgggaatagatcttgtcctaagagatcacttcgaagtctgatctaaaagtgagaaactttgggttcttgttttgggtttttggnatcntgtctaatctggggaaataatgggaaatgagtcc

SEQ ID NO: 7572 - DNA, 429 bp, Arabidopsis thaliana
  unsure at all n locations
  Clone ID: LIB24-072-Q1-E1-B1
caatcgaatcaagacattgacgaggagctttggtcgtaatccgaggaagagattaaaatcggaaagtgcgaaaatgccggtcatggagaaattgaggatgttcgtggcgcaggaaccagttgtggctgcttcttgcttaatcggcggtgttggactatttttgcctgcggttgtgaggcctattctagactctctcgaggcttccaaacaagttaaagctcctccacttaccgatgtgattgctggtgtcacagggaaganacagagttaaaacaagcaatgacttcccctgttttcttacattcagatgatccctattccttttttgtcntttactcctctctaattcacaatgaataagccagactcaattgtttgttatganaccttantaataaagggcatgtngtgtacactcancttttggtc

SEQ ID NO: 7573 - DNA, 437 bp, Arabidopsis thaliana
  unsure at all n locations
  Clone ID: LIB24-072-Q1-E1-B2
attaaaccaaaatcaaaactaagcaacctaactaaccatatcttccgatttctcttatctctctgaagccacaaatctccagattcattcgtcgtctcggttaaggttagacggagaagaagatacaacaaatatggcggttagtatgaaacaaatgtcgttggtcgtctctgctttgggcgtcttatcctttgttttgggagttatcgccgagaacaagaagcctgcgtctgggactccaataagtggaaaaggagtagttatctgcaaatacccatctgatccaactgttgccttgggatacctttctgctgcttttctccttgcctgcactgtancaaggatacaaaatccttgttcatctcttacaaagggaaaagtctgttcctaactctgtccttgttcaaaaagcaaccaagcttccccngtggttcctt

SEQ ID NO: 7574 - DNA, 426 bp, Arabidopsis thaliana
  unsure at all n locations
  Clone ID: LIB24-072-Q1-E1-B5
gcgattaaacgactcgttggccgtgggaccgggaggagcgatcatggattcacggcggagattcaaactttggggagaatccgccaccgtcacatagtgagacttcttggttacgtagcgaacaaggatacgaatctccttctttatgagtacatgcctaatggaagccttggagagcttttgcatggatctaaaggtggtcatcttcaatgggagacgagacatagagtagccgtggaagctgcaaagggcttgtgttatcttcaccatgattgttcaccattgatcttgcatagagatgttaagtccaataacattcttttggactctgattttgaagcccatgttgctgattttgggcttgctaagttcttaagttgatggtgctgccttctgaantgtatgtcttcaattgctggctcctaa

SEQ ID NO: 7575 - DNA, 424 bp, Arabidopsis thaliana
  unsure at all n locations
  Clone ID: LIB24-072-Q1-E1-B6
ttttggtcactctgatgctttcagtttccatggttttatgagaaaatatcattgattatggttgcttctgagattaaatccccggtgagtgtccccgagactccgggaagctcctctgtgcatcataggaagcagttgagtgtgttcttcatagaatcagataacagacgtcttgctcttggccgtggctataccggaggaaccactcccgttaacatccatggcaaacccatcgccaatctttccaaaaccggtggttggatcgcagctttcttcatttttggaaatgaaatggcagagagaatggcgtatttcggactctcggtgaacatggtgggcgttcaagttctacgtaatgcatanggccntttgaaaagttcaatcaaaccgcaagtcaagaaacttcctttgggancctctcaaa

SEQ ID NO: 7576 - DNA, 373 bp, Arabidopsis thaliana
  unsure at all n locations
  Clone ID: LIB24-071-Q1-E1-G1
acccggtaanattccccaaggataagggtattgcaatcacggctggacaaaaatcgccactttggtgaaaagctgctgggtgttaccattgagtcatactgggccaatgctattcgccaagatggctgagaaacgtaatgtcactgatctcatcatgaacgttggtgctggtggtggaagtggtgcgcctgttgcaactgctgctcctgctgctggcggtggtgctgccgctgctgctcctgctgccgaggagaagaagaaggacgaaaccancagaaganaatgatggagaattgggttttggcttgttcgattaagtgcattttacttggttttttcctcctcnaatttgagactatttttttttccgnaa

SEQ ID NO: 7577 - DNA, 425 bp, Arabidopsis thaliana
  Clone ID: LIB24-071-Q1-E1-E11
gaagagatctctcgttcgtttttttcccggtaaatccggcgagaaaaagttcacattgaatctacgagaaaatttccttccatttcactccacgagttttcacctctcttgttcaatctctcaacgtctctccctcgtttctcgttttcgctttttccccttttcctcttctattttaccggaatccgagaatttttgatcagatctagtttcagaaataggttagttccaacaatgttgacggaacgaggaaggcgaatttctggtttcaatgggagtttcgaatttagcaatagaaaattccgtggttatggattcgtagatcgatctcaaggtttccatgaaaggagtccttcaagatcatgttctgtttcgaaaatccttcgtatcacgccaacaacctcgtctccaccgtcttcggctcc

SEQ ID NO: 7578 - DNA, 506 bp, Arabidopsis thaliana
  unsure at all n locations
  Clone ID: LIB24-071-Q1-E1-E2
actgttaccctgccgtanccgtccgaaattcccgggtcgacccacgcgtccggctagctgtcttctgcaagaatattgcaacanaagtgggagttctatgccaaaacagaaaacacatgatgaagttgattattcaaatactcttttgaatcttcaatttactcattacattttcacatcaaaccatctgaccacaaacaacactagaaatttcactgagagaaacttaccatgtctgaaatatcatcttccatgcctttaacagagagagtttataatcatctttgtctgtccgatgtttctctggccttgttgggactgtttgttttctgttgtgtgcgtgagaaggttactaaaaagctggggccaacgatatggnctgtgttcggaattactccagagttctccttcacaggaatgatgttaatgggttgggctacaagatgtttgaaaaaatgtcnaaggtaccttcccataacggaatcctggcttggtggggtcctatg

SEQ ID NO: 7579 - DNA, 447 bp, Arabidopsis thaliana
  Clone ID: LIB24-071-Q1-E1-E3
acgcgtccgcccacgcgtccgcgagatcatctagaagatgatgttcacatgtcatttggaagtatgttgttacgaggcctttgttctggtgaagctgatggtgatcttgagacatgttgcagagctgcaagcattctttctcatgttgtcaaggacaatcttcggtgcaaggaaaaggctttgaaaatcgtacttgaatcaccgatgccgtccatgggaactccagagcctctctttcagaggattgtcagatacctggctgttgcttcttccatgaaaagcaaagagaaatcaagcacactggggaaatcatatattcaacagatcattttaaaactgctggtgacatggactgttgattgtccgactgcagttcaatgctttttagattcccgccaccacctaacgtttttgctcgagctgggtaacagacccagctgcaacagt

SEQ ID NO: 7580 - DNA, 418 bp, Arabidopsis thaliana
  unsure at all n locations
  Clone ID: LIB24-071-Q1-E1-E5
tcattgaaatcgaaagagtgtgcttgaatcacagcttatgcagacgctacaccagtcccaacttctccagaatccggccgaggcggcgaacaatcagtctgaatcggacgcgccgccgaaacaggtggctcaggccatggaacgactcaatcaagcggctagggttatcgccgatatccgcctcggcgctgaccgtatccttgaagctatgttcgtggcttcgcaacctcgtcacacagacatgcctcttcagctctttctcagagaagacgcctccaatgcgtcaacatcttcaggatcttcgcttaatagggaagaaattggaagaatccnggantgttaactgaancacttaaggtcannaantaanncttggggtcttcanatgccctttgggtttgtccaaaatgggtgnatt

SEQ ID NO: 7581 - DNA, 430 bp, Arabidopsis thaliana
  unsure at all n locations
  Clone ID: LIB24-071-Q1-E1-E6
agtttcttctttcttctctcccgagaggcctctcgctgttcattgaagttctcttagaattttctatcaccttgtatggttgtgtaatttgcaaaacagacaacaatggttgagcgtgggaagangactcacaatcgtttcagagacaacaacaatgacaacaaccggaatcaaaggagaagactttcttacgaatccgaagaaaaaaagatcgatancaaagacgatctcgttgttgtttacagaancttangcccaagtggtgtcatgggaagtgttataggcaaaagtggcaaagttattancttgattaggcaagaaactagagctaggatcaaagttgttgatccttttccaggttgtaccgaaagagtcataacgatcttttgcncggtttcggagaagaaagacattgttgacattgagtaaa

SEQ ID NO: 7582 - DNA, 459 bp, Arabidopsis thaliana
  unsure at all n locations
  Clone ID: LIB24-071-Q1-E1-E8
acgcgtccggttacagcttcgtgaaatcggtttgggaacggttatctccgatgatgtctccgcgtggtagctttgcttgcgctgcgatgcctggttcttgtggtcggattattgtggcgggaggaggatcacggcacactctgtttggtgctgctggaagtagaatgagttctgtggagatgtatgatgttgagaaagatgagtactataaagacgcggtagtgatggatttgagagtagatggtggtgagaaatggagggtagttggagatatgtggggagaagaagagagacctaagctagggaagattgttgctgttgattgtgggaagcctgtgttttcatgttggataaggattggattcctaggtatgagatgggttttgaatcgttggagaaaaggaatcaacgttcctaaagaaaagccattacgacaaaaccggtttggtttccnttcac

SEQ ID NO: 7583 - DNA, 503 bp, Arabidopsis thaliana
  unsure at all n locations
  Clone ID: LIB24-071-Q1-E1-F1
actggtacccntccgtagccgtccgnaattccngggtcgacccacgcgtccggcaaatatgatggatcaacggctgagaagaaaaagatcttagaaaaactccgtgttcgtggtgccgtagctataaacttaagaccagcaacaaagatagaggatttggctgatatgatggcgaagggttcaaagtgtagatggggaaacttcataggaacggttatatttccgttgtgggtgaaatcagagaaagatccgttggagtacattcgacgagccaaagctacgatggataggaaaaaaatatctctggaagctttttttttctatggaattattaaattcaccttgaaattttttggaggaaaggcagtagaagcttttgggaaagaggatatttggtcacacatcattggcattttcaaatgtgaaaggtcccgatgaagaaataagtttttttcaccatccgatttcatatatcgcaggaagtgcattaattggagcacaag

SEQ ID NO: 7584 - DNA, 484 bp, Arabidopsis thaliana
  unsure at all n locations
  Clone ID: LIB24-071-Q1-E1-F10
aatgttaccctgccgtaccggtccgaaaattcccgggtcgacccacgcgtccgcnctctcttctctctcacccaatttcacaaacccgaaaccctaattttctcgggacactgaaatttttacagcttctttcctcttcttcaccggggagatttgtcggtactaaatctagggtttttgggtatcaccggagggttgaagagagagaaaaaaactcacaatggaatcagatcagggaaagctatttatcggcgggatttcatgggataccgacgagaatcttctgagagagtacttcagcaatttcggcgaggttttgcaggtcactgttatgcgagagaaagctactggtcgtcctagaggattcggattcgtcgcattctcggatcctgctgttattgatagggttcttcaggacaagcaccatattgataatagagatgttgatgtgaagagagcaatgtctagagaagagcagagtcct

SEQ ID NO: 7585 - DNA, 478 bp, Arabidopsis thaliana
  unsure at all n locations
  Clone ID: LIB24-071-Q1-E1-F12
actgtttcacctgntcgtacgcctccaaaattcccnaggtcnacccacgcgtccgatcaaagattgcgtcgaggagatgaacgataccgttgaccgtttgaccaaatctgttcaagaactgaagttgtgtgggagtgccaaagatcaagaccagtttgcgtaccacatgagtaatgctcagacttggactangtgcggctttgactgacgagaacacttgctccgatgggttctcgggtcgggttatggatgggaggatcaagaactcggttcgggctanaatcatgaacgtgggacatgaaaccagcaacgctttgtccttgattaatgcctttgctaaaacttactaatttaaaactatattttgtcctgtaaaatatatatatagataaatgtaatgtcntgccaacagtttgatgtgatatatntttttcgatnntggtagtttccttttgttntgtaacgtnggttataatac

SEQ ID NO: 7586 - DNA, 511 bp, Arabidopsis thaliana
  unsure at all n locations
  Clone ID: LIB24-071-Q1-E1-F2
ctgttacgcctgccggtagcngtcnaaattcaaggttcgacccacgcgtccgccnacgcgtccgtgcgattctgctactctggannnnnnnnnnnnnnnnnnnnnnnnnnnnnnnnnnnnnnnnnnnnnnnnnnnnnnnnnnntttttgcgatatcttcatagaaggaagatggtcttatctcaaggctctgcatctctctccttttctcatccataggtcatgcgtccatgagcaattggcataatacgtaattgtcagatggtatacaacaactgtggacaagagtgtatgtttttcagtgtggcagtgttggaaaaagaagcaatgcgaggaggcacacctcttcacttaaagagcaaaatcgatgagctgatnaaagantccncttggatttgtgcctcngtacttcctaanaaggaangtgtgttgacttttcgacttgttccttgngttcctggatacatgttcctttcaacntccnanaacattggtttcctttaacaanggta

SEQ ID NO: 7587 - DNA, 456 bp, Arabidopsis thaliana
  unsure at all n locations
  Clone ID: LIB24-071-Q1-E1-F5
acgcgtccggaaaacgatgacgagaactgttctactgagagctctgacgaagaataagttcgtcgcctctaatgctcctcgatctatatccatttccatcaccagtctctctagatgcattagcactctgattctagcagaacatgagagtggtacaatcaaacctcagacagtgagtacagtagttgcagctaattcattaggtgagagctcttcaatttctttgttattggctggttctggttcttctcttcaagaagctgcttctcaagctgcctcttgtcatccttctgtttccgaggtacttgttgctgattctgataaatttgagtactctttagctgagccttggggctaaattgggttgacttgttcggcaacaaggagattactcacacattcttgcttcctccnagttcatttgggcaaagaatatattaccccgtgtcgctgctc

SEQ ID NO: 7588 - DNA, 457 bp, Arabidopsis thaliana
  Clone ID: LIB24-071-Q1-E1-F6
ggtttgcttagaaaggagaagacatctggagcaacaggatttacaaaagttattatctttatcgatttctcttcttcctagacccaacagacgaagagaatttgttgttggttgtctctggtctcttcgtctaggttttttttgggttattaaagatggtgaggatcgtgagaagttgtttacagtccatgttaaagctcgtgaattctctaattgggatggttgggattgctatgattctctacgctgtttggctgattaggcaatggcaagaacaaatgggaaatcttccttttgctgattctgatcaccctgttccgtggttcatttattcatttcttggtctcggggccattctctgtgttgtcacttgtgccgggcacatactgctgaaaccgtgaatggatgtttgccctttacttgtaaaatgggattcataagtccttgctaactaatg

SEQ ID NO: 7589 - DNA, 485 bp, Arabidopsis thaliana
  unsure at all n locations
  Clone ID: LIB24-071-Q1-E1-F9
actgttacgcctgccgtaggctccgaaaattcccaaggtcnacccacgcgtccgcncacgcgtccggttccaaggccgatgggtgttcgatgcttcttaccctttctatgactcgtccaagtgtcctttcatcgacggcgagtttgactgtctcaagttcggccgaccagacaaacagttcctcaagtactcttggcaacctgaatcttgcaccatcccaaggttcgacggtggggcatttctgaggaaatacagaggaaaacgagtcatgttcgtcggagactcactgagtttaaacatgtgggaatcgttggnctgtatgntccatgcgtcngtaccanacgcnaagaccacttttctcaagcgtaccccactctctactctcactttccaggaatatggantaacnttatatcnatatagaacaccatacatagtangatatatccaaagaganagtgggcgtgtgcttaacctttggancc

SEQ ID NO: 7590 - DNA, 507 bp, Arabidopsis thaliana
  unsure at all n locations
  Clone ID: LIB24-071-Q1-E1-E1
ttagcctgccgtagcngtccgagaattcanggggtcgaccaacgcgtccgacaagtaacaaaaatccccgggcgaagaaatttcaattgagattttactcctcctctctctctcctcttcttcactctccaacaaaagtctctcgtctcaagatatgaagatttctcaagctccgatctctgttttcgtactcttcttgctctccactgttttgcctcaccatctctcactgggagctccgattacatgctctggtatagttccaatgaaacacagaaacgagatgctatcaatttcggattttggagctgtcggtgacggcaagaccttgaacaccaaagcattcaattcagctattgatcggatacgaaactccaataacagtaacgaaggaactcttctttatgtgcctcgtggtgtgtatttgactcaaaagcttcaatcttacgagtcacatgactttatanctcgcccgatggtgctgttattaaagcccgttcangatac

SEQ ID NO: 7591 - DNA, 400 bp, Arabidopsis thaliana
  unsure at all n locations
  Clone ID: LIB24-071-Q1-E1-B4
aatggtttccccccggnaaagttanggaaaaccttttnncaaggttanccttnaattcggcaataattggtcccggtagtcctttaaaacctggtgtnggttcctttgagaacctaaagcaagccaattgtccacaaagctgagctctcctttcctttctcctccaagttcaaagnattctaaactttgggagcaaagtaagcaagtcagagaagaaggacaaattagctgaaatgctgggagattgaaagccctacgaagtctctgtttccgtacaaacactacttgtaatgctctgcttcgaanagcttcagaaaatatggggttgatattggtgagaatgatgctgagaaaagaacgggatgccaatgggaattgggagaaaggatgtcttgaaatc

SEQ ID NO: 7592 - DNA, 460 bp, Arabidopsis thaliana
  Clone ID: LIB24-071-Q1-E1-B8
acgcgtccggatgacgatgatgaaaatcaggacaataaggagataaaagttaaactgaagaatgtttcatgggcaatcgctagcttatctttgaagcgacctaaagctccaggcgcaagtaatgtattagacgctagtgttgatcctgtgagtatcgatccaagtcagttccaaggatctctgcgcaaaggaaatggtgataaggactcaaattgctggaattctcctagtggcatggggtttatgatcaggggaaagacctacctaaaagataatgcaaaggtgatgggtgggcagccccttctaacacttatatcagtggattggttcaaagttgatagtgctgtagacaacatcgccctgcatccaaaatgtcctatccaattcggaacctgggaaaaagctccaattcatcctaagtcatcaatcctacaaggtacaagcaaagccctaactattg

SEQ ID NO: 7593 - DNA, 428 bp, Arabidopsis thaliana
  unsure at all n locations
  Clone ID: LIB24-071-Q1-E1-C10
ngcttcttatgcacgctcaacccccgggatccagattggcatcanagctgantggngaggacaccatggtagacttgttctcttcatgggaaacaagaatacttctccacntacatcaagttcaagctctgatactaccccctgctcacttaagactggatctgtctccagtacctgatacaattcctcctcgagcacaggtacaatctccacttgaagtgatgaacatccgccctancatggatgttgcggttttggatttctcttacaagtttggtgcaaacgtggtcantgccaaattacggatcccagcaaccttaaataagtttcttcaacctctacaattgacatctgannagttcttcccgcaatggganagcaatctcaggtccanccttgaaacttcaggaagtggttataggtgtaag

SEQ ID NO: 7594 - DNA, 426 bp, Arabidopsis thaliana
  unsure at all n locations
  Clone ID: LIB24-071-Q1-E1-C12
nnnnnnnnnnnnnnnnnnnnnnnnnnnnnnnnnnnnnnnnnnnnnnnnnnnnnnnnnnnnnnnnnnnnnnnnnnnnnnagcaatacttcanaagctggttttggccatggaacccaatgggtacaggaaagaaagaagaaaggaacaacatttggggagaatgaatggtggtggtggtgatgttgagactgatcttgatccatggactgcatgggcttacaagcctcgcactatctctcttctccttattggcgcttgttttctcatttgggctagtggagctcttgatcctgacagcactacatctgatgatcttgtcacttctgtcaaaaggggagtgtgggctatgatcgctgtctttcttgcttactctttgctccaaggccccttcaacggttctaancaggccccaatcctgcaatctgg

SEQ ID NO: 7595 - DNA, 423 bp, Arabidopsis thaliana
  Clone ID: LIB24-071-Q1-E1-C5
tcgagaacggcgaattctccgatggagcgcttcgtaattttcaggtgattcgtttggagaaagagttagtttcacaattggcgacgaggcttggtgaaatctccggtttggtggagactcggatcggtggtggaggcgttgttcttgatctcggagatttgaaatggttagtggaacatccggcggcaaacggtggagctgtggtggagatgaggaagcttctggagagatataaaggaaggttatgtttcattggtacagctacttgtgagacttatcttcgatgtcaagtttattatccatcaatggagaatgattgggatcttcaagctattccgatcgccgccaaatcttctcttccggcgatattcccaaggcttgggagcaataacaataacaacgctatgttattaagcaacaaca

SEQ ID NO: 7596 - DNA, 483 bp, Arabidopsis thaliana
  unsure at all n locations
  Clone ID: LIB24-071-Q1-E1-D10
acgcctgtccggtacngctccgaaaattcccnaggtcgacccacgcgtccgcggacgcgtgggcggacgcgtggggaagccatggataccgagtttctccgaaccctagatcgtcagattcttttgggtgtcttcgttgctttcgtcgccgttggtgctggtgctgcttattttcttacatcctccaagaaacgcagagtgtgtttggatccagagaatttcaaggagttcaagcttgttaagagacatcagcttagtcacaatgtggccaagttcgtttttgaactcccaacttctacttctgtgtttgggtcttcccattgggacaacacatcagttgcagggggaaaggatggtcaaggagaggatgttattaagccatacaccccgactacgttagactctgacgttggacgtttcgaacttgtcattaagatgtatccgcaaggacggatgtctcatcatttcaggggagatcgttgt

SEQ ID NO: 7597 - DNA, 425 bp, Arabidopsis thaliana
  unsure at all n locations
  Clone ID: LIB24-071-Q1-E1-D12
acgcgtccgggcgaatccttttttttctcttttcttcatttccttttgcttcatttcgaatcaaattcaattttatatgtgagattttcattcttattcatatgagtttttgttagatttcttccagttggtgaatcgtggtactcatttcttctcatgtgccatggatattgaaattacggtttttttttacgtctagagtcaattgggtttgtgatttattggggtttactcgaaattgccgttattgggtttcttaaagtcttcgtcttttgaatgttcttcatcagttcaaatttacgatttttgtgagggttttggatacaaatgttganttcnatgtggattgatcatatggattatgtaaaagtttanccctttcctcgaaaganttgatctttaangtgtagcaaatcctggtttgc

SEQ ID NO: 7598 - DNA, 495 bp, Arabidopsis thaliana
  unsure at all n locations
  Clone ID: LIB24-071-Q1-E1-D3
tccganaattccaggggtcgacccacgcgttcngattgnnaaccantctntttncaccatgaaaacaacataanacaagaatgggaaaccttcaaaaacaaagaaagttccaaaagctcatgggagacaccaccgaacatatcaaacgattcatcaagcaaccgagaaaggagaagcaacaaggcaacaacagctaccaaacaataggtacgcactcacagttgacgaggtgatcgagcaacacattggagcacttgggtttgctcagatcttgcatgctctcttggtctctatcgcttggatcttcgatgctcagaccactcttatatccattttctccgatgctcaacccgcggcgaggcttcttgcaaccggtgccatcgtggagggtgcctccttgtgtggattggccaatggagaatgggaatggattggaccaaagagtgacactgttgtttctgagtggnatctcatatgtcaacataaatttcntgt

SEQ ID NO: 7599 - DNA, 504 bp, Arabidopsis thaliana
  unsure at all n locations
  Clone ID: LIB24-071-Q1-E1-D4
ctgttagccngccgtagccgtccaaaattcacgggtcgacccacgcgtccgttcacgactgatgtttttcttctccgacgctacaatcggtgtctgtttccgaagttgttcgttccattagagcttcagatttcgtcgtttggtaatttcaagttagagctacttaatcttttgatctgtcaaaccaatttctcagataaattcactctagggtttgtgaagaacgatgatatgatcacatttcacaatgcaaacggtgctaagcttatagtaaattaatggtggcttgatgcttaattgaaaagtcggaaacttttttattcttctttattgtttgagattcatttcaatggttgacatgtatgccaagtgtttgttaaaatgtctaaaagaaaacttcaagttgatcacttttggtaaaattgggtaacctggttcccgtagaatgcaaaaaccttaatgaaaatgtgattgacaactctgaatccttgaaaatgtcaccgg

SEQ ID NO: 7600 - DNA, 493 bp, Arabidopsis thaliana
  unsure at all n locations
  Clone ID: LIB24-071-Q1-E1-D6
cctgcnggtaccggtccagaattcccgggtcgacccacgcgtccgagaagatctcgttccctctaagccatgaatcgtcgtaatcgtggctcttcttcttcttcttctagggtttcgaatacttatgggaaccgccagttctctgataacccgaggactggatccggcggcggagttaatgaatcctttcagagaagatccgatgcaccgcacaaacgaaacaatgaaaaagacgaatcaaaacataaagacgaagatcctgctgacgtttcattgattgtaggaacttgttcttctatgtgcccagagagggaaagagtcacaagagaacgcctgcgtgatcttgcagtgtttgagaggctttatggaaaaccctcaaaatcatccacaagagatagctgtcaaaaagttttgcagaancctttcancggcggatgttcaagcatccggatgtaagacgctccaagttttagaagaaacctgagataccttc

SEQ ID NO: 7601 - DNA, 421 bp, Arabidopsis thaliana
  Clone ID: LIB24-071-Q1-E1-D7
actaaattaaaaaaaaatcttgagagattcttggaacacaagaaaaacatgaaacctagaatgtgtttaatcttgtttattgctttaatgagagtaatgtcgattgtttctgctcagtcgagttgcacaaatgttctaatcagcatggcgccgtgtctcagcttcatcactcaaaacacttctctcccgtctcaacaatgttgtaaccagttggctcatgttgtccggtattcttctgagtgtttgtgtcaggttctcgatggtgggaggttctcaagcttgggatcaatgttaatgagacacaagctcttgctttgcctaaagcttgtcatgttgaaactcctcctgctagtcgctgccatagtggttcttcggttaattcacattcagaacatggaaatggatcaaaaacagtcccaag

SEQ ID NO: 7602 - DNA, 510 bp, Arabidopsis thaliana
  unsure at all n locations
  Clone ID: LIB24-071-Q1-E1-D8
aaactgtcacgcctgcaggtancggtccngaattcccgggtcgacccacgcgtccgcttagaagtttccccatgaaatccgagaagattcaaatgtaaattcagcctccgattcatatattttgctcaccggaaacttcagatcgagctactgcaatttgcggatcgtgtttttttttctttcaattcacggtgtatttatctcgggagaagaagaatggatactttcacggcggaggatctgtcgacgatcggcggaatagcgacagtatcgctccttcactcgtttattccgacgcattggctacctttctccatcgtcggacgtgcgcagaaatggacgctttcgagaacactcctcgtcactgcatttggagcagtcctacatgttatatccacttctctccttgggataacagcaatcacaatggcgaataccatccgctnggtgaagaaacngttcaanaaacttgcttcccttttggcctggaattccncgggtggaaagcta

SEQ ID NO: 7603 - DNA, 487 bp, Arabidopsis thaliana
  unsure at all n locations
  Clone ID: LIB24-071-Q1-E1-D9
aatgttacgcctgccggtaccgctccgaaattcccnggtcgacccacgcgtccgcccacgcgtccgcggacgcgtgggtgtcggtgtgttcttcgtcttcttcttctcagaaaacatggattgttaacgggatcttggccggaacagcgattgcagccgcaatcggcgcacgtgcttatctgggtcgatccaagaaattccggagccgggtcgtcggaatcattcccgcacgttacgcttcctctcgattcgagggtaagcctctcgtgcaaatcctcggcaaacccatgatccagagaacttgggagaggtcgaagttagctactacgcttgatcatattgttgtagccactgatgatgaaagaatcgcggagtgttgtcgtggatttggtgccgatgttatcatgacttcagaagtcttgcagaaatggcactgagaagtgcaacgaagcgctagaaaagctggagaaagaagtatgatgtcctt

SEQ ID NO: 7604 - DNA, 410 bp, Arabidopsis thaliana
  unsure at all n locations
  Clone ID: LIB24-071-Q1-E1-B3
ttgagggtgacaacatgattganaggtccaccaaccttgactggtacaagggaccaactctccttgaggctcttgaccagatcaacgagcccaagaggccgtcagacaagccccttcgtctcccacttcaggatgtctacaagattggtggtattggaacggtgccagtgggacgtgttgagactggtatgatcaancctggtatggttgtgacctttgctcccacaggattgaccactgaaggtcaantctgttganatgcaccaacgaantccctccttgaaggcacttccaaggtganaacgnttggggttcaanngttaaaaaaatnttgcccttaaagggntctnaaaaaaaaggggtactttccccctccaaacnccaangggatgaccctgccaaaggggtgc

SEQ ID NO: 7605 - DNA, 418 bp, Arabidopsis thaliana
  unsure at all n locations
  Clone ID: LIB24-069-Q1-E1-B12
attgctttttctctcactctctgacctgaaatctcctactgagatttttgaagtgtattcaacaatggcggatccaccacatttctctctgtttcagcaaaaatttcgtaccggagacaaaccatttctcactcttgatgctgacttcttaatgaatcacacgaaagtgttactaaaatcggatgcttcagacaaagtttggaaagtgaaactggacggcggtaggctctccgaaggctgggaagagttcgcctgcgaccagaaattcagagacggtgacgttttggttttcaaacatcatggagacgaggtctttcatgtagctgtggtgtccccatctgtttccggcgacatacgtaacgcatcttctagccaaagttattacgggaagatactanattgatgttgaccaatgntg

SEQ ID NO: 7606 - DNA, 449 bp, Arabidopsis thaliana
  unsure at all n locations
  Clone ID: LIB24-069-Q1-E1-B3
acgcgtccggaagaatctaccaggtgatttgatggatgagaaccgaatgggaagtcagtttcaagagcctgagcagccaatgcagagccttgacacgattatgcagataatatcggaggctacgattccgactgttcgtaatcgttgcctcgatgatttcatggcggataatcttgatctagacgatgacatggatgactttgattccgaatctgagattgatgttgacagtagtggagagatagtttatgctctctgagattcctgaggacaaagtctgttttgtccgtactgttgagacacaccactggagttttgtcttagctccacgcactccatcgttcatttttggatcgtttgttgttttttactctacaagctttggattcacatacatatatatgtantgtaatgtaatatgttataaaatccaagtaattcccccttgg

SEQ ID NO: 7607 - DNA, 444 bp, Arabidopsis thaliana
  unsure at all n locations
  Clone ID: LIB24-069-Q1-E1-B5
acgcgtccgnnnnnnnnnnnnnnnnnnnnnnnnnnnnnnnnnnnnnnnnnnnnnnnnnnnnnnnnnnnnnnnnnnnnnnnnnnnnnnnnnnnnnnnngtgtccattttattaggcatgttggtgatctttgtttcaccaatggtgttcgcagatgatttgacaccaatcccagagggcaaaccccaagtggtgcagtggttcaatacccacgttggtccattggctcaacgtaaaggcttagatcctgctctcgtagctgctgaggctgctccacgtatcatcaacgtgaatccaaagggaggtgaattcaaaacactaacagacgcaataaagagcgttcccgcagggaacacaaagcgggtgatcataaagatggctcatggtgagtacaagagagaaggtcactatcgacaggaacaaanccttcaatacattgaagggga

SEQ ID NO: 7608 - DNA, 432 bp, Arabidopsis thaliana
  unsure at all n locations
  Clone ID: LIB24-069-Q1-E1-C1
acgcgtccgccctaattattttacttcgatatctctccacttttcccgctcaatcatctgatctttccctctctcagcaatgcatgatcttcgattttctatcagtgttcaaagctgaaaaaaatcgaactgggtctgttgatttcttcaggtctaaaatcagattagattagagaagaagaagaagaatgctggaagctgtagatagctcaggagtggtgaatggaggattcccgcagattcagagcttttacggcgattgcagtagtgaagaagagttatcggtattgccacgtcatacaaaagtggtggtcaccggaaacaaccggacgaaatcggtgcttgttggtcttcaaggtgttgtcaaaaaagctgtcggtctcggtggttggcattggctggttttgacaaatggaatanaagttaaattgc

SEQ ID NO: 7609 - DNA, 413 bp, Arabidopsis thaliana
  unsure at all n locations
  Clone ID: LIB24-069-Q1-E1-C11
tggactggagacatggcaccatcgagtttatcatctgatccaaggagggttaagttcaatatactgtctggaacttcaatgtcatgtcctcatgtaagtggtgtagctgctttgatcaaatcaaggcatccagattggagtcctgcagcaatcaaatcagctctcatgacaactgcttatgttcatgacaacatgtttaagcctcttacggatgcatcaggagcagctccttcatcgccttatgatcacggtgcaggacatatagatcctttaagagctacagatcctggtttggtctacgacattggacctcaagagtattttgaattcctctgcactcaagatttaagtccatcacagcttaaggtattcacanaacattcanacagaacctgcaaacacactcctgccaa

SEQ ID NO: 7610 - DNA, 397 bp, Arabidopsis thaliana
  unsure at all n locations
  Clone ID: LIB24-069-Q1-E1-C12
agagctatcacactgattaacactgtggctctcgcatctttccagattagtgaagaagaatggactgatctttttgaggagcatcaagactggcttactcaagataatcttcataagctctcggatcatctcattgagtgtgattatgtaagtgaaccaacggtctcaaacctctcaaagtcattgaaatctcgatgtgggtcttcttcttcttcagcacaaccattgttagccgtagatgtaacaactcaaagtcagggcgaaaaaccggaggaagatttgcttctgcaagatacaacaatggaangatgataatagtgctaatggtgaagcttgggaatttacagagactgaactcgaaacgttgggtctaaaagaactcgagattgatgatnga

SEQ ID NO: 7611 - DNA, 475 bp, Arabidopsis thaliana
  unsure at all n locations
  Clone ID: LIB24-069-Q1-E1-C3
accggtccgaaaattcccgggncgacccacgcgtccgtgcangtacaatgaagtgatacaaagctggcaactttgtttcaattgggaacaagggtttgactttcaggtccacacggttcgcactcggatactaacagacatggcttgggtcaccatgaaggcatacctgaacgtggatggtggtccattcctaataaccaatgtgttcgagttccacaatggaaggtggcacatggttcatcatcacagctcagtgatgctcatcgatgatcaacaagttgttgttcattgatgaatgatgataatatcttttagttttggtttccttctcttcttttattttcatggggacaacaaataaagaanaagaaagaaactgcatattgganaaattggcttattanatttttagtggttattatttaagttttaactacatgtactgaatgttccaattttttttttttcccanttg

SEQ ID NO: 7612 - DNA, 438 bp, Arabidopsis thaliana
  unsure at all n locations
  Clone ID: LIB24-069-Q1-E1-C5
acgcgtccgtgtgaattggagtttaggtttctcaatcgtaaggtttctgcttctccgtatcgttccttggttgttcgagctacctcgaagaagagtaacgacgattcttcttctcctggagatgcttctcaggaaaacaaaccttctaacggcaacaagtccggcgattccgcggctccgaaatcgttcggtttaaacacggattggagagagttcagagcgaacttgtttatgaaagagcaggaagaaaaggcggaagctgagggtcatgaatcggaacctataggtttgaaatgggcacatccgattccgtttcctgagactggttgtgttctagttgctacagagaagctaagatggttataagaacatttgcgaagaactgttgtgcttcctcttagaacangtactanacacccacaaagaaagggcntttgg

SEQ ID NO: 7613 - DNA, 494 bp, Arabidopsis thaliana
  unsure at all n locations
  Clone ID: LIB24-069-Q1-E1-D1
ntggtacgcctgcaggtaccgggtccgggaattcccgggtcgacccacgcgtccgctttgattctggaatctaggtttaaagtttagacctttgagatcacactatatcaaaaatggagctcaatttctcttcaatggctataacacaccccaaaatcccttctttcggttttacacccaccggaatattcctaaacccatcaaaatcagtgtgtttggcttcacatcatcggcttccgagagtttcatgctctgtttctactactactgattctcccaagctagtgacttcaacaaaggtgacggcaatggatggagtgagctctagagacttggagatgtcgaatttaacggcgttatcgcctttggatggacgttattggagtaaagttaaggacttggcttcttctttgagcgaagtttggattgatctatttccgagtttttgtcgagatnaaatggcttcctaagctttcnaataatcctgaagtcac

SEQ ID NO: 7614 - DNA, 415 bp, Arabidopsis thaliana
  Clone ID: LIB24-069-Q1-E1-D11
aacaagtagactgaagaagccgattgttcttctcactatcgcactattgagctctgtcttcttcttcgcattcttcttcctaaacaaatctgacgtatcatctacctctgctttacggaaccgagactccatggctcgaaccttcatcttatggcttcacgggctaggtgattccggacctgccaacgaacccatcaaaacacttttcaggtcccaggagtttagaaacactaagtggctcttcccttctgctccaccaaatccagtctcttgcaattatggtgcagtgatgccttcttggtttgacatccctgagcttcctcttactgcgggatctccgaaagatgaaagcagtttgcttaaagcagttaagaacgttcatgccattataagataaggagattgcaaggaggga

SEQ ID NO: 7615 - DNA, 419 bp, Arabidopsis thaliana
  unsure at all n locations
  Clone ID: LIB24-069-Q1-E1-D12
acgcgtccgactgattcttcattgacggtaggagtcaccacttttggcggcgattccttgtnctctantntttttgcacaagcaacatttagcttctgcaaacnccagttcatctctcaaccctcatatctccgtgttttctcgctctagtaccgcgagctcngannaaccangaagcaatccgttaatctagaagcggtgttgagaagatgacgattacatcaantatctctgtacanaacnataacctcgttgttcaagggaagactatccttaccaaaatccctganaacattatcctaactccggttaccggtaatggattcgnttccggttcatttataggcgcnacgtttgaacaaagcaaagagtcntcangtgttccccancggtgtantgganggtcctccgttcaagtt

SEQ ID NO: 7616 - DNA, 511 bp, Arabidopsis thaliana
  unsure at all n locations
  Clone ID: LIB24-069-Q1-E1-D3
tacggggccngaattccgggaccaaccaacgcgtccgcgggaccccttgggcggacgcntngggaaaagaaaganaaatcaaatcaaccaaagtccatccggngccgattacaagangaaagaaagaaaancatggngggaaagaaagaagaaaaagcgtgaatgaaagcaagttgatgggtggcgatttgatgaaagcnaaatgtagtaaacgcgctcttcaatggacgctcgtgtatctcaaagataagcctccgccgattccggacatcatcctcttcactgctcaaacctcatcttggatctcaagctgcgtctaatgcttcctcttatgggcgccgctccgatttgaagcttataaaactcattgcaaagaagaatcataaagaacgctgggattgaatccgtccttgatggaaaggaaccaaaaatttggtgctgaagactggggggttactccaaagaaaagggtgtttgggaattttgggaatccctaaaagaaancgatatg

SEQ ID NO: 7617 - DNA, 439 bp, Arabidopsis thaliana
  unsure at all n locations
  Clone ID: LIB24-069-Q1-E1-D5
acgcgtccgatacataccactcaccgtaccaaaaagattagaccaacanaaaaaaaaaaanaaaggaccagctcagatgagtctggagtttccaagtttaaaacctctctacctcgatttgagcaaatcctgatttactctcatcctcatcatctctcatcatcgagattcatagtctcttttgccgcttggattcttccaaggttantgagctgctatggcaactcatcagcaaangcaacctccttccgattttcccgctcttgccgatgaaaattcccanattccagaggctactaagcctgctaatgaggttcagcaagctaccatagctcaggatcctccaacatctgtgtttaanaattctgaaccaatacgggaggattaaattcagaacgctatcaaattcctttcgcaaccganggtaaaagcctcctgt

SEQ ID NO: 7618 - DNA, 419 bp, Arabidopsis thaliana
  unsure at all n locations
  Clone ID: LIB24-069-Q1-E1-E1
taataacatcccttgtgatcaaacaagtaaaccattcaaaagatgaaaggaagaattttgattttgagtttgctcataatgagtctggtcatggcacaagttcaagtagaagcaaagatctgctgcccttccaaccaagctagaaatggctatagtgtatgccgtataaggttttccaagggaaggtgtatgcaagtgagtggatgccaaaactctgatacatgccctcgaggttgggtaaacgccattctcgaaaactcagctgatgctaccaatgagcactgcaagttagggtgtgaaacttctgtgtgtgggtgccatgaacactctccaagaactctgatgcaagtgaaattgtgaatggagcgtcggaacaatgtgccaagggatgttcnaatttccgtaccaaagagctaagt

SEQ ID NO: 7619 - DNA, 445 bp, Arabidopsis thaliana
  unsure at all n locations
  Clone ID: LIB24-069-Q1-E1-A6
tttattgtcccgacacacgaaaatggcgtctcttagccaaatcaccctgccacgcgcgccgtcgtcggagattggcctcttacgccgtcgattggagcggccgatcatcagaacccggatcggattcaacggccggattgcgagcgtattgactaacgcaggggaccaagcggtgtcggtaaaagcgagtgtgagccagaaggtgattgaagaggaagccaaagttattgtgggtacctacgcgcgagctccagtggttctctcgagtgggaaaggttgtaaattgttcgaccctgaaggaaaagagtatctggattgtgcatctggaatcgctgtgaatgctcttgggtcatggagatcctgattggcttcgagctgtcactgagcaagctggtgttcctgcccaatgtcagcaatgttaantacacgattccctcaanataga

SEQ ID NO: 7620 - DNA, 412 bp, Arabidopsis thaliana
  unsure at all n locations
  Clone ID: LIB24-067-Q1-E1-F4
acgcgtccgctcatgcctcctaacatcatccttgttcacggtgaagctaacgagatgatgaggctcaaacagaagctcttaacagagtttcctgatggaaacacaaagatcatgaccccgaagaactgtgagtcagtggaaatgtattttaattctgagaaattggcgaaaaccattgggagattggcggaaaagacacctgatgttggcgatacagtaagcgggattctggtgaagaaagggttcacttatcagataatggcacctgacgaactccatgttttctcacagctatcaacagcaactgtaactcagcgaattacaatcccgtttgtaggagcttttggtgtgataaaacatcgcctggagaagattttcgagagcgtggaattttcaacaagatgangaatcc

SEQ ID NO: 7621 - DNA, 242 bp, Arabidopsis thaliana
  unsure at all n locations
  Clone ID: LIB24-067-Q1-E1-F9
gaaacactcacttacgctatcggttgagaagacttacttcaagtcccactcttttttgtacgtataaaaacactcttattaactccatatcatccctttttttgttggttcgtcttttaggaagttctttttttttagctgttgagtcatttgtttgtactattcgcacatttttgtgttcttgaaggtgaagaactctattgaggttctttggtaaaaaaagnngagannaaaanaaaagg

SEQ ID NO: 7622 - DNA, 412 bp, Arabidopsis thaliana
  unsure at all n locations
  Clone ID: LIB24-067-Q1-E1-G10
acgcgtgggcggacgcgtgggcagagtcaccggtaaactcatctccggcgacataaaaacacaaaagttcatatatttagattctggtgactctctgctctaatgggtcaatctcaagtttctctctttcttcttctaattcttgttttcatctatggagtttcctccaccactttcaccatcgttaaccagtgtagctacaccgtctggcctggacttctctccggcgccggaacctctcctttacctanaaccggattctccttaaaccctaccgagacacgagttatcccgatccccgcagcttggtccggtcgtatttggggtcgtactctctgcacacaagacgcaaccaccggaaagattcacttgcatcagcgggggactgtgggttcttccanccgtagaatgc

SEQ ID NO: 7623 - DNA, 416 bp, Arabidopsis thaliana
  unsure at all n locations
  Clone ID: LIB24-067-Q1-E1-G12
aactgttacaaactgaaccaagacgcacaagcgagtctcgtgggtcatgctcgaatcaaaagtcagttaatggctaatgcttctgcaaaacgttattatcggggatttgttccggagcctctggttggtatctgttacccggccactgaaataccgagttggttctgccaccaaagactaggacgttcactagaaatcccattgcctccgcactggtgtgatattaactttgttggacttgcgttatctgtagttgtctcattcaaggactatgaagacagtgcgaaacgtttctcggtaaagtgttgtggcaacttcgaagaacaaagacagttccttcacgagatttgatttcactctcgcangctggaacgaaccatgtggattccttagccatgantcaaggaaagctcact

SEQ ID NO: 7624 - DNA, 452 bp, Arabidopsis thaliana
  unsure at all n locations
  Clone ID: LIB24-067-Q1-E1-G2
gnccgtccaaaattaacgggtcgacncacgcgtccggtgaanacgttgtctgttggtggagcaagttctaccacaccgtcaaaatccacgaaatctgctactaccaattccagtgtacaatctcagtcacatagggcatctcttttgganactatcttacaaggggagcttccatgcgaccttgncaagtcnaattctacatataatgttctggcactgttacgtgtattanagggtttaaatcagctttgccctcgtttaagagcccaaactctttccgatcgttttgcaaagggtaaaattacaagtctaagatgatctgagtacaactgctgctaaggttcctcttgatgaatttgtcaatagcaaacttacacccaaattggctcgacaaatccagggatgcgcttgctttgtgcagtgggaagtcntccctcttggtgcaacanttg

SEQ ID NO: 7625 - DNA, 460 bp, Arabidopsis thaliana
  unsure at all n locations
  Clone ID: LIB24-067-Q1-E1-G3
ggtccaaaaattcncgggtcnacccacgcgtccgcatctgctcagaagtgggattatatcggttgtgtaagggctcatacacatgatatcagggctctaactgttgcagtgccaataagttgggaaggttccattccagataggaatgcaaaagtaacaagtcctaaacagcgcaggaaggagccggctggtttcagttaccataaatgggcacatttgggggttccgatgctcatttcagctggtgatgatgccaagctttatgcatactcggttcaagagtttactaagttccctccacatgatatatgtcctgcgcctcaaaaaantgcccatgcagntggtacataatacatngttcaatcaaacttccccttcccttggttcaggatnccngtccctttaaaantncctntcgnanttcacataanncaatgattccnagtggggcgttttcccc

SEQ ID NO: 7626 - DNA, 409 bp, Arabidopsis thaliana
  unsure at all n locations
  Clone ID: LIB24-067-Q1-E1-G6
acgcgtgggcggacgcgtgggcggacgcgtgggtgttgaccatacgtgtgggcatcccaatggtgcacacactccttcccctacaactaatcatttaatgggttcagtccctaaagttggaggcttcccaccattaggtgctcacggtccatttcagccaacaccagctcctcttacaacatctcttgcaggatggatgcctaatccatcggtacaacaccctactgtttccgctgggcctatcggcttaggtgcccccaacagtgctgtgtctatgttaaagcgtgagcgtcccaggagtcctccaactaatagcctatcaatggattatcaagacggcagattctgaaagtgtgttgaagagacccagaccttttggtaattcanatggggttaataatcctccaat

SEQ ID NO: 7627 - DNA, 414 bp, Arabidopsis thaliana
  unsure at all n locations
  Clone ID: LIB24-067-Q1-E1-H2
ggatgcagccaacacaatatatgcatggtggcaataccaattctgtgatgtgtacattgaagcaattaagccttattttgctggtgacaacccaacgtttgcttcagagagggctcatgcacaacatgctctctggataagtctggagactggtttgagactgcttcacccatttatgccttttgttactgaagagctatggcaacgacttcccgcacccaaagacacagaaagaaaggcttctatcatgatatgtgactacccatctgccataganaactggtcaaatgagaaagtggagagcgaaatggacaccgttctggcaactgtgaaatgcatgagagcactcanggcaaggttgctggagaaacagaaaaacgaaangttacctgcttttgctccgtgtnaaaaaca

SEQ ID NO: 7628 - DNA, 405 bp, Arabidopsis thaliana
  unsure at all n locations
  Clone ID: LIB24-067-Q1-E1-H5
acgcgtccgaacgatccatagatctcaagtctctctctcttagtgaataaattagggttcgttgattctctgttcttaagctcagtaatcgaggagaagaagaaaagggaagatcgggaattgggaaactgagaagtcaaaaaggcaaatgcgagtggaggagattgagttttagaattccaatgtcttgggctgctcctgatgatatcttcttctccacttctcttgctgcntacctagacaagaaacttcttgtgttgcttcgtgatggtaggaaactgatgggtctacttcggtcctttgatcaatttgctaatgcgttttagnanaagcttatngaaagagtcattgtgggtggatntcctacngtgnanantcccttaggtctatacattaanccgttgg

SEQ ID NO: 7629 - DNA, 409 bp, Arabidopsis thaliana
  Clone ID: LIB24-067-Q1-E1-H7
acgcgtccgctgatatttattttcttaccttaaatacgacggtgcttcactgagtccgactcagttaactcgttcctctctctgtgtgtggttttggtagacgacgacgacgataatggaggagctagatcgttcacgtgcttttgccagagacgtcaaacgtatcgtcgttaaggttgggacagcagttgttactggaaaaggtggaagattggctcttggtcgtttaggagcactgtgtgaacagcttgcggaattaaactcggatggatttgaggtgatattggtgtcatctggtgcggttggtcttggcaggcaaaggcttcgttatcgacaattagtcaatagcagctttgcggatcttcagaagcctcagactgaacttgatgggaaggcttgtgctggtgtt

SEQ ID NO: 7630 - DNA, 416 bp, Arabidopsis thaliana
  Clone ID: LIB24-067-Q1-E1-H9
atgatggtcagggacctgaacattcaagtgcgaggttggaacgttaccttcagatgagtgatgataatccctatgtcataccagacatggaaccaacaatgcgaaagcaaattcaagaatgtaattggcagattgtcaatgccacaactcccgccaactatttccatgttctgcggcgacagatacacagagacttccgtaagcctctgattgtaatggcaccaaagaacttgctccgtcacaaggactgcaaatcaaatctctcagagtttgatgatgtccaaggccacccaggttttgacaagcaaggaactagatttaagcgattaatcaaggatcaagaatgatcactctgatcttgaagaaggcatcagaagattggtactttgctccggaaaggtctattatgagcttga

SEQ ID NO: 7631 - DNA, 450 bp, Arabidopsis thaliana
  unsure at all n locations
  Clone ID: LIB24-069-Q1-E1-A1
acgcgtccgnnnnnnnnnnnnnnnnnnnnnnnnnnnnnnnnnnnnnnnnnnnnnnnnnnnnnncgggatttggagtttgtgtacaaaaagactgttgttggaatgtgcaaatgagacaatattggaaatgttatttgcagcagaaggaggaggattcttctcttcatcagcttctggttatagcaatggtttagctcttcttctattaggtcaaaagactgaacaaaaaccaatcaaagtttcatcacaatggaaccattatcatttagttcttgaagattctgataccgggtttcggttagattcgtctaagaattggctctcttctgcttgcacttctctcatatgttttgggtcgaaaatccgaaagactggaaagcgacgggaagaaagatgnngcaccgagtgtggangactataataactgtgaagtcactaanaaggtttcaa

SEQ ID NO: 7632 - DNA, 416 bp, Arabidopsis thaliana
  Clone ID: LIB24-069-Q1-E1-A10
acggtcgagttttccttcagataccggcgagaaccgccgcaattctcttggacgcagcggcgaggattcagaagcagcagtcagagaaggctaagaccaataaagctcggaccagaggaaacgggtttggtatgttcgggtctgtcttgaagctgctgacataccgtataacaaaaccgcgtttggataacgctgatggaaacgcagtttcgttggaacgcgggtcggaaccgacgagtagtagccggagagagcgtatcgtggagattagtgataaatgcttttgtgaaagcccttttcattttgttctccaaacaactccttcttcctccggtcaccaagactcctcactttacatcgacggccacttctccggcgcgaccaatactgaggtttgtctcaatccccgtttttta

SEQ ID NO: 7633 - DNA, 444 bp, Arabidopsis thaliana
  unsure at all n locations
  Clone ID: LIB24-069-Q1-E1-A2
attcccggancgacccacgcgtccgcnttcgcgtcttttgcttcctccctctttttcgccaatgttttctttagatctagctaatatggcgacgattttgttctttctcgcttctaatcaccgtagagatccttccgatctgcaaatccgatccgaattctcaacgaanttgtagatctgatctgtgattccatcgttgacgacggatcttcgcttacatcgtttgatctgtcgcagatctgccgttttctatagatctagatctgggatcgtccttcgcggcttcttcacatgcaagattctgtgaattgttcangttgaggcatcatttctgggattacnacgacgacgaanctgttgcagacngatgtgtgtgtgtnggagtgaanntgagantaggggtgtanaagatgtttttgtggatagccaaaaacttcctgaant

SEQ ID NO: 7634 - DNA, 145 bp, Arabidopsis thaliana
  unsure at all n locations
  Clone ID: LIB24-069-Q1-E1-A3
tttttttttttttgggataggacataataattattttaacagaaaagagcatttacactttggggctctatgtnnnnnnnnnnnnnnnnnnnnnnnnnnnnnnnnnnnnnnnnnnnnnnnnnnnnnnnnnnnnnnnnnnnnnngg

SEQ ID NO: 7635 - DNA, 458 bp, Arabidopsis thaliana
  unsure at all n locations
  Clone ID: LIB24-069-Q1-E1-A5
gtgccaaattcccgggaacatcanggtccagccacgngtccgcacggagtcacggttcctcgttcgtcctctcccgtcgtctctccgcactaaattgatgggcacatcatctgggtccaatcttcctcaccaagatgctacctccacgtcagcaactacaaacatctctttcgcttgtatcttcagatccccacttgtcacggtctaattctggcattgtgcgtgaatcaccagctgaaagtgctagctctcaagaaacttggccaacctcaaaatctattatgggaaggaagacagatagcggaaagacagggcctgactctcatgatcaacatgtgatccgccatgtttccattgctgataaggtatcgctacgggacatagctaagagagagacttgacatagtcgctgagaaaatgcatcgattaccangaaagaatatcccnaaggagttaaa

SEQ ID NO: 7636 - DNA, 409 bp, Arabidopsis thaliana
  unsure at all n locations
  Clone ID: LIB24-067-Q1-E1-F1
taanaaatctgattcttctttccttgtaaataaagatatggatctgttactaaaacaaagtcgctttattcagatctnnnnnnnnnnnnnnnnnnnnnnnnnnnnnnnnntctctgttaanatgtcttcaacaacaacagattctacagaattgnaaaatctgatcaaactgtttcaaaattgccaaactcatcctcgtcaacattttcctgcaaaatcttcagctgtattaantttgtctataccaagaacantagagaagacaangaacgaagctacgcgtaatcttaaccaagcgatctactactctctcttctcatcctggggaagtagcattgcctggaggaaaaagagaccntgangataaagatgatntagctactgcgttgagagaagctcgtnaagaaat

SEQ ID NO: 7637 - DNA, 366 bp, Arabidopsis thaliana
  unsure at all n locations
  Clone ID: LIB24-067-Q1-E1-A12
tcctcatcttccatcgattaagaagaagaattcgtctcttcacagtttcaatgaagatctcaggagaagcaacgctgtctcattctctctgaggaaggactctcgttcttctgggaaggtttttgctcggaagccatcgtatgattctgattcgtcttccttagctaccactgcatctgagaagctccgtggccatcagagtgatagctcttcatctgcctctgatcaagtanaatctcgggatactgtctctgacganactcaggtgctcggcaatgtanacgttcaganaactgangaagcccaggaaanagnagacacttggatnaangcttctgcactctnaacatctggaagcatangtta

SEQ ID NO: 7638 - DNA, 415 bp, Arabidopsis thaliana
  unsure at all n locations
  Clone ID: LIB24-067-Q1-E1-A9
gggcagagaagtgtctcacgacgaggttaaagcggaagggaagatagagaccgcgatgaaggaggaaggcgttgaagtcaagtatttctggggaagcactctctatcatttggatgatttgcccttcaaaattgaagacttgccgtcaaattacggagctttcaaggataaagtccagaaattggagattaggaagactatcgcagcgcttgatcaattgaaaagcttgccctctcgaggagacgttgagcttggcgatattccttctctcctggatcttggcattagccccactcctaggactagccaggagggggaaacccgacaatggttggaggagaaacagaggcgttgactangactaanagagctttgccgcggattgtcaagctccgggtttaagcaagggnaaacc

SEQ ID NO: 7639 - DNA, 417 bp, Arabidopsis thaliana
  unsure at all n locations
  Clone ID: LIB24-067-Q1-E1-B12
gggcaattttctcgagaaaaagaaaatgtgattatccattcgattttttcgcagaagaagacgaaagagagaagaagagaaagagatttgaaatcatggcgaatgtagtgggacagctaaaacgaggaatctcgagacaattctcaactggatcgcttcgtcgtacgcttangtcgtcaattcacgcgtcaagcttcacatgatcctcgccggaacaatatgcgatttagttttggtcgacaatcgtctttagatcccgattcgtcgngagtcctgatggttctaacggtccgcagcttgctgtaccgggataatctcgacgctactatgcagcttctatttgtggcttgtncaggtgatgtnggaaggtgttnaggatctgntttgatgaaggtnntggangttaaagaggtatcc

SEQ ID NO: 7640 - DNA, 419 bp, Arabidopsis thaliana
  unsure at all n locations
  Clone ID: LIB24-067-Q1-E1-B3
ctaantctctctccttgggaagaagacgacgagcttaatacattcgacagtggagaatatcagattctttttggcgagggttggttgattccttcttattcatcagattaaggatcgtttccggtggctnnnnnnnnnnnnnnnnnnnnnnnnnnnnnnnnnnnnnntaaaaatgtcagacctagatcggcaaatagggcagcttaagcgatgcgaaccattgagcgaatcggaggtgaaggctctttgcctcaaagccatggaaattcttgttgaagagagtaatgttcagagagttgatgcccctgtcactttatgtggtgacatccatgggcaagttctatgatatgatggagcttttcaaaagttgggggtgattgtcctaanaccaactaatttgtttaatgggagatttgttn

SEQ ID NO: 7641 - DNA, 400 bp, Arabidopsis thaliana
  unsure at all n locations
  Clone ID: LIB24-067-Q1-E1-C10
gttatttctctctctctctccttgtagatggaacttaagggcgttacttgtttgcttctttctttggttttgcttaattcgtgtgtggaatgtgttttgggggatggatctgtggtgggtcctgcgaggtttagagacgatgattgtaggtggggccggaggaggtttggggcacggtggtggtgttggtggagggcatggaggaggcgtcggnattgggattggaattggaataggtgttggggtaggtggaggctctggtcaaggttccggcancggaagcggtantggtggcggcggcggtcgccattaatcaaagctncttattaccaaatcctcaanttnaatngtctttgacagtactacttcttggcattctatttctcgtgtattgttttca

SEQ ID NO: 7642 - DNA, 425 bp, Arabidopsis thaliana
  unsure at all n locations
  Clone ID: LIB24-067-Q1-E1-C11
acgcgtgggcggacgcttgggcggacgcntgggtggctctgagctactctttantgcttangccttagtgtgtgtgtgtgaatcttctcaacgaaagccaagttcttttctttgttggtgtttctgggtttattgcgacaatgggagctgancattttatgcctgangaagttcaatagaggtttctttgtgtgtttatgngtgatnctctcgcgatcttgcgcatcagcganctatgtgntcntcaaggcanangtttgatgtgaaagaagcatttgaatagggctcaacaaacntcctgttaacacnantcacgaagtccatgatgganatataagcgaccgtattcctanttcaagagcagcnagcttttgaccaacccttcntcaanagaccangannattcagatgaagcctaagttacc

SEQ ID NO: 7643 - DNA, 477 bp, Arabidopsis thaliana
  unsure at all n locations
  Clone ID: LIB24-067-Q1-E1-C4
aactgtttacgcctgcccgtaccgggtccgaaaattcacgggtcnacccacgcgtccgaaaaaaagagacaaagaaaaagtaaagagaagtgcgctctctcttactctcatcgattttacaaaatatcagccatctccaaattacagagttctttctcaaacccaggttatcattttccaaagtttgaangtgtgttcctgtccctgcanagatggcttggtacttatnaatgtgtttatactaatcactaaactcngggattttggctgtataatcaanaatttcatttantaacattgtttggccttgaagggggtgatgataaaccaaagctcaaaacgggtgcactcngttgtattgtggcctcaaaggcactggttacaacaaaatcttcaacccacancgggaagggatattccncaatcaagtcaagctgaaaccttgcaatggngggcaaaatttcagcntctcacccg

SEQ ID NO: 7644 - DNA, 409 bp, Arabidopsis thaliana
  unsure at all n locations
  Clone ID: LIB24-067-Q1-E1-C6
ttttcatgatcccgaggacatcttagaccccaaatgttcttcgtcgatgttctttggaaactggttcctctatacttgttcggatcagaaacaaagtctctctcagcaacagagtccattttgcagatagttcctgaggcaatggctgctacttcatctaacgtcctttgcaatgctagcgagtcagatctttgtcgtgatgattccgctgcatttctacttaaatttgtagccattgcttcgattctcttagctggagctgctgggtgtaactatacnactcattggcangaaccgtcgtttcnttcaaactgatggtaacctctttgtgactgctaaaagcttttgcagcctggtgtgattcnccgccacgggttttgtcatatgtnggcgggtggcacggaaactt

SEQ ID NO: 7645 - DNA, 412 bp, Arabidopsis thaliana
  unsure at all n locations
  Clone ID: LIB24-067-Q1-E1-C7
aattagaagaactatggctcggaagaaaccgtatcaaagttgttaacctgtgtgggctcaaatgcataaaaaagattagcttgcanagcaatcgattgacctctatgaaaggatttgaggaatgtgttgctcttgaagagttatatttgagccataatggtatctccaaaatggaaggcttgagtgcattggtcaacctacgggtattggacgtgtcgaacaacaagcttacttcagttgatgacattcaggaacctcacaaagttggaagatttgtggcttaatgacaaccagatagaatcactggaagcaatcacagaagctgttacaggatctaaagagaagcttaccactatcnacctcgaaaataacccntgtgccaagtcctccggattatgttgctgccggcana

SEQ ID NO: 7646 - DNA, 410 bp, Arabidopsis thaliana
  unsure at all n locations
  Clone ID: LIB24-067-Q1-E1-C9
acgcgtccgcggacgcgtgggcggacgcgtgggcgccaatcccacatggncctaacctctttcttcancatcaaatgtcaaccgccaccctcgtcgtcttccctcctccacctcctgtcnctatccctacctatataactagcctcggncttggctactccatagccatagctctaggtttcctcgttcttatctccacaatcattctctcttcttacatctgttgccgcgcctcacgcctccgcttctctgcctccgccgcaaacgcaaacgcaaacgcatcgtttaacgaccgtggcgttatcgtcccaagaatcanattcgtagntggaagacgacgatcttgagtctggaaacgtcgtcgttggaggtcntgatcattcagtcatcaactcttaccctaaantcca

SEQ ID NO: 7647 - DNA, 409 bp, Arabidopsis thaliana
  unsure at all n locations
  Clone ID: LIB24-067-Q1-E1-D5
ttttggannnnnnnnnnnnnnnnnnnnnnnnnnnnnnnnnnnnnnnnnnnnnnnnnnnnnnnnnnnnnnnnnnnnagacactaagattcaagtcctctctttggtcggagaagatgcaggtagtctcgagcttcgattttcagtcttcgccgttctcacacggcgccggagagattctcatttctccggtagaccaccgagagttatcctcacacggtgacgcgcttgaaggcgcgtgtgatgactcgactagattggcggcggtgaaagtacagaaggtctacaggagttatcgtacgcggcgtagattagcaagactctgtcgttgtcgccgaagagctctggtggcaagcgatggattatgcgaaggcttaatcatagtacganttcgtttttcgattaccgagaa

SEQ ID NO: 7648 - DNA, 409 bp, Arabidopsis thaliana
  unsure at all n locations
  Clone ID: LIB24-067-Q1-E1-D6
tcggaagaatatttggctcgnggnttcaangggattgattgtcagttcccggaaagaatccattcaacatttcaaaaagccctgngctcatgaccatgaaccaataagggaacttgttgatgccgtcaangcaatcaagccnacagttctgatcggnacatcaggtgtangtcaaacattcactcaagacgtggtggaaaccatggcaaagctaaatgagaaacccatcattctttctctttcgaacccaacttctcantcanaatgtacggcagaagaggcctatacgtggagtcagggactggcgatctttgcaagtggaagcccatttgcgccagtagagtatgacggaaagacgtttgtgcctggacaggcacacaacgcatacatcttccctgngtttggactc

SEQ ID NO: 7649 - DNA, 421 bp, Arabidopsis thaliana
  unsure at all n locations
  Clone ID: LIB24-067-Q1-E1-E10
acgcgtccgcccacgcgtccgcatacatctacatattaaccatgaagcttcttgggttcgccttagctattctattagttgtggcgacttgcaaacctgaagaagagattacttgcgaagagaacgttccattcacatgtanccaaacagatcgtttcaacaaacaagatttcgaaagcgacttcatcttcggtgttgcatcttctgcttaccagatcgaaggcggcagaggtcgtggacttaangtttgggatggcttcactcaccganacccaganaaaggtggagccgatttggggcaatggnagacactacntgtgactcatancggacttgggcagaaagatctagacgtgatgggaanaccttgggngttaaaggntacaggattctcctttgcgtggtcaangaatccttccaa

SEQ ID NO: 7650 - DNA, 420 bp, Arabidopsis thaliana
  unsure at all n locations
  Clone ID: LIB24-067-Q1-E1-E11
aaactggaagctgagtgtgccgacgccgttgccggattctttatacataagcggcggcgatgaagcgaatccggaggatctgtattcgtctccggtctctgtacgtatcgcttgggtgattttactcacgctttgtaaaatcgacggtaaagctcagccgtataaagacgttgctttgtcttatctcttcctcgctaacaatctccaatacgtcgtcgttaaagtccgatcgtcgactctgaaggttcttctcggagacgattgggtgtttaggcatgaagagaaggtgaagctgtatgctgataagtttgagaagcttgcgtgggggaaagtgctggatttactaccggnagattccaacgcgatggagatttcgcccgganggaagctaaggttttggtnggcgagattcaacgatga

SEQ ID NO: 7651 - DNA, 510 bp, Arabidopsis thaliana
  unsure at all n locations
  Clone ID: LIB24-067-Q1-E1-E7
actgtttacgcctgccccgtaccgagtccaaaaattcccgggtcgacccacgcgtccgnngacgcgtgggaagagaaacaacaagaagtagtaatggcttcctctatgctctcctccgccgctgtggttacatccccggctcaggccaccatggtcgctccattcaccggcttgaagtcatccgctgcattcccggtcacccgcaagaccaacaaggacatcacttcatcgcaagcaacggggggaaagagtttagctgcatgaaagggtgtggccaccaaatttgggaaagaaagaaantttgaagaactcctaatccttaacctcccctgaaccttaagtgaacgtncgaatttggnttaagggnanttnaactaaccttcctcccgcaaacaaagttnggatcccttggtgttgaaattcnangttagagcacgggntttgtgtacccgtgaagcacgggaaacactcccngatactacnatggncggtactgggcaatttngaaac

SEQ ID NO: 7652 - DNA, 414 bp, Arabidopsis thaliana
  unsure at all n locations
  Clone ID: LIB24-067-Q1-E1-A10
acgcgtgggcggacgcgtgggtttttttctagtcttggtgacttaaaaagctcctaggcaccgaaatcgatgacactctcgacaaccatgctctctgacgccgggggtggttccgattgccggcgtcgggacttatcaactcccatcaaccttcatgtgttctatataagctttatcttcattgaatcttcctccgttatctcaaatctctcaaaatatctaaatctccttttttatgtgagcttcttcactgaaagttttctttgtgacggaagagtanatcgatgctctattggctccgatctgactcagatcttggatgcatctctgtcttcgaacccaaaacaagaaaattcacaacagtccaacagctcctcttctcaaacatcagagcaagacttcatcancttatca

SEQ ID NO: 7653 - DNA, 413 bp, Arabidopsis thaliana
  unsure at all n locations
  Clone ID: LIB24-064-Q1-E1-G2
tncccgggtcgacccacgaatccgaaatcannncagcctctcataantcaaaaacaaccccttattcataccaatatttggtcacacgcatcagaagaccaatatctcatatttctccgaccaaaccagacccantccgactcanacaattgccaataaacggcttaatcagaaaaccaaacgaagaaccaaagcttggctcttttatcctctcagtacctgtagtgaacaggcttgtaaggaccttcaacgggtatgctgacatagtcagattggtccttggtaagcttggtgagtcttgcaccangcttgcctangtgaagtgcagctaccttctcatccaagtgtttaggcaaaacatagaccttcttctcatacttcccgcttgacttctcgttcnagagctcaagctg

SEQ ID NO: 7654 - DNA, 415 bp, Arabidopsis thaliana
  unsure at all n locations
  Clone ID: LIB24-064-Q1-E1-G5
ctctgctcgtttctctaccggcgacgtaacctctctgtctctgttctgttccttgcctgctcgaggtgtgcatcttcttggaatcagctgactttgcggtcaatcggatttcttgggattgtttggagaaactttggaggtgatggacaacanaaatgatcaggatattgatgttagatcagtggttgaagctgtttccgccgatctttcctttggtgctcccctctatgtggttgagagcatgtgcatgcgctgccaagaaaatggaacaaccagatttctattgaccttaattcctcacttcagaaaggtcttaatatctgcatttgaatgtccgcattgcggggaaaggaataatgaagttcagttcgcangcganattcaaccccgtggatgcctgttacaatctanaagg

SEQ ID NO: 7655 - DNA, 417 bp, Arabidopsis thaliana
  unsure at all n locations
  Clone ID: LIB24-064-Q1-E1-G7
agattcgtcgcatcagttctgaagaccttaanactggcgtttgttttgcancangtggntcaggaattgacgatcttacatcccgaacactgagagttttatcggcaggtgaccaagtataagactttaaanactatttgnataaactaagaanantagtgnaacgtaagaaaaaantcaaagaaatagtttcaaacgctgtgtttcttatttctgaangaaataangatcttggatactttgtcgctcncgctcttcttcgattacagtccacancaacatacaccantaaaatggttgtttggaccacaangtttctaaaagatttatacgatcttggnccgagaaaatttgcggtgatgggagtgatgcctgtgggatgtttgcctanccatcgagcctcattcggtggggtat

SEQ ID NO: 7656 - DNA, 372 bp, Arabidopsis thaliana
  unsure at all n locations
  Clone ID: LIB24-064-Q1-E1-G8
acgcgtccgcccacgcgtccgggaaatggaggagttaagcgatagtttaaaccatgtaanagggtttatgtacgagaaagatgtgacgtatatggatttcctaaaccgagttcgaaccggagagctaaacctgaaatccaaaggccaatgggatgttccacatccatggcttaatctcttcgtaccaaaaactcaaatctccaaatttgatgatggtgtttttaagggtattatcctaagaaatancatcactancggtcctgttcttgtttatcctangaatcgcaacaagtaagtttaactcgatattgcaaaatttactatntanattttcgttttggnatcngaaatattcttacaagctnattttat

SEQ ID NO: 7657 - DNA, 419 bp, Arabidopsis thaliana
  unsure at all n locations
  Clone ID: LIB24-064-Q1-E1-G9
agatnnnnnnnnnnnnnnnnnnnnnnnnnnnnnnnnnnnnnnnnnnnnnnnnnnnnnnnnnnnnnnnnnnnnnnnnncctttttccccatcaacaacaaacaaaaaataaagtcctttcacaacaattatatttagaacaaattcaccaaaaacccttccacaaaaaacctctcttcttcaacaatgtcgtctcgaaaccaaagatcaagaatcacctctagtnnnnnnnnnnnnnnnnnnnnnnnnnnnnnnnnnnnnnnnnnnnnnnnnnnnnnnnnnnnnnnnaatggagcaagaacaaacacgaacgtcttcaactcgaaaccacacaagaagcacaacgacgccgtttcttcttcaactaaancagttccntgggggttctgggnaagntaatttcccggttcaaggttcgggg

SEQ ID NO: 7658 - DNA, 419 bp, Arabidopsis thaliana
  Clone ID: LIB24-064-Q1-E1-H1
ctttcttcgatttgcttctgctttcttcgatttgcttctgctttcatcgcggttcaggtcactcttttctcagccatggcgattcctttcatggaaaccgtcgtgggttttatgatagtgatgtacatttttgagacgtatttggatctgaggcaactcactgctctcaagcttccaactctcccgaaaaccttggttggtgtaattagccaagagaagtttgagaaatcacgagcatacagtcttgacaaaagctattttcactttgttcatgagtttgtaactatacttatggactctgcaattttgttctttgggatcttgccttggttttggaagatgtctggagctgttttaccgaggttgggccttgatccagagaatgaaatactgcatactctttcattccttggctggtg

SEQ ID NO: 7659 - DNA, 418 bp, Arabidopsis thaliana
  unsure at all n locations
  Clone ID: LIB24-064-Q1-E1-H3
aaagattagggtgaatgtggtacccaatgcaaggtctggtgttgcggctttcagagatagcaggatgttcatgggaaatgatgatacagagtcggattcatcccatggctatgatgatgaggaggagagaaatcgcttaatgcggaacaaatcttctgtctcagttggtgggatgaataattctcattttccaatactcaaatccagacaagatattaaaaagagcaaatccagaaagaaagatatgcaggagaatgaattgcttgatggacggagtgcgtacttgaaatatttaggcgtatctggagaacacatctatgcgccagggacagagaagcactccttcaagtcaaaacagaagggtaagatgcgtgacaggagtcccttagagaacttttcctctcganatttgaagatg

SEQ ID NO: 7660 - DNA, 420 bp, Arabidopsis thaliana
  Clone ID: LIB24-064-Q1-E1-H4
acgcgtgggttgcaacctagggggctcgcagagactttatgtggttcaccattgtatatggccccagagatcatgcaactccagaagtatgatgcaaaggcagatctctggagtgttggtgctattttatttcaacttgtgacaggcagaaccccttttacaggaaacagccaaattcagttgctccaaaacattataagatcaaccgaattacattttccaggggactgtagagatttaagcttggactgcatagacctgtgtcagaagttactgcgccgtaatccagtggaacgtttgacatttgaagagttctttaatcaccctttcctttcggacaggcagtcatatgatttctccaggaagtaagattggggttaaagaacaatgggacggttttctttcgtctggaaacagtcc

SEQ ID NO: 7661 - DNA, 420 bp, Arabidopsis thaliana
  unsure at all n locations
  Clone ID: LIB24-064-Q1-E1-H5
ctccccatctctttcgacagatctcttctctctctcgtgtttcacgaaacaatggcgactcaattcagcgcttctgtctcattgcaaacttcttgtctggcaacaacaaggattagtttccaaaagccagctttgatttccaaccatggaaagactaatctatccttcaacctccgccgttcaatcccatctcgccgcctctctgtttcttgcgcggcaaaacaagagacgatagagaaagtgtctgctatagttaagaagcaactatcacttacaccggataaaaaagtcgttgcagaaaccaaatttgctgaccttggagcaagattctctcgacacggttgagatagtaatgggtttaagaggaagagtttaacatccaaatgggccgangagaaagcacagaagattgccacagtt

SEQ ID NO: 7662 - DNA, 400 bp, Arabidopsis thaliana
  unsure at all n locations
  Clone ID: LIB24-064-Q1-E1-H7
aaaacaggtaccgtgaattggctaatanagttgatgaggctttgggattcatgggtgcagctggacttactagtgctcacccgatcatgactactactgagttttggacatcccatgagtgtttgttattgccttatgagcaagcactcacaagagaggattcaacatctggactttactatgattgctctgcgcacatgctttgggttggagaacgaactcgccaacttgatggtgctcatgttgagtttctgaggggaatcgctaaccccctcggaatcaangtgagtgataaaatggtccctagtgaactggttaagctgatagagatactaaaccctcagaacaagcctggaangattacggttataagtgagnaatgggaagctgagaaatatng

SEQ ID NO: 7663 - DNA, 384 bp, Arabidopsis thaliana
  unsure at all n locations
  Clone ID: LIB24-064-Q1-E1-H8
caacaaacatggagttgtgctcaacttcacctgcatggagatgaaagacggggagcaacctgagcacgcgaattgctcaccagaaggtctggtcaagcaagtacagaacgcgacaaggcaggccggaaccgaactagcaggggagaacgcgctagaacgatatgactcaagcgcattcggacaagtggtaacaacaaataggtcagattctggaaatgggttaaccgcatttacttacctaagaatgaacaagcggttatttgagggtcaaaattggcagcanttagtggagtttgttaagaacatgaaggaaggtggtcatgggaggagactctcanaagaaganacanctggcagtgacctttatgttggatttgncaaaag

SEQ ID NO: 7664 - DNA, 473 bp, Arabidopsis thaliana
  unsure at all n locations
  Clone ID: LIB24-065-Q1-E1-A12
caacttccagccgccggtaacggtccaaaaattcccgggtcgacccacncgtccgntcgtctttgcctttcgtctcttctctgctcgccgatcgttactccgtcgaaatcaccatggcgccaaagaaggataaggttccaccaccgtcatcaaagccggccaaatctggaggtggaaaacagaanaagaagaagtggagcaagggaaagcaaaaggagaangtgaacaacatggtgttgtttgatcaaggcacttatgacaagcttctcactgaagctcccaagttcaagctcatcactccatcaatcctctccnaccgtangaagattaatgggtctcttgcgangagggcgaattagggagctaatgggcaanaaggtttgattaaggatggtctctgnanactcgagccangnaggtttacactccgtgcnaaccaaccacctaaaaaagccgttgacctttccaatngg

SEQ ID NO: 7665 - DNA, 432 bp, Arabidopsis thaliana
  unsure at all n locations
  Clone ID: LIB24-065-Q1-E1-A5
ttgtctaaaaatggcgatgctaggtttttacgtaacgttcattttctttcttgtatgcctatttacttatttcttcctccaaaagaaacctcaaggtcagcctattctcaagaactggccgttcctcaggatgcttccaggaatgctccaccaaatccctcgtatctacgactggaccgtcgaggtgcttgaggcgaccaatctaactttttatttcaaagggccatggcttagtggaacggacatgttgttcaccgccgatccaaggaatattcatcacatactaaggctcaaactttgggaattaccctaaaaggacctgagttcaagaagatctttgatgttttgggagaaaggaatcttaaccgttgaattttgaagttgtgggnaggagatnaaggangtcaaaatcaaggccctaattccacaaat

SEQ ID NO: 7666 - DNA, 443 bp, Arabidopsis thaliana
  unsure at all n locations
  Clone ID: LIB24-065-Q1-E1-A7
cgtaccggtccanaaattcccgggtcnacccacgcgtccgnctctttgaactactcttcgacaatggccgaacgtggtggagaacgtggtgttgagcgtggtggagaacgtggtgatttcggacgaggattcggaggccgtggaggtcgtggagatcgtggagggcgtggacgtggaggccgtggtggtcgtcgtggagggcgtgccagtgaagaagagaaatgggttccagtgaccaagcttggtcgtctcgtggcggctggtcatatcaagcagatagagcagatctatcttcattcactcccggttaaggagtacaagatcattgatatgctcatcggtccacattgaaggatgaagtaatgaaaatcatgccngttcaagaaacaaaaccaagggctggtcaaaaggactagatcnaaggcctttggttgtcntttgga

SEQ ID NO: 7667 - DNA, 455 bp, Arabidopsis thaliana
  unsure at all n locations
  Clone ID: LIB24-065-Q1-E1-B4
acgcgtccgaaaatctcaatttcaacctcttaagtctctccaaagtcccataaaccctaaaacaatgtcgagacgtttcaatccgttagaagatccgccgagtgcttcttcaagcgacgaagaaggtaaagaaatcgcacganactcttcttcggatgatgaagatgacgtttcctctgaaaacccatcacctttgaagacgactctcgacgccgtttccgattccgaatctggttcggatgaagaaaccggttcagactctgaactcgagaagnaangaagatcaagttgtgacnaatcctgtgggatgtnaagagggctnagaaaggggaaaannnccgagaaatctggggggtaaacgttctccttgaaagtgggattgaaagcangcagttgtcnaatgggatggtngnaggangggtnaggaangggttcaagggggaaaganggacgaa

SEQ ID NO: 7668 - DNA, 390 bp, Arabidopsis thaliana
  unsure at all n locations
  Clone ID: LIB24-064-Q1-E1-G12
cattggtgaaaatttgtaagagatggacaaggaaaaggagcaaactttggagtggaacgaagcacagaagatagatataagcgttgaccttttggctgcagccaagaaacaccttctcttcctcggagctgttgatcggaaccgttgtctctacgatggccctgcactccaaagagccatctacagatacaatgcttattggcttcccttgcttgctcaatacaccgagtcttcttctatctgtcaaggaccattagtccctcctcttgactgtgaatgggtttggcattgccacaggcttaatccggtgaggtataagactgattgtgagcaattctatgggagagttctgggacaattctggcgntggaacctcccgttaaaatngga

SEQ ID NO: 7669 - DNA, 284 bp, Arabidopsis thaliana
  Clone ID: LIB24-064-Q1-E1-D7
acgcgtccgatttgtacaatcaagttggaggatctagaggccgggcttcgagttttctcgcagtgaaaagaaacttctgatggctaataattggttagtattacaaattgtattgattcaattctttacatcatatattctttatgtttttgtccccctcaagatcttgtaggaggagaggctttggtttcaacttccattgtttgatcaaatctatttctgttgtataaaactatattgatattttgtcttttcacttttctcataaaaaaaaaaaaaaaagg

SEQ ID NO: 7670 - DNA, 416 bp, Arabidopsis thaliana
  unsure at all n locations
  Clone ID: LIB24-064-Q1-E1-D9
aatcaagacaacgacatggttactacgtttgcttcgagatctcattctctctctgttccatttcttctataaagacagtcctcatcttcatcttatctgcaaatgcaaattcgtctgaaacctgattattccttcttcatcgcctcttcctcaacgatggcttcgacttcttctttgggaccttctacactactctcttacggttctccttctcgtcagtttcctgattttgggttcagattgatttcgggtcacgaaagtgttcgaattccatcattccggcgatttcgggttcactgcgagtcaaaggaaaaagaagtgaagccgtcttctccatttcttgaaagctcctcgttttcgggagatgctgctttgcgctctantgaaatggaangctgttcctnataattggggga

SEQ ID NO: 7671 - DNA, 401 bp, Arabidopsis thaliana
  unsure at all n locations
  Clone ID: LIB24-064-Q1-E1-E11
ccatctgtttagtgcgccnttataantcaangaccctttgtacttttccgattcctctttcgctataacttcatctctcccattctcttcactcttctcaanaattcgatctttagggtttttcttttancctcttatcgctaatctggagctctatagagactataaagggtttttgattgattcgggagcncgagatttgacttctttnatctgattcggnangtttgtatcnanaaaggatcgattggtgaggtcaatantggttggtgggttttantaatggaagacggtgagcttgatttctccaatcaggaagtgttttcgagttcggagatgggtgaattancacctancanttgttcgatggaanaatttctttgaaggggctttaangggga

SEQ ID NO: 7672 - DNA, 470 bp, Arabidopsis thaliana
  unsure at all n locations
  Clone ID: LIB24-064-Q1-E1-E2
tgttacgttgccgggcccggtccaaaattacgggtcgagccacgcgtccgnatcaacttccttgctctgtattttnnnnnnnnnnnnnnnnnnnnnnnnnnnnnnnnnnnnnnnnnnnnnnnnnnnnnnnnnnnnnnnnnnnnnnnnnnnnnnnnnnnnnnnnnnnnnttcaccaacaccaaccccttcgcctctccaaaccaccccttcttcaccggacccaccgccgtcgcgccgccaaacaacatccatctctatcaagcagctcctccgcagcagccacaaacatctccagttcctcctcatccatctatttcccaccctccttactctgacatgatttgcacggcgattgcagcgttaaacgaaccaagatgggtcaagcaagcaagctatttcgaggtacatagagagaatttacactgggattcctactgntcatgggagctttgttgacacaccanctcaaa

SEQ ID NO: 7673 - DNA, 474 bp, Arabidopsis thaliana
  unsure at all n locations
  Clone ID: LIB24-064-Q1-E1-E3
antgttaccttgccgggccggtccaaaattaacgggtcgacgcacgcgtccgcgacgatgctctcaatctcgcagctgccgagtttctcgttaaccaccgccaaannnnnnnnnnnnnnnnnnnnnnnnnnnnnnnnnnnnnnnnnnnnnnnnnnnnnnnnncctaaggtttctaatttcgtcagagcaagttccggaatccccaatttggtcgcctgtagtccgacagagattatcatccccagagttaataacgccggactcagaatcgaggagatagtagacgccgcgaaaggcaaaattcgtcttgattcatggatctcttctcgtatcaatggcgttagccgagctcgtgtacagtcgagtatacgattgggactcgttaccgtcaatggtcgtgtcgttgataaggtttcacacaatgtcaaatctggtgatgaggttaattgtacgatatcagagcttcaanctttg

SEQ ID NO: 7674 - DNA, 417 bp, Arabidopsis thaliana
  unsure at all n locations
  Clone ID: LIB24-064-Q1-E1-E5
aattccgtcccctctctctctctctttccgcagctcgccggatctcctttgtcttcttcccctgggttccgtttagctcaatccctttttaggaaagactccgtggctcgatcctagtcttggcgatcgnnnnnnnnnnnnnnnnnnnnnnnnnnnnnnnnnnnnnnnnnnnnnnnnnnnnnnnnnnnnnnnntagggtttcttacacgatatgagctaaatacgattttgatttcaccctaagctttcttctattgcttctcgtcgttgcagggttttcttaaatggaaacgcccggcgccagtcatgattcatttaggggttctcctcgtagaaactccatcctctctgcttctaacatcatccaaggcccctatttctaccttgttagagtattcgggtctctttcgangctag

SEQ ID NO: 7675 - DNA, 409 bp, Arabidopsis thaliana
  unsure at all n locations
  Clone ID: LIB24-064-Q1-E1-E8
acgcgtccggggaatgcaagcttggtgattgcttttaatatgttagaagatctggttgtgaaaatggatagatcatctatcgttagcagccatgggaagatttttgatcagtgcttagttgcccttgatattcgacgtctaaatccagcagcaattcagaacattgatgatgctgagagaagtgtaactagcgcaatggttgctctcacaaagaagctaacggagtccgagttcagacctctctttattaggagtattgattgggcagagtcagatgttgttgacggatcagggagtgaaaacaagagcatcgaccgagctatatctttctatggtctggtggatcgactctgtgagagtcacaggtccatctttgtaccgtatttcaaatacgtgcctggaaggnaat

SEQ ID NO: 7676 - DNA, 415 bp, Arabidopsis thaliana
  unsure at all n locations
  Clone ID: LIB24-064-Q1-E1-E9
acgcgtccgggtttaagccctcactatcctctctctcaaatcgcggagtctccgaagtttctctgtcagacaaaatgcagtcgtcaacgtatgcggttaaaggaaacgctgcgtttgcgtttcagagacggaccttctcttctgacagatcgacgacttctaccggaattcgcttcgctggttataagagcttagccaccaccgggccactctactgttctggttctgaagccatgggagcgacgcttgctcgtgctgataacgggatccagagcgttatgaagtttctcttctgtcaaangctcgatcggtcagagctcaagcctcatctgatggagatgaanaagaagctatacctctgagatctgaagggaaaaagctctgggaacaagntttgccttttgtttggggttnc

SEQ ID NO: 7677 - DNA, 422 bp, Arabidopsis thaliana
  unsure at all n locations
  Clone ID: LIB24-064-Q1-E1-F1
acgcgtccgcggacgcgtgggatacttttactaagttttagacttaataaatgcgatcgccctttttttagtatgttgaacctcattgctttcctccgccgtcgtctccgccgtccccggaaagccagaatctccgtcaaccaccaccacctctcagttgattcttctcctgagactcatcatcatcaaaatggcttttcatcggcagccgccatccacccaaacccggacaaaaccatcacagtggccacctttaacgctgctatgttctccatggctcccgccgtccctagcaacaagggcttgccattccggtccaagtctacggttgaccgccccaagagcattctcaagcccatgaacgccgccgcatctcctactcacgactctagaaagcaacagaggtttgccaaatccaggnc

SEQ ID NO: 7678 - DNA, 391 bp, Arabidopsis thaliana
  unsure at all n locations
  Clone ID: LIB24-064-Q1-E1-F12
agttgcaagcacagtggtccaccttctgatggacttcttgggagatagcaatgtggcttcagctcttgacgtggttgtttttgttagagagataatagaaacaaatcccaagttaagagtttcaatcatcacaaggttattggacacgttctatcacatccgagcaggaaangtctgcccttgtgccctttggataattggggagtattgcctatcactttcggaagttgagagtggcatttcaactatcacgcaatgccttggcgaattaccattttactctgtttctgaggagtctgagccaactganacatcaangaagattcagcctacctcttctgccatggtgtcctccnngaaagcaagtgatccttnctgatggaaccttagc

SEQ ID NO: 7679 - DNA, 417 bp, Arabidopsis thaliana
  Clone ID: LIB24-064-Q1-E1-F2
gcatctgtagtcatttgtcaaagataattgaacagaggctttctatattcgtcgtcaagggtttaggagattctgggttttggcgtgattttgaggggaaagattgaaactttccccgtgaatggtaagacagtgagagatgtctgggtacgtgggtgttgtcgtttctgatccatggctacagagccagttcactcaagtcgaacttcggactctcaattccaagtatgtgtcggtgaagaatcagaatggaaaggtcactattgaagatctccctcctctatttgcaaagctgaaggcacttagtgcaacatttaaggaagacgaaatcaagggtatgctaggggaattgggttctgatacaagcactgatgtgaagttttgaagagtttctcaagatatatctcaacttactaa

SEQ ID NO: 7680 - DNA, 418 bp, Arabidopsis thaliana
  Clone ID: LIB24-064-Q1-E1-F5
gtttgttcgttttctctatcgctctcgttcatctacgcaatctctctcactaggtacagttttaaatgggtaagaagaagtcagacgagagtgctgctaccacaaaggtgaagccaagtgggaaagatgcttcgaaagattctaaaaaagagaaattgtcagtctcggctatgcttgcaggcatggatcagaaagatgataaaccgaagaagggctcatcatctagaaccaaggctgctccgaaatctacatcttacactgatggcatagatcttcctccttctgatgaagaagacgacggtgaatctgatgaggaagagagacagaaggaagcaaggaggaagctgaagagtgaacaaaggcaccttgagatatctgtgactgataaggaacaaaagaacgaagaggcgaaagaaag

SEQ ID NO: 7681 - DNA, 416 bp, Arabidopsis thaliana
  unsure at all n locations
  Clone ID: LIB24-064-Q1-E1-F7
acacaaaactgatggaagctcctagaggaaatctgagagcggtggctcttatcgccggcgataacaacgtccgaggctgtcttcaattcgtacaagacatttccggaactactcatgtcaccgggaagatctcaggactctctcctggcttccatggatttcatattcactcttttggtgataccacaaatggctgcatctctactggacctcacttcaatccattaaatcgagttcacgggccaccgaacgaggaagagcgtcatgctggcgatttgggtaacattcttgcaggatcaaacggtgttgctgaaatcttaatcaaagacaaacatataccgcttagtgggcagtattccatactcgggagggcggttgttgtgcatgcngattctgatgaacttgggaaangaggg

SEQ ID NO: 7682 - DNA, 406 bp, Arabidopsis thaliana
  unsure at all n locations
  Clone ID: LIB24-064-Q1-E1-F9
acacctctcttcaatagcaataaccatggctcacactctcggtctcactcaacccaactccactgagcctcacaagatctcgttcactgcgaaggagatcgatgtaattgaatggaaaggagacatactcgtagttggtgtgacagagaaggacttagccaaagacggtaactcaaagtttgagaatccgatcttgagcaaggtcgatgctcacttaagtggacttttagctcaagtctcttccgaggaagatttcactgggaaacctggtcaatcgactgttctcaggcttccgggtttaggatcaaagangaatcgctttgatcggtcttggacagtctgtttccgtctccggtggcttttcatagccttgggnaaancctggngctncagttttaaaaggctt

SEQ ID NO: 7683 - DNA, 395 bp, Arabidopsis thaliana
  unsure at all n locations
  Clone ID: LIB24-064-Q1-E1-G11
atctttctctctaagagattttgtaggtgacaatcaaaagtttgacaaaatggtgaagtttacagctgatgagcttcgaaggattatggactacaaacacaacatccgtaatatgtctgttattgctcatgtcgaccacgggaaatccactcttactgattctttggttgctgctgctggtatcattgcccaagaggttgctggtgatgttcgtatgactgatacnagagctgatgaggctgaacgtggtancactatcaacgtccactggtatttctctctactacgagatgactgatgaatccttgangagtttcactgganccagagacngaaacgagtacctcatcaatcttattgattcacctgggcacgttgacctttcctccgaagnt

SEQ ID NO: 7684 - DNA, 406 bp, Arabidopsis thaliana
  unsure at all n locations
  Clone ID: LIB24-064-Q1-E1-D6
atncccgggtcgacccacgcntccgnacaatcataaccacaaaaacaaacactatgggacacctcaaaagtctcttcacaattcttttcctaatagctatgtcttcaaccgtaacatttgccggtaaaatacccgcgatcatcgtgtttggcgactcttccgttgatgccgggaacaacaactatatcccanctgttgctagaagcaacnttgagccatatggacgggactttgttggtggaaagccgaccggacggttttgtaacgganagattgcgacggattttatgtcngaagccttanggcttaaancaatcattcctgcgtacttggattcttcttanaacatttcggantttgcaacaggtgtnanctttgcttctgctgccactggccangacaacgc

SEQ ID NO: 7685 - DNA, 408 bp, Arabidopsis thaliana
  unsure at all n locations
  Clone ID: LIB24-064-Q1-E1-B12
tttcctacctttctccatgagacgctttcctttaggtctcggggtgctgattttgcttcaccgccgttcgtggtaaggagtattttggttttgtttccttttgtgagagtttctagtctcagatctgttgattctatgtttgttttacactttgtatttctggttttgaatatcaggattatgagtccggaaagtatttcttcagatatgatgtatttgtagcttgggttttttcccctttagtttgatcttgtattcgggagttttcatttgcttgcccgactttaatctctacaaggattgtttccttgtcggcctttgtaatcatgtgactctaaattttatcaataaaatccttattccactaaannaaannnaanngaaaaaagggcggccgctccanaagat

SEQ ID NO: 7686 - DNA, 443 bp, Arabidopsis thaliana
  unsure at all n locations
  Clone ID: LIB24-064-Q1-E1-B3
tgttactnttgccgtgccggtccananattacgggtcgacncacgcgtccgncttgctcctctcgcttttgaatggagatgtgagctttcttcattcaaagagcaaaactatctaattccatggcgttctccctcctctctccaattcctacctctgcctctctttttttcactctctccgccattaccgcttctaataatgcttcctcctcctctctctcccgtctttactctttatatcaccccaaaggaaccttacgaaccagaaccgcgacctcgtttttcggagcttctgggaacttgaggattgtttccatggcggagaataggcaattggtttgtaggattggtggcggagccggtgctgaattggatgatatggatgaangtgaaatccanaggattgggaatgaagacganagacgacgatgaattcanacaat

SEQ ID NO: 7687 - DNA, 419 bp, Arabidopsis thaliana
  unsure at all n locations
  Clone ID: LIB24-064-Q1-E1-B5
gattcactagaaagaaaggaaaaaaatctctttgtctttgcagatgcgacacgcaaaacgacgattctgatctcgcttgtctgatttcaaaaacaatgagaagatagttctgattatataacacacaaaccctacttcattccttcatcatcgtctccaatcattacccaaagatccgtctttttctttacttcatgtcgaagcaaacgtacaaagtgtgtttctgctttcgccggaggtttcgttacactgcatcggaggcaccgcgtgagatcaagaccattttcgaaaagtactcagagaatggagttatgaccgttgatcatctccacaggtttctgatcgatgttcaagaaacaagataaagccaccagagaagatgcacagtcaattatcaattctgcatcttcccttcntca

SEQ ID NO: 7688 - DNA, 407 bp, Arabidopsis thaliana
  unsure at all n locations
  Clone ID: LIB24-064-Q1-E1-B6
taatgttgtttctatcctcggctccttcgatagtcgtctgtctgctcttgaaaccgccatgcgtcctactcagattaggactcatgctataaggaaagctcatgagaatattgataggactcttaaggctgctgaagttattttgtctcaattcgatctcctccgtcaggcagagactaaagtactcaaggggccacatgaggacctggaaagttatctggatgcaattgctcaactcagaaagattattcgttattttatgagcaacaaaagctttaagagtagtgatggagttctcaaccacgcaaatagtttgcttgctaaagcacagtcaaagctggaggaagagtttaagcagttgctagcttcttacagtaaagcggtggagcctgatngcctatttgatg

SEQ ID NO: 7689 - DNA, 391 bp, Arabidopsis thaliana
  unsure at all n locations
  Clone ID: LIB24-064-Q1-E1-B7
ccacagaagacaagcctaaactcctttttcagttaactgccttgcttgctgagcttgggctgaacattcaagaggcacatgctttctctacaactgatggctactcactagatgtttttgttgttgatggctggccgtacgaggaaacagagagacttaggatatcattggagaaagaagcagcaaagatcgagttgcagagccaaagctggcctatgcagcaatccttctctccggaaaaggaaaatgggcaaacaggtgccagaacgcatgttccaatacccaatgacggaactgatgtttgggaaatcaaccttaaacacctaaaatttgggcataaaataacgtctggttcttatgganatttgtanaaangtacatactgtagcca

SEQ ID NO: 7690 - DNA, 420 bp, Arabidopsis thaliana
  unsure at all n locations
  Clone ID: LIB24-064-Q1-E1-B9
cagcattattgattttcagaagacttacgaggctcagtcaaaatctgatacagataaacttattgcagatttaactaacctagtctcaagtcacattcgtcgccaacacgaattggttgattcaagactccataactttaaagatgccgtctcttccaacaaaactttcttggacgaacatgtctctgctgttaataatctgacgaaagacgcaaaaagaaagtgggagacattttccatgcaagctgagaatgaagccagagaaggtgctgatttctcggctgcaaaacattgtcgaatggagttactgcttcagcaatctgtgggtcatgcggaatcagctttcaaacactgcaagataactcatgaatctccaaagggagatgaccaattagcnattcacaaaatgtcccttaactt

SEQ ID NO: 7691 - DNA, 454 bp, Arabidopsis thaliana
  unsure at all n locations
  Clone ID: LIB24-064-Q1-E1-C10
gttacgcctgccggtaccgagtccaaaattcccgggcttcttggtctcttctccatctcatcggagctgatctcgaattgttctccgttcatttgttacggtggagatgacatcggatcaccgcgacgctcttttctctctggaactggaatcgcctgatccggacgaaggaggtgtagcagacggaggagaatctgataccgacgaggatttgcgcgacaacgatgatgttgttatgccgggaacgaacgaagctgaagctgaagacgacgatcccgaagaggaagatctcaattctccgtctacatcatcactccccatggtttctacgatctcagcgactgctgttgtttccgggaccccgacggcgacttcctctacaggcgccgtgaccgttgcacttccggctggatncgcgtccctgtctccgtgantccgttgatccnattccgaa

SEQ ID NO: 7692 - DNA, 414 bp, Arabidopsis thaliana
  unsure at all n locations
  Clone ID: LIB24-064-Q1-E1-C11
tctctgggtttagtttttaaccaatgtgcactagaaaaaaagttaatctttaggatatgttcttttagtttcatgatgaaaaattgaagcttcatagtataatgatccttaaagcctgggatctgtgtttgtgaaccatctgggtttgtggaaagttcgtanctttcgaggatttatctattggctaaaaagatggattcttcttactcctttgccttggggacaagtagttctattttgccaaaactcagtttcaggaatgtagagaacagattttatggtgagaagaacaacaacaatggtttgtgtaaacgttttggatcagatttgggctccaagaagtttaggaatcaaaagttcaagcacggtgttgtttacgctgttgccacttcaagataatccaaaaaaggntat

SEQ ID NO: 7693 - DNA, 409 bp, Arabidopsis thaliana
  unsure at all n locations
  Clone ID: LIB24-064-Q1-E1-C12
ggagttccggtggtgattgctcagtctcggaggattccaacgagcctgagatgcttctctgccaccgcaaattctgaccttcttcgctcccagcttgatcggcttcacgcggaggcagagtccactcgtgccaaagcaaacagtaataggttgagacttttgagattatctgaggctgcagagaatctacgggaacaagcagctgtcaatgttcgaacagggaaagagaatgatgccagagatctacttcttcagaagaaaaaagttatgcaagctttggacaaggctaaagctcgtatcgagttgctcgatacgctttcttccaaacttaacgaggcaatatctgtcaangaaacacanctgataagcaatatatctttgggttncnaagaaagatggnagagatacc

SEQ ID NO: 7694 - DNA, 459 bp, Arabidopsis thaliana
  unsure at all n locations
  Clone ID: LIB24-064-Q1-E1-C5
ngcccggtaccgagtccaagaattcccgggacaaaaaaaaactgtaacgaccaaaaaaaaagaggacgcgttagaagaaaaaaaaagaacaatccgataaaaagatccggcgatgtcaaacccgacccgtaagaatatggagaggattaaaggtccatggagtccagaagaagatgatctgttgcagaggcttgttcagaaacatggtccgaggaactggtctttgattagcaaatcaatccctggacgttccggcaaatcttgtcgtctccggtggtgtaaccagctatctccggaggtagagcaccgtgctttttcgcaggaagaagacgagacgattattcgagctcacgctcggtttggtaacaagtgggctacgatctctcgtcttctcaatggacgaaccgataacgctatcaagaatcattggnactcgacgctgaaaccaaaatgcancgt

SEQ ID NO: 7695 - DNA, 405 bp, Arabidopsis thaliana
  unsure at all n locations
  Clone ID: LIB24-064-Q1-E1-C6
gaatagagagatcactgtacttattgggttttgatctttgatggctccactgagtccaagagtagtggtgaaggtggatttgaagaagaagccatggcagcaggaccagccattgcacaatagatggcatccggagataccaccagtagcanaggtcaaggctggtgagtttttccgggtagaaatgattgatgcaatgggaggtgttatcananacaatgactctgcaagcgatatcaagaacctagtcctaactactactcatcacctaagtgggccgattanggttgtacatgacgaaggtgttgcagctaaagcaggtgatcttcatgctgttganatatgcancttgggtcctcttccaggagatgaatggggattcactggttcgttttgtagagnaga

SEQ ID NO: 7696 - DNA, 416 bp, Arabidopsis thaliana
  Clone ID: LIB24-064-Q1-E1-C7
ttgaagaaaaaaagcaaaaggtttcattcttcaattggtggatgtttagctctttcttaggcgcgttgtttgcgacattggggctcgtctacatccaagagaatctcggatggggtttaggttatggcatccctaccgtaggactcttggtttctctcgttgtgttctatattggaacaccattttacaggcataaggttatcaaaacagacaatttggcgaaagatttggttcaagttcctatcgcggcattcaaaaaccgaaagcttcagtgtcctgatgaccacttggagctttatgagcttgactctcattattacaaaagcaatggtaagcatcaagttcatcacacgcccgtcttcaggttcttggataaagcggccattaagacaagttcaagagtgccatgtacggtg

SEQ ID NO: 7697 - DNA, 417 bp, Arabidopsis thaliana
  unsure at all n locations
  Clone ID: LIB24-064-Q1-E1-C9
aaatcgagaaaaatggtatcgtgtcgcatcgaggacttattacgtatggcgagagagctcaaaccaaaagatcaccgcctcgactgattcatcttttctcctgattcttggcaggcttctcttggtctaagtgaatttggagttatgcttctgtcagcacttttaacttcagtgggaatcaatcttggcctctgttttctcttcttcactttgtattcaatattgagaaagcagcctagtaatgtcactgtatacggtccacgtcttgttaaaaaagatggcaagtctcagcagtcaaatgagttcaacctcgagaggcttttgcctactgctggttgggtcaaaagagcattggaacctaccaatgatgaaatcctctccaatcttggctanaatgccttggggcctcaatcggng

SEQ ID NO: 7698 - DNA, 413 bp, Arabidopsis thaliana
  unsure at all n locations
  Clone ID: LIB24-064-Q1-E1-D12
acgcgtccgctgannnnnnnnnnnnnnnnnnnnnnnnnnnnnnnnnnnnnnnnnnnnnnnnnnnnnnnnnncagtccccgatttccgctttatccgatcggccgccgccgagattctagataaacctatggcaatggaggttacgcagttgctcattaatgctcagtcgattgatggaactgtacgtaagcacgcggaagaaagtcttaagcagtttcaggagcaaaaccttgcgggtttcttgttgtcgcttgctggagagcttgcgaatgatgagaagccagtagatagcaggaaattagctggtttagtccttaaaaatgctcttgatgctaaggaacaacacaggaagtatgagcttgttcagaagatggttggctctaagacatgtcaaacaaaagtcgcaagttaaa

SEQ ID NO: 7699 - DNA, 422 bp, Arabidopsis thaliana
  unsure at all n locations
  Clone ID: LIB24-064-Q1-E1-D4
aaaacagcgataaaaccgaaacatcaagcaaacaatnaaaaaaagagaagagaaattatttttttttgttttcgttttcaaaaacaaaatctttgaattttatggcaanccgtcttctccgaacaaactttatccggcgatcttaccgtttacccgcttttagcccggtgggtcctcccaccgtgactgcttccaccgccgtcgtcccggagattctctcctttggacaacaagcaccggaaccacctcttcaccacccaaaacccaccgagcaatctcacgatggtctcgatctctccgatcaatgcccgtcttttctcctctatcccaacctctgatctcctccgttcnaccgccgtgttgcatgcggcggcnaataggtcctatggtcgacctagggangttggtcatgaggctcnaaa

SEQ ID NO: 7700 - DNA, 415 bp, Arabidopsis thaliana
  unsure at all n locations
  Clone ID: LIB24-064-Q1-E1-B11
aatcaagacaacgacatggttactacgtttgcttcgagatctcattctctctctgttccatttcttctataaagacagtcctcatcttcatcttatctgcaaatgcaaattcgtctgaaacctgattattccttcttcatcgcctcttcctcaacgatggcttcgacttcttctttgggaccttctacactactctcttacggttctccttctcgtcagtttcctgattttgggttcagattgatttcgggtcacgaaagtgttcgaattccatcattccggcgatttcgggttcactgcgagtcaaaggaaaaagaagtgaagccgtcttctccatttcttgaaagctcctcgttttcgggagatgctgctttgcgctctagtgaatggaaaggtgtcctganaatttggaaaa

SEQ ID NO: 7701 - DNA, 426 bp, Arabidopsis thaliana
  unsure at all n locations
  Clone ID: LIB24-062-Q1-E1-E8
gtgagaacgttgcgtcncatcttcaaaagtataggctttacctcaaaaggatgcanggattgactaatgaaggtccctctgcttcggataagctcttctcttcaacacctgttcctccacagagcttccaagatatcggtggcggtggcggtagcagcggtaatgttggagtgccgattccgggggcgtatggaacgcaacagatgatgcanatgccagtttatgcacatcatatgggtatgcanggatannnnnnnnnnnnnnnnnnnnnnnnnnnnnnnnnnnnnnnnnnnnnnnnnnnnnnnggagctggtggaaatggtgcgtttgagtcaaatccttatatgatgcacgcagaataagtttggattcatggcttcttatccttctgttggaggtgnaaacgcaaatgagaantaaggaaag

SEQ ID NO: 7702 - DNA, 462 bp, Arabidopsis thaliana
  unsure at all n locations
  Clone ID: LIB24-062-Q1-E1-E9
tttacgctgcccgtaccggtccanaaattcncgggtcnacccacgcgtccgantttcacaacgactcacttctttcagctctctccattcggcgctctcttctggaattgaagaatcaagattagcaatggcccatacatcagaatctgtgaatcctagagatgtttgcattgtgggtgttgcacgtactccaatgggtggctttctcggatctctttcatctttacctgccacaaagcttggatctttagctattgcagctgctttgaagagagcaaatgttgatccagctcttgttcaagaagttgtctttggcaatgttcttagtgctaatttgggtcaagctcctgctcgtcaagctgctttaggtgcangaatccctaactctgttatctgtactacagttaacaaggtttgtgcatcaggcatgaaagcggtaatgattgctgctcaaagtatcna

SEQ ID NO: 7703 - DNA, 466 bp, Arabidopsis thaliana
  unsure at all n locations
  Clone ID: LIB24-062-Q1-E1-F4
ttccaagggtcnacccacgcgtccgctctgcaatcgcttccatggaaaccaaattcagtgactttacctgaaattaatcttttgaatcccaagcaattgactgcctcgagttctcagtatcgtagaactcgaaactggagaattagaagttcgtcggaagataatgtagcaatttcgagtgacggcggagatttgaagaattctctgtccggtattgtgggaaatcaagtggaggagctattgagcagagaagagaacaaaggtttgcttgatggtctggaaaaagcttcgttgagagtggagattgcgaagagagagctcgaagatatagagagacaagaaattgaggcgaaattgctacaggattatattaatcagctcgaatcaagagccgcagagattgcagaatgccagcangagattgacgcagcaagatnaatgggttgaggaagcagaacgctccctt

SEQ ID NO: 7704 - DNA, 485 bp, Arabidopsis thaliana
  unsure at all n locations
  Clone ID: LIB24-062-Q1-E1-F5
aaacttctccgccgntcggtaanggtccanaaattcccgggtcgacccacgcgtccggtgcgaatttcgaacggagctacgattccatggcgaccaacggagagaaggtcacggctacggtggtgaatggcggagggctatctactggtgaaaaccctaagaaaattgtagacctcaacactacggagttagatcgtactgacgacattctcgacggagaagtcaagggattttcagattctggtgaaaagaaggaagaaaccgactctaatggtattggatcgacggctggtgttgattctggggatatctctccggtcgatgatatccagaagaagattcgacgtgctgagaggtttggtgtttcggtgaaattgaccgaagaggagaagcgcaattctcgtgctgagaggtttggtactgtagctgcancagtggtgaatggctcaaanggaacgaagaaagcaaaagaaattaaancaaaa

SEQ ID NO: 7705 - DNA, 462 bp, Arabidopsis thaliana
  unsure at all n locations
  Clone ID: LIB24-062-Q1-E1-G3
ttcaagggtcnacccacgcgtccgaccacgcgtccgaatctttttagtgagagagaaatcttagagctgagctaagaaaaatgtcaaaagaagtgagtgaagaaggaagacatggcaaagactacgtggatccacctccagctccacttctagacatggctgagcttaagctctggtctttttacagagctatcatcgcagagttcatcgccactctcctcttcctctatgtaaccgtagctacagtcattggccacaagaaccaaaccggtccttgtggcggtgttggtttactcggcattgcgtgggcctttggtggcatgatctttgtcctcgtctattgcaccgccggtatctccggaggtcacattaacccagctgtgacatttggtctgttcttggctcgtaaagtgtcgctccctagagcagttgcttacatgggtgggccaatgtcctgggacc

SEQ ID NO: 7706 - DNA, 458 bp, Arabidopsis thaliana
  unsure at all n locations
  Clone ID: LIB24-062-Q1-E1-G4
tcnacccacccgtccgaccacgcntccggagccatcaacagtcgttggcgaatcgcatccaatggatgtcgaggagccacttgagcagaagacatctgttggaggtggggatgacagcaatgctgcaaacgcagatatgatcaaagaaaataatattatcgatgcaggcgactcagaaaagttgaatttagatagaagttctggtgatgagtctatggaggatgagccggagacaaagcaatccgagtcaattacatctgatgataagagtgcaaaaattgaaatgctttctaaggaggaaagccgtgctgatatggatgcggggaaagggaaatcccctgaaaataaaagtcacccactggtggcttctgacaaaagaaagcttcctgctaatgatcaagaagctgttggaaacaatgaacctgcaaagangcgccgatggnactcctaataatatt

SEQ ID NO: 7707 - DNA, 436 bp, Arabidopsis thaliana
  unsure at all n locations
  Clone ID: LIB24-062-Q1-E1-H1
acctttcctacgaaaactcaaagaaacaatggcnnnnnnnnnnnnnnnnnnnnnnnnnnnnnnnnnnnnnnnnnnnnnnnnnnnnnnnnnnnnngctttggatccttcgtttcttcgtctttcgacctctctccaaagaagtagctttcctcaagattttcggtttggtgcagcttcgagtgcttatcagagtgaaggagcagccaacgttgatggaagagaaccaagcatatgggatacgtttactaaacaatatccagaaaagatttcagatggtagcaatggcgacgttgcagacgaattttattaccgtttcaaggaggacgtggcacatatgaaagaaatagggctggactcatttaggttttcgatttcttgggtccagaatactacctcgangtacggttgccggangagtaaatcaaggaaggaatta

SEQ ID NO: 7708 - DNA, 411 bp, Arabidopsis thaliana
  unsure at all n locations
  Clone ID: LIB24-062-Q1-E1-H10
gtacatgttgcaaanaccaacataattggcaaggttctacctactctgattggggacaatgtaacagtaggtcacagtgctgtcattcatgggtgtactgttgaggatgatgcttttgttggtatgggagcaacactacttgatggtgtggtggttgagaaacatgccatggttgctgctggttctcttgtgaaacagaacacgcgaatcccttctggagaggtgtggggaggaaatccagcaaagttcatganaaagttaacanatgaagagatagtatacatctcacagtcagcaaagaattacatcaatctcgcacagattcacgcctcaagagaattcanagtcatttgagcagatcgaggttganagagcgcttaggaagaagtatgcacgcaagggacgangatt

SEQ ID NO: 7709 - DNA, 478 bp, Arabidopsis thaliana
  unsure at all n locations
  Clone ID: LIB24-062-Q1-E1-H2
ntgttaaactgctccgccggtctgtaaaggtcanaaggtcgacggncccgtcngatgacatagagatttgttttgagagtgganataaggcggtggaaactagccagggaactcaccttgtttatgttcatgctggaancaatccctttgaagttatcagacaatccgtaaaggctgtggagagacacatgcagacatttcatcatcgtgagaagaagaagcttccttctttcctanactggtttggctggtgcacatgggacgctttctacacagatgtgactgccganggtgttgatgaaggccttaaaagtctttctgaangaggtacccctccgaagtttctgatcatanncgatggttggcaacaaatannagcacatagaaagatgaaaactgcgttgttcaggaatgaacacagtttgctactangcttgttggtatcaaggagaatgcanagtttcaggaagagttgatn

SEQ ID NO: 7710 - DNA, 477 bp, Arabidopsis thaliana
  unsure at all n locations
  Clone ID: LIB24-062-Q1-E1-H5
tgtnaaggtccaaaaattcccgggtcnacccacgcgtccgntttgacacaggaaataacaataatctagaaacaaagataaaaagtaattatcgtccctatggtatggactttaaattcagagttgcaactggtagattcagcaatggaatggttgcttccgattatttagccaaatacatgggagtaaaagaaattgtnccggcatatttagacccgaaaatacaaccatgacgatcttcttacgggagtatcttttgcatcgggtggtgctggctacaatcctactacatccgaagcagcgaatgcaatcccaatgctggaccaactgacatatttccangactatatanagaaagtanataggttaagtaagacaagagaagagccantataagttggcaggtttagangaagaccaatcagctaatatccaaaggagtggcaattgtcgtcgggggaagcaatgatctgatca

SEQ ID NO: 7711 - DNA, 487 bp, Arabidopsis thaliana
  unsure at all n locations
  Clone ID: LIB24-062-Q1-E1-H6
cagccgnccggtaacggtccanaaattcccgggtcgacccacgcgtccgattttcgccgcgtggattgatatgacgactctctttcgccggaagtcaatcggaatccgcgacaacttcttccttcaatccctttgattttttttttggctctacttatcccaaacccttcaaatcttcaggtccaatctcttcttctatttgttttttaattaaaaaaatccggcgaaaggtgaagctcttggattcgagtggtggctagtaatcgatttcggtagtttagaagtagtttataggttttatcagctttcgatttgatggagccgcgagtcggaaacaagtttcggctcggaaggaagatcggcggtggatcattcggagagatctatcttggtaccaatatccagacgaatgaagaagtggctattaaacttgaaaatgtgaaaaactaaagcatcctcaattgctggtaagaatcaaagttgtaca

SEQ ID NO: 7712 - DNA, 449 bp, Arabidopsis thaliana
  unsure at all n locations
  Clone ID: LIB24-062-Q1-E1-H8
tccgnccacgcgtccggagatcgagaaaggagaacantgggtcaagagagtagaaaggaaatgaatctatacgcgcacgatctttctcttctcgatttcaattacaacgtctccggtcccttcggcgagccactatctcancgcttcctctctcctggccctttcttccaaaggngaagaagacgattancgccgttatacgagctacagtcacgacggagctaatgggacgaaaaacgggcacagattcaagagcatctccgccgnatcgccacgacgggaaggtctccgttacctctgggaatggattggagttctcctcctcgtcatttggnangaagggacacggtttgggccacatgatcatcgaactgggttggagttactgtgtcactgtcccttcttgggttgaccttcccaagtcaangcgtttcagattctggccgggt

SEQ ID NO: 7713 - DNA, 410 bp, Arabidopsis thaliana
  unsure at all n locations
  Clone ID: LIB24-063-Q1-E1-A10
acgcntccgcncgcttttttccccatttcaacttttttttttcctctccagtgcactaggaaacaaaaaaaacccaagatctatagttcgatcggntcgagagaagctcgaaaatggcgctggcgttcgatgagttcgggcntccgttcattatactgagagagcaagatcannagacncgtcttanaggaatcgatgctcagaaagccaatatcgccgctggtaaagccgtggctcggatncttcgatcctctcttggacccaaaggaatggctaanatgcttcaagggacctgacgggagacatcancatcacaaacgatggtgctacgatattgggcgcaaaatggatgttgacaaccangattgcgaagantaaatgggtgggaantgtcagcggagncagggatt

SEQ ID NO: 7714 - DNA, 445 bp, Arabidopsis thaliana
  unsure at all n locations
  Clone ID: LIB24-062-Q1-E1-E6
acgcgtccgctcaattcgtttagttcatctttggaagattctcttccgattaagttttggtttttgttacaggagaggattatcaaaccattacatagggaaatcgaaatcgtttgggaatttaatggaagcgagtaacacaaacgatttggtgaaagtggagagtccattgaacaagagaagaagattgcttattgctaataagctaagaagaagatcgtccttgtcttctttcagcatctacactaaaattaaccctaattctatgccgttgcttgcattgcaagaatcnnnnnnnnnnnnnnnnnnnnnnnnnnnnnnnnnnnnnnnnnnnnnnnnnnnnnnnnnnnnnnnaactagtaagctgaaagagaagaggatgaagatgacgaaccatagagattttatggttcctcaagactaaagagctgttttaacntaacta

SEQ ID NO: 7715 - DNA, 405 bp, Arabidopsis thaliana
  unsure at all n locations
  Clone ID: LIB24-062-Q1-E1-C11
gtaccagtcgcatcaaagcaagttttggtgaanaagaagagacnaggtcttcctcttactgtggtggtgacattttcnctaaanagaaagtctccgatatgtcgnanagatggagtanaaagaagagtagacttccantagcgggtctcctctttattctcgttgtcacctttatgattctcttcaacgagcgtagcattcagcagatccatcaccacgccgcgagtcacactcaaaatctccgagaaccttccacgttcgatttcgtcaagcctaatgttcctcggattaactacttgggagctcatgaggttttggatagattcagcaaatgcaactcgacgaaagagtacatgtgggaataaaatcggatgggttgacccgtttgaaagaccacncgggtca

SEQ ID NO: 7716 - DNA, 479 bp, Arabidopsis thaliana
  unsure at all n locations
  Clone ID: LIB24-062-Q1-E1-C3
cgtagccgtccaaaattccaagggtcnacccacccgtccggtccaacnatcaccagagaggcagaggcgggttgagccacagccgcagagagcccaagatagaccgagatacaatgacagaactcgttactctcgccgcagagaaaacacaagatgaactgtaactgaagatggtatacatacacctaagctaagccagtnnnnnnnnnnnnnnnnnnnnnnnnnnnnnnnnnnnnnnnnnnnnnnnnnnnccgccacacgagggctctgtattccagtccgttgcagttaatggaccgggcttactttggatattgttgaaattctaagttttgtttctatgtaacaattttatttaataatgtaaattgaggtttcactgttttaggaaattactttgggtagaagattagttttcttttcaagaacaattcatgtgggaaatggtaaatttaatttaagtaatcctttaagaaaaa

SEQ ID NO: 7717 - DNA, 476 bp, Arabidopsis thaliana
  unsure at all n locations
  Clone ID: LIB24-062-Q1-E1-C4
gtagccgtccanaaattcaagggtcnacccacgcgtccgngaatctcgactttgatcaattgagagagaaatgaacaccggcggtggccaatacacggattttccggcggtggaaactcacggaggacagttcataagttacgatatcttcggtagtttattcgagatcacatctaagtatcgtcctccgattataccaattggtcgtggagcttaagggatcgtttgctctgtgttggntacggagacgaacgagctagtagcgatgaataagatagctaatgcttttgataatcatatggatgctaagcgtacgcttcgtgaagatcaagcttcttcgtcatcttgatcatgaaaacattatagctataagagatgttgttccaccaccactaataagacagttcagtgatgtttatatctctactgaattaatggatactgatcgcatcaaatcatcagatttaaccaggggt

SEQ ID NO: 7718 - DNA, 433 bp, Arabidopsis thaliana
  unsure at all n locations
  Clone ID: LIB24-062-Q1-E1-C5
ttttttttaattagaaacaaatggggttgagtggtgttcttcatgtggaggttgaggttaagtctccggctgaaaagttcngggtancccttggcgaagggatcaatcccctccccaaagctttcccnaannancacaaaaccatccaagttctaaccggcgatggcaacgctcctggctccantcncctcaatacntaaggagaaggntttccactggtgaagatatcggcggagaggatcgaagcagtggatttggagaacaaaagcatgtcgtacagcatcattggcggagaaatgttggagtactacaaaaccttcaaaggaaccatcaccgttatccctaaggatggtggtagccttctgaaatggtctggtgagtttgagaagaacgcccatgagattatgattcacatgtcaacaaaggactttgc

SEQ ID NO: 7719 - DNA, 441 bp, Arabidopsis thaliana
  unsure at all n locations
  Clone ID: LIB24-062-Q1-E1-C9
attcacgggtcnacccacgcgtccgaaaaccacaagaagatgtgtctgacaacttcagagccaccattcccagacactgacacaccaactatgagatctgcttcgtaccatatcaaacataaatctaagacacaaacccatcttcgtatccttaatctcaccaggaggagaagattactgaaggaacagaaggagatggagatgaggaacttgaagcttttcgtagagaatcaaagcatcatacgagagaatgaagctttaaaaaagaaagctcttcttctccaccatgaaaacaatgctctgtttgctctgcttcacccaaaatactcccctgtttcaacctcnnnnnnnnnnnnnnnnnnnnnnnnnnnnnnnnnnnnnnnnnnnnnnnnnnnnnnnnnnnnnnnnnnnnnnnaatggtactaaaataaaatcaaacta

SEQ ID NO: 7720 - DNA, 411 bp, Arabidopsis thaliana
  unsure at all n locations
  Clone ID: LIB24-062-Q1-E1-D12
ctctgccacacccgatctgaaattctccagttttgagttacgtagacctttacaagtcttagtattgagtatcactgtttattgtttagagtttatgtgttttgaatggatttatctgcttctgtcgccaaaaagctttagcctttattttttagacatggagttctccatggtttcgtatgttaagaattatgagtttaggccaaaattttttacatttttcttagaattcactgcaggactgttatggtcatggcgatggaaaccttgagagaaaggttctaccaagtatggtcctgatggtgtttactatgaangatccactcctaaaacggtcaaagtgaacgacactaagtttgggagactatgcttgaaagttccaaagttatcatccttccataagaaaatgtg

SEQ ID NO: 7721 - DNA, 483 bp, Arabidopsis thaliana
  unsure at all n locations
  Clone ID: LIB24-062-Q1-E1-D2
aactgtttagccncgacgtgncctccanaaattcaanggtccacngacccgtccgaanagtttncgggttctgtagaaaaggagatacttcaggagcagctaagatggttaaggagatggaagagagagggattaaaccgtcgaaagtaacatacacgatacttatcgacacatttgctcgttcggataacatggagaaagcaattcagcttcgactatcaatggaggaactaggattagtcccggatgttcatacctatagtgtattgattcatgggttttgcatcaaangtcaaatgaatgaagcatcnaggctttttaagtcnatggtcgaaaagaattgtgaaccgaacgaggttatatacaatacgatgattcttggttattgtaaggaaggtagttcttatagnagcattgaagttgcntaaggagatggaagagaaanagttggcccaaatgttgctagctacngatatataattg

SEQ ID NO: 7722 - DNA, 480 bp, Arabidopsis thaliana
  unsure at all n locations
  Clone ID: LIB24-062-Q1-E1-D7
ctttccccgncggtaaggtccaaaattcccgggtcgacccacgcgtccgcccacgcgtccgaaaatcataatccacttttatgtgatcgagaaagagattctaagcccagnaaacaccaaaaccttccattttcattggttcccatttttttttctttgtagctcgaattctctgctgccactactcgtaagtgaaattggagtttttaatagatctttggttgcttctgtagtctcagaatggcagcttatgtttctccctgtttaactcctccggattctcgggtactcactgttcttagaaagagtgtgttacctgatcatcatctaggcacgagggttggttgcttaagaatgagtgaaggtactactaaaagatatcgtgttgttgcttctcataagtacgagtcttcgtcaatcagaaactctttgaattctcatagtacaagccatttccaaagccaagacccttcctgaaac

SEQ ID NO: 7723 - DNA, 428 bp, Arabidopsis thaliana
  unsure at all n locations
  Clone ID: LIB24-062-Q1-E1-D9
cgtgtacgctgcgacgtgccggtccanaaattcacgggnccacccacgcgtccgnacacgcgtccgaaaacatatacttttccgacaaaacatggaagatgttaatcaggagaagaagaaagtacctccaatgtctgaaccagaaagatccacaccgattaaggtaacaatatcaagaatctttatcttaaacttgaaccaactttttggaacatcaacactacaccatgttcttgantttagnttattgaaatcttgataagtcnaatcttgtgtttaanatgttttttttaagtngtttaagagctatgtcccctcgagtccaccttcnggtgagcacaaggctttgcntttttgttgcagactacaggaggacagtatcgtttctgcaantcatgtgttganggaagtagttgcaggccagtgng

SEQ ID NO: 7724 - DNA, 436 bp, Arabidopsis thaliana
  unsure at all n locations
  Clone ID: LIB24-062-Q1-E1-E1
aaccaaaccaaccaaccccaangccaaacaaagttttatagagaccttccatttctccctctcgtgacaaacgcaatttnnnnnnnnnnnnnnnnnnnnnnnnnnnnnnnnnnnnnnnnntttgagattactttgtatcgatttagctattcgagaaactcttgccgtttgaaagttttaattgttaaagatgtcgagttctatggaatgttctgagttcgtcggtagccggagatttactgggaagaagcctagcttctcacagacgtgtagtcgattgagtcagtatctaaaagagaacggtagctttggagatctgagcttaggaatggcatgcaagcctgatgtcaatggaactttaggcaactcacgtcagccgacaacaaccatgagtttattcccttgtgaagcntcnaacatgggttccaagggtcaa

SEQ ID NO: 7725 - DNA, 459 bp, Arabidopsis thaliana
  unsure at all n locations
  Clone ID: LIB24-062-Q1-E1-E10
tacgctgnccgtgccggtccanaaattnacgggtcnacccacgcgtccgangacgcgtgggatcgaattagataatgccactccaaaaaacgttactttaccttacctatctcgctgacgtcagatcccaccgttagagcttacacttgtaacgccgtttcctgcattttccacaagcaaggtaaaaaaaagctttgtgcagaganagagagaagaagaaaaatgggtttgcntacgancaanattgagagagaagagctaangccagggagatcacatctagtacttacagagcaatcttcgcttattctcaccacggaatctttgtcggtgggtccaaagttgttcatttcagacctgnacacaaccccangggnttcagcaanatcatcaatatcancatcttcctctgnagatatctgttccatatctcntgagntgcggtttcagacaaccggg

SEQ ID NO: 7726 - DNA, 468 bp, Arabidopsis thaliana
  unsure at all n locations
  Clone ID: LIB24-062-Q1-E1-E12
ctgtttacgctgnccgtaccggtccaaaaattcccgggtcnacccacgcgtccgnaaaagatggtgaacgctatggtggagagagcgacgagcgagatgctgatcgggcctgattgggctatgaacctcgagatctgtgatatgctcaatagcgatccagcgcaagcaaaagatgttgtgaaaggcattaaaaaacggattggtancaggaatccaaaagctcagcttcttgccttaactctgcttgagacaatagtgaagaactgtggtgacatggttcatatgcatgtggctgagaaaggtgttattcatgagatggtccggatagttaagaagaagccggacttccatgtcaaagagaagattctggtccttatcgatacatggcaagaggcctttggtggccctanggcaagatatccaccaacaataacagtccatatgctcaaaatgccccaaacaaggtca

SEQ ID NO: 7727 - DNA, 492 bp, Arabidopsis thaliana
  unsure at all n locations
  Clone ID: LIB24-062-Q1-E1-E2
ttaccctgnccgtagccgtccaaaaattcaagggtccgaccnacncgtccggtttttttcctagagacctctgctgcaatggcggggatcataagccctagccctacggctctttatttcaccagtaatgtcggtgggaggcgactgaaagcagtgagctgggcgggaaagagtgtctccgggaacgttatccgccggagaagcttgagaattgctgcggagctgaaattcgtgaatgcagaagaagcaaaacagttaatanctgaagaaggttactcggtggtggatgtaagagacaagactcaattcgagagagctcatataaaatcttgctcccatattcctctcttcatttacaacgaagacaacgatattggcacgatcataaagaggacagtgcacaacaatttctcagggctcttctttggtttacctttcacgaaagtgaatccgggaatttcttaaatctgttagaaaaccagttttctcaag

SEQ ID NO: 7728 - DNA, 491 bp, Arabidopsis thaliana
  unsure at all n locations
  Clone ID: LIB24-062-Q1-E1-E5
aaacttgnccgccggccggtaanggtccaaaaattcccgggtcgacccacgcgtccgaaaagcatacaatacaatgtctactcttgttttattcctccaacttttttccatcctaccattagcacttgggttgaaccacccaaattgtgacctgaccaagactcaagaccaaggctctaccctaagaatcttccacatagacagcccttgctcccccttcaaatcatcatccccactctcatgggaagcgcgtgtgctccagacgctggctcaagaccaggcccgtctccagtacctgagcagcctcgtcgccgggagatctgtagtccccattgcctcagggcgtcaaatgttgcaaagcactacatacattgtcaaggctttgatcggtactccggctcagccgctgctcctagccatggacacgagcagtgacgtggcttggattccttgctccggctgcgttggctgtccttctaacaagggctttt

SEQ ID NO: 7729 - DNA, 410 bp, Arabidopsis thaliana
  unsure at all n locations
  Clone ID: LIB24-062-Q1-E1-C10
aactcgtctctcttgcactccaaaaagcaaccatgtctgcttttgtcggcaaatacgcagatgangctgataaagacggctaagtacattgccacaccgggaaagggcattttggcagcagacgagagcacgggaactattgggaaacgattcgccagcatcaatgttgagaacattgagtccaaccgccaagctctccgtgagctcctcttcacgtcccctggcactttcccttgcctctccggtgttatcctcttcgaggaaaccctctaccaanaaaaccacggatggcaaacccttcgttgagctcctcatggaaaacggagttatccctggaatcaaagtggacaagggtgtggttgatctagcangaaccaatggcgagaccactactcaaggtctagattcac

SEQ ID NO: 7730 - DNA, 404 bp, Arabidopsis thaliana
  unsure at all n locations
  Clone ID: LIB24-061-Q1-E1-G10
acgcgtgggcaaacaccaacgataaacctcatccaaaatactctgacgttaagcctgctggacatttggtgcagccaactgccccttctgaagttgtggaaagacctaagctgaacctgcttcctcggacaaaaccacttgaaagtgtggagaaacctgtgaatgacgaaaaactggaaaatagtgcttcagtccttatacaacgtgaaaatgcgacacagaaaagtttcaacaattcaaaatctggtttgtctacagatgagattcctaaccagccggctgagcggcccaagttgaatctgaagcctgtggcacagttgcttgagcagccagaagttaaaactgaaaaggacagaagtgcggtttttggtggtgccaagaccacgagaactggtgttgaangg

SEQ ID NO: 7731 - DNA, 415 bp, Arabidopsis thaliana
  unsure at all n locations
  Clone ID: LIB24-061-Q1-E1-G12
atntgttaaatttttcttctctcgataataaaaacaacaaatgatcgttgatcgtttttctctagattcgattccgattcnaaagaactagtctccggcgtgtaatctctgatcgttgaagatccaagctacgccgcatcttactcgccggcggcttgaatcatggctgataggagaaacaggtgtaaccagatcctccttttagcataccagagttttggcttagtgtttggagatttgagtatttctcctctctatgtgtataaatgtacattctacggaggattgagacatcaccanacagaagatacgatatttggcgcgttttctttgatattttggaccancactctcctttcactcatcaagtacatggtttttgtgtnaagttgcagatgacaatggcggaagggag

SEQ ID NO: 7732 - DNA, 443 bp, Arabidopsis thaliana
  unsure at all n locations
  Clone ID: LIB24-061-Q1-E1-G5
acgccggnccgtaacgtgtccananattcccgggtcnacccacgcgtccggcaatactacaaatggatcctctgttttatcctcactctctatttttttgcttccttctttgtcgaccatgatcaagatcatagatcttctacttccatatcaaagcatcttcttactaaccataaacctaagcttttcgcttctcgtgccatgtttgaatctaaaatccatgatcacaaacttgggtttacctctcaacaacctaacatcaanacagacgtattcaacaatttgaaaatctacgtctatgacttaccttcaaagttcaananagactggttagccaaggatagatgcaccaaccacctctttgccgcggaagtggctctccaanaaggcgtttctcagcctccaagganatgtanggacggaagatccgtatgaagccgtnt

SEQ ID NO: 7733 - DNA, 461 bp, Arabidopsis thaliana
  unsure at all n locations
  Clone ID: LIB24-062-Q1-E1-A1
acgcgtccgcacacacacacataaancacgngaaacagaatatctttgagatctcctctttatttggagaagacaaaacacanaacaagaattanaaagaanggagaganngcaaaaatggnactaagaatgtgggcttcttctacagcaaacgctctcaagctttcttcttctgtttccaagtctcatctctctcctttctccttctctagatgcttctccacagttttggagggtttgaantatgcaaattcacatgantgggttaaacatgaaggctctgttgccaccattggcatcactgcccatgctcaggaccatttaggtgaantggtgtttgttgaactgccagaggacaatacttcagtgagcaaangagaaaagctttggancantgggntaaatgtgnaagccaaaangtnanatttttancaancaaccccaggggaaacccatttttg

SEQ ID NO: 7734 - DNA, 413 bp, Arabidopsis thaliana
  Clone ID: LIB24-062-Q1-E1-A11
acgcgtccgctctgttcgtcgtttgtttttccggtggagaaaaatggtgatggaaattgtgaaaccaaacacatgcattagaggatgttgcaccaagtgaatcgatccctcttcatctcccttcttcttccttcactcttctctccccaatcgctaaaggatcagagagtgttgtttatgaagcgattctcgatggccgaagagtagcagcgaagaagcctatcttgtctacttccgatgaccttgacaagttccacaggaatttgcagctctcatgcaatctcaatcatcctggtgtggctaagttactagcagcacatgcgaagcctccaaattacatgtttttctttgacttctacgagtctgggactttagctgagaagttacacgtcgaggagtggtctccgagtatt

SEQ ID NO: 7735 - DNA, 495 bp, Arabidopsis thaliana
  unsure at all n locations
  Clone ID: LIB24-062-Q1-E1-A4
aactgtttagccgnccgtagccgtccaaaaattcaagggtcnacccacgcgtccgntcaaagcaggtgtagccctgaatgttcccctgtgcctagtccaagaatgacaagccctggtcctagctctagaatacagagtggtgctgttacacctcttcatcctcgagctggagggtcaactactgggtctcctactagaagacttgatgataacagacagcaaagccatcgtctgcctctcccgccgttattaatctctaatacttgtccgttttcacccacatattcagcagcgacatctccgtctgtcccccgaagtccggcaagggcagaggctacggttagccctggatcgcgatggaaaaaagggagattgctggggatgggaagttttggacatgtgtatcttggctttaacagtgaaagtggggagatgtgtgccatgaaagangttactctatgctcaaatgattctaaagtcaagggaagaatgcac

SEQ ID NO: 7736 - DNA, 431 bp, Arabidopsis thaliana
  unsure at all n locations
  Clone ID: LIB24-062-Q1-E1-A8
gaagagagaaaccatgtcttcgccgagcaagcgtagagaaatggatttgatgaaactgatgatgagtgactacaaggtggagatgatcaatgatggcatgcaagagttctttgtcgaattcagtggacccaaagacagtatatatgagggaggtgtgtggaagataagagttgaacttcctgatgcttatccttataaatctccatctgttggtttcattaccaaaatataccaccctaatgtcgatgaaatgtcaggttctgtttgtctagatgttattaaccaagacctggagcccgatgttcgacctggtgaatgtgttcgaagacatttcttccgcaacttcttctgtatccgaatccgtcagatccattgaatggtgaagcagctgcattgatgatgcgtgatcgtcctacctatgaacagagant

SEQ ID NO: 7737 - DNA, 469 bp, Arabidopsis thaliana
  unsure at all n locations
  Clone ID: LIB24-062-Q1-E1-A9
tacgcctggccgtaccggtccanaaattcccgggtcnacccacgcgtccggtgagagaagagagaaacatttcgaagacaaatggccgccgccgctgctcgtcctctcgtcaccatccaaaccttggatggtgacatgtccaccgatcaatcctccaccgtcgtacttcccgacgtcatgacggcgccagttcgaccagacatcgttaacttcgttcacgcccaaatctccaacaacagcngtcagccatacgccgtatcgaagaaggccggtcancacacctccgccgagtcctggggaaccggacgtgccgtgtctcgtatccctcgtgttcccggtggtggtactcaccgtgctggtcaagctgcgttcggtaacatgtgtcntggnggtcgtangttcgctccaaccaagatctggggccgctggaaacgtcgtgtcaatgtaaaatgaaacgtcacgncaatcg

SEQ ID NO: 7738 - DNA, 463 bp, Arabidopsis thaliana
  unsure at all n locations
  Clone ID: LIB24-062-Q1-E1-B1
tcaanggtcgaccgacccgtccgggacangaagcttctcanagagatccgtggaggagaattctctcaggcggatctgtttgtcggagcttttgtgaatcatcatcatcaatgggtttgttggaagcttttctcaattggnttcgtagcctcttcttcaagcaanaaatggngctttctttgataggacttcaaaatgcangaaagacatcacttgtnaatgttgttgcaactggtggatacagtgaagacatgattcctacggtcgggtttaacatgaggaaagtaacannaggaaatgttacaatcaanctatgggatcttggtggtcaaccaagattccgcagcatgtgggaacgttactgncgcgctgtttctgccattgtgtatgtagttgatgctgcagatcctgacaacctangtttgtcnaaaagtggactccaaggaattgttgnggaaaaatt

SEQ ID NO: 7739 - DNA, 414 bp, Arabidopsis thaliana
  Clone ID: LIB24-062-Q1-E1-B11
aagagtaaagaagcagaagatagaagaagaacaacaacacacgcgagaaatttcagatctttcctctctccgcatctccctttttgcatcctcgtgtaatcatcgtctaagaagaagaagaagaatccttttgcttgttgctttactttctctgcaaactttcgtatctttgcgtgtttgagaatctctctatctttctcggatttggagagttatcgaagagatcgtgtcacattaaggattgaagacaagtctttaatgcagagaaatcgtgtgaaaatggattcttaagccccacttttagttgcagatctgggagctttttactgggtttctgctaatttatcgacaagaacaaaaaaaggtttgttttgtctcacaagtgatggtccgtatgactcacatgcatgtccc

SEQ ID NO: 7740 - DNA, 452 bp, Arabidopsis thaliana
  unsure at all n locations
  Clone ID: LIB24-062-Q1-E1-B3
ccacncgtccgcatattacatagaaataatggctcacggacaccaaggcttatgctttgggtttatcttcttactatgcttcttcagctctacttttgcactcaggattcttaaggacctccctatgatggagccaagaaagctagatctgaaccatgaaatgatgcctgggatggttatgctacagccagatcatgaggtccaacctgagcacacggtcaagcctggccatacactccagtccatgtccggtgtatcagaacatccagagcacacggttaagcctggccatacactccagtccatgtccggtgcattagaacatcctgagcacaaggaaaagcctgaccataaactccagtctatgttgggagaacatcctgagcacaangaaaagcctgaacataaactccaagtctaagttgggaanaaaatcctggancacaaggaaa

SEQ ID NO: 7741 - DNA, 483 bp, Arabidopsis thaliana
  unsure at all n locations
  Clone ID: LIB24-062-Q1-E1-B5
gccgntcggtaaaggtccaaaaattcccgggtcgacccacgcgtccgngaaccgttcctcaccgtatggagctgtaatcacgatgagaaaacagatgataatgataagtgtgagtgtttgggtaagatctgtatggctgatgtaatctgttacctatccaaattcgacaacaatgttttgtctctttcctctgctttcgacgcatctgtctctgttcttcttcccaaatctcgtgccctcgtcgtccatgttcaatcttcttgcagtttgattgaagctattgatctgataatcaaaggagcacagaatctgattgttccgattcatacgaaatcaatcacaaagagaagacaacaacaaaaacttctgaaacgaaacgtcgtcgtttcactcaccaacgcaacttcaacaacccacaaaaacagccgagaattctgctggatnacacaagaaagacattaatccaatccctccccaatncaa

SEQ ID NO: 7742 - DNA, 479 bp, Arabidopsis thaliana
  unsure at all n locations
  Clone ID: LIB24-062-Q1-E1-B7
tgtctccgccggncccgtaanggtccaaaaattcccgggtcgacccacgcgtccggaatggcagcatctttactcagacttcacttccacgactgcttcgttcagggctgtgatgcatcaatcttgttggatgatagtgcaaccataagaagtgaaaagaatgctggaccaaacaagaactccgttagagggtttcaagtaatcgacgagatcaaagccaaacttgagcaagcttgtcctcaaactgtctcctgcgccgacattctagctctagctgctcgtggctcaactatactgagtggtggaccatcatgggagcttccactagggaggagagactcgaggaccgctagccttaatggcgcaaacacgaacattcctgcacctaactcaactattcaaaatctcttaaccatgttccaacgtaaaggtttgaacgaagaagaccttgtttccctatcaagaggacatacnaatgg

SEQ ID NO: 7743 - DNA, 434 bp, Arabidopsis thaliana
  unsure at all n locations
  Clone ID: LIB24-062-Q1-E1-B9
gtcnacccacgcgtccgtagaaatcaagatgggaagccaaggcatgagttcaccgagtcccttggtggtgaagaaatcgcaagtggttatagtgaaaccctcaaaggctacacctgatgtctctctttctctctccacactcgacaacgatccttatctcgaaaccctcgccaaaaccatctatgtctacgctccaccatccccaaacgaccacgtccacgatccagcttccctttttcagcaagctctctctgacgcccttgtctattactaccctctcgctggaaaacttcaccggggatcacacgaccatagactagaattgaggtgcagtcccgcggaaggagtcccctttgttanggcaaccgcanactgtactctctcttccctcaactatttgaaggacntggacactgacttataccaactcgtan

SEQ ID NO: 7744 - DNA, 501 bp, Arabidopsis thaliana
  unsure at all n locations
  Clone ID: LIB24-061-Q1-E1-G1
gttacgcctgctgtaccggccccnaaattcccgangtcgacccacgcgtccggttgctctggacatcaacacaagagggcccggtaatctcatgggattcgccaagaagtgcaagaaactcaaactgttcttgcaagtatccacagcttatgtgaatggacaaagacaaggaaggatcatggagaagccattttctatgggagattgtatagcaacagagaacttcctcgaaggaaacagaaaagcattagatgttgatagagagatgaagttagctcttgaagctgctagaaaagggactcaaaatcaagatgaggcacaagaagatgaaggatctcggtctagagcgggcaagatcatatggatggcaagacacttatgttttcaccaaagcaatgggtgagatgatgatcaantagcactcgaggagacgtacctgttgttattataanggcctagcgtcatcganaggcactttacaaaggatcctttcctgggatg

SEQ ID NO: 7745 - DNA, 427 bp, Arabidopsis thaliana
  Clone ID: LIB24-060-Q1-E1-C8
gggtgaagttttgacggagtccctgactctaaaagagacatcaattccaaccaaagttgctagactcatgcttgtgtctgatattcttcataatagcagtgcacgtgttaaaaatgcatctgcataccgaaccaaattcgaagcaactctacctgatataatggaaagcttcaatgatctgtaccgaagcataactggaagaattactgctgaggctctaaaagaacgggttctcaaagtactgcaagtatgggcagattggtttctcttttcagacgcatacatatatggactacgttccacatttctccgatcaggagtctctggtgttacctcatttcattctatctgcggtgatgcacctgaaatagaagaacaaaagttacgctgacaatatgagtgatattgggaaagataaatccaagat

SEQ ID NO: 7746 - DNA, 458 bp, Arabidopsis thaliana
  unsure at all n locations
  Clone ID: LIB24-060-Q1-E1-C9
tttacgcctgnttgtaccgncccgaaaattcccanatcnacccacgcctccgcactgatgcaattcaagattggatcnagagagttgcggttattccnnnnnnnnnnnnnnnnnnnnnnnnnnnnnnnnnnnnnnnnnnnnnnnnnnnnnnnnnnnnnnnnnnnnnatccgcgccttttatcgangngcttggtcaattctcttaccgtgtangcccagggaatttctgtcnggtccatgtcagcctcgtgcctgtgcttaatgttgttggtgaacagaaaactaanccgacacagcatagtgtcaangggctacgaggattgggcttgacgccggatatcttaacttgtaggagcacaaagccacttgaagataatgngaaanaaaaactagctcagttttgccatgtcccgccttgagtatacctcactctctatgatgtcccancatttggcgtt

SEQ ID NO: 7747 - DNA, 408 bp, Arabidopsis thaliana
  unsure at all n locations
  Clone ID: LIB24-060-Q1-E1-D10
ataagctgcagattctatctttttggttggatatgtctctgtttgaagttatatatttatagttttgaattcataggatgtggtgatacgtttgtaatctcgtgccatatctttggtttgtcaaagagagtgtgttttaatgtcaatttctgggtaaccaagtttgagcttattccttttgattctgcccggctctctgantttttaaggtgagattcctaagcatgtcaattactttttttttttttttaacattcgcaattttcttgagttggtgacgttttcgagattttgttgattangtgcaagacgacaagtgatgaaaagatagagacaaaagaaaggcttcaagtttgttgatanctgctgtctaaagagttcgttcccttgaganattctgactccgac

SEQ ID NO: 7748 - DNA, 437 bp, Arabidopsis thaliana
  unsure at all n locations
  Clone ID: LIB24-060-Q1-E1-D2
ggtcctagtgngagatacttatnaaggtcagtgggtgatgaacctgaaacatggacatggaatcaagcgtttcgcgaatggagatgtgtatgatggtgaatggaggaggggtttgcaagaagcccaaggaaagtatcagtggagagatgggagctattacatgggggaatggaagaacgctacgatctgtggcaaaggtacttttatttggacggatgggaatagatacgacggattttgggatgacggttttcctagaggaaacggtactttcaaatgggctgatgggagtttctacgttggtcattggtctaatgatncggaagagatgaacggtacttattatccatcaggagacgacgggaatcctgnattggatnccnaaagaccngtttaccaaatctgagtgagtacaagatctgcagccggagaagana

SEQ ID NO: 7749 - DNA, 496 bp, Arabidopsis thaliana
  unsure at all n locations
  Clone ID: LIB24-060-Q1-E1-D4
ctgttacgcctgccggtancggtccanaattcacgggtcgacccacgcgtccggcaaatttctccgttcgagatcaattccgtcgagatctcaagctctctcactcgtagtaaaaaaatggcggcggtagcggcaccaatggcttcgaagccccgtggatctaaagctgaatcgttcgtagacaacaagcggagagaagatatccgattcgcgaacatcaactctgctcgagcagtctctgacgccgtccgtactagtttgggaccgaaaggaatggacaagatgatttccacggcgaacggagaggtaatcattactaacgatggagctacgatccttaacaagatggaggtttttgcagccaagcggcgaagatgttagtcgagctttccaaatctcaagattcagccgccgggagatgggtaccacaactgtcgtagtaatcgccggtgcgcttctcaaggagtgtcaatcgcttctcacaaacgggatncaa

SEQ ID NO: 7750 - DNA, 423 bp, Arabidopsis thaliana
  unsure at all n locations
  Clone ID: LIB24-060-Q1-E1-D5
aaaaagagaaaaaaatagtgaatcaagctgtctcgtagcagtctttatagatcaaacgataatcgaatccaacgacccannnnnnnnnnnnnnnnnnnnnnnnnnnnnnnnnnnnnnnnnnnnnnnnnnnnnnnnnnnnnnnnnnnnnnnnnnnnnnnnnnnnnnnnnnnnnnnncaatctgatctaaagcttttgtctgaaaaaaagtgtcagactttctatgaagatgttgttggtcaatgggtgatttttagtttgtgttaaagcagaagcataagattacttggtgaatcgattacaattttgatttgattcagatatttgaagggttcttactagaatttgaattggggatctngaattccgatcaggcttttagagangtagggaacattggaattgagatcggggtcaancttttg

SEQ ID NO: 7751 - DNA, 446 bp, Arabidopsis thaliana
  unsure at all n locations
  Clone ID: LIB24-060-Q1-E1-D8
acgcgtccggaacagttgaagatacaatacgaatgttcatcttcgcttgtggatgtgaccgagcttgaaaaccaagtagagagtctggaagctgagctcaagaagcagtccgaagagttttcagagtctttgtgccggattaaagaacttgaatcacaaatggagacattggaagaagagatggagaaacaagctcaggtattcgaggcagacattgatgctgtcacacgtggtaaagtggagcaagagcaaagagctatccaagccgaagaaactctaaggaaaacgaggtggaaaaacgctagtgtagcaggaaaactccaggatgaattcanaagactctctgagcagatggattcaatgtttacatcaaatgagaaaaatgggctatgaaagcgatgacagangctaacgaattacgaatgcagaaacgtcaactagaagaa

SEQ ID NO: 7752 - DNA, 472 bp, Arabidopsis thaliana
  unsure at all n locations
  Clone ID: LIB24-060-Q1-E1-E10
ttacgcctgcntgtaccggcccgaaaattcccgagtcgacccacgcntccgcgtcactcttcttcaattcgaagaatcttttaaaccctaatcctctttctcgcttcatttctctcaaatctaacttcctccctaaattatctccgagatcgatcactagtcacaccttgaagctcccatcttcgtcaacctcagctttaagatncatttcctcttcnatggnttcttcnttcaancctgancaagctagagttccctctgctcttcctctcccagctcctccgttgaccaaattcaacatcggnttgtgtcangctatctgttacatctgacaaaaagngaaacatntcncatgctaanaaagccattgnagaagctgcttctaaangagctaagcttgttctcttaccccgngaatttggnaacagtccgtattccaatgagagttttccagtttaaggcgngggggaga

SEQ ID NO: 7753 - DNA, 414 bp, Arabidopsis thaliana
  unsure at all n locations
  Clone ID: LIB24-060-Q1-E1-E2
tgtttcacgtcgttcatgtcaaattcactttgatgaccaaggcgatggttattgcacaagcacacattggagttgaaggagacctcgctgttaagttgggcanaagctacaccgtnatggctgaaaggtttgtcaaccttttggagatgatgtctacggtctcggccaagtataagttcgatgctaatgcnaagataagcgctantgagagtgctgagattganaaatgtgtgatgaagttgaagagtgccattaggtcttacgtgaaggtgatctctcagtgcagcacganattctctgctgggaagagtattggtttccccacttaccccgttggtttcattggaggtatacctanacaaggtctccggatntgcnggtaaaatttgttggaccctcatgggcaaatttgga

SEQ ID NO: 7754 - DNA, 491 bp, Arabidopsis thaliana
  unsure at all n locations
  Clone ID: LIB24-060-Q1-E1-E4
ctgttacgcctgccggtngcggtccanaattcacgggtcgacccacgcgtccgatttttatgcgatttgcactaggtgggaagaacagtacggatagatctttgataacagaaataatgtgttgggtttcacagaatccacctccagctcatctcttccttatctctagtgatagcgatttcgcgaatgtgctacatagattgaggatgaggaattacaacattttgctcgcgtgctacgaagaaacgacgcttggtgtattgtgcagtgctgcttcgattatgtgggattgggatgctttagttagagggcaaaatccaactgctaaacattttaatcagccacctgatggtccttatcattcttggtatggtcacnatacaactcctcttcttgacccatttgccacatctaccaataataagcagatatcttctactaatgtcaaaaccgtagagttgccccgaattgggttcctccaaagtcccngc

SEQ ID NO: 7755 - DNA, 440 bp, Arabidopsis thaliana
  Clone ID: LIB24-060-Q1-E1-E5
acgcgtccgatcccaaggaaggctcttgtgatattactcttaagctaccacattctcttcctcgtattttcccatcagatcaagaaaatatggaaggttaccatacatatcgtgggggattctggaattacttcagcttgggaatggatgctcaagtatcttatgcatttcattcccagagaaaactgcacccggaaaggtttaaaaatcagctagttaatcagagcacatatctaaagcttagttgcacacaaggatggttttttgcctctctttttcacccttcttcacaaaacatagctaagcttgcaaaaattcagatttgtgatagaaatggccaatggaatgatcttcatattccccaaagcataaggtccatagtatgtttgaatcctcctagtttttcctggaggactaaatccttggggaacaccaaatcc

SEQ ID NO: 7756 - DNA, 484 bp, Arabidopsis thaliana
  unsure at all n locations
  Clone ID: LIB24-060-Q1-E1-E6
ccngccggtacaggtccaaaattcccgggtcgacccacgcgtccgcggacgcgtgggtcaagctcgacgaagatgtcttgcttgatttcatcaacttgctcactcgtccccttcgactcgaatctgactcgttcgaatcgtttcaccaaactgggttctgcagtttcatggcaatcttcctttcctaaactctccatcgaaatcggctctgttatctcatcccccattgtcaagaaggtaaagccgtctactttcgtagtccatgcacaatctctgaggttgtttcgtactttctcttgcgcgtatagtattgtgcttgtctgattttttttangcttaagtgtgttcttatatgtttgaagctcgttgttcagatttaggcaattgtaatttgtggtttaaaggtaaaaatctaaggcttcttctagtgaatctttatgaacatgaaanctanganactcctaatgtgaataaaaantgttgg

SEQ ID NO: 7757 - DNA, 446 bp, Arabidopsis thaliana
  Clone ID: LIB24-060-Q1-E1-E7
acgcgtccgtggatctgttagaaatggttatgaggatcctcttgcactctctcccacggttgtgcgattttattcgcttagatcgcataactatgttcatgttttgaggtttagatctactgtttatatggttagatgcagtcctcggattgtcgctgttggcctcggttcgcagatatattgttttgatgcgctaactcttgaaaacaaattcagtgtcctctcgtatcctgtacctcagcttggaaaccaagggatatctggggttaatgttggatatggtccaatgggctgtcgggggctaagatggttaagcgtatgcttccaatagtcccttgtcttctagtataggtcgtctgagccctcaaaatgttactcctcctgggtgtcagtccaatctacctccgccaaataatggtaatcctggtgggcaagatacgctatgg

SEQ ID NO: 7758 - DNA, 448 bp, Arabidopsis thaliana
  unsure at all n locations
  Clone ID: LIB24-060-Q1-E1-E8
acgcgtccgaatcgttccttctctgaagctctctttgcaattgaaaatcaacaacatacgatacgagagaggattcttcgagagatgagcagcacaagcactagttctgctcttatccaccatttccgcctcaccactcgcaacttgggttcgcctacaaagcagcgttgtccttacgctgtaactttctgcaattcgtggagggaagctggactccgatactccgtcacgcaacgccggagcaaaggctttgggccggtgtcagctctcaatgacgacgattcaccaacagagaccacccccggcgttggctctgctgtagaagacagannaccagattcatctgaagatagatcaagttcggtctatggagtttctgtatccccgtaaagaggagctccctggatgacaaaagaantgactattttcgaccaatctcgaggagctc

SEQ ID NO: 7759 - DNA, 439 bp, Arabidopsis thaliana
  unsure at all n locations
  Clone ID: LIB24-060-Q1-E1-C7
acgcgtccgcactgatgcaattcaagattggatcgagagagttgcggttattccnnnnnnnnnnnnnnnnnnnnnnnnnnnnnnnnnnnnnnnnnnnnnnnnnnnnnnnnnnnnnnnnnnnnnatccgcgccttttatcgaggcgcttggtcaattctcttaccgtgtaggcccagggaatttctgtctggtccatgtcagcctcgtgcctgtgcttaatgttgttggtgaacagaaaactaagccgacacagcatagtgtcaaggggctacgaggattgggcttgacgccggatatcttagcttgtacgagcacaaagccacttgaagataatgtgaaagaaaaactagcctcagttttgccatgtcccgcttgagtatatccntcactctctatgatgttcccaacatttggcgtantcctttgttgctaaaagatc

SEQ ID NO: 7760 - DNA, 464 bp, Arabidopsis thaliana
  unsure at all n locations
  Clone ID: LIB24-060-Q1-E1-A12
ggaactgttagcctgcctgtaccgcccgaaattcccgaagtcnacccacgcntccgcaagttttccatatactaatggggaggtttcataaatttcctctcctaggtttagttctgttcctcggtctgaccggctcacttatcgccgccaatgagtatgcctgttctagtaccgatatacactttactcgtgccaatttccctaaaggtttcatttttggtaccgcaactgctgcttttcaggttgaaggagctgtaaatgaaggatgtagaggtccaagcatgtgggacgtatacaccaagaaattcccacataaatgtaattatcacaatgccgacgttgctgtcgatttctaccatcgttacaaggaagatatcaagttgatgaaaaatctgaacactgatggctttagattttccattgcatggcccagaatattcccccatggtangatggagaaaggg

SEQ ID NO: 7761 - DNA, 454 bp, Arabidopsis thaliana
  unsure at all n locations
  Clone ID: LIB24-060-Q1-E1-A3
gtcgacgnacgcgtccgcgttttccgatttagggcaccaaattgaatcaaaatctccgcttcttcccaatttacgaaacttcacgaaaaatcttcttcggattcttcttaaccctnnnnnnnnnnnnnnnnnnnnnnnnnnnnnnnnnnnnnnnnnnnnnnnnnnnnnnnnnnnnnnnnnnnncattgtaggcggtttcgcgtcttgtcaccgaatgatacattgtctcacgtgagattgtcagtcagttagtgcaatgtcaaaccttcattcatctctcaatggttcagcttcgaatttaccagatggttcgggcagatcgtttactgcttcttattctggacaatctggtgcaccgtctccctcttttcatcatactggaaatcttcagggacttcaaaataatcaaggggaaactataatgtcgggaacaatgcaaaggtacacttacatc

SEQ ID NO: 7762 - DNA, 426 bp, Arabidopsis thaliana
  unsure at all n locations
  Clone ID: LIB24-060-Q1-E1-A6
agaggcttcgcttacttgctgagaaaaaagctccaaactttctcttattgggtttttgatcagctccggagataaaaaaaaaaagtattttcttgaaatcgaaatctgatctccattgagagtcttgctacttgatttggattccgatttaaggttttctcgagaattcttttgctgcagttattagattttgacgagccgttgatctggacggagttccagatctccgggtcgtggtaccaaggaattanggttttaagcacaaagttctcgtttttctgtgtattcgagggatgaaggagttttcgggtcnatgttcggctgctctaacatttggncgnatgaangangaacatgaagaaatttctcaagaaaagcnttcggtntcacgcgcantcaacggagaagaatggtgaaggttcnagt

SEQ ID NO: 7763 - DNA, 434 bp, Arabidopsis thaliana
  unsure at all n locations
  Clone ID: LIB24-060-Q1-E1-A7
acgcgtccggctgcagccacagagaagacttgctccttcgagtcaacgcgaaaaactgtactaaagttccaagaagttagcccctgggccacgtttggacacgtggcggcaaacggagcaatcttggaagcagtagacggagaggcaaagatccacatcgttgacataagctccacgttttgcactcaatggccgactcttctagaagctttagccacaagatcagacgacacgcctcacctaaggctaaccacagttgtcgtggccaacaagtttgtcaacgatcaaacggcgtcgcatcggatgatgaaagagatcggaaaccgaatgggngaaattcgctagggcttatgggagttcctttcaaatttaacattattcatcacgttgggagatttatctgagtttgattctcaacgaactcgacgtttnaa

SEQ ID NO: 7764 - DNA, 412 bp, Arabidopsis thaliana
  unsure at all n locations
  Clone ID: LIB24-060-Q1-E1-A9
acgcgtccgcccacgcgtccgcccacgcgtccgcccacgcgtccgactctgtgagctttatccgcttccaatggcgtcttccgccgcttctccttccttatctctactctcattcacctcgaagccaccttatccctccggctctcagcggctatttgcgtcattcagaacggacggtcttttcgcgcctttaacactgaaatcccgacgcggccgtggtatagtcgttaaagtagatgacgtcgatgctgatggaggtggagcggacgaagtatgatatggatgatgaggnggtagangaagttgacaacaagaagggactatgatgtcgagtatgaaccccttggccgccgcgataancggctgcaaggcggtggtgggtgattggagatatcgctttggtcaanagtaa

SEQ ID NO: 7765 - DNA, 403 bp, Arabidopsis thaliana
  unsure at all n locations
  Clone ID: LIB24-060-Q1-E1-B1
gcgtccggccagtantactcgtgatgtatctagtgcagtacatgccttcccttggcttctggctcatggacaaggttggaggaaagcgtgtggaggtcgcggaaaagaaaggcaacacatactcgtgggatttactgttcgggaagaagactaaaacaaactgaagctgattctctagaagatacacatagatgtggttggttgagccttagtccgtaaatgtggttggtgtttgtttgctantttgattgttaaataactaccaaagcgtcnaaaaatgttttgttgcccttgtgaggtgctcantaagttangaaaaagatgtgattaannngagnaggcagananaaaaaggncgggccgctctaagaaggatncaangcttaacggtacgcngtgcatg

SEQ ID NO: 7766 - DNA, 467 bp, Arabidopsis thaliana
  unsure at all n locations
  Clone ID: LIB24-060-Q1-E1-B12
aantgtttagccggttgtaccgccccaaaattcccgaagtccacccacgcgtccgaaaaaaacancgataaaaccgngnacatcaagcaaacanaaaaaaaagagaagagaaattatttttttttgttttcgttttcaaaaacanaatctttgaattttatggcaacccgtcttctccgaacaaactttatccggcgatcttaccgtttacccgcttttagcccggtgggtcctcccaccgtgactgcttccaccgccgtcgtcccggagattctctcctttggncaacaagcaccggnaccacctcttcaccacccaaaacccaccgagcaatctcacgatggtctcgatctcnccgattaagcccgtcttttctccctctatcccaacctctgatctcctccgttccaccgccgtgttgcatgcggcggggataggtcctatggtcgacctaggggacgtgggtc

SEQ ID NO: 7767 - DNA, 411 bp, Arabidopsis thaliana
  unsure at all n locations
  Clone ID: LIB24-060-Q1-E1-B2
acgcgtgggaaaaatatcaaagtgtcattantanaaagacgagaaagaaagaccaaccctgaaacatggctgaagaacaacaaaactcagatcagagcaatggtggaaacgttattccaactcctgaagaagttgctacgttcctgcacaaaactgttgaagaaggtggatgggaaaaatgttgggaagaagagataacaccatgggaccaagggagagccacacctctcattgttcatcttgtcgacacttcctcactcccacttggccgtgctctggtccccggctgtggtggaggacacgangtcgttgccnatggcaagtcctgaacgccttcgttgttggatttggtatttcccganngcgcactccncgaaagcctaatgagaacttacgggctcctccaccaan

SEQ ID NO: 7768 - DNA, 475 bp, Arabidopsis thaliana
  unsure at all n locations
  Clone ID: LIB24-060-Q1-E1-B3
cgtccaaaaattcaangggcnaaaannnnnnnnnnnnnnnnnnnnnnnnnnnnnnnnnnnnnnnnnnnnnnnnnnnnnnnnnnnnnnnnnnnnnnnnnnnnnaccgtcgtcaacaactgtcccttcactgtctggccagccattcaacccaacgccggccaccccgtcctagagaaaggtggcttcgctctcccaactttcactcaccgctccttcaacgttccaaccacacactggtccggtcgcatctgggccagaacctggtgtgcccactacaacggaaaattctcctgcctcaccggagactgcggaaaccgcctggaatgcaacggtctcggcggggcaccaccagcttctctagctcaattcgacctccaacacggtggtcaccacgacttctcctcttacgggtgtctctctcgttgnacggttacaaatgttcnaatgaaccgtgactcctcaanaaaggcaatgg

SEQ ID NO: 7769 - DNA, 442 bp, Arabidopsis thaliana
  unsure at all n locations
  Clone ID: LIB24-060-Q1-E1-B6
acgcgtccgcttcttctccactattttcaatggctttaacattgtcaaccacaaagaccttcactaacataaactgctcaaacaatacttccaacataaccacctttaagcctctcaagcttcctcttttctggccatggcaaaaggtcaaaatgggtcctttaagtgtttctcctatgggttttgggacatgggcttggggtaatcagcttctttggggttatcagacttccatggatgatcagcttcaacaagcttttgaattggctttggaaaatggaatcaatttgtttgatactgctgattcttatggcactgggtaggcttaatggccaaagtgagagacttttggggaaattcattaaagaatctcaaggacttaaagggaaacnagnatgaagtagtggtagctacaaagtttgcagncttaaccaagggaggt

SEQ ID NO: 7770 - DNA, 482 bp, Arabidopsis thaliana
  unsure at all n locations
  Clone ID: LIB24-060-Q1-E1-B7
ccgccnggcccggtacaggtccanaaattcccgggtcgacccacgcgtccgcccacgcgtccgatggagccatctccaatgtgactctccgccagtctgccacatccggtggaactgttacatatgaggggagatttgagattctgtctttatcgggatctttccatttgctggagaacaatggtcaaagaagcaggacgggaggtctaagcgtgtcattatcaagtccggatggtaatgtcctcggtggcagtgtagctggtcttcttatagcagcatcacctgttcagattgttgttgggagtttcttaccagacggagaaaaagaaccaaaacagcatgtgggacaaatgggactgtcgtcacccgtattaccgcgtgtggccccaacgcaggtgctgatgactccaagtagcccacaatctcgaggcacaatgagtgagtcatcttgtggaggaaggacatggaagccctantcatca

SEQ ID NO: 7771 - DNA, 475 bp, Arabidopsis thaliana
  unsure at all n locations
  Clone ID: LIB24-060-Q1-E1-C1
gtccanaattaaaagggtcgacggacgcgtccggaaggancaaagaagctatgggcttccaatttctggacttcgacgcactacaaagagcttaaggacccagaagaggttaatgttgttcatcctcttgatgctcatagaggaatctctgttgaagatttcagactcattaagcttcatatgtctaattatatatcgaaactggcacaacacattaagattaggcaaagagttgttgcaactgcantaacctatatgcgtcgtgtttacacaagaagagtttgacggaatatgagcctcggcttgttgctcctacatgcttgtanttggcntgccagagcaggaagnagagtgtgggtgcatgccaaaacntccttgtcgtcctacatgaaaaaactttatggcgggtgannaagttttcnatnagagnattaacggntntcctngnaatnggngaatgaanggccttgggaaa

SEQ ID NO: 7772 - DNA, 419 bp, Arabidopsis thaliana
  unsure at all n locations
  Clone ID: LIB24-060-Q1-E1-C2
cacctgactcgtcttctcatcctacccccaattcaatattcgtcgccaatatgccgcaaagacactcgaagaacaacaatgatcttgcgtatttcacttacgacgagaagaagaagttaggttatggaactcagagagagagattggggagagactcgatcaaaccctttgatgcttgttctctctgcttgaagcctttcattgatccgatgtgttgccataagggtcatgtcttttgcagagagtgtatacttgaatgtttccttgctcagaagaaagatatccaaaggaggcttgctgcacattcgtctcanaagaagcaagataaggatgnagaagaagagaggctaatgttacaaaaaggcgagagaactccaanaaattggntaagcaaaaaccatagttgcaatggcctccaa

SEQ ID NO: 7773 - DNA, 399 bp, Arabidopsis thaliana
  unsure at all n locations
  Clone ID: LIB24-060-Q1-E1-C3
atgtgaacacatcaaatgattttaacaccaatccaaaggagacagtggtattagatgagaactctatggaatctgaagattcatcgggtgaagtatacgaaaccgggtgtaatgaaattacttatgcaattgaggaggatgaagaagatttttcagagagggaatatgtcgaaaatgtggagaatttctctaacataacctctactcctctacggtcacagccagaaagaatgcagaaattggagtctcgagcaaaaacacaatgtgtgtttgaagatgaggatctgagtagtgacagtgacaacaaacntccagaagctgagacttcanaagaaggaaatggtttggganaaggtcatgttgtatccaacctantcgagtctttgaaaagnaaacccc

SEQ ID NO: 7774 - DNA, 434 bp, Arabidopsis thaliana
  unsure at all n locations
  Clone ID: LIB24-060-Q1-E1-A1
gggcggacgcgtgggatcgccgccaacgaacccatcctttgcctgatctgggagcagattgccattctctacaccggatcgcttgaagaccgctctgatgccgccgcctcgctggtatctctggcccgtgacaacgatcgctacacgaagcttatcatagaggaaggangtgtggtgcctctccttaaactgctcaaggaagggaagcccgaggggcaagagaacgcagcgcgtgcgttagggttactgggacgtgatcctgagaacgtggagcacatgattcacggcggcgcttgttccgtcttcgggaaattcctcaaaagaanggcctatgaaagtccaaggcnggtggtttgcntgggctacgtccggagcttgtgtccaatcaccccnaagntgccaannacgtcttcggctcaaagaanaacggcaat

SEQ ID NO: 7775 - DNA, 412 bp, Arabidopsis thaliana
  unsure at all n locations
  Clone ID: LIB24-059-Q1-E1-E12
tcacgctatttggaaggattcaagcaactttggtgatatctatgacgaagatcacttcatatcaagccttgaaggttatgtgaaaatagtgagagatgttcctgatgagataatgactcgttttagttacaatgtttcaagtattcctactattcgtgttcaagcttgggctactgtgaactactataacggggaagtttatccggttttaaaggaacatggggttattcggataactcctttcgcaaatagattggcgatgagtgttccaccgtatatacaacttttgaggtgcatagctaattacaaagcattgaagttttcttcacctatatcaacactagctgagaagttagtcgatcggatggttgagaaaagctccgcgaaccggagggaaagtatgtcccgggnc

SEQ ID NO: 7776 - DNA, 381 bp, Arabidopsis thaliana
  unsure at all n locations
  Clone ID: LIB24-059-Q1-E1-E7
tctctccttgagtatcttcttatcctattttccaaattccaaaacaattcacaaaatggctacatgctggnctgagccgattgtttccgtgcaatccttgtcccaaaccggtgtaccaactgtaccaaaccgctatgtgaagccggctcatcagagaccggtctttaacaccacccaatccgatgctgggatagaaatccctgttctagacatgaacgacgtttgggggaaaccagaggggctaaggctcgtgangaacgcgtgtgaggagtggggtttcttccaaatggtganccatggggtgacccactcgttggatgggagagagtgagaagagcgtggcgaaaagntcttcganccaacggctngagggaaaaacgg

SEQ ID NO: 7777 - DNA, 326 bp, Arabidopsis thaliana
  unsure at all n locations
  Clone ID: LIB24-059-Q1-E1-E8
gggcaatgttaatggtttttctcctggtgattgggtcattccatctccaccttcttcagggacttggcagacttatgttgtgaaggaagagagtgtgtggcacaaaatcgataaagagtgtccaatggagtatgcagcgacgattactgttaatccattgacggctttgaggatgcttgaggactttgtgaacttgaattctggggattctgttgtacagaatggtgcaacaagtattgtgggtcagtgtgtcattcagttggcangactccgtggcatcagtaccatcaaccttattcgtgacanggctggggtcggangaaagc

SEQ ID NO: 7778 - DNA, 413 bp, Arabidopsis thaliana
  unsure at all n locations
  Clone ID: LIB24-059-Q1-E1-F10
ttcttctcagactaatgagctctatcagttggccgctgtagcattttgtttacttgtcgcttggtgtagtgacaagctcggtctaagtctggagttgggttcctttgcggcaggagtgatgatctcaacaactgatctcgctcagcatactcttgaacaggtggaacccatccgcaatttttttgcagcactgttccttgctagtatcggcatgttgatacatatgcacttcttgtggaaccatgttgacattctgctagcagctgtgttactggtgatagtgataaagacggtggtanttgctatcgttgttaaagtctttgggatacaataacaaaactgcagtacttgttggtatgtcccttgcacagattgngggaaattgcttttggttctgccaaantcgaacaatc

SEQ ID NO: 7779 - DNA, 414 bp, Arabidopsis thaliana
  unsure at all n locations
  Clone ID: LIB24-059-Q1-E1-F11
ataatggcatcaattctcaggtcagtggcaacgacttcagccgtcgtagccgccgcctctgcgattcccatcgcgannnnnnnnnnnnnnnnnnnnnnnnnnnnnnnnnnnnnnnnnnnnnnnnnnnnnnnnnnnnnnnnnnnnnnnnnnnnnnnnnnnnnacgtctcttgggactttcacgaagcttcgttagctctccgatggcgactgctctcacttctgatcgtaatctccatcaggaggatcgagccatgcctcagcttcttactgagtttatggtggatatgacatgtgagggttgtgttaatgctgtgaagaacanattagaaaccattgaaggtattgagaaagtggaagtggaatttgtccaaatcaaagttgtaaggatacnttggattcttcccngggttaag

SEQ ID NO: 7780 - DNA, 526 bp, Arabidopsis thaliana
  unsure at all n locations
  Clone ID: LIB24-059-Q1-E1-F3
aactgttagcctgccttaccgggccaaaattcccggancgacccacgcgtccgctgagttttttttagcaatggcgaaaatgattcctagcctcgtctctctaattcttatcggtcttgttgcgatcgcctccgccgcagttattttcgaggagcgctttgatgatggctgggagaacagatgggttaaatctgagtggaagaaggatgataacactgctggggagtggaagcacactgcgggaaattggtctggtgacgctaacgataaaggtatccagaccagtgaagactacagattcctacgccaatttcaagcctggagttcccctgaaattcaagttancaaagggacaaagaaccttaagtccttccaaattcctcaagtcaaagcaacgaagcaaaaagccttgaactgccnggtgggtnggctaacaatngaaanctactaaagttggtgatgtttgaccaaaaangaaaattttgggtggangacacaccaatacaagtatcaatgtttgggtccc

SEQ ID NO: 7781 - DNA, 511 bp, Arabidopsis thaliana
  unsure at all n locations
  Clone ID: LIB24-059-Q1-E1-F4
aatgtttacgcctgncctttacgggccanaaattcccggnacgacccacgcgtccgnacacgcgtcangctttcactcgccattattgttcnctcttcttcntcttcttattctctggatctctccttctcactctcttctttctacagttatttcgctttagcagattacttaaatccacngtttcttcttctccgggagcatttatggcgtcagcggtgacggngtcaggcaaggtggagaaaggacatcagctatatanagacggcaagtataaggaggcgcttctcttcnatacggangctcttactgctgctaaaagctnaaaccacaggaanatcgctcttcacaancaaaccggcgcccgctttgttaactttgaaatttgcacgnatttcattaagnggnaagcangaaagaatgcaacttngtgttcnttgagccttgatcaagaaacataaccggagcgttgaangctgaagggntcaagactttangtccctccctaaaa

SEQ ID NO: 7782 - DNA, 404 bp, Arabidopsis thaliana
  unsure at all n locations
  Clone ID: LIB24-059-Q1-E1-F9
aaacattccggcgatatataaagtcagcaatggccgttctctcctctgtatcttctctcatacccttctcttatggggcaacgagactgactagtaaagcttcattagcctcaagaacttccggattcaatctctcttctcgttggaactcaacgagaaactcccctatgttgtatctttcgagagcagtgacaaacaacagtggcaccacagagatttctgataatgaaacagctccaaggacttactcatggcctgataacaagaggccaagggtgtgcattctaggtggtggctttggaggattgtacacaagctttgagattagaatctcttgtttggcctgaagacaaaaagcctcangtggttttggttgaacaatccgaacgttttgtgttcaancc

SEQ ID NO: 7783 - DNA, 493 bp, Arabidopsis thaliana
  unsure at all n locations
  Clone ID: LIB24-059-Q1-E1-G1
ccgagcccanaattcccggaaacganccacgngnccgcccacgcgtcancccacgcgtccggaacaatggcttcctctatgctctcttccgctactatggttgcctctccggctcaggccactatggtcgctcctttcaacggacttaagtcctccgctgccttcccagccacccgcaaggntaacaacnacattacttccatcacaatcaacggcggaagagttaactgcatgcaggtgtggcctccgattggganagaagaagtttgagactctctcttacctttctgaaccttaagcgattcngaattnggctaangggaagtngactaacttatccgcaacaangtggantcccttggngttggaatttcgagtttggggncacgggttttgttgttancggtgagccacgggtaacgtcancccgggattactatgattggggcgggtattggacantgtggaaagcttccccttgtttcgggttncc

SEQ ID NO: 7784 - DNA, 383 bp, Arabidopsis thaliana
  unsure at all n locations
  Clone ID: LIB24-059-Q1-E1-G10
agtgtatatataaacaaaaatgagtgtccacataaataatccaactaacacatcagcataatcccaaccgaaacagcttctagagagagacaaaaaagaacagagtaactatctaaaactcaaaatgtgtgcacttgtccctccattatatcccaatttcggctggccttgcggagatcatagcttctatgaaaccgacgacgtatccaacacgtttcttgattttccgttgccggacttgacggtgactcatgagaatgtgtcgtctgagaataacagaacattactagacaatcccgtggtgatgangaagcttaatcacaacgcgagtgaangtgaagcgtcgcaagaangatcaacacgatgttctcatctcctcgntc

SEQ ID NO: 7785 - DNA, 477 bp, Arabidopsis thaliana
  unsure at all n locations
  Clone ID: LIB24-059-Q1-E1-G2
accgggccanaattcccggaacgacccacgcgtccggggtgaatggacagagcataggtaggtactggccaactagtatcgctggaaatggcggttgtacagaatcatgcgactatagaggttcttaccgtgcaaacaaatgcctcaagaactgtggaaaaccttcacagacattgtatcatgtacctcgctcgtggctaaaaccgagcgggaacatacttgttctgtttgaggagatgggaggagatccaacacaaatatcatttgcgacaaaacaaacaggaagcaatctttgtctaacggtgtcacagtctcatccaccaccggtggacacattggacttccgactcaaagatctcaaagcagaaacangaaccaaggccggttctttccgtttgaaaatgccctaacctcctaactcagggtgatattttccnataaaaatttngcaangctttgggtacnccccaaagggta

SEQ ID NO: 7786 - DNA, 408 bp, Arabidopsis thaliana
  unsure at all n locations
  Clone ID: LIB24-059-Q1-E1-G5
acgcgtgggggagaaccctaattttcaattgtggtcgaaaattggaagaatgaggaggaggaggtgcgatcttcaaccgaagagaacgagaatgtgcgatcttcaaccgaagagaacgagtatgtgcgatcttccaccgaagctggtaggggagaagatcctcacgaggattccgataacatctctgagagcggtgcgatccacttgcaaattatggaacgctttaaccaaagatcgggttctgggtaaagcancggcgcaagtttttggggtttaagacgatggattcaaaggtctgttcagttagattccaactccgtcgcaacaagggagggaagaagaaagacaccatgggttcnatcctataaagcaagnaagattttgccttaaaccaagtccnagaataac

SEQ ID NO: 7787 - DNA, 405 bp, Arabidopsis thaliana
  unsure at all n locations
  Clone ID: LIB24-059-Q1-E1-G9
aaagatatttgttggaggtttagccagggagacaacttcagctgaattcctcaagcattttgggaaatatggagagatcactgattctgtgattatgaaggataggaaaactggacagcctcggggatttgggtttgtcacatatgctgattcctctgtggtcgacaaagttatccaagacaatcacattataattggcaagcaggttgaaattaagcggacggtaccatccttatggaaggtagagagttcgatgaaagcttgaatcttcttcttacttgttgtgtcatgcttagcatcatgtatggttatcaagattgatagctagtcattgtattttgagagatgaggcttttanggctttgattcccctgagtaatttaaatcaatacattttttanaata

SEQ ID NO: 7788 - DNA, 385 bp, Arabidopsis thaliana
  unsure at all n locations
  Clone ID: LIB24-059-Q1-E1-H12
ttttagggattgtttttttaacaatttttgccttgccataagcaatacaaccatggcaaggatctctctgttgttctcattagcctttgttttagccctcggctcagtgttcctttccgtttccggtcacgctcctcccgtgacaccgagaaaatcagcatgtccaaaaacagtatccgaactccagaccttaccttttaccgaaatcactgagatccnaaaccgaaaagagcggtctgccccgaaaacccctgagttcaaggcaatgttcacaatgtgcaaaggctacgtgacatacctcgagagcctctacaagtttgagaatcccattgtagatgttttaagaattgccaagaccanatacaccctggatgaacnaatggca

SEQ ID NO: 7789 - DNA, 488 bp, Arabidopsis thaliana
  unsure at all n locations
  Clone ID: LIB24-059-Q1-E1-H3
ctgttacgcctgcctgtaccggtccaaaattcccggncttacagcgggcagagatgcactgcggttaaggtagtcctagtgatggaatcagtagcggatgagcttgttgagaaagtgaaagctaaagtggccaaactcacggtgggaccgcccgaagagaactccgatatcacggcagtggtgtcggaatcttcagctaatttcattgaaggattggtgatggatgctaaggagaaaggagcaacgttttgtcaagagtataaaanagagggtaacttgatttggccgttgcttttggataatgttagaccggacatgangatcgcgtgggaggaaccattcgggtcctgttgtgccggtcntgaaggatcaattctgttgaagaanggattaatcattgcaatgcaagcaactttggccttcagggatgtgtattcactaaagncatcaacaanggcaatactgntcagtgggtccaatgggggaac

SEQ ID NO: 7790 - DNA, 393 bp, Arabidopsis thaliana
  unsure at all n locations
  Clone ID: LIB24-059-Q1-E1-E10
tctcttcccgttttcacttttgttcgttctctggcggccgatcccgtcgctcgctaccttttaagatattttttttatctaatgaacctgaaattgtaattaggcatataattggggattatttgctgaaattctcatttctagatcgaaaaaagcgaataattcgttttcatttgattcttgcctaatcttagggtgtctttatttatctaccaaaagaatgtctaattatcgaggagatgatgctgagtacatggaagacgtanatgatgagatggaagatgttgaagatgatatggatgaggagtttccgtggtgatgatcttggtgcttcagattctgacgttgangaatttgactattcgaacaatnaagtagctganaacacggctg

SEQ ID NO: 7791 - DNA, 469 bp, Arabidopsis thaliana
  unsure at all n locations
  Clone ID: LIB24-056-Q1-E2-G5
acgcgtccgantaagtagcactctttttcctctctatatctctcactcacactttttctctatatcttctcctcaacttggatatgggtgaagccgtagaggtcatgttcggaaatgggttcccggagattcacaaagccacatcacccactcaaaccctccactctaaccagcaagactgccattggtatgaagaaaccatcgatgatgatctcaagtggtcttttgccctcaacagtgttctccatcaaggaactagtgagtaccaaagatattgctctgttggacaccaaaacgttttggaaaggtgctgtgaantgatgggaaaatgcaanagtgctgagagagatgagtttaantaccatgaaatgtttgattcaatcccggctnctcctttttccatcccaaaccccaaagaactggtgtttataaattggggaggaggtgaagggctctggctgnaagaaga

SEQ ID NO: 7792 - DNA, 469 bp, Arabidopsis thaliana
  unsure at all n locations
  Clone ID: LIB24-056-Q1-E2-G6
acgcgtccgaacaactacagcctcactcaaccacgccacttctgcaanacctgccggngatactggacacgtggcggagctctccgcancgtcccagtcggcggtggctgccggagannnnnnnnnnnnnnnnnnnnnnnnnnnnnnnnnnnnnnnnnnnnnnnnnnnnnnnnnnnnnnnngtttctcctccgggaatgcatccaccatcancacgattctctcctcccactatggaggaaaccaagagagtatcttaagccagattttgtctccggngaggctaatgaatcctacttacaatcatctcgcgngatctcanaagtnatacnganacanacagcaacatgagcttgttganctaatgggaggatttgngtcaaagacttganggncaatccacatgggaagcttccnggtggntcgcttatgagcctgttgttnatnaatgggggattggcgtcatatca

SEQ ID NO: 7793 - DNA, 411 bp, Arabidopsis thaliana
  unsure at all n locations
  Clone ID: LIB24-058-Q1-E1-A12
ctgagaannnnnnnnnnnnnnnnnnnnnnnnnnnnnnnnnnnnnnnnnnnnnnnnnnnaaacaacaatggcgacaccaggagcttcctcagcaagagatgaattcgtatacatggcgaaactcgccgaacaagcagagcgttacgaagaaatggttgaattcatgganaaagtcgcgaaagctgttgacaaagacnaactcaccgtcgaagaacgtaatctcctctccgtcgcttacaaaaacgtcatcggagctcgtcgtgcttcgtggagaatcatttcatcgatcgaacaaaaggaggagtctcgcggtaacgatgaccacgtttcgttgatccgtgactacaagaagnanantcgaaaacggaactttctgatanctgtgacggaatccttaaagcttctcgataag

SEQ ID NO: 7794 - DNA, 504 bp, Arabidopsis thaliana
  unsure at all n locations
  Clone ID: LIB24-058-Q1-E1-A2
aactgttaccctgnccgtacgcctccaaaattccanggtcgacccacgcgtccgcncaaatgtatccttctctcgacgatgatttcgtctctgatttgttttgcttcgatcaaagcaatggagcagaacttgatgattacacacagtttggtgtaaatttgcagactgatcaagaggatacctttccagattttgtgtcatatggtgtgaatttgcagcaggagccagatgaagtctttagtattggagcttctcaattggatttgtcctcgtataatggagttttgtcgctagagccagaacaggtggggcaacaagattgtgaanttgtgcaggaagaagaagtagagatcaattctgggtcatcctggtggagctgttaaagggaagancaagnacatttagatgacgattgctccaaaaaacgggcaaaggactggatcgtgtnacaagaggaaggaaggaactaaanccntgccctgaaaaggttaaggaagggaaaac

SEQ ID NO: 7795 - DNA, 446 bp, Arabidopsis thaliana
  unsure at all n locations
  Clone ID: LIB24-058-Q1-E1-A8
acgcgtccgatttgtatctctgaactccaaccatggctcctctggttctctaccttctcactctcctcatggctggccataccagtgcctcatggtgtgtgtgcaaaacagggctgagtgactcagtgctacaaaagacattagactatgcttgtggaaatggagctgactgtaacccaactcacccaaaaggctcttgcttcaatcctgacaatgttagggctcattgcaactatgcagtcaatagcttcttccaaaagaaaggtcaagcttctgagtcttgtaacttcactgggtactgccactcttaccaccaccgattccagctatacaggatgtgcattccttctagtgctaatggttctagtggaagcggtancaacaacgtgacgccaaggcaaaaacagtccaaaaggaagcaacacatcaacaacatttcccgggng

SEQ ID NO: 7796 - DNA, 413 bp, Arabidopsis thaliana
  Clone ID: LIB24-058-Q1-E1-B11
acgcgtccgctcgaacaaacaaattataaacccattttccttcataaatttctaaaataaaaccccttaaactttcattcacatcatccaacccccaatgggtcgaatcttgaaccgtaccgtgttaatgactcttctagtcgtaacaatggccggaacagcattctccggtagcttcaacgaagagtttgacttaacttggggtgaacacagaggcaaaatcttcagtggaggaaaaatgttgtcactctcactagaccgggtttccgggtcgggttttaaatccaagaaagaatatttgttcggaagaatcgacatgcagcttaaactcgtcgccggtaactccgctggaaccgtcactgcctactacttgtcatcggaaggaccaacacacgacgagatagactttgagt

SEQ ID NO: 7797 - DNA, 407 bp, Arabidopsis thaliana
  unsure at all n locations
  Clone ID: LIB24-058-Q1-E1-B12
gactctaaagacactgatctgtctcctaaagatcgtatcatcattgtagccaatgaattacctatacgagctcagnnnnnnnnnnnnnnnnnnnnnnnnnnnnnnnnnnnnnnnnnnnnnnnnnnnnnnnaaggttggaacttttcttgggatgagaattcacttcttctccaattgaaagatgggttaggagatgaagctattgaagttatctatgttggttgtttgaaagaagagattcctcttaatgagcaagaagaagtgtatcagattcttcttgagagtttcaagtgtgtgcctacgtttttgcctttggatttgtacactaagatactaccatggattctgtaagcaacagctttggcctttgtttcattacatgttgccactttctcctgatcttggag

SEQ ID NO: 7798 - DNA, 479 bp, Arabidopsis thaliana
  unsure at all n locations
  Clone ID: LIB24-058-Q1-E1-B2
aactgttaccctnccgtagnctccaaaattccaaggtcnacccacgcgtccgcccacgcgtccggcggagaagattgttttcctctggaatgattccgatggatttgctgcaaccatttctgatactttaaaccctagccctagttcccctcttcgcaaactagaagaacagatccagcttccgttggataagtatggcgttgaaggtgtggaaaccggcgggagtatcgttcatttcgtagatgaaaatgaagtttatcaggtctcgatttttcttccntcgaagttatgagcctccagtactagtgtgtgctatgaatgaactgctggacctaattacaaggggatcgtcaactcctacccacaatcatagctcctttctttgtggcgggatctaaagctcaagttcaaataacaaattccntggaaagcaaataaccagannangccaagtcctcaatacgttcaaagttngctac

SEQ ID NO: 7799 - DNA, 461 bp, Arabidopsis thaliana
  unsure at all n locations
  Clone ID: LIB24-058-Q1-E1-B8
acgcgtccgaaaaaattgtgtgtggactctttctctcttctttgctggttttgaggagaatcgtgtcggctaaatttgtgtcagacacaccacactctgattgcaaagtcttcctcttcttcttccaccagagacaattccatcatcatcatcaaatagacaagggaagaattcaatttcccctttctttattggcgcgaagatctttcacagaatcaatcaccaacgaaaaatcgagaatggatgtttgcttgagctatttcatataatatggatgatgagattgctaaagttcatcaagaaagagtggatccaacaaaggttgtgattgataacgaaagtcctgcaaaagatgttactggtcaataaaggtgggataattgcaaataaaccatgggaatacttctgggaaggttgttcaaagttttgactgaacttaatccggactaattaagaaaagn

SEQ ID NO: 7800 - DNA, 500 bp, Arabidopsis thaliana
  unsure at all n locations
  Clone ID: LIB24-058-Q1-E1-C2
tagcctccaaaattccanggtcnacccacgcgtccgcggacgcgtgggtgcagatcgagctagtaatgagaagaaggtgaagagttcatactttgatttgccacctatggaaatgtctgtagcatttcctcaagcaactccagcctctacatttccaccttgtacttcaagactattatcatttcaatgatctactgactccggaagaacaagctatccggaagaaagtgagggaatgcatggagaaagaagttgctccaataatgacagagtactggggaanaaagcagattttcaattccatatcactcccaaagccttggggggctatgggttgtttgctggtggctccgattcaagggtttaagggatgttcctggggcccctccaatcaccggncaaatgcaaattgccaacagcaagaaatagcntagaagtngattncaagttgttcgnctttcattttggngcattcttctttgggcaagccncacaattgg

SEQ ID NO: 7801 - DNA, 389 bp, Arabidopsis thaliana
  unsure at all n locations
  Clone ID: LIB24-058-Q1-E1-C5
cgatcgtgtgagccggtcaaaccctgggtcatggcttatactgcgtcccggagactgtacctggagaccgtggggaagacttgaagcatggcgggaacgcggtggagccactgatggtctangttacagattcgaactcatcccagacggatcaagcggtgcaggaatcgtgcttgcggaatcaaccataagttctcacagaggtgggaaattctcaatcgagttgggatcgtcgccttcttcatcgtcgccaacaagtgtggtgaaccgatcgagaagccgtagaggtgggagtagtggaagcggtggaggagcatcgccggcgaatagtccgaganganggaacggagattacggttacggattgtggccgtggaactgtncaaagg

SEQ ID NO: 7802 - DNA, 481 bp, Arabidopsis thaliana
  unsure at all n locations
  Clone ID: LIB24-058-Q1-E1-C8
gccgcncggtaacggtccaaaattcccgggtcgacccacgcgtccgaatcgatctgggttcattggattcattacacaaaccggagagacatgtcggagaaagagcaccctcggctaattctacacaatttcctgtcgccggcagaatgcaaggttgtcccttttttgcttaattttgtgtctaatcatgtgggtttggttaattttgaggtaaaaacaggaacttgagcttatacacaagagtagcagtacaattgggtacagaccaaatgtcttctccactactctctctcacctcattgccactaattctcctcacctcatcatcccttttgtctccattagagagaggttgaaagagaagatagaggaaacatttgggtgtgagtatgagctttttattgaattcacaggtttgattagttggtgcaaaggganctaacaatggttggcaaaatgatgataacaagttaataccaaa

SEQ ID NO: 7803 - DNA, 466 bp, Arabidopsis thaliana
  unsure at all n locations
  Clone ID: LIB24-056-Q1-E2-G4
ccaaggtcnacccacgcgtccgcactgctgcagttacagaagatggtgacctctatggatggggctggggaagatacggaaatttgggattaggtgaccggactgaccgcttagttcctgaaagagttacctctactggtggtgangaaaatgtcaatggttgcttgtggatggcggcacacaatatcaggtttcctactctggagcattgtatacttatggatggagcaaatatggacagctaggacatgganacttgganggatcaccttattcctcacaanactggnagcactgagcaacagttttatctcccaagatttcggggaggttgggagacatacaatgggcattgacttcngatgggaaaaccaatatggatgnggttngggaataagtttggaccanntcggagtcccgcaataaatttagattngtgttcccctgtgcnaattccgaattcccc

SEQ ID NO: 7804 - DNA, 411 bp, Arabidopsis thaliana
  Clone ID: LIB24-058-Q1-E1-D10
acgcgtgggggagcgtatcagtaaaataatccgagagaagaagcaagaaagggatatcaagaggaagcagatatattatttgaaaattgaagaagaaaggattaggaagctgcaggaagaagaggaagctcgcaagcagcagcagtctccgcaaatgtttccgatggttccgtcgattccccctgctaacaacatcagcaagctatgcaaggacacatggggattagaccaatgggtatgaccaacaacgggatgcagcatgcgatgcaacaaccaagaaaccggtcttggaggaaacgtggggcttagaggaggaaagcaagatggagcagatggacaaggaaaagatgatggcaagtgaaaaggatccaaagaagctttgttttgttgatatttagactgttaatcccc

SEQ ID NO: 7805 - DNA, 484 bp, Arabidopsis thaliana
  unsure at all n locations
  Clone ID: LIB24-058-Q1-E1-D2
aacgttagccgttcgtagcctccanaaattccanggtcgacccacgcgtccgatcaccttcgctagctagtgtactgagttcaatgaagatacatgccatattggtagtagcgttcttggtcctgatgaagaccgccgtttcccaggacaataatccgctggaacattgcagagacgtgttcgtgagtttcatgccctgcatgggcttcgtcgagggaatatttcaacaaccttctccagattgctgcagaggcgtgacccacttgaacaacgtcgtcaagtttacgtctccaaggatcgaggaatangcagggatagtggagaaacaagaanagagtgtgtcctgtgcattgagataatgggaaattgcaaatcaacctccttttcctcccggccggctaataatnancttcctcccccgttggtccccttaatcctcaaagcttttccaatcctcccgttggaaaatggaccggttcncaag

SEQ ID NO: 7806 - DNA, 504 bp, Arabidopsis thaliana
  unsure at all n locations
  Clone ID: LIB24-056-Q1-E2-B2
ctgttacgcctngcccgtaccgcgtccggaatcccnaggtcgacccacgcgtccgtttcattggagggctcagcagacaaaccttgagtatctattgatgttggatgttgatggtttggcctggagcttccgtanagaanctggtcttgatgcacctggagattactatggaggatgggagagaccagatagtgaactccgtggccattttgtcggtcactatttgagtgcaacagcttatatgtgggctaagtactcataatgatactctcaaggagaaaatgtcagctcttgtctcagctctatcggaatgccaacanaagtctggcacaggatatctctctgcctttccttccaattttttcgaccgctttgaaactataacacctgtttgggctccttactacaccattcacaaagattttagctggtcnggttgatcaatacaagttggctgggaacagtcaagcctttaaagaaggcaaccgggaanggctgaattat

SEQ ID NO: 7807 - DNA, 500 bp, Arabidopsis thaliana
  unsure at all n locations
  Clone ID: LIB24-056-Q1-E2-B3
aactgttccgccngcctccggaaatccaaggtcgacccacgcgtccgctcttgtacttaagcatggtggttaatcagaagatatccggccttgcatccgctatgaacgccaaaatcatcggttcaggagagagatcgatggtcttggcacacggtttcggaggcgaccaagtcggtttgggataaaataataccggtcttgtcccaatccttcaaagttttggtctttgactggcttttctctggagccattaaagatcaaactctctatgacccttcaaagtataactccttagacgtcttctctgacgatctcattgctcttatggaggagttgaagtttggccctgtcgtgttcgtaggccattccatgtcgggggtgatcggttgtgctgcctctattaaaagggccgacttgtttacaaatcttctccttaattggctgcntctccaaggtaatatagacaagtgagggattacaaanggaagggttgagtcaaa

SEQ ID NO: 7808 - DNA, 459 bp, Arabidopsis thaliana
  unsure at all n locations
  Clone ID: LIB24-056-Q1-E2-B6
ttgggttttagccagcagcaggtcacgatccttggcgttgcttgtgatttgggtgaaaacatgggtcttcttcctggatacgccagtaacaagcttcctccatggtcgatgcttctcatcggagcttcctcttgtttcctcggcttcggcgttctttggctctccgtcagccaaatcgttcttggcttgcctttttggctgctttttgtagctctagctttagctaccaatagcaactccgtggttcggtacagcatctcttgtcaccaaatatgaggaattttcctaagancccgaaggcctgtgggtgggacttcccaaagggtaaaatgggatnaagttgggtgcaacaattcactgtccttgttcaagcaatgggtgcntcaaccattcaacctatgggattcngcttccngtntccttaccggntgggaattccgggttaaaaggccttaaacn

SEQ ID NO: 7809 - DNA, 450 bp, Arabidopsis thaliana
  unsure at all n locations
  Clone ID: LIB24-056-Q1-E2-B7
ccttcgatggaatttgagatcaatgaaagttagggtttttctttgagatttcttcacccagataaaaaatgtcgctcgtgagaagatttcaaacagttcgttctttattgaaaacagctggntcaagagaatcttcttctcttccatttaggaatgngaaatgagttctctttgattcaaattggagatgatttcagatttggttgttggagaagctatcattcntcnctttgtcacgttcctgaagctcatggaaaaagtgcgtattcacgtttanatgaacggcacagcgtcaanacacatttgcttcgatctacaacgantgcagagtttttgccgtttaatgaatgaanaanaggnctgcnacaactcaaagttaaggctccancctcaagctacagaaaacgggtgcnggtnagangtgtcnatgggtaagtcctggnatttgta

SEQ ID NO: 7810 - DNA, 494 bp, Arabidopsis thaliana
  unsure at all n locations
  Clone ID: LIB24-056-Q1-E2-C5
tcgcctggcccgtacangtccgaaaattcccgggtcnacccacgcgtccgcnaagatgtcttgcttgatttcatcaacttgctcactcgtccccttcgactcgaatctgactcgttcgaatcgtttcaccaaactgggttctgcagtttcatggcaatcttcctttcctaaactctccatcgaaatcggctctgttatctcatcccccattgtcaagaaggattcttttgtgcaagctgcgtggactcgaagatcacgaggtgaagcagcgaaaagacccaacaggaagtcatggaaacagagaacggacatgtacatgaggcctttccttctgaatgtgttcttctccaggaaattcatacacgctaaagtgatgcataggccaacaagcaaagtcatttcagttgccaccacaaatgctaagagatataaggactaatataccgtctcttgttgataacgaagcgtgtagactcatcggtaagctcataact

SEQ ID NO: 7811 - DNA, 515 bp, Arabidopsis thaliana
  unsure at all n locations
  Clone ID: LIB24-056-Q1-E2-D1
ntggttacgcctttccgtangcgtccggaaattcccnaggtcgacccacgcgtccgcaaaagccctttcttttacaagttgttctccaatggaatgagggaatctgagcaaaggcatgtcacccttaggattaatgcatcagaggaagctgctttgatggagcttttaaactttatgtataagcaatgcggtatctgtcaccacagcacctgccttattagatgtgttgatggctgctgataagtttgaagttgcctcttgtatgaggtactgcagtagacttctccgtaatatgcctatgactccagagtctgccctgctctatctcgagcttccctctagtgttccaatgggccaaagctgttcaagcctttaactgatgctgcaaaacaagttccttgcagccccgctacaanggatattaccaaagtttcaatganggaggtaatgtctctacctttggctgggaattgaagcaaattctatcaaagcgatgaactccaaaattgcatcaa

SEQ ID NO: 7812 - DNA, 454 bp, Arabidopsis thaliana
  unsure at all n locations
  Clone ID: LIB24-056-Q1-E2-D5
acgcgtccgtgcagatgttgcagctgttagtgcgggtaacaacgacgaaattggaaatatgattgctgaagcaatgagcaaagtgggcaggaaaggtgtggtgacccttgaggagggtaaaagtgccgagaacaacctctacgtcgtagaaggaatgcaatttgaccgtggttatatctctccttactttgtgacagacagcgagaaaatgtccgtcgagttcgacaattgcaagttacttctcgttgacaagaaaattaccaatgcaagggatcttgttggtgttttggaggatgcaattagaggcggatacccaatattaattattgctgaagacattgaacaagaagctttagcgactcttgttgtaaacaagcttagaggtacactgaaagatagcagctctcagagctccaanggtttggagagcgcaaagagccaataccttgatgat

SEQ ID NO: 7813 - DNA, 463 bp, Arabidopsis thaliana
  unsure at all n locations
  Clone ID: LIB24-056-Q1-E2-D6
acgcgtccgatctgtagtttttttccgcgaccgcccaaaaaattctctgatcagacggtcgattggatcggagatttaaggtaaagaaaaaatggcgcaacaatcgttgatctacagtttcgtagctcgcggcacggtgatcctcgttgagttcactgatttcaaaggtaatttcacctcaatcgctgctcagtgcctccagaagcttccgtcttcgaacaacaagttcacctacaactgcgacggtcataccttcaattaccttgtcgaagatggattcacctattgtgttgttgcggttgattctgctgggaaggaaaattcccatgtcctttttggaaagagtaaaaggaagatttaacaaagccaatatgggtggtggaaagggtgcaactggctcaagnanacagcttgaaataaaggagtttggctcctaaactgaaaagagcaatattgcaagtat

SEQ ID NO: 7814 - DNA, 501 bp, Arabidopsis thaliana
  unsure at all n locations
  Clone ID: LIB24-056-Q1-E2-E3
tacgccttccgtangcctccgaaattccaaggtcgacccacgcgtccgtcnagttaaactaaaattgcattttctaaatcctaaccaagataactgttagtattaaccatgaaattacataactacatacataagnnnnnnnnnnnnnnnnnnnnnnnnnnnnnnnnnnnnnnnnnnnnnnnnnnnnnnnnnnnnnnnnnnnaagtttgatctttctggcgttgaatttacttaaaaagctattgattacnggtctggttaaatcaatcctttaactttataaagttgtgtcctttgtcnttccctcncttttattcattggntcttttaattggtttgacctgatagattccanaagtaanttggtcatagattccaagatccaanttctaacggtataaaccatcttttttggtcccanngattantgaatgatcaagacgantangtccttggagaccnntttttttttcgtttccaagggtatggaaaanagaaaga

SEQ ID NO: 7815 - DNA, 415 bp, Arabidopsis thaliana
  unsure at all n locations
  Clone ID: LIB24-056-Q1-E2-E6
aagagctatnaaagaggataaaaccaacatttgaatttttttcttctatctctctccccaagatatatagcacangaaaatgangataccatcaattggctatgtctttttccttatcttcatctctattacaattgtttcgagttcaccagatcatggagaagttgaggacgaaangcagtttaactacgagaagaaaggagagaaggggccagagaactggggaagactaaagccagantgggcaatgtgtggaaaaggcaacatgcagtctccgattgatcttacggacanaagagtccttgantgatcataatcntgggataccttccgtagcccantatttaccttccanatgccnccatttnggaaccagaggccaatgatancatgantgaagatttgaangaaggaa

SEQ ID NO: 7816 - DNA, 453 bp, Arabidopsis thaliana
  unsure at all n locations
  Clone ID: LIB24-056-Q1-E2-E7
acgcgtccggncgtgtcaaatcaatctactgttctctctcctatctgggcaaaaatctcagacaaacctgcaaaattagggtatttgaggatatggattatgatcggtacaagttatttgttggtggtattgcgaaagagacaagtgaagaagctctgaagcagtattttagcagatatggagctgtgttggaagctgttgtagctaaagagaaagtcactggaaaacctagaggttttgggtttgttcgctttgctaatgattgtgatgttgttaaagctcttagagacactcacttcattctcggtaaacccgttgatgtgagaaaggcgattangaaacatgaactataccaacagccgtttagcatgcagtttttggagaagaaaagtgcaacagatgaatggtgngttgcgtgagatgtcnaagtaatggtgtgaccaatagggacna

SEQ ID NO: 7817 - DNA, 499 bp, Arabidopsis thaliana
  unsure at all n locations
  Clone ID: LIB24-056-Q1-E2-F4
aactggtccgnaggcggccgaaaattccaaggtcgacccacgcgtccgcaacggtagtgaagagtaacgctcctttggaaatgatgccaccttccaaccgaatcccaattctgtttaccaaactgaacatctatcatacttcaaatttgttggtcgcatggtggcaaaggcgttgtttgatgggcagcttttggatgtttatttcacccgttccttctataaacacatactcggtgtgaaggtgacctatcatgacattgaggcggtggatcctgattactacaagaatttgaagtggctattaagagaatgacgtgagcgacatactcgacctcacatttagtatggacgcagatgaggaaaaacacattctttacgaaaagacagaggtgacggactacgagcttaaacctggaggacgaaacatacgggtaacagaagaaacaaaacatgaatatgttgaccttgtggccgggcacatacttaccaatggcaatcg

SEQ ID NO: 7818 - DNA, 466 bp, Arabidopsis thaliana
  unsure at all n locations
  Clone ID: LIB24-056-Q1-E2-G3
acgcgtccgcgngacgcgtgggcagaaacctttgtttcatttgcttcgtgtgcgatcgcgagaacaagggaaaattagggtttatatcctcaagctttttcgaacaccattgatcgttgatctaagatttttcttctagtcgagtttcttaaggggctttgatcaaactcaaaattgaagaccaatactttgaaggattctggtaaagctaaacaactatgagttcaaantcatgggctgatgtttctgaatcagagaggggcaccatctgggtggttggttggggggttattctccgtccgtctcgaaccaactangttcctccanatcttagggagccgttatnaccatcttcggcagtttggtggcgccttccacctggggaataatggatcnntggggggannanngtggtngcaaaatantggggtatggnggtccanagccaaaaggttatnggtgggcc

SEQ ID NO: 7819 - DNA, 438 bp, Arabidopsis thaliana
  unsure at all n locations
  Clone ID: LIB24-056-Q1-E2-A8
catccttccaatggctattacttgagaactcttctgattaaacatagcaacaacaacaactcttcttctcctctctttctcacttcaatttagcgatggctgcaactgcaatctcttctctttccttcccagctttgggtcaatcggacaagatctccaatttcgcatcttctcgtcctctcgcctccgcaattcgcatctgcacaaagttttctcgcctttctttgaattcgcgttccacttcgaaatctcttattcactgcatgtccaatgttaccgccgatgtgcctcctgtatcagagacaaagtcgaaattcctaaaagcttacaagcgacccatcncgagtatctacaacacggttttgcaagagctcattgtccagcagcatttgatgangtataagaagacntatcgtnatgattctgtttttgcccttg

SEQ ID NO: 7820 - DNA, 413 bp, Arabidopsis thaliana
  unsure at all n locations
  Clone ID: LIB24-054-Q1-E1-F9
acgcgtccgaaagacagaccttccacctcgacttcaccaaaggtttccaatgcccatattgtttggtggtgatggcagttacatggctcctttctcacttcaaaatgacaacattcttaccagtctgatgagtcagcttggttcgcctactacttggtatanactggtggctggtgtaaatgctcaattacgtcctgttcgccgtgggcgtctgagatcaacatttcattctgttctgagatggttagaaactcatgctaatcccgctctggaaacacatggcatacgggttgatctggcctggttccanactacagcttgtggttactgccaatatggtctcttgattcatactgttgaggattgtgaaccaacatcacctcaggtgtgtcagtgaaacaacatngactgaa

SEQ ID NO: 7821 - DNA, 467 bp, Arabidopsis thaliana
  unsure at all n locations
  Clone ID: LIB24-054-Q1-E1-G4
ctgttacgcctgccgttaccgggccaaaattcccggancnacccacgcgtccganctgaagttggagctaatattttgatgtttgattctgtgaatcgaagaacatgtttgcattacgctgcttattatggacatgctaattgtgttcaagctattctctctgctgctcaatcaagtcctgttgctgtccattggggatatgcgagatttgtgaacataagagatgataaaggagcgactccgttgcatttagctgctcgacagagacgacctgaatgtgtgaatgttttgttggatagtggttctcttgtttgtgcatctactagtgtatatggttctccaggaagcacacctcttcatttagcagctagaagtggatctatagattgtgtcagaaagttgcttgcttggggtgctgatcgtcttcaacgagacgcttctgggagaataccttanggtgggtgcga

SEQ ID NO: 7822 - DNA, 396 bp, Arabidopsis thaliana
  unsure at all n locations
  Clone ID: LIB24-054-Q1-E1-G5
gaaaaaaatggaagatctatggaagagagcgaaatcgtttgcagaagaagcagcgaagaaatcacaaaccataacactacaatcatcttcaacaacattcgtcaatctcgtcaccgaaaccgctaaaaaatccaaagagttcgctctcgaagcttctaagaaagctgattcgatcaatgtctccgagttcgtcgccgagacggcgaagaagtcaaaggaattcgctgctgaggtttcaacgaaagcggatcagctcaaagtcgtagcattgaaacaagctggatcaggatccagaatataaaatcnattgccgacattatacctggaggattaggaggatcaggatctggtggtggtggttctgaagtttcngaatccgagcttggntaggtttgg

SEQ ID NO: 7823 - DNA, 404 bp, Arabidopsis thaliana
  unsure at all n locations
  Clone ID: LIB24-054-Q1-E1-G8
tctctttagatttggcttcgagaaatggctcgcgatcgtgcgggaaggtctggngatcaangtggtgaatccaccggcggcggcgacaaacaatgtggctgtngaaacgtctccggcgacggcgacgaggagacngcgacaacaacaacgagcttcgttcgctgagtttagaccgtttaagctttggtttccatggcttgttccagctatcgtggnggctaacattgcccttttcgccatttcgatgtttattaacanttgtccnaagaacncggcttantgcttagctaggtttcntgggaagatttgcttttcagcctangaaagagaatcctcttctggggtcgntcttctttgacattggagaaganggngggctttatatgtatcaatgggttggtcan

SEQ ID NO: 7824 - DNA, 499 bp, Arabidopsis thaliana
  unsure at all n locations
  Clone ID: LIB24-054-Q1-E1-H4
acgcctgccgtttaccggggccanaattcccgggaacgacccacgcgtccgcggacgcgtgggcggacgcgtgggctctctcgttctttgcattttggaaagttcgaaacagagcctctgtaaattacgcgtaaagtttcaatctttattcacacaattcacacagctaatgtaagcatgagaatcttcagattcacgtcaatctcaccgcggattttgccgtcgaatcattactcaacattcccgttgaaacaaaacgtgtcttctctctcaccggcgaaatacattgcgggagctttacaagaanatatcaattctccggccccaaaagctggtaagaagatacacgcagatatcatcaaaactggggtttcaaccangattttgantatatccatcaaactactcattcttcatttaaaaatgcggnttgcttgagttatgcaccccaagtgttcgaccnaattaancaannccaaaaantaaccggggttgaaag

SEQ ID NO: 7825 - DNA, 403 bp, Arabidopsis thaliana
  unsure at all n locations
  Clone ID: LIB24-055-Q1-E1-A6
aaccatcgcatattcgccgccataagcagagagtttcacatataaacgaaaaattcccttcgagaagtctcaagtcgacgatatggagaacggagacattccagaggacgctaacgagcattgcccaggtcctcaatcagaatctgctggaaaatcagattcttgtgctggctgccctaatcangaagcttgtgctactgctcctaaaggacctgacncagatttggttgccatagcangagaggatgagcantgttaagcacaagattctggttttgtctggcaaaggtgggagttgggtaaggagtactttcncagcncanctctcgtttgcccttgcggggcatggatcatcangtacgtcgtgatggacattgntanatgcgggtcnaagcatcccaaa

SEQ ID NO: 7826 - DNA, 402 bp, Arabidopsis thaliana
  unsure at all n locations
  Clone ID: LIB24-055-Q1-E1-B3
aaacagaggatgtgttttgtttattcttagtcatggtttctccattacatctagaattcccataagtgcttgtttcatcttgggttacaggtgctgggaattagatggtcatcaatcttttatgttgagagtgtagcaagagtgaaaaagctctcattaagtggattgttgctttacaagttgataatagctgatcaattctttgttcaatggccacaactgcataagaagtatcctcgggctcactatgttggggtgcctgatgtaagctgattggnactctacttacacctagnatnntattacaaaaacttagaanagctacatagngtacaccttctctttanatgcacgattgagttttanacaatgantttttgnaancagctgtttttgactttg

SEQ ID NO: 7827 - DNA, 392 bp, Arabidopsis thaliana
  unsure at all n locations
  Clone ID: LIB24-055-Q1-E1-C6
atttccatttttctctcttccataaaacccaaaagaaactaggaagaggagtaaataatatttgttttaaagaaatgattctccacaaaatggcgttcttggccgttattctcttcttcttgataagcagcagcagcgtttgcgttcatagccgtgaaacgtttgcttgcgatacaaaggangcagcancagctacactgagattctgccagctttcagttcctataccggngagagtcagacatttgntcggacggttggacattggccggagaaagtgggcntgttatcggaacactgcggnggcgatacnacgtcnantgaatcanagggtacganttggtggtcnggnggctttacacggnngtttcaaatgtgggacncggtagtaa

SEQ ID NO: 7828 - DNA, 419 bp, Arabidopsis thaliana
  unsure at all n locations
  Clone ID: LIB24-055-Q1-E1-F5
aatctcttcttaatagtcaatcatatatcaaaaaatttaaactcttcttgatcaatggcttcttcttctgctgctatgtctcttgaatccatctctatgacaactctcaacaatctctctcgtaatcatcaatctcaccgcagttctcttcttggtttctcaagatctttccanaaccttgggaatctcatcnaacggtccagatttctcctcccgatcaagatctactacttccangancctcaacgttactcgagctttcntctggaattggggcaagaagaccgangnctccagacnaagtaagatgnanagaactaanngtgtatgagctcanngaaggagatataaacagtcnagcaggttcctnanactcgggcangganngcangcagagctttgtcctgggggatngcgtc

SEQ ID NO: 7829 - DNA, 384 bp, Arabidopsis thaliana
  unsure at all n locations
  Clone ID: LIB24-055-Q1-E1-F6
ttcgccacatcacagattttgttttcttccgtttctcgaaattcagtttcatcatcatcctctctggatttanaaattttcaatctacctttcaatcgccgggggataatcgaaacccgatctgtgtaaaaaaatgatgaaatcgacggcgagatttgcgtctgattgtcgttataatgatcacaaaagcataaaagcgtgacgtttccgcgtcttcgcgtatctcggaaactttaatccgtatctaaaggagctaaatttgaagcgannnnnnnnnnnnnnnnnnnnnnnnnnnnnnnnnnnnngaagcttgcctagtttcgaagttattcnatgttttatcnncaanttctagatcatagnttttggaaatttaagttttan

SEQ ID NO: 7830 - DNA, 461 bp, Arabidopsis thaliana
  unsure at all n locations
  Clone ID: LIB24-055-Q1-E1-G12
gcagtgtncacgcctgccaagtaacggtccnanaattcccgggtcgacccacncgtccgcngaaccacaagaagagaagagaccaaaaggaggagccaaaatcctctctttctttggaattagggtttcctcaaaggaagtgaactgaaaatggtcgcggacaagagcaagaagtcgaaanttgaagagaaaggcgaagaagaaaacttggagcagatcgacgcagagcttgttctctcaattgagaagcttcaggagattcaagacnacctcgagaagattaacgannaaggccagtgacgaggtcttggaagtagagcananatataangtgatacggaaacctgtctatgacangcgcaatgaagttatccaatcgantcctgggttttggatgactgcttttttgagtcatcctgccttaggcgacctcttgactgaagaagaccagcgngattttt

SEQ ID NO: 7831 - DNA, 456 bp, Arabidopsis thaliana
  unsure at all n locations
  Clone ID: LIB24-056-Q1-E2-A1
acgcgtccgaatttgaagaatggttggtggatcggaagagaattccggcggattggaggaagagggttgctgtgatcagagtcaaaatcttaaaagagttctcttctttgcctaaagagatcgatccattctttcaaaccctagatcctgaagtgatcggttacttggaggtcaaaaaggtgtatgagattctcctgaagacaactccggaaagccgcaacatctttggtcgactttcgggtgcttctggtgtttgggaagcaattgttcgtgcgtttgaaaaagatcacatttatcttggggaaggagctcagataanaantcanaatgttaattacnaaaancccttatcttaaaaagcaaatgnaaaanggtcaacaacaaatgacangnacntgatcngtaaagaaactgatatcaaaaggagcnnttgnactcctcagcaaacaaaatncc

SEQ ID NO: 7832 - DNA, 489 bp, Arabidopsis thaliana
  unsure at all n locations
  Clone ID: LIB24-056-Q1-E2-A3
gtatgcngtgaaagtccgagnttcgcgggtccgtcagncgtcgcgtgggnnnnnnnnnnnnnnnnnnnnnnnnnnnnnnnnnnnnnnnnnnnnnnnnnnnnnnnnnnnnnnnnnnnnnnnntacgaagcttcccttcccttagtttatacattactctcagctctctttatttcactcagcttcacgttgaagacgagtttctctatttgccaagatctgttatctttcacatttctgatctgtttgaagaaagctatgacttgtgtttgntaaagagagaagcaaaagaaggaacagtttttatataaagatatttgctttatttgtttgttcttaattgttgccacgaaaatggcaatgccaccacctgggaaatgttactactccgtctggagaaantgcagtttcctcctccgggcaaattgggtccangangagcgagatgggtttaacccctggcttcgtgcggagtttcgctgcgggnaagg

SEQ ID NO: 7833 - DNA, 447 bp, Arabidopsis thaliana
  unsure at all n locations
  Clone ID: LIB24-056-Q1-E2-A7
acgcgtccgcatcatccttccaatggctattacttgagaactcttctgattaaacatagcaacaacaacaactcttcttctcctctctttctcacttcaatttagcgatggctgcaactgcaatctcttctctttccttcccagctttgggtcaatcggacaagatctccaatttcgcatcttctcgtcctctcgcctccgcaattcgcatctgcacaaagttttctcgcctttctttgaattcgcgttccacttcgaaatctcttattcactgcatgtccaatgttaccgccgatgtgcctcctgtatcagagacaaagtngaaattcctaaaagcttanaaagcgacccatcccgagtatctacagnacggttttgcangagctcattgtccaacagnatttgatgaggtatangaagactaatcgttatgatccgttttntggc

SEQ ID NO: 7834 - DNA, 487 bp, Arabidopsis thaliana
  unsure at all n locations
  Clone ID: LIB24-054-Q1-E1-F3
ctgtttacgcctgcccttaccggnccaaaaattcccggaaccgacccacgcgtccgaatctgttcttggtttacttaatcttctttctagttaagtatattcttgttgctcatcaccaaagcttgtgatggaggctctcttcntgagttcctcntcttcctccattgtancgtcaaacanncttactaggttacacaaccattgtgtctggtctacagtgattagagataanaaaaggttcggtcncacttggtgccgtgtaagtggtggtggtgatggtgggagaaacagtaacgcagagaggcctattcgggtttcttcgcttttganaagacagaggtcaggtactgattangggaacanagttcgccggctatggatgctgagacattggttctgtctccaaacnggaatggganaancattgagatcaatgggagtaaagactttgatgccttttaatggcgcctccaaggggggggatnaa

SEQ ID NO: 7835 - DNA, 503 bp, Arabidopsis thaliana
  unsure at all n locations
  Clone ID: LIB24-053-Q1-E1-H11
ctgttacgcctgcccgttaccggtgccaaaaattcccgggnacnacccacgccgtcccggnttagtgatcnaaggaatggctttttcttgccggacaaaatggcttggggaaatggaaacattttgtccttnggtgggcttttgtcggggtaacagatgctggtttcaagactattcttcactcttgcgctaacctctccaagtttagtatatatcatggacctaaattgacggatcttgtcttccatgacatcttagcaactactctttcgcttagtcatgttagcttaagaaggtgccatcttcttactgaccacgcaattcaaaagctggcatcaaagtctcaagctggagaatcttgacctcagagggtgcagaaacctgagggatgaaaccttgacagctgtatctcatctgccaaaactgaaagttttacttccntgatngcgctgaatatttatcgacacagggccttccgtacccaaaaagaaggaagntttttg

SEQ ID NO: 7836 - DNA, 488 bp, Arabidopsis thaliana
  unsure at all n locations
  Clone ID: LIB24-053-Q1-E1-H2
gtangcctccaaaaatccaaggccttcttctctaatgganatctgcacttacttcaaatcacaacccacttggctcctcattctcttcgttctggggtcaatctcaatcttcaaattcatcttcaccctcctcanatctttctacatctacttcctccgaccatccaaaaacctccgccgatacggttcatgggcaatcatcaccggaccaacagacggaatcggtaaagctttcgcctttcagttagcccagaaaggtcttaaccttatactcgttgctcgtaacccagacaagctcaaagatgtctctgattccatcagatcnaagtatagtcaaactcagattttgaccgttgtgatgggtttcccctgganatantgatgaaagtgtgaaacggattaaggaganttattggaagggatnnattgttgggaatttgatnaannaatggctnggcatgtcttaccttaatgctaaagtattttca

SEQ ID NO: 7837 - DNA, 493 bp, Arabidopsis thaliana
  unsure at all n locations
  Clone ID: LIB24-053-Q1-E1-H3
ctgttaccctgccgtacngctccnaaattccagggtcgacccacgcgtccgcngacgcgtggggcaattgctctcatttcgcgtttatctgtctgctgaaacgcagaaagcttctccagggtcgtttaagcgaacccaaaagactcgaaaaccattttcgcctgatagaagaggtccggtggctccgtcgcggaaatctcagaatctgaatttggaagtttctccacatagagctgtatctgcagtcagattgatgagaattgagtacggtggtgcttttgctgatcttttgaatgagaaaggaaaanggtcctggggagcaatgagatgagttatgttgaaaggactatcggttttcggactcncgatttggatgaccganatcttagactgggttacagatgttgttggaggaacaatacggtggaagaagtatccttgatcatttgattgggtccctttgccacaacgaaagaacnattttcgaaatatg

SEQ ID NO: 7838 - DNA, 497 bp, Arabidopsis thaliana
  unsure at all n locations
  Clone ID: LIB24-053-Q1-E1-H4
gcctntaaaattccaaggtccacccacgcgtccncntctctcncgatatcatctaaatctctctcgatctcaatttcgcaaaatggctgacaanaanatcagaatcggaatcaacggtttcggaagaatcngtcgtttggttgctagagttgttcttcagagggatgatgttgagctcgtcgctgttaacgatcctttcatcaccaccgaagtacatgacatacatgtttaaggtatgacagtgttcacggtcagtggaagcaccatgagcttaaggtgaangatgacaaaaactcntctcttcggtgangaagcaatcactggttttcggcatcaaggaacccctgaaggaaatccccatggggggtgaaggctnggangctgacttggttggttganttcnacnggngtccntcaactgancaaagnacnaaggcttgctgcctcacttnaaagggtgggtggctaaaaaaaaggttgtcaatctccngccccaa

SEQ ID NO: 7839 - DNA, 498 bp, Arabidopsis thaliana
  unsure at all n locations
  Clone ID: LIB24-053-Q1-E1-H5
ctgtncacgcctgccggtaanggtccnanaattcccgggtcgacccacgcgtccgattgatggcggcaccagaaacaatattccgggggtgggaagtgatgcaaatgatttagatccacgtattcagtcaaggatgccccataatgcattcattagatcaaatttccctcaaacatcctggaatgttaatcctggccagcagattgaaaaagagccgaaaaaagaagaacaatttagtcgtaggatatcggctcaaagtcctcgtttgtcggcaggtggtccaccgcagtccccactttcatcgaagtctggtgagttttctggtggttcaatggggacccactatggagcagttgcagcagctcanaagggacaangctgttacttcnaatcctgctattgggtgcctactcaantcangttgggttccaanggctaattgaanctatgcagnaaaaggggaacaccaaagcccaaaatggctgcnaaacggggcaa

SEQ ID NO: 7840 - DNA, 503 bp, Arabidopsis thaliana
  unsure at all n locations
  Clone ID: LIB24-053-Q1-E1-H6
anactgccagccgccggtaaacggtccaaaaattcccgggtcgacccangcgtccgnggacgcgtgggcggacgcgtgggtaaaaaggtcgagatttcttgatagcgcaatgaccacacagaccagannttcgaaccttcaaaagggaaatatataatttgtttcttagtttctcgagtatctaccacctcgagatctgaaaatctgattctacctttccattttctttctcaaaagtcgtggctttgagaatagttttttcctcttcntctcatcagactcggtttcctagttgactcattttcaangatctgggcatcngtcanttctttaataaaagctttctttttttatntatcccttttgttttcagctgctggttgcttgtactangtanagttttggggtggccttacttgcttttcancaaaangctgggaagatngagattttctnccgtcntccacncncctttantcctttgnggaatctgcgccaattct

SEQ ID NO: 7841 - DNA, 505 bp, Arabidopsis thaliana
  unsure at all n locations
  Clone ID: LIB24-053-Q1-E1-H8
accctgtncagcatgcctgtaanggtccaaagttcccgggtcgacccacgcgtccgcgcgtgatgctgaagatatctttgctgagtttttcggcgaatccggtgatgcttttggcggagggagtagcggaaggacacgtggagatggcggtgatggtggcggtcggagatttaaaagtgcagaagcagggagccaggctaatagaaagacgccgccgacgaacaaaaaaacgacgccgccggcgaataggaangctccggctattgagagtaaattggcttgcacattggaggagctctacaaaggtgcaaaggaagaagatgcgaatttctcgcgttgttcctgatgattttggaaagccaaagacagtccangagatattgaagnatanacataaanccaggttggaaagaaaggcacaaagatcactttttccaagagaaaggcaanccaanaaacctggtgtcactcctggcgggattcctaaattccgtgggttgacnaa

SEQ ID NO: 7842 - DNA, 415 bp, Arabidopsis thaliana
  unsure at all n locations
  Clone ID: LIB24-053-Q1-E2-A10
agtgatcaaggaatgctttttcttgctgacaaatgcttgggaatggaaaccatttgtcttggtggcttttgtcgggtaacagatgctggtttcaagactattcttcactcttgcgctagcctctccaagtttagtatatatcatggacctaaattgacggatcttgtcttccatgacatcttagcaactactctttcgcttagtcatgttagcttaagaaggtgccatcttcttactgaccacgcaattcaaaagctggcatcaagtctcaagctggagaatcttgacctcagagggtgcagaaacctgagggatgaaaccttgacagctgtatctcatctgccaaaactgaaggttttacttcttgnatggcgctgatantancgacacagggctttcgtacctaaaagaaggg

SEQ ID NO: 7843 - DNA, 413 bp, Arabidopsis thaliana
  unsure at all n locations
  Clone ID: LIB24-053-Q1-E2-A2
atttgttagatggaangaagattgcgagtttcgacattgggatgagttgattccagatgctcttggnttaatctttagccacttacctcttcaagaagtactaacagtggtgcctagagtttgcaaagcatggaacaganctgttactggaccttattgttggcaagagattgacattgagctgtggagtaaccgttttcaccagtctgatcatcttgaccggatgcttgagatgttgatccctagaaacgctgngctctttgcgaaaactctccgttactggccttcgaaatgactctatcntctccttcantgcacaacatgctggttcacntaagaccttgaaggtgccaagaagtggtctgactaattcnggtgtggnaaacgtagctgaaaagctctcgtctcncact

SEQ ID NO: 7844 - DNA, 446 bp, Arabidopsis thaliana
  unsure at all n locations
  Clone ID: LIB24-053-Q1-E2-B1
acccacgcntccgctttcaataacaatatgctgcgtacttgtgctatttttaagatctatatgtcgatagatcaagatcacctctaaagttactcaagacgaatataaagaggaaagtgagaatgaagaccctgcagacgagcccaaagaaaaagattcaaatttgaaaccctttgcaagtttagaggaattggagaaaggaaggttacctccacaggatattctttcactccctatgttcaagaactacacagctgggaatccgtcggttgtactgtatatcaaaaaccttgccaaagatgttgttatcgatgatttctattacatatttgggtcacagtttgaaagcnnnnnnnnnnnnnnnnnnnnnnnnnnnnnnnnnnnnnnnnnnnnnnnnnnnnnnnnnnnnnnnnnnnnnnnnnnnnnnnnnnnnnnnnnnnnngaaa

SEQ ID NO: 7845 - DNA, 421 bp, Arabidopsis thaliana
  unsure at all n locations
  Clone ID: LIB24-053-Q1-E2-B4
acgcgtccgcacancactctcacaatatgatcccttatccaaccgtagaagatgcgtccgtggcgttaggacgaaaccttacttggttcgagacggtttggttcgattactcaaccaccaaatccaatttccatgtanattgccacaccattctggttctcttccttgtcttttcactagctccttttcctcttgtgattgtctaatggaccggttggttcgatcagtttaagattcanaagaaggttaagtattcnttgtctgagnatgttccaatgttatnaagaagtcatgaatttgttccttctcngtcgtcggcacattgcaaatcctttcttatccttccatccagatggttgggattcgaaagtggnttgncattaccatcnntantggagatagtancacaattagtgggttt

SEQ ID NO: 7846 - DNA, 414 bp, Arabidopsis thaliana
  unsure at all n locations
  Clone ID: LIB24-053-Q1-E2-B6
acgcgtccggctgaagaagcaaacaacaatagaaaagagatgcgagcaattcacatcgtgacgacgcgattgagctccagctttattaggcctgttcttcttgacttcgtttcttgttcgcctctacgccagttctctacccctaggcgctttatctgtgccgcgagcaaggtcaatggaggaggcaggtcatgttcgattgttgctccattggtagtgaatgaagaatttcagaacatcgatgtcaatcctcctaaaggaactccgtgatttccctcctgaggatatgctactccgcaactggctcttcaaccacttcaaagaggtctcacggttanttgggtatgaggaagtggattttcnagtantggagacggaggcattgttcatcagaaaagctgggggaggagnatt

SEQ ID NO: 7847 - DNA, 433 bp, Arabidopsis thaliana
  unsure at all n locations
  Clone ID: LIB24-053-Q1-E2-B8
angcgtccgcaaaaagaaaaacaatagctaatttaatatcttcttgtgatcatcacaataccacattgatccaaggccagttaaaatctctttcaccatgaagataaagattatgagcaaaacacatgtgaaaccaacanaaccagtactagggaanaaacaattccacctcaccacatttgatcttccttaccttgctttcnacnacaaccagaagtttctactcnacaaggttccaganccttctagatctcgaggaacccacattccaaancgaggtcgtggagaatctcaagggatggtttgggtttggttcttgangacntctatcancncgccggtaagctgggccaanggncgatgnaggagtcttccgtgttgagtacgacgctggngactcagagatcaagcngcgtagangttcggcgtcgct

SEQ ID NO: 7848 - DNA, 507 bp, Arabidopsis thaliana
  unsure at all n locations
  Clone ID: LIB24-053-Q1-E1-H1
ctgtttacgccgnccgtaccgcgtccanaaattcccgggtcnacccacgcgtccgcnctgtcttccttcgcttccctcttctctcaccacaatccnnnnnnnnnnnnnnnnnnnnnnnnnnnnnnnnnnnnnnnnnnnnnnnnnnnnnnnnnnnnnnagctctttatcaccattgtctcctttcttctctatgctccattgttcttatcttcaccagttcctgaccctgaatctgtcgttgaagaagttcacaagagcattaatgcgtcggttgcaggaagaaggaagttaggttacctctcatgtacgaccggtaacccaatcgacgactgttggcgttgtgaccctcacngggagcaacaccgtcaanntctcgctngactgcgccattggantccgggaaaaaaggccaatccggttggccgtgaacgggtccgggatntaacgttggtcaaccggactcaaaggaaanngancaacccaanttaggcccccaagccccgggaa

SEQ ID NO: 7849 - DNA, 435 bp, Arabidopsis thaliana
  unsure at all n locations
  Clone ID: LIB24-053-Q1-E1-E1
caactcactccttatcttaacgagaagcttaaacgcacggtggaagttgttccggccaaaaaggatgacggagcaccagtggcagctgcagcggcggctccagctggcggtgagaagaaggacaaagttgctggtgaaaagaaagagattaaagatgttggagaaaagaaagtcgacggtggtggtganaagaagaaagaagttgctgttggcggcggtggangaggaggtggacgtggaggagaccgtggtgctatggatgtgaanaaatcggantataaccggttacgggtaatcctccacagccgatgtattnctacccagaanngaccaggtntncggttcaaccaaccattacatgatgcaacgggtcaatcatcgcnantcgntattgtncnaagaacccgtatttcnaacccaaggggataacctgcn

SEQ ID NO: 7850 - DNA, 498 bp, Arabidopsis thaliana
  unsure at all n locations
  Clone ID: LIB24-053-Q1-E1-E2
acgccgttccgtangcctccaaaattccaaggtcgacccacgcgtccgcccatttcccattttctgctaattttctttcactttctcggctgattttcctgggaaaatactctttatctaaacgtcctaaaacactactcaaaaacgaatgttttttttangtnataacttatatttgtgtgactattttgatataactattattgcagatctgtggatctnaacacttctctaatgcttataatgacgagatctaagcatgagaangaagagataagaagctcatgacaagaatctgaagaaaattaantttgtttttcacntatcgcccgccattgttgttctacactgagcttanncagttgacacctgtagatccaaaaattcaaaaagtttaccactgnancatactcaggcnttttncttaaagtgancagagctctgataaagtatgacaagtagcgttacaatngggangttggccaaagaaaattgagn

SEQ ID NO: 7851 - DNA, 498 bp, Arabidopsis thaliana
  unsure at all n locations
  Clone ID: LIB24-053-Q1-E1-E3
tgttacgcctgncgtacgcctccaaaattccaaggtcgacccacgcgtccgcttcaatcaaaatcatgaacattttaagttctcgcttggttggacttgttccaatgctgatcaaaattgatgctgcgaattccttgattgaggattatgccgcctgccttgagggacgacttgaagagggtgaagttgtagagaacagttgtgatgatctaggggtccttattatgcagcttctggttgataatatcaaccggcctgccccaagtatcacacatttgcttctgaagtttgatcttgatgcccctgtggaagggacagttttgcagccgaagtttcactaacagttgtctgnaaggtcattccttgaaatgcctgggagaaagcntccaaaccctgaatnatnaacttcctactcctttgaantttggcttcccaagcctttgtgtganttgaaattgggattcanctaactaagngggtccaaaccaatggattcna

SEQ ID NO: 7852 - DNA, 503 bp, Arabidopsis thaliana
  unsure at all n locations
  Clone ID: LIB24-053-Q1-E1-F1
ctgttacgcctgtncgtacggcctccnaaattcccaaggtcgacccacgcgtccggttaagaaaattctcatcggcgtttagatcaagaaacttgggaatcggagaagctcactgagaacaatggatatgagacgtgcttcgatgtgtatgatgttaatttgcgtctccttggttctcctttcgggttttggccagtttgtgatctgcagtgaagaaaaaaggaacgtacaacgacaacgtcgtaaagatgaagcttggtggatttagcgattccaagaacgattggaacggtggaaaagagatcgatgatattgcactcttcgctgttcaagagcacaacagacgagagaatgctgttcttgagcctgctangagtattgaaggnaacaagagcanggtggttgctggcaaagctataccntcctacccctgaaagttaatgaancctgggtgaagaaaaaagatttatgaanccaaaagtttggggtgaagccaatgggat

SEQ ID NO: 7853 - DNA, 463 bp, Arabidopsis thaliana
  unsure at all n locations
  Clone ID: LIB24-053-Q1-E1-F11
gtttacgcctgccgttaccggtngcaaaattcccgggacgacccacgcgtccgcacaagaatgtgtatgcacactggggttcctgaaggccaaatcataacaaccaatctctggtctgctgagctgtccaagcttgcggcaaacgctttcttggctcaaaggatttcatcagtgaatgctatgtcggctctgtgtgaagccacaggcgcagatgtcacgcaagtgtcttacgcggttggtacagactcaaggattggtcccaagttcttgaactcgantgttggattcngtggttcntgtttccagaaggacattctgaatcttgtcnacatctgtgantgcaacggactcccggaagtggcanagtactggaaagcaagtcatcaagatnaatgactaccaaaagganccggttccgtgaaaccntgtttggtttccnccaatgttcaactccggtatcnag

SEQ ID NO: 7854 - DNA, 491 bp, Arabidopsis thaliana
  unsure at all n locations
  Clone ID: LIB24-053-Q1-E1-F3
ctgttacgcctgtncgtacggctccaaaattccaaggtcgacccacgcgtccgtgttgctctgccattggtccacaaaacaacagaacagtgttagcacttgcaagcagaattgggatcaactatggaaaattaggcaacaatcttccttttccttaccaatcaatcaacctcatcaaaaccattaaagcaggccacgtcaagctctatgacgccgatccagaaaccctaaagctcctctctacgaccaatctttacgtcaccatcatggtccctaacaaccagatcatctcaataggtgctgatcaaagccgctgctgataactgggtcgccactaatgtccttccttttcacncgcaaacccgaatccgattcgtccntccgttggnancgangtcctcagntacagttctgattcaagacangcaaaatatggggctantcntgtccctggccatgcngnaaagtagtgaacncccttagacccgtgg

SEQ ID NO: 7855 - DNA, 485 bp, Arabidopsis thaliana
  unsure at all n locations
  Clone ID: LIB24-053-Q1-E1-F4
cgtaggcctccaaaatccaaggtcgacccacgcgtccgcccacgcgtccgcccacgcgtccgaccggattaaaatcggtttgcttaacaacgaccagagccgaaacaagcggtgttgacagagaggagaaagtagtgattgttgggggcgggattggcggacttgccactgncgttgctcttcaccggcttggaatccggtccgtggtgttggagcaggcanagtcgcttcggacaggaggagcatcgctgacgctatccaagaatggggtggcgtgttcttgacgccatctccatcggacctcaactccgaaagcagtttcttgaaatgcaangggtggtattgaanaaggaagatggaagagagcttcgttctttcaaatttaaagacaatgatcaaagccaagaaagttcgggggggtggagaggcgaagtactcctgggaaacacttgcaaaccanccttctccacaaaccattccggttt

SEQ ID NO: 7856 - DNA, 499 bp, Arabidopsis thaliana
  unsure at all n locations
  Clone ID: LIB24-053-Q1-E1-F6
naactgttcacgcctgcccggtaacggtccaaaaattcccgggtcgacccacgcgtccggctctttcttcttccccgcagttcccggagacgacgccggaggaaaatcgtacggaaactttgcttcgacttcacgtggccgctccacgaagcgcctttgggtttcgtcttccccgtttctctttctctctcttcttttgcctttgttaccacgaatagaacgagaggagagagataggaggagagttttgggatattggtggagagcgattatcgggagagccaagagaaaaaaataagcagcttcttcctccctcatcgttgggaccgtgacttttgttttcttcagctttaagcaancaaannaaaaagatgaccgggcgttggcganaatcagcttatctcnaattcaacctgaatgaactcaaatttctcntttgaactttgagaagcaaaacctactggtgattcttaaaagtttgccagttagnacaagggaa

SEQ ID NO: 7857 - DNA, 420 bp, Arabidopsis thaliana
  unsure at all n locations
  Clone ID: LIB24-053-Q1-E1-F8
ccgtgaagacacacaatctaatatttctcctccacgtagacaaaggactcgtaatgactcgccctctcctgagcctgggcctagacggtcggttgcggatagagttgatacagatatgtcaccaccacgacggagaaaacgtcacaattcgccttcacctgaacctaacagaaaacataccaagcctgttagtttggattcagatatgtcaccacctcgcaaaagaaaagccaggaatgattcgccttcaccagaanctgaagctaaatatctgagtgaagatctatctcctcctcgtangagacatgttcattctccatcggcgtgaatctagcanaaagccgttcaagattcngttgaagttggacnatgatttanctcngccntcgcaagaanggngaattacatggntcaccgtgt

SEQ ID NO: 7858 - DNA, 488 bp, Arabidopsis thaliana
  unsure at all n locations
  Clone ID: LIB24-053-Q1-E1-F9
tgttacgcctgccgttaccgggtncaaaattcccgggangacccacgcgtccgcactcncttcanttctctaacagtagcgccaaaatgaatccccanggactaaagctttcttcaatggaagaagaaacccacnacggntctctcgatctccaagagattcgcaggcgcgtgaaagagctcgatttctttccccggaattgcanagaagagcctgtagaatcgtgtagttccgattacgaagactctggtggntcangattttgttcttcagtttgaaccaaaggtgnnaagagattgttgaaggannaccgcgatgttgatttaantgggctgttgaacattcaagattgcttacttggagtacntgngaaaatgancttcagtcngtggaggctgaaaagtgccaaagtttctgnagaaaattggagcgtctttctcaagtctcatgccccanggattctaatagggttgccanacggggatctt

SEQ ID NO: 7859 - DNA, 459 bp, Arabidopsis thaliana
  unsure at all n locations
  Clone ID: LIB24-053-Q1-E1-G12
acgcctgccngtaccgggtccaaaaattcccgggtcnacccacgcgtccgancagctctctcaataaaccaaacccaaatgcangctgtgtagagagaaacggagtgaggaaggaaggagatgggangggtgacgtcatcggtggcgggcgaaagtttgccttcntcccgccgagtccaccgtcttacaaggtggtgaccgacgagctcaccggactgttgcttctcagccctttcncccaccgcgaaaacgtagaaatcgtaaagcttcggaccaggagaggcacagagatcgtgggcatgtncgtgaggcatccgatggctacctcccangctcctctactcccatggcaacgccgccgatctgggacacatgtatgagctcttcattgagcttancatcnatctcaaggttaatcttatgggatacgnttactccggggtatggacaaatctacng

SEQ ID NO: 7860 - DNA, 416 bp, Arabidopsis thaliana
  unsure at all n locations
  Clone ID: LIB24-053-Q1-E1-G8
aaacatcctctgtttctcttgtccttgtccctttttccagatcttaaggttttccacattttatcatctgggtcctctccttaatgatttgaagacactcaattcctatttgatcggggactagaatttggattctgtttcagacaaaagtagatttccctgtctctttcccgtttgattttcaataacgatgaatccggaggagcaaaagatggaatctgcatcggatctgggcaagctcttcattggcgggatttcatgggacacagatgaagaacgactgcaagagtattttggcaagtangganatttggttgaagctgtgatcatgagagaccgtactancggacgtgccccgtggcnttgggtttatcgtttttgcagatccttccngttgcccgagagatcatcatngg

SEQ ID NO: 7861 - DNA, 448 bp, Arabidopsis thaliana
  unsure at all n locations
  Clone ID: LIB24-053-Q1-E1-G9
gttacgcctgcccgttaccgggtccaaaaattcccggggncgacccacgcgtccgnccacgcgtccgcccacgcgtccgcccacgcgtccgatttgctcatctccttcnatttcgaacccctaatcttgagatggcatcggagaagaagctctcgaaccctatgagggatattaaggtccanaagctanttcttaacatctctgttggtgagagtggtgatcgtctcactcgtgcctccaaggtgttggaacangctcagtggtcanactcctgtcttctctaaggccaggtacactgtgaggtctttcggtatcaggcgtaatgaaaagattgcgtgctatgtcaccgtganaggtgaagaaggcaatgcagcttccttganaagtggcnttgaaagtgaangaataccancctgttgaggangnacctcaatgacactggntgctt

SEQ ID NO: 7862 - DNA, 434 bp, Arabidopsis thaliana
  unsure at all n locations
  Clone ID: LIB24-053-Q1-E1-D8
acgcgtccganaaaacagaggtggcagatggtcttgtcttagagaagacctcatcaccattaggcgtacttctgattgtttttgaatcccgacctgatgcacttgtacagatagcttcacttgccatccgtagtggaaatggtcttctgctgaagggtggaaaggaggcccggcgatcaaatgctatcttacacaaagtgatcactgatgcaattccanacactgttgggggtaaactcattggacttgtgacttcaagagaagagattcctgatttgcttaagcttgatgaccgttatcgatcttgtgatcccaaggangaagcancaagcttgttactcagatannacatnctacagaaatccctngtgctangtcangccgattggaaatctgnccatntatntgtcngacaaagggcttgttnaataccg

SEQ ID NO: 7863 - DNA, 539 bp, Arabidopsis thaliana
  unsure at all n locations
  Clone ID: LIB24-052-Q1-E2-F2
gcggtcgaactgtttccctgttctacggcccgaaattccgaatcgacccacgcctccgcggacgcgtgggcaaagcnnnnnnnnnnnnnnnnnnnnnnnnnnnnnnnnnnnnnnnnnnnnnnnnnacaagaactttgttttggggcttcatccatcgttcaaggttcgttgaaaactatgaagaaagttgagttttttatgctccttctctgcttcatcgcagcgtcatctctangtgtctgctgatccaccancatgtcctgctgatttgggaggcaagtgtagtgantctgatgactggcaaggtgatttcttccctgaaatccccangattaantatgacggacctttcgagtaagaacccacgtgcctacangtggtataactcnngagnangaagattcttgggaagaaaatggaacggattggnttaaatttcagtgttgcgtttttggcatactttcccgtngggaactgggaggtgattccatttgggtgctgnanctaagttattgcnccttggggaaagaacgggtcca

SEQ ID NO: 7864 - DNA, 511 bp, Arabidopsis thaliana
  unsure at all n locations
  Clone ID: LIB24-052-Q1-E2-G5
tggtacgcctggccgtaccggtccggaattcccgggtcgacccacgcgtccgggcagacccaagagttgcagttgttactggttccaacaaagggattgggtttgagatttgcaggcaactagctaacaatgggataactgtggttttaactgcgagagatgaaaacaagggtcttgctgctgtccaaaagctcaagactgagaatggtttttctgatcaagccatctcctttcaccctcttgatgtctccaacccagacaccatcgcttctcttgctgcttttgtcaagacccgcttcggcaaactcgatattctggttaataatgccggagttggaggggcgaatgttaatgttgatgttctcaaagctcagattgctgaggctggtgcgccaactgatatttccaagataatgagtgatacatatgagataagtcnaggantgtgttaaaacaaactactacngcgttaaagcgaatgttgcgagggccatgattcctctccttcaat

SEQ ID NO: 7865 - DNA, 473 bp, Arabidopsis thaliana
  unsure at all n locations
  Clone ID: LIB24-053-Q1-E1-A2
gtangcctccaaaattccaaggtccacccacgcgtccgngatatttgttagatggaacgaagattgcgagtttcgacattgggatgagttgattccagatgctcttggtttaatctttagccacttacctcttcaagaagtactaacagtggtgcctagagtttgcaaagcatggaacaganctgttactggaccttattgttggcaagagattgacattgagctgtggagtaaccgttttcaccagtctgatcatcttgacccggatgcttgaagatgttgatccctagaagcgctgggctctttgcgaaaaactcccccgttactggggcttcgaaaatggactctatcttcctcccttcaattgcacaacaanctggttcacgtaangaccttgaanggtgccaaggaagtggnctgacgaaattcgggtgtggnaaaacgttanctgaaaaaactctccgtctctcacn

SEQ ID NO: 7866 - DNA, 488 bp, Arabidopsis thaliana
  unsure at all n locations
  Clone ID: LIB24-053-Q1-E1-B11
ctgtttacgcctgccctgttaccgcgtnccaaaattcccgggacgacccacgcgtccgagtctggatgaggtttatggctacaagacagcttgtgtggaacaaaaactataatgttaagccaagggagataagcaaagcgcaggatagactgactgaccttctccaggacgtttatgcaagttatccagagtacagagaacttttgcggatgataatgtctactgtaggtcgaggaggtgaaggagatgtcgggcaacgaatccgtgacgaaattctagtcatccagcggaaaaatgactgcaagggtggaattatggaggaatggcatcagaagttgcataacaacactagtccagatgatgttgtcatctgtcaggcattgatggattatatcaaaaagtgactttgacttaagtgtttactgggaaaaccttgaaacgataatggcataaccaaagagcgaccctaagttatgatcgtgctanac

SEQ ID NO: 7867 - DNA, 423 bp, Arabidopsis thaliana
  unsure at all n locations
  Clone ID: LIB24-053-Q1-E1-B4
acgcgtccgcacaacactctcacaatatgatcccttatccaaccgtagaagatgcgtccgtggcgttaggacgaaaccttacttggttcgagacggtttggttcgattactcagccaccaaatccaatttccatgtnnattgccacaccattctggttctcttccttgtcttttcactagctccttttcctcntgtgattgtcgaatggaccggttggttcgatcagtttaagattcacaagaangttaagtantcgttgtctgatatgtnccantgttatnaanaagtcatgaaagttgttccntctcgtcctcggcacaattgcaaatccgtttccntanccgtccatccaagaatggttgggaattcgaagtgggnttggcaattaacaancgttaatggagataagtaancaccaatta

SEQ ID NO: 7868 - DNA, 492 bp, Arabidopsis thaliana
  unsure at all n locations
  Clone ID: LIB24-053-Q1-E1-B6
aantgttcccctgccggtaanggtccaaaattcccgggtcgacccacgcgtccgcccacgcgtccggctgaagaagcaaacaacaatagaaaagagatgcgagcaattcacatcgtgacgacgcgattgagctccagctttattaggcctgttcttcttgacttcgtttcttgttcgcctctacgccagttctctacccctaggcgctttatctgtgccgcgagcaaggtcaatggaggaggcaggtcaggttcgattgttgctccattggtagtgaatgaagaatttcagaacatcgatgtcaatcctcctaaaggaactcgtgatttccctcctgaggatatgcgactccgcaactggctcttcaaccacttcaaagaggtctcacggttatttggggtatgaaggaagtggattttccaagtactggagacggaggcattgttcatcngaaaaagctggggaaggagattaagagaccaagtttgtctt

SEQ ID NO: 7869 - DNA, 430 bp, Arabidopsis thaliana
  unsure at all n locations
  Clone ID: LIB24-053-Q1-E1-B8
aaagaaaaacaatagctaatttaatatcttcttgtgatcatcacaataccacattgatccaaggccagttaaaatctctttcaccatgaagataaagattatgagcaaaacacatgtgaaaccaacaaaaccagtactagggaagaaacaattccacctcaccacatttgatcttccttaccttgctttctactacaaccagaagtttctactcnacaagttccagaaccttctagatctcgaggaacccacattccaaaacgaggtcgttggngaatctcaanagatggtttggggtttggttcttgaagacttcnatnanctccgccgggtnagctggccnagggacgangaaggagtctccgntgtttgagtncgacgcngangactcacagatcaacggccgtagaagttctccgtggntcatgct

SEQ ID NO: 7870 - DNA, 471 bp, Arabidopsis thaliana
  unsure at all n locations
  Clone ID: LIB24-053-Q1-E1-C11
cgttaccgcgtncaaaaattcccgggacgacccacgcgtccgnacaaagagatttcggtcccatgcatgagtgtttttgatgttggtggaaacagcttatcgggtgtaatccctgattttctcaacaataccacaagccattgtcctcctgttgtttactttgacaggttttctattgaatcttacagcgacccgtcgtctgtttatctctccttctttaccgagaaggctcaagttggaacttccctgatagatcttggaagtgatggaggtccggccgtgtttcataattttgcagacaacaacttcactggtactctcaagtctataccacttgcacaggagcggttgggaaagcgatctcctacatattttctgctgggaagggaatcggttgtacnggcaatttccgggaaatcctgtttggataacntgcgacgaanctcaaagctgttaatgtcaatgttaacc

SEQ ID NO: 7871 - DNA, 414 bp, Arabidopsis thaliana
  unsure at all n locations
  Clone ID: LIB24-053-Q1-E1-C5
acgcgtccggttgaacactgctagttctggtaataacagattgagtggtgatagttatgtattgtgctcttctgggtttcatgaacatagaggttatgctgataaatatgagttcttggaatcaaaaccactttgctctcaagatggcttctttgattacctcaactttgtttctgttctggtgtctggcttccatctgaatgtggcattcctatgatcagatatcttaaaatgggaatcggcaanacggnaaatcaatttcatgangattactttcagctgcacctaatcaggcannnncagtctaacgcttatgcattantgttgctactttgacggaacaagttggnaccaactctccggaagaggaagaccctttgaangggcttcccangagttacaaaacgcgnaagg

SEQ ID NO: 7872 - DNA, 446 bp, Arabidopsis thaliana
  unsure at all n locations
  Clone ID: LIB24-053-Q1-E1-C6
acgcgtccggtttgcaggcctgagtcaatgcacgagtataatttaaccccacactcgttgtatgctgctgtttccgttggtcttgagacagaaactatcatctctgttttgaataagctatctaagaccaagctacccggggagatcattgatttcatccatgcttctactgctaattatgggaaagtgaagttggtattgaagaaaaatcggtattttattgaatcaccattcccggaggtgttgaaaaggcttctcagtgatgatgtcataaatcgagcaagatttacttctgagccatattatggtggtgatggatttacgatcggcanaacaagtggtgaacttgaagcaaggacctggggagttgttgaatgaaancagaattggcagcagcagnaaganganaaagaaactcactcanttgagataganccctgcactgg

SEQ ID NO: 7873 - DNA, 502 bp, Arabidopsis thaliana
  unsure at all n locations
  Clone ID: LIB24-053-Q1-E1-C8
gaactgtntccgcctgcccggtaaaggtccaaaaattcccgggtcgacccacgcgtccgcttccgccttgtccgattctgcttcacctctgcgcattccttgtctgatcctcgcaggaaactctactgtcagcaataggttgatgggttctgcagccagacagcctctcttctcatttggtgttattgctgatgttcagtatgctgatatttctgatggccgctcttttttaggtgttcctaggtattacagaaacagcatccttgtccttcaaagagctgttgaaacttggaaccaacatggnaacctcaaatttgttattaacatgggtgacattgttgatggcttttgtcccaaagatcaatccttgggcggccactaaggaaactagtcnatgaattcgagaaattcaanggtccctgtgtatcatangaagtgggnaatcacngccncnaaaaatctcccccggcgangaagttgcttccgttgctggaaggatccn

SEQ ID NO: 7874 - DNA, 474 bp, Arabidopsis thaliana
  unsure at all n locations
  Clone ID: LIB24-053-Q1-E1-D3
acgcctgtncgtacgcctccnaaattccaaggtcnacccacgcgtccgaagaaacccaaaagcagaagaagatggtggcgatatctatgtacagaggcaaccttcacaaagttcccgacgtacctcgccggtggataatgcctgaccgtaatctctctttcaaggatttcaaatctcttcttcatcgccgtaaaaaagccctttctcgtctcccccttaaccctaatttgaaccttagcgtcaagactgagttggttactgatcaggagaatccaattcttccatctgaagcgaacggttcttctgggaagcagaagctatttgaggtaaagagagaggagatttgtgggaatcgggttaaggggagatgagaacaacgacagaggttttgaanggagctccgatcagacggtgganatcgtcccggggagaattgacgggnatcagaggaaaccgataatgtggccacacnaa

SEQ ID NO: 7875 - DNA, 423 bp, Arabidopsis thaliana
  unsure at all n locations
  Clone ID: LIB24-053-Q1-E1-D4
aaaactgtccatgtaccacaccatgagattagttgtcacgatanatattcgcgagacgagaagctccaattaaaaaccctatgagctcatctctctctccaggtacggccttttcgtttttggctttcaccggcgtggatctccggtgacggggagattcggaatttcggagagattttagatcatgtatanggagataggtatggttggatcgaagtcggacgtggtcgatcngaaacgaataaacganattcacgataacaggccttcgcattcgatgtctcancctgtcaatggaaaangcaaggtaacatcgacctcccgttttgatggggaaacaccaanttgcatgatnaggaatcttcacnttctggttcaatctccaaggactaacatttccgacgctggtggagatatcanacc

SEQ ID NO: 7876 - DNA, 516 bp, Arabidopsis thaliana
  unsure at all n locations
  Clone ID: LIB24-052-Q1-E2-F1
actgtttccctgntctaccgccccgganattcccgnagtcgacccacgcgtccgaatnaattanggttcagagagatgggtagganaaagaaatctagggcttcgacaaccgaagaagatgagattgagatggataatgctggcccatcctctgagacaagtctttacgaggttcttggagttgaaagaagagccacttcacaggaaataagaaaagcataccataagttggcattgaagcttcaccctgataaaaatcangatgataaggaagctaaagacaagttccagcagctgcaaaaagtgatatcaattcttggtgatgaagagaaaanggcagtctatgatcaaactggctcaattgatgatgctgatattcctggagatgcgtttgagaatttgcgggatttcttccggggacatgtataagaaggtcaaccaagcctgatattgaagagtttgaggcaaactacaggggatctgatcagagaananagacttgccttgaacctttca

SEQ ID NO: 7877 - DNA, 351 bp, Arabidopsis thaliana
  unsure at all n locations
  Clone ID: LIB24-051-Q1-E1-C12
ctctggggagaagcaagctttgatatctctatctgacaagagggacttggcttctcttggcaacggtctgcaagaattgggatacactattgtttctactggaggaactgcctctactttggagaatgctggagtctctgtgaccaaagtggagaagcttactcattttccagaaatgcttgatggccgtgtgaaaactttgcatccaaacatacatggtggtatcctcgctanaagggatgtggagcatcatatggaagctcttaatgagcatgggattggtanatttgatgttgtggttgtcaatttgtaccccgttctatgaaaaagttactgctccaangtgggatc

SEQ ID NO: 7878 - DNA, 414 bp, Arabidopsis thaliana
  unsure at all n locations
  Clone ID: LIB24-051-Q1-E1-C2
attttcaacaaggataagagccggaagctcatcgccggtgaacggaactagggtttcattcatccccaaattgataacaagaaaatggctcatgcttgcgtctctacatcggcttcttctctcagattcanagctggattcgtctccgctagtcccaatggntcctctttcgattcncccaagctttctcttcctttcgaggcctctccgttcaaggaangacgaataagttagttaagcgataganagaattgggaagaantcaactccggaaagctgtatattccggnaatctctggacacccggagattncgtctcctcaagggagtttggtccattagagatgatntacaangtcccttcttcgncgtagtttccggcttatgctcaanggacaaaggaccaacctccna

SEQ ID NO: 7879 - DNA, 406 bp, Arabidopsis thaliana
  unsure at all n locations
  Clone ID: LIB24-051-Q1-E1-C3
acgcgtccgcccacgcgtccgcttttaaagaagcaatattttttgtgttttgttttaagttttaacacacaaacacattacctcgaattcgatacgtcatagtaattagcaactatggaacgatgtcgttctggtcatcatcgcatcatttcttattanctctcttcttcgttgatactattttggtgtattttcgttctcgtgctgttatctacgacaagtactacaaatgctttagtgaaaatcccgaaaaacncgaccgttccggcggtaatagtgttcggtgattcanttgtcgatgccgggaatnacgacgacatgatnacagaagctangatgcgattatgcnccctacggcattgattttgacggtggaagttgcnacgggaagattcccctnatgggc

SEQ ID NO: 7880 - DNA, 381 bp, Arabidopsis thaliana
  unsure at all n locations
  Clone ID: LIB24-051-Q1-E1-C8
tgcgattgtgatggcatttgctccggctccttgggttatcatcgttggaagaatctttgttgggtttggtgttggtatggcttcgatgacgtctccgttgtatatctctgaagcttctccggngaggattagaggtgcacttgttagtagcaatggtcttctcatcactggtggacanttcttctcgtacctcatcaatcttgcttttgtccatactccgggaacatggagatggatgttgggtgttgcgggagttccangctattgttcagtttgtgcntatgttgtcgctacctgagtctccaagcgtggttatantagaanaaggacaatgattgccggaatcccanaaccgattcnttgagaaggatttacccnggg

SEQ ID NO: 7881 - DNA, 426 bp, Arabidopsis thaliana
  unsure at all n locations
  Clone ID: LIB24-051-Q1-E1-D10
acgcgtccgctgaagctcttcgtcacgcatctacaatggcatcgatgatgcaaccgcagatcatactgctgaaggaagggacggacacatctcagggcaaagcgcaactagtaagcaacatcaacgcttgcactgctgttggagatgtagttcgaaccacgctcgggccacgagggatggacaaactcattcacgacgataaaggatccgtcaccatttctaacgatggtgctaccatcatgaagctcctcgacattgttcatcctgctgctaagatcctcgtcgatatcgccaaatcncaagactccgaggtgggtgaatgggacaactacantggttcttcttgcagcagagttttttgaangaagcgaagccatttantggggggatggngttcacgctcanaatcgaagttagggngtttcc

SEQ ID NO: 7882 - DNA, 382 bp, Arabidopsis thaliana
  unsure at all n locations
  Clone ID: LIB24-051-Q1-E1-D11
acactcaaaggttaagaagaaaagatggcgaaaaagttggaagctcaaggtggtcgtggaggagaagaatgggacgatggtggtgcttacgaaaacgtcaagaaagtgtatgttggtcaaggtgattctggtgttgtttacgtcaagtttgattacgagaaagatggaaaaatcgtatcacacgaacatgggaagcagacactacttggaacagaggagtttgtggttgatccangaagattacataacatcaagtgaaaatttactacgagaanctctttggatcacccgatagagatcgtaacggctctaatctttaangacattcaactgggaaaaacttctcanccttttggactaacctctgggagaangaagctga

SEQ ID NO: 7883 - DNA, 422 bp, Arabidopsis thaliana
  unsure at all n locations
  Clone ID: LIB24-051-Q1-E1-D3
tttaggtgggattaaggtgaaagtatgtggagttgtgcaatatgttaatctatttggtacagcaattggatatacaattgcatcagctataagtttggtagcaatccaaaggacaagttgccaacagatgaatggaccaaatgatccttgtcatgttaatggaaatgtttacatgattgcgtttggtattgtacaaatcatattctctcagattcctgattttgatcagttatggtggctttccattgtcgctgcggtcatgtcttttgcttattctgccattggacttggccttggtgtctctaaagtggtaagagaacaaagaaattaaaggtagtctcactggagtcactgttgggacagtgacactgnagtgggacagtgacatcgtcgcagaanatatggagaacatttcantctcc

SEQ ID NO: 7884 - DNA, 410 bp, Arabidopsis thaliana
  unsure at all n locations
  Clone ID: LIB24-051-Q1-E1-D7
acgcgtccgcccacgcgtccgccgaatctagggtttttgtctctagcctcctcaagctttgcaaacaatcatggngacccagatcagcaagaagagaaagttcgtagccaatggtgtgttttacgctgaactcaatgaggttctaaccagagagcttgctgaggatggttactctggtgttgaggttcgcgtcactcctatgcgtactgagatcatcattagagccactcntactcannacgttctcggtgagaagggaaggaggattagggaattgacatctcttgtgcaaancagattcaantttcctcatgacaggtgttgacctttatgctgagaaggttgccnnacataggtctttgtgctactgcncagngctgagtctctncgttacaagcttcatgggnggt

SEQ ID NO: 7885 - DNA, 418 bp, Arabidopsis thaliana
  unsure at all n locations
  Clone ID: LIB24-051-Q1-E1-E4
ggatggcagctgggagctttcaacagaggccaaggaaatattgaagcagaggctggatattactttggacgangtttgctccctgaaagaggagaaaaccacatgcattgccaaatggaatgctgtagctttgcagaatcaaagcttagaggcaaatttgcagaatattactcacgaaaacctcatccttctgcaaaagattgatgaactggaatctgtagtgttggagtctaagagttggnagaccaattatgagacatgcatttgtgaagaaaaaagagcttgcaaagcttatgggagaaagaaacggtgggaaaaagctcaatatccgacaaggcntgctactgtncaagctgagttttgatgctgtganaagtaangtttgatgaatttgggctaccngcaaatggaaaatcta

SEQ ID NO: 7886 - DNA, 382 bp, Arabidopsis thaliana
  unsure at all n locations
  Clone ID: LIB24-051-Q1-E1-E6
agcctctcgttgctaagaggaatcaaacaatggtgtttgtgaagtccaccaagtcgaatgcttacttcaagaggtaccaagtgaagttcaggagaagaagagatggaaagactgactacagggcaaggatccgtcttatcaaccaagacaagaacaagtacaatactcctaagtatcgttttgttgtccggtttaccaaccanagacataatggcacagattgtatctgcaagcattgctggtgacattgttaaaagccttctgcttacgcacatgaactgcctcagtatggtcccactgttggtcctacaaactatgnctgnagcttaccggtaccggccttcctttttggctcgccngtgttttaaagaangttgggaaa

SEQ ID NO: 7887 - DNA, 419 bp, Arabidopsis thaliana
  unsure at all n locations
  Clone ID: LIB24-051-Q1-E1-E7
acgcgtgggcggacgcgtgggggatacttaatttgacactcttctttgtgttttctcttccaccttctttttcggtatatcattcaacaaaattctctcttcatttcnttattttgttgttttttttattantattgaaatcaaggagaattaaaacagaggctctgcaaaagaagatgatcaaaacaatcacatctctacgcaaaactctggttctacctcttcatttacatattcgtacgctacaaactttcgccaagtacaacgcacaagctgcatcggctttgcgaagaagagcgtnanaaacctctttancaanatggagatganngtatatgcggatttggnttgggaataanctcgggtttggnccaaaatccaatctganntacatgtntgtcatngaaaatggctcaaaa

SEQ ID NO: 7888 - DNA, 446 bp, Arabidopsis thaliana
  unsure at all n locations
  Clone ID: LIB24-051-Q1-E1-F12
acgcgtccgagaagaggcaaatgacaaaacagcgagtgcttcagagaacgagctcaagctggaggaaaaacaaaacatgcgaaccgaattggaaatcgctgctgcttcagaaaagttggccgagtgtcaagagacgattctaaacctgggaaagcagctcaaggcattgactaactcaaaggaaacagctttactttcagaaacactcatgtacgacgttacagacaaatcgaacaacctacctgatgcacaaccttcacatgagactactaaaccagagaagagattgaccagccagagatcatctcttttggatcagatgaaggcagaagatcacaacaccggggaatccaaggatcagaaaccgcaangcagcaagattaaanacggaaaagggaagaaaacagctctgtttacaatgaaaccattgaaggcactagaacaaa

SEQ ID NO: 7889 - DNA, 410 bp, Arabidopsis thaliana
  unsure at all n locations
  Clone ID: LIB24-051-Q1-E1-F2
aaagatggactatatgagaatctttagtgtttttgtagtaacgttatggatcataagggttgatgctagggttttcggaggacgaggaatcgaaaaatttgtaactttcggtcagaattatattgttacgtggggacaaagtcatgtttctacactccattctggcgaagaagttgatctttacatggatcaatcttcaggtggtgggtccgaatccaaggacgcctacngatcaggtctctttgaaatgagaatcaaagtgccttcaggaaatactggcggcatcgtcaccgctttttacttgacgtccaaaggaagtggtcacgacgagattgacttcgaatttctaacggnaacaacaacggaaaaccggtaacgtttacagacaaatcctgtttctaaatggagna

SEQ ID NO: 7890 - DNA, 507 bp, Arabidopsis thaliana
  unsure at all n locations
  Clone ID: LIB24-051-Q1-E1-C11
ctgttacgcctnccgtacccgtccaaaattcnagggtcgacccacgcgtccgcccacgcgtccgattgacctgacagtttcttacgccggcgagcgaactcgacgaagaagacaacttccttttgttgcacctgtgagtctgcgaccatggctatgcaatctggtattgggttatcgaagattttgattctagctggagcaggttatactagtacgattctggttaagaatgggaagatggcagatattttgggtgaagcttcaggctttggttaagcgatttgagaaatctggagatcatgtagatgatgattctgatgccatgactacncagatgcaacgattagcaatgggaggttcgngcaantggcntcgtccgcgggcagataactggtnaggaaatgggagctcangggagctgantttacacccttttantggtccccgngnangcgacatntgggagcantaaggctatgggntaganngtgggttcaaaggggaaat

SEQ ID NO: 7891 - DNA, 420 bp, Arabidopsis thaliana
  unsure at all n locations
  Clone ID: LIB24-051-Q1-E1-F3
aagagctattgctgaattgtgtggtttgaatcatattgaagaagctgctgtgcttagtacttgtaaccgtatggagatttatgttttagctttatctcagcatcgtggagttaaagaagttactgaatggatgtcaaagacgagtgggatcccagtttcagagatttgtcaacaccgttttctgttgtacaacaaggatgctacacagcatatatttgaagtctcagctggtcttgactctcttgtcctaggaaaaggtcagatccttgcacangtgaaacaagttgtgaaagttggtcaaggagtgaatggctttgggaggaatatcagcgggctgtttaaacacgcgataactgttggtaagcgtgttagaacagagacaaatattgcctctggtgcgggtttcggttagcncaactg

SEQ ID NO: 7892 - DNA, 68 bp, Arabidopsis thaliana
  Clone ID: LIB24-051-Q1-E1-F4
aaatgtatgttctaaaatgaggtgagaataatgtgttgaatccatttctcaaaaaaaaaaaaaaaagg

SEQ ID NO: 7893 - DNA, 420 bp, Arabidopsis thaliana
  unsure at all n locations
  Clone ID: LIB24-051-Q1-E1-G12
acgcgtccgtacgatttgtccgtactctcctctctgtccatgatgattatgtccagaattacgtggttaaaaacaacttgttgaaaccgatcatagatgtcttcattgccaatggaacccggtacaatctgctgaactctgcagtcttggatctgcttgagcacatacgcaagggaaatgcaactctgttgctcaaatacatagttgatacgttctgggaccagttggccccatttcagtgcttgacctccatccaggctttcaaggttaagtatgaacagtgtttaagaaagtgccggaccaaaaagcacttctgatgcggttgatccaagaagaagagttgacgagcgggcattggagaaagangaangaagattatttcaatgaaagacagcgaatgaagaaagattcaagcctcng

SEQ ID NO: 7894 - DNA, 492 bp, Arabidopsis thaliana
  unsure at all n locations
  Clone ID: LIB24-050-Q1-E1-E7
gnaactgtttacgcctgccggnaccggtccaaanattcccgggtcgacccacgcgtccgttcctcacacgatcaaaaagatagttcaaatttttctttaaagcttaagaaaccactcagtggaaaccaagactaattaaggctaatggtttctcgacaagaaggaaccctctactctagaaagagggatttcacagtctgtggagaagagtttcacaattcattcaagaagagcaaacaagaagatcaatcacagagcactctgttcaatgaacgaccaaaatcggagagtatgagatcaattacctttgattttgaacttcatctccacactcctctaccatcagattggcaaactaagggatattcaagaacatctgatgagcatagggcatatcccaaagatccagtgatttttggacaacctaagatgagcctaagaccttgagctgaacctttcaccttcaggttcaccttcacgaaccacaacgan

SEQ ID NO: 7895 - DNA, 495 bp, Arabidopsis thaliana
  unsure at all n locations
  Clone ID: LIB24-050-Q1-E1-E8
cngtttacgcctgccggaaccgngtccaaaattcccgggtcgacccacgcgtccgnccacgcgtccggcgctcgataatggctgcttccgatgattcctctcactatttcaccgagtttaccttgtctgagattgtncgacatggagaatctgtataaggagctcggtgaccaatctctccacaaagatttctgtcaaactgttgcctctacttttanttgttctgtgaatcggaatggcanatcctctataacctggaaacaggtacagatttggttccaggagaagctgaagcatcaagagccaaccaaaatccaaaactttgccatctccccctttgcanattcatgacttatctaatcncagttcggatgcttcaaatgcnncaaatgctacctttgttgggaattctacctttgttcanacactacaaggttttccnttttcgggtgtgccatatttggnttcnntttaggntaaacgccttagaaacgc

SEQ ID NO: 7896 - DNA, 427 bp, Arabidopsis thaliana
  unsure at all n locations
  Clone ID: LIB24-050-Q1-E1-F10
acgcgtccgatcactgttttttagattggagaacgctgagcacagccttggaggttcttcctccgaacacagcaacctgacgagcttagacttgggcgtgtctcacagcgaccatgaaattctggcagaggtactaagatgtacttcgaagatcagtaaacagtggggtggtgctccttatgccatgtattatgaatcaattaccggaaggccaattatctcatcggatgaaatcgttcctcgcttagttaacatccttgagtcggggatattcnacgaccataggtcaacgtacntggtcagatcttggtgctganaggancatgggaaaaagngctagaagctcataaagntcnnagancantcncnatttgaacatgctgctgtcncncnctgcnccanngtcnnagggctgggatcttgggga

SEQ ID NO: 7897 - DNA, 425 bp, Arabidopsis thaliana
  unsure at all n locations
  Clone ID: LIB24-050-Q1-E1-F3
ttcttcttcttcttaatctcagattcttgtctgaaaactttctctttcattttctctcaatttaacactttcaagatgccgatcaacaaagacccatcaacacctcctcctgttatcggaaaaatcggtccttacactgtctttatgactcntcctgcgactcctaaaccacctgaatctccctccgctgtgtctcagaagcctgtgatggcaccaccggttcttcctccgncgcagcagtttaaatcggtggcttcttctgaccagganggctcagttttggggttctttaaaaacgccgtcacaaaggttcaaaatgnacattcanggtgtggattatcatttggtgnggtggtttgggttaaaccaatctaangtntcangtgcggcnttggatngagtgtncgaacagcaacagnatcacg

SEQ ID NO: 7898 - DNA, 412 bp, Arabidopsis thaliana
  unsure at all n locations
  Clone ID: LIB24-050-Q1-E1-F5
gaaaatcaccaacccgattataccatctcttttagtctctcatctctacttctctaagctaaccgaaaccttttggtgggaatcgtcgaaagttttcaagacacctgaattgcatgtatgttgagacaaattccaacctgcaaaggtgggcgctttacacgagttttgcaatctatcggatcagttattagagaattttcagcatctgcaaatgctttgcaagactgttggaaaaatgggaatgaaagtaaagagattgatgatgttcacacacttttcagatattgcactaatttgcaatcagccaaatgtctccacgcacgtctcgttgtctccaancaaatccaaaatgtttgtatctctgctaaacttgttaatctcnattgttaccttggcaaggtcgcattggcna

SEQ ID NO: 7899 - DNA, 455 bp, Arabidopsis thaliana
  unsure at all n locations
  Clone ID: LIB24-050-Q1-E1-G4
cgcctgccggtaccgncccaaaattcccaggtcnacccacgcgtccgcacacgcgtccgaagccatctatgacatttgccgcagatccctagatatcgagaggccaacctacacaaacttgaacaggttgatatcacagatcatttcatccttgacaacatctttgaggtttgatggtgccatcaacgtggatatcactgagttccagaccaatcttgtcccatatccccgtatccatttcatgctgtcatcttatgcaccagtcatctcagccgccaaggcttaccacgagcagctatcagtccctgagatcaccaatgccgtgtttgagccagcgagcatgatggcaaagtgtgacccaaggcacggaaagtacatggcatgttgtttgatgtaccgaggagatgttgttcccaaagatgttaatgctgcccgttgggcaacatcaanacaaa

SEQ ID NO: 7900 - DNA, 403 bp, Arabidopsis thaliana
  unsure at all n locations
  Clone ID: LIB24-050-Q1-E1-H11
ttcttcaccattcaggatcagagattcgtgacctgagaagacactcaatatgagtaagcttcagagtgaggctgttagagaagccataacgactatcaagggaaaatctgaggagaagaagcgtaactttgttgagacagtggagcttcagattggtctgaagaactatgacccacaaaaggataagcgtttcagtggntctgtgaagctcccacatattcctcgcccaaaaatgannatctgtatgcttggagatgctcagcatgttgaggaggcanagaaaatgggacttagtaacatggntgttgangcnttgaaaaagcttancaagaacaggaaagcttgttaagaancttgccaagtccntaccatgcgttcttggggttcctgagnccggtcaatt

SEQ ID NO: 7901 - DNA, 504 bp, Arabidopsis thaliana
  unsure at all n locations
  Clone ID: LIB24-050-Q1-E1-H2
agccgctngtacggccccaaattcccangtccacccacgccgtccggaaaacacacactgcanttgagatcgatttcgactgtaagttnaactttgattgccgcgaagattacncaaatcgccggacacangtttttcagtgnattccattggcnnnnnnnnnnnnnnnnnnnnnnnnnnnnnnnnnnnnnnntctaacaaggagtcaaagtttctgactttttcgcattctttttganatcganttctgtttttggtggcgtgtgaagatgaattcttaaagaangaagaanangangaaggaaaagatgcgtangagagatctccgtttttgctacaggcccaangtgtcttcttcttctcnttgccctaacgattttcctcgtcttcgcnctcttcaacacccggnaaagatgaggagaagcangtaattgaangatcatgaaaatcaccaacaggggttttctccatgntgagagtggatggccaacggcttaggnaagg

SEQ ID NO: 7902 - DNA, 483 bp, Arabidopsis thaliana
  unsure at all n locations
  Clone ID: LIB24-050-Q1-E1-H3
gttagcctgccgtaccggcccaaaattcccgangtcnacccacgcgtccgcaagtattctggaagaaagaaaagagagagaaaatgtcgtccagtaaaatccaggtacgagggcagccacttcttagggttccggcaagaaaccaccgtatgacacacttggttgtttgcggcgtttccacaaaacgccaccaccgtgaaatcaatgcactcagcagtaatagtggtccatcgttggattcggtcccaacaagaaccgacaagaggcagtttcttcgtggtgacggtaacggtaaattcgggaggttcggtgggaagtttgtaccggagacattgatgtctcgcctgatagaacttgaagacgaatttaactttgttaggtgcgatcacgaatttcaggaggagcttaccacaagcgttaaagagactacgtaggaanagaaacgcctctctacttcgccgaacgtctaaccngaacactaca

SEQ ID NO: 7903 - DNA, 434 bp, Arabidopsis thaliana
  unsure at all n locations
  Clone ID: LIB24-050-Q1-E1-H5
ttccacacgattttccctgtgatttcttcatttccggcgacttaaaacggtgtctagcaaaatgagccgaccacaagatccaccccgaggtttcttcccatttgtgaaatccctttcggatgttatcatcaaagggatcagatttatcgccatggntactttctctattgaacggctttgagctacgtttggaaganagactgaagaaacttatgcctaagaacanagatgacatcctcactttatcctggatgaagctanctatggagtcactctgcgaagactcataagaacattaacactctcattactgatctccagcttcctgtctctgattgggaagagaaatgggttgatgtntacctcaacatangcgttanggttnctanatctctggtantgcctttangctcngaggtcaagacgtcccaaan

SEQ ID NO: 7904 - DNA, 483 bp, Arabidopsis thaliana
  unsure at all n locations
  Clone ID: LIB24-050-Q1-E1-H8
cgnctacgccggccccgaaacgggtccaaanattcccgggtcgacccacgcgtccggttttaatctctttttaagacaacatataatgtcaattgtatgtacgtttttcttgtttctcttaaacacttcttttgcgtttgcatttgcgattcctaaaccgccaatagtaaggagactatcaacgacagtgacatcaaattcaacagcgtcttcttgctcagccaatggaaatccaatcgatgagtgttggagatgcgacgaaaactggaaggacaaccgcaaaaacctcgcggattgcgcggttggattcggacgcgactcaattggcggtagagccggggagttctacacggtgactggattcaggagacgacaatcctcctaaatcnaactccaggtacattacggtacgctgcgacacaaggatcaacctctaatggatcatttttgatcgagacatgggtaatacaactanaaacaaga

SEQ ID NO: 7905 - DNA, 426 bp, Arabidopsis thaliana
  unsure at all n locations
  Clone ID: LIB24-051-Q1-E1-B2
acgcntccgggccatggcagcctctctccaatccaccgctacattcctccagtcggcgaagatcgccaccgctccttctcgcggaagttctcacctccgatcnactcaagccgtcggcaaatcttttgggctcgaaacttcctcggctcgcctcacttgctccttccagtcngactttaanganttcaccggtaaatgcnccgacgctgtcaanatcgccgggattccgctcttgccanctctgctctcgtcgtctcgggagcaagtgcggagggagctccangagagattgacctatgatgacgattcangagcaagacatacatggaagtgaaagggaactggaaacggctaaccaagtgcccctaagattggacnggtggctcnnnagacnttcctcggtncaaaancccgtgaaagtattgc

SEQ ID NO: 7906 - DNA, 423 bp, Arabidopsis thaliana
  unsure at all n locations
  Clone ID: LIB24-051-Q1-E1-B3
gcttaaatccttcaattttcagcttctgtttgttaaatttcaggtttttgttgtttttgagctaattgaagaccctatttgatcttaagaagcaatcagcttttagtttaagcatctagaaacttgaattttgcgaacctttttggtatttttcaaaatttagtctctctgtagaactttggttttgtgtccgatgatcgttgattggtttctcagggtttaagttggtgttgaaatatttaactttcnatttatggtctctacatgttttctgtttaattctattangaaacatgtgatacagagaggtagcttatanctgcagtcaaaagatcttataaaggatatgtttaatgtnaganatatcttaaggaacttgtttcggttaggaatttagcgtccaaaaagctcctaggatttggg

SEQ ID NO: 7907 - DNA, 411 bp, Arabidopsis thaliana
  unsure at all n locations
  Clone ID: LIB24-050-Q1-E1-E6
acgcgtccgcgaaaaaacaatggagacgccacttcttgtgggactcgaactacgttgtcctcctcatctcttcaacactcactctcgtccctcttcatctctctccattcccgccttatccttacgaatcctcacgccgacggcggcaacgacatcttccgctgttattgaattaccggcgaacgtagcagaagctcctcgttccaaacgccattccaattcatacctggcgagaaaatccgccatttctgaagttcaacgctcctcggattttctctcttctctgcangagattagcaacagttttgaaggtacaagatttgaatgtaattttgccgtgattttggaatcnctggaaaganggcaaggatcttatacagctctttgaatgggtgcaacaacatggaaang

SEQ ID NO: 7908 - DNA, 421 bp, Arabidopsis thaliana
  unsure at all n locations
  Clone ID: LIB24-051-Q1-E1-C1
tgaattaagcggaactcgatgccattttgctgtgaaagtcatggataaagcgtctcttgaggaccggaagaagttgaatcgagctcagaccgagagggatattctacaactattggatcatccgtttctaccgacattgtacactcattttgagactgacagattctcgtgtttggtcatggaatactgtcctggaggtgatctgcacactctaaggcaacgtcaacccgggaagcatttctcggagtacgctgctcgattttacgctgcagaggtgttgctaacactagagtatctccacatgctcggtgttgtttacanaggacttgaagcctgagaatgttctggttcgagatgatggtcacataatgctttcagactttgatctctcccttgaggtgcgcggtttcnccaacactga

SEQ ID NO: 7909 - DNA, 491 bp, Arabidopsis thaliana
  unsure at all n locations
  Clone ID: LIB24-049-Q1-E2-H4
cgnagcctccaaaaatccagggtcgacccacgcgtccgtctgaaccggagacggtgtcacgggacgaatctaatcgccgggaaaccgtttttttttttctctcggaaaatcgatttgaatctccggcgatctgatcgggatgagtaacatcgatctgattgggatgagtaaccgcgatctgatcgggatgagtaacagcgagcttctcaccgtcgagcctctcgatcttcaattcccttttgaattgaagaagcagatctcttgctctctctatttgacgaacaagaccgacaataatgttgcctttaaggttaagacgacgaatccgaaaaagtattgtgttaggcctaataactggagttgttctcccgaggtcnaattgcnaagttcttggtgaccaaggnaagntcaaaaggaanctccttccgatangcaattgcaaggaaaagtttccggctcaaaggggggggaaaccnagcccgggggtccaa

SEQ ID NO: 7910 - DNA, 422 bp, Arabidopsis thaliana
  unsure at all n locations
  Clone ID: LIB24-049-Q1-E2-H7
acagggtgctcgcaaggaatcttaggacaagtgtctgtggaacaaggattttgcagaggacttgttcgactgttgtgacacatgatgtttctacttcttgttccaatgagagcaatgcattaaataattccactgacgatggtccacaacatgacattgctattgttggtggtggaatggntggatcgctttagctgcttcattggccaacaagccaattgacaaagcacttgaatgtcgctattattgacaataatcctcctttgggggaagaagaaatatccatagagaaagggcatcaacctgattcccagagtcagtacagtcacacctgcaacatntccttcctcaaaagatattnggtgcctggaaatacnttgagcaacaancgacatgngttnttttgataaaaatcaaggtat

SEQ ID NO: 7911 - DNA, 430 bp, Arabidopsis thaliana
  unsure at all n locations
  Clone ID: LIB24-050-Q1-E1-A12
acgcgtccgaaaaatcaaaaattcgccgagagcacaaaccctaatggcttctctctcaatggcttccgttaacgttagcttctgtcatcctttacgctcttcttctccaaaggtctcacttcgcagttccgttcatttcgcgacgagtctttcctcaagtcactccatttctgggcttcgcgctgttttgcctctgaagatttctacagttgcttcccccaattctcaaaagcttcattcttttaccgttttcgctcataagggctacaagatgaagacccacaaggcctcagcgaagcggttcagagtgacgggtagagggaacattgtgaggaggagatctggaaagcagcatttgttagctaagaangaacaggcaacgaggaaattacgtctatcganaatganggaagttgaancgggagcgagt

SEQ ID NO: 7912 - DNA, 411 bp, Arabidopsis thaliana
  unsure at all n locations
  Clone ID: LIB24-050-Q1-E1-A7
acgcgtccggcgaagttggagaagattgatggaaagccgaccgggagttttggtcgtcggatcctctggcgtcggcaagcgcaccctcctctctcgattgctctctgtggaatttgaggattcatcggagtcatcatctcaaacagaagttcatggctggacgattaacactaagtattacactgcggatgtttctgtatgtatatcacatatttgcgatgaatactctctacccaatctccctaactcacatccactggtggcgttagttatggtcttcgacttgagtgagctgtcaacccttgttgctcttcaagactgggtttctcatactgacatcaacaagttttgatatattgttgtgcattggtaacaaagtanatcgtgtccctcatcaacttgctcaagnag

SEQ ID NO: 7913 - DNA, 428 bp, Arabidopsis thaliana
  unsure at all n locations
  Clone ID: LIB24-050-Q1-E1-B5
ttattaaaaaaaaaaaaaaaaacacattgtcatatctctggtcccatatgtgatatgtcaccgtccttctccatcgccaccaccgtctcaccggcttctctagccgggactctggcctcgaactcaaagaatgttttgtgtagtttacattcaaagaacaatgatattaccaagacaaataggaatctgaagtttanagcttgttctgtttctggagggtataacaacaatacatctgtggacaatgtaccttttcctcgtgattacgtcgagctcattaatcaggccaaagaagcagtggaaatggctttgaangatgagaaacagttaatggtgagttttgttgcaatggtctgttttaaaatggatgtacgaaaacacgttatttttcgtgatccaaagggaacccttttacaggaaattgagtt

SEQ ID NO: 7914 - DNA, 496 bp, Arabidopsis thaliana
  unsure at all n locations
  Clone ID: LIB24-050-Q1-E1-B8
gcaactgttacgcctgccngtaacggtccaaaaattcccgggtcgacccacgcgtccgaaaaagagaagaagaatcaaaatcccacacaatggcaacacactcttccttcaccgcaacaacacctctctttctcatcgttcttctatccctatcctccgtctcagttctcggcgcatctcaccaccacgcaacggcgccggctccgtctgtagactgttcgactctcatactcaacatggctgactgtttatccttcgtttcgagcggaggcacggtggcgaaaccggaaggtacatgttgctctggtcttaagacggtgcttaaagctgactctcagtgtctatgtgaagcgtttaagagcagtgcttctcttggagttactttgantatcactaaaggcttctacgcttcccgccggcatgcaaagcttcacgctccttctatcgcgtacntgtggattgtcggttgctccanngtactgcccaaggtcctgct

SEQ ID NO: 7915 - DNA, 453 bp, Arabidopsis thaliana
  unsure at all n locations
  Clone ID: LIB24-050-Q1-E1-C3
acgcgtccgaaagccacaacatacccaaccgtatgcgtcaactctctcaccggttacgccaactccatccaaacaagccctcgacgtctagccgaagaccgcactcaatgtgaccgtgactcaggcccagtccaccaagagtcttcgtctggcgcttggggcgtttcactagtctcaagaaacgagagattcaagccgttaaggactgcatccaggagatccatgatgccgttgaccgtttgaccatgtcgatccatgaagtgaaaatgtgtggtagtgccaaagtcgtgaccagttttgggtccacatgagcaaatgctcaaacgtggaccaacgctgctttgactaatgnaaacacttgctccgatggggtttgcgggtcngggtcatngatgggccgnggtaaaggaactcagtaagggcacgggatcntgaatttngggaaaaagaaac

SEQ ID NO: 7916 - DNA, 465 bp, Arabidopsis thaliana
  unsure at all n locations
  Clone ID: LIB24-050-Q1-E1-C4
accctgccgtacggntccaaaattcccnggtcnacccacgcgtccganaacgactagagatgagctcttcctcaatctcgttatggagtatgtaccagagacattgtaccgggttttgaagcactatactaagttcaaaccagcggatgcctatcttctatgtcaaactttacacataccaaatcttcagaggcttggcttatatccatactgctcctggtgtctgccacagagatgtgaaaccacaaaatcttttggttgatcccctcacccatcagtgtaagctctgtgattttggaagtgcaaaagtactggtgaaaggtgaagcaaacatatcatatatctgctctcggtattaccgagctccagaactcatctttggtgccacagaagtatncatcatccattgatatatggtctgctgggttgtgtttctggcaaagcctacttcttgggnaaccgttt

SEQ ID NO: 7917 - DNA, 451 bp, Arabidopsis thaliana
  unsure at all n locations
  Clone ID: LIB24-050-Q1-E1-C8
acncgtccgatcgtccacatctttctcctttggtggcaaacacaacgacagatagagagaaacgatggcgtcgaactcgcttatgagctgtggcatagccgccgtgtacccttcgcttcnctcttcttccaagtctaaattcgtatccgccggagttccactcccaaacgccgggaatgttggtcgtatcanaatggctgctcactggatgcctgncgagccacgaccagcttaccttgacggttctgctccnggtgactttgggtttgacccacttggncttggagaagttccagcgaaccttgagagatacnangagtcaganctcatccactgtanatgggcgatgcncgctgttcctggggattttggtaccagnaancnttaaggatattggaaacctgggttttaangctcaaggaatgggnangcactaccnagggggggtaaa

SEQ ID NO: 7918 - DNA, 346 bp, Arabidopsis thaliana
  unsure at all n locations
  Clone ID: LIB24-050-Q1-E1-D6
actatttgctacttgcgtgccatgcatcaaacgagactgtacaactctatcagctctcacgttgggctagagcccaggggtatttancctccaagaaagaangaggagaaaccatctcagtaaaccaaaatgaggaaaggtttcttcaacgctgcttcagaatttgttcgtgggaattactgaatccatccatttgattttctttcnaaacgtgttttgtattgtgtccccaagctatggttgctttacttgttggatcattcactaacattatatcctttgttttcataagtaaccgcttgtaataaaatttgggaccagtcgtcattaanaanaanaanaaagg

SEQ ID NO: 7919 - DNA, 437 bp, Arabidopsis thaliana
  unsure at all n locations
  Clone ID: LIB24-050-Q1-E1-D7
acgcgtccgngacaagagtgcaaaaggcacacgatgggctgttttagttgctggatcaaatgaatattataactacaggcatcaggctgacatatgccacgcgtatcagatactccgaaaaggcggtttaaaagatgaaaacatcattgtgtttatgtatgatgatatcgcgttttcctcggagaatcctaggcctggagttatcattaataaaccagatggagaagatgtttataaaggagttcctaaggactacactaaagaagctgttaatgttcaaaacttctacaatgtgttacttggaaatgaaagtggcgtcacaggaggaaatggcaaagttgtgaaaagtggtcctaatgataatatcttcatctattatgctgaccatggagctcctggcttagtaacgatgccaactgggaactggaantcttctg

SEQ ID NO: 7920 - DNA, 482 bp, Arabidopsis thaliana
  unsure at all n locations
  Clone ID: LIB24-050-Q1-E1-E3
ctgttacgcctgcntgtaccggcccaaaaattcccgaagtcnacccacgcntccgcaagacgcgtnggtttccaatctcttaagtaattggcggcgaanatgggtttcctgatagggggctcttgcttcgtcccnnnnnnnnnnnnnnnnnnnnnnnnnnnnnnnnnnnnnnnnnnnnnnnnnnnnnnnnnnnnnnnnnnnnnnnnnnnnnnnnnnnnnnnnnngantaatgtcgccaagttcaagcgccgacgaccaacattggcttctttaaaccaggaagatgggtacgagtatgacgttgcttccgccaaaangaggggctttccttcttgtgggtanctctgttcntccctttttgcagcttcgatcaccccgctttggctgatgaaanaggcaatgagataaagacatcgaaangttgatctanaaactgacgttgcagtanttagtgaagggaanatcgccaaatccatttccng

SEQ ID NO: 7921 - DNA, 508 bp, Arabidopsis thaliana
  unsure at all n locations
  Clone ID: LIB24-050-Q1-E1-E4
gttacgcctgcntgtaccggcccaaaaattcccgaagtcnacccacgcgtccgcaggattaccaaacgtcgtcaatacatttcttcaaattacgtttcttttatccttcgttacnctcaacaaattttgatatctgattggtgttgattccaagtaagganagatcaaaactttaggtaaagtatggatangggtttccatgaaaatgngcaaaatcaagaatttgcgaatctaatggagattggatctgggcattacgggtgttcacantatagaagacgatgcaagattagaacaccatgttgtgatgagatttttgattgcagacattgccacaacgaagctaangattctcttcanattgaacancatcataggacattgagcttcctcgacaatgaagtttcaaangtcatatgctcgctttgtgaagacagnacaaggacgtttcanccagaacctgctccaaantgttggngtaatgttatgggggaaattccntccggtt

SEQ ID NO: 7922 - DNA, 455 bp, Arabidopsis thaliana
  unsure at all n locations
  Clone ID: LIB24-049-Q1-E2-H3
acgcgtccgcttcacaccgaacttgaatctactccaccgagttcttcaagcttgcatccgttaacaccgactccacaaacgctgtcttaccgtgttaaggaagagttgtgtccatcttcctccttgccaagtcctaaaggccaacaaccaagagttgaggttagattaagagaaggaaaggcagtgaacatacacatgttctgtggacgtanaccaggtcttttactttccaccatgagagctttggataacttaggattggatgttcaacaagcggtgattagctgtttcaatggttttgctttggatgttttccgcgctgagcaatgtcaagaagaccatgacgtgttacctgaacaaatcaaagcagtgcttttagatacagcaggttacgccgggtttgggtttgaatggcnnaagcnngangggaagcatccggtgtggaacagaacctn

SEQ ID NO: 7923 - DNA, 437 bp, Arabidopsis thaliana
  unsure at all n locations
  Clone ID: LIB24-050-Q1-E1-E5
acgcgtccgtctctaagtctctctatactttcatttctcgtttcataatattaggaaacttgttagtgtttaaggaaacaaaaggaagaagatgaagtatgtggttgtttcaggaggagtagtgagtggactcggcaaaggagtcacggcaagtagcatcggactcatcctcaaatcctgtggcttccgagtcaccgccattaaaatcgatccttacttaaacattgatgctgggaccatgtcacctattgaacatggtgaagtttacgtcttggatgatggtggcgaggttgatctggatcttgggaactatgagaggttcatggatattaagctgactagtgaaaacaacataactactgggaaaagtttataancatgtgcttgacnaaagagaggacanganattatccttgggaagaactgttcangggtgt

SEQ ID NO: 7924 - DNA, 484 bp, Arabidopsis thaliana
  unsure at all n locations
  Clone ID: LIB24-049-Q1-E1-C4
acgcgtccgctggagaaatttctaatcaacttaacttttaatttgtgtgggtttgttcccttaacattgttatagattagaattcatcctttgctttgtttatttgggtgtttatctatcgcaggaattagggtttttggtctgcttcgatggatatggatcaagagataggtcaaaattctcctggatttgatggtgaatcagtagtgtcaatgagtaatagaagcaaggagactgaaccagtcccggttgagaatgactattatcgggaaaacggattcaacannnnnnnnnnnnnnnnnnnnnnnnnnnnnnnnnnnnncagaagctccttcactgatttgaatcaactcccggcgattccgccagcttctagtggtcaaggtttgccgtttgcacctgtcgatttccccgaacccccggcgatgtttggacctggaganttnggaaggagantgnaataatgcccgggttccaaaaaggn

SEQ ID NO: 7925 - DNA, 427 bp, Arabidopsis thaliana
  unsure at all n locations
  Clone ID: LIB24-049-Q1-E1-C7
atataataacaacaacnnnnnnnnnnnnnnnnnnnnnnnnnnnnnnnnnnnnnnnnnnnnnnncaagcgcttctttaatggcggctgttcaatgtctcactttcctcttcttgtttcttctccaaaacgcgacgtcagcttcacctctccctctcttccggcggncgatccaaagcaaccacagcaacttcgtgaagcatcctcgccgaagtcaggtggttttcccggtgaatcatagtagttgtgatctgttcgccggcgagtgggtgcgggatgagacttacccactttaccggtctaaagaatgcggccgaggaatcatagatccggggattcgactgccatacttangggcagacctggactccgannancncaagttccggtgggnaanccttcaactgcaatgtcccctaagagtcnaatg

SEQ ID NO: 7926 - DNA, 484 bp, Arabidopsis thaliana
  unsure at all n locations
  Clone ID: LIB24-049-Q1-E1-C8
acgcgtccgaaaaacttttccttcttcttcctcaacctttgcttcaatcttcaacaactttctttttataaagattttgcaagttaagtgtaaacctacaaaaaccaaacatggtggttttgccacagccagtcactttagataaccacatctccctaatccccacatacaaaccggttccggttctcacttcccattcaatccccgtcgtcaacctagccgatccggaagcgaaaacccgaatcgtaaaagcctgcgaggagttcgggttcttcaaggtcgtaaaccacggagtccgacccgaactcatgactcggttagagcaggaggctattggcttcttcggcttgcctcagtctcttaaaaaccgggccggtccacctgaaccgtacggttatggtaataanacggattggaccaaacngtgaanttggttggnnttgagtatctcctcctcnaatgncaaacctcangtctcccctcc

SEQ ID NO: 7927 - DNA, 422 bp, Arabidopsis thaliana
  unsure at all n locations
  Clone ID: LIB24-049-Q1-E1-C9
tacgacatcaaaaggaacaacctcccctgtttttgggaatgtggtcggtagtaaatttgtgttcgaanaaacaagttttaaacttgttgggttttgtggtcgatccggtgaagctattgatgctcttggtgcacattttgcccctcttcctgctcccactccangctcccgcgcccgcgcccgcgcccgctccangctccagctccctcgcccgctcccgcttctgcgcccgttccagctcccgcacccacgcccgctccagctcnagctcctcntaacanagtggaagctctaangaggaaatggtggaacantatgtgacgatggggctttcgatcatntaannannggttaataantggtcaangtgattcctggtgtancttatgtgaagttcnaaatacagnagaagatggggaaaa

SEQ ID NO: 7928 - DNA, 486 bp, Arabidopsis thaliana
  unsure at all n locations
  Clone ID: LIB24-049-Q1-E1-D1
acgcgtccgaaacataagagagtctaaacactgtggtagaaaaaaatatagacttttagatatgtgtagtaaaataacattagtgttaactttattttccagttatttcatatcaacagatgctgtgaatggatcatttcctgcgcttttggcttttggagattcaattctcgatactggcaacaacaattttctcctgacttttatgaaaggaaatatctggccatatggaangagtttcagcatgagaagggcgacaggaagatttggaaatggaanagttttctctgatatagttgctgaaggtttagggatcnagaagattttaccagcttatcgtaaagttgttcaattctccaagttgaccttagaactggggtttgcttcncatcncggtggtgcaaggagttnacccctgtnacatccnaattgccngaganttttaaacncccaaanggatnaantnaacnaattcaaaaagggttc

SEQ ID NO: 7929 - DNA, 457 bp, Arabidopsis thaliana
  unsure at all n locations
  Clone ID: LIB24-049-Q1-E1-D4
acgcgtccgnccacgcgtccgttttcatggtagacccaactctctcatttcttactctctgattcatctctctctctctcttcatttccatggaaggaaggtgatgagctttctcaatctctctttactgattcttaatgaaagtcatctcctttctctttggtatcccttttcttcttctctgcttaattcctgaccaaaaattgtgacaagatctttcaatccaaaagctatatacattaagagctcaggtcactatctgacgggatccgtgacaatagtggttactggagtcaaaagcagctccttgaatcttgagtgttaagtagataggtaaggtaaccgttcatggcctcgaagtatggttctggagttctcccagaaaataagaangaaaagggcgattaggaaaccccggaaacatcttantccaagtccaagtgtctcaagttnaaca

SEQ ID NO: 7930 - DNA, 409 bp, Arabidopsis thaliana
  unsure at all n locations
  Clone ID: LIB24-049-Q1-E1-D5
acgcgtccgatcatctccaagacaagcaccacgcatcagattttctgcatccttaaagatctcgttgcggtttttgtcggaattgtttcgatttgttgtggttctcaataagctctcgcttgtcagagaaacaccggcaacgccgttgaaatagtcaccggagaccattttgcatcgtagagttcgccttttatggcgttcacgtggggatctgctctccggatttctgttctccttatccttgtagctgcaattgtcttagcttgttattttcnccctgttgagaagctattgaaggattttttgttatgggttgaanaagatctagnggccttggggaccttttgcccctagctgttgcgtacattccnctaacagttttggcngtncctgcctcgggntcccaacg

SEQ ID NO: 7931 - DNA, 449 bp, Arabidopsis thaliana
  unsure at all n locations
  Clone ID: LIB24-049-Q1-E1-D7
acgcgtccgcccacgcgtccgctgaagcttctactggggaatcgatgaagctcttgcatctgatattcttattagctttgactactggaatctctgctgttctaatctacattatcggcgtctctaatctctacgagtctaatcgttttaccaatgaagatttagaggcgttgcagtctttgcagaacggattccagaagtgcgtaagtgcaaatggtttgggactacaagctgctatgggtagagattattgcaaagtttctataaacttccctaaggatactgtccccaaatggaaagatcccaagtctggagagcttgaaggattgtcatatgagtttgacctgtgtgaagcagtanctacatgggaacaagtcaggaatagctctacaatactcaccaaggaatacattgatgccttaacaaatggatgggaagantatgcaatg

SEQ ID NO: 7932 - DNA, 446 bp, Arabidopsis thaliana
  unsure at all n locations
  Clone ID: LIB24-049-Q1-E1-D8
ccgcccacgcgtccgcccacgcgtccgattaacttctctcacactgactctgcgaccctaatttgtgagctctcttctctttgcgcagtcaatttgctacaacttagaaaatggcggcggctacttcatccatcgctccttctctttcatgcccatctccttcttcttcatccaaaaccctttggtcttccaaagccagaaccttggctctacccaatatcggtttcctctcgtcntcttccaagtctctgaggtcgcttantgccaccgtcgctggaaatggcgccactggatnctcccttgccgctcgcatggtttcttcgtctgcggtcaaaagcccctgtttcgcncgattttgagaanctgtcttcanaaaggnggaaagtttcncttgccngttnccaaanagtncattgtgagnagnggggaaagagactttgttnaaa

SEQ ID NO: 7933 - DNA, 482 bp, Arabidopsis thaliana
  unsure at all n locations
  Clone ID: LIB24-049-Q1-E1-E1
acgcgtccgnaagggttcttcgttttcgttgttgtgaggaattttgctccgatgtcggcggagagttgtttcggaagctcgggtgatcaaagcagcagcaaaggagtggctactcatggtggtagctatgttcagtataatgtctatggcaatctcttcgaagtttctagaaagtatgttcctcctcttcgtcctatcggtagaggcgcttatggaattgtctgtgctgctacaaactcagagactggagaggaggtagctatcaagaagattggtaatgcttttgacaatattatcgatgctaaaaggactttgagagagattaagcttctcaagcatatggatcatgaaaatgtgattgctgtaaaggatataataaaaccaccgcagagagagaacttcaatgatgtttacaatggttaagaacctaatggacactgatntccaacaaaattatcgctcctaaacaancccttaaatga

SEQ ID NO: 7934 - DNA, 526 bp, Arabidopsis thaliana
  unsure at all n locations
  Clone ID: LIB24-049-Q1-E1-E5
tgtttaccccgccggtaccggtccaagaattcccgggtcgacccacgcgtccgagggaatggagagttgctgtcggagcgtcatagcttcaaggacgtttcatctgcggtcaagtggccgtctatttccctctcttagcttaactcatctcaagggcaagctatctctctccatcaactcgttttcctccaagattcagtctcatgcnctccgagganttggtataggcgagtcagataagaaaaatcccctgccgcgaggggccggagaaggagtcaaggaagatgcgaggagtaagctgcttcatgtagttttggtctctcctcagattcctgggaatacaggttgcattgcaagaacatgtgctgcctcagctgttggtctgcatttagtcgggccattangttttcaagtggatgacgccaagagttaagcgaactggtttggattattgggcctttgtggttgtcaaagncgcatagctcatggggctgagtttcaaggaatanttcaggcttcaggaggg

SEQ ID NO: 7935 - DNA, 480 bp, Arabidopsis thaliana
  unsure at all n locations
  Clone ID: LIB24-049-Q1-E1-E8
accgagtccanaaattcccgggtcnacccacgcgtccgnncacgcgtccggtaaggctcggaggaaaacctaattcgtccggagaatctccacctcactctcgccaaacgcatctctgttgtagcttgtgatggatccaacacagaacacaagtgcagggattggtgggagcaatggtacaatcagatatcaaaccaatgatgggacttcaactgtgaccgttgctgatgattcaaaggagaatctttcccaagtcataaactctattgagaaaactttaggagtccttcatcaagttacaccttaccgtcacttctttcacacccgcgtctcaactccatctcctccagcgccttaactctcttgtgatgngagcnagataacatgactaanttgtctgagaaatgcaacattcaaatcccatggaaggtcttaacttnnntnntnagtngggaanaacccgggntgagttttacgaaa

SEQ ID NO: 7936 - DNA, 467 bp, Arabidopsis thaliana
  unsure at all n locations
  Clone ID: LIB24-049-Q1-E1-F4
acgcgtccgggaaagaagaaagaaggaagacgatgatgatgctcagaatccgaagcagagatggactggagagagtcacagcggagggagctcatatcactgtttcccagctcaaaaccttgatcgcggatcagcttcagatccctctccataagcagaccttatccaccaatcgtgatctcctcctcgccaaaactcccgctgatctactcgccttcaccgacctcacggacccaaacctccccctctcctctctcaacctcggccatggctctatgctctacctcgcctacgatggcgagcgctccattcctggagctcctcccgttactcctgccggatccttcgggaggaagatgaccgtcgatgacttgatcgcccgccaagatgcgcgtcactcgtcaggagacgtctcactgcgactccgtctccttcgatngcgatgcccgccaaagctttncagcact

SEQ ID NO: 7937 - DNA, 502 bp, Arabidopsis thaliana
  unsure at all n locations
  Clone ID: LIB24-049-Q1-E1-C2
ccggtccnaaaatcccgggtcgacccacgcgtccggagatctgcgagagaaagagagatcagattccggtgttccaaggaagcacatattttaagattcagaatcgcctgagagatgtctaccttcagtggcgatgagaccgctcctttcttcggcttccttggcgctgccgctgcgctcgtcttctcatgtatgggagctgcgtacgggacagcaaagagtggtgtgggagtggcatctatgggtgtgatgaggccggagttggtgatgaagtctattgtcccagttgttatggctggtgtgttgggtatctatggtttgattattgctgttatcatcagtaccgggattaaccccaaggctaaatcctactacctcttcgacggatatgctcatctctcttctggtcctgcctgtgggccaactggtccttcaactggaaatggccaaaagtatncttggcganccnggtntcangggcaaatgctccaaaanccaaaag

SEQ ID NO: 7938 - DNA, 494 bp, Arabidopsis thaliana
  unsure at all n locations
  Clone ID: LIB24-048-Q1-E2-G8
cccgtacantccgaaaattcccgggtcgacccacgcgtccganctggtgcaactgcagctaatcaacttcgactttggaataagggtgtcgattcagaaagcttcaatccccgtttccgttctcaagaaatgcgtataagactgagtaatggcgaaccagaaaagccactagtgattcatgtaggtcgcattggcgtagaaaagagtttggagcttttaaagagtgtaatggacaaattacctgaagctcggattgctttcattggagatggaccatacaaagaggatcttgagaagttgtttaccggaatgccaagcggttttcactggaacgttacaaggcgatgaactctcacaagcttacgcaagtggagatgtgtttgtgatgccatcagagtcggagacacttggccttgtggttcttgaagcaatgtcttcangacttcctgtcgtcgcggcccntgcccngtggaatccctgatataatcccctga

SEQ ID NO: 7939 - DNA, 379 bp, Arabidopsis thaliana
  unsure at all n locations
  Clone ID: LIB24-048-Q1-E2-H3
acgcgtccgcccacgcgtccgcccacgcgtccgcccacgcgtccggatttactcttaacttacagctgattacaattcactgtaatctctcaagaaccctagattcttttttttccttttcaattgtgatccgtcagcaatgcttgatctttaaatttactgatatctgaagatcgaattagggttctgatctacttgatatttatttgtttgggcttttattcagcagctcgatcttgggctgaagctatggctcaagagtaattgggaagctgacaagatgcttgatgtttacatatatgattatttgggtgaagaaggaaanttcatananactgctaangtcgtttatgactgaagggaaggtttctcctgatnc

SEQ ID NO: 7940 - DNA, 430 bp, Arabidopsis thaliana
  unsure at all n locations
  Clone ID: LIB24-048-Q1-E2-H6
ttatttcgaagagagagagagaagaagacggaagctagaagaaatcgtttttgatcggagatagtgtatgagctagttgtttgtaatttgacggctctcgggaactgatctatctccggtgtctctgctttgtcggtagctacaggagtgaagagagtttctacaagggttttaatggaangatgatgactctccttcttctcgggatttggatgcacagaacccttatgatcnattgcttgctctagatacaagtaccgtagatccaaattgtnacttggnttcggtttctgccatttatctagcgatgaagaggtctaagctggaatgtgttgacgagcgtggtcananattcccttaantacttcgggatgcatngaggatgaancaggatgaggagctcgatgagtttgatccttaatcggtttan

SEQ ID NO: 7941 - DNA, 489 bp, Arabidopsis thaliana
  unsure at all n locations
  Clone ID: LIB24-048-Q1-E2-H8
ccnggggtccgaaatcccgggtcnacccacgcgtccgcggacgcgtgggaaaaaaaaattactcttagattttcctcaaaaaccttaatcaatcgccgggaaaatgaatattccggtgactatttcctccattactgtttctaataacgctgtttccgacaatcgtcgtcatgtttcccgtgaaaatcgtcagcgttaagaaaaccgtcacttatatttttttttcttttcttcttcgtttttgtgaagatgatgatccactgatttgagagtagtagcttgagaggtttttagtagatttcgattttgcgattatttttgtttcctggagagatctcatttttttgccacttccgatgatgaaagatccagccgattaacaacgatttgccggcgaatagagtggaatcatcaaccaanaccagtgcttaagtctcgtctcaagcgtttaatagatngancgttcacgagaatcccaaactcagagaa

SEQ ID NO: 7942 - DNA, 467 bp, Arabidopsis thaliana
  unsure at all n locations
  Clone ID: LIB24-049-Q1-E1-A1
acgcgtccgnaaagtagaggatttaacaatggcgtctctttctctcagttctgctcatttctcttcaacttcttcttcatctcgctcctctatatccacttcatcgctttctccgtcgtcaacttctctccctctcttacaatcaccgatccgccgccgttaccgctccctccgccgccgtctctccttctccgtcattccccgtcggacttctcgctccttctccacttccaattctcagattaggtgttcgataaatgagccgttgaangtgatgatttcgggtgcaccggcttcaggaaaaaggnactcantgtgagctcattgttcacangtttggtttggtgcacatatcaacaggggatctattgngaacagaggtgtcatctgggacagatattggaagagngcaaaagagttcatgaactcgggtaanttggttccngaataaaattgttaataaccna

SEQ ID NO: 7943 - DNA, 523 bp, Arabidopsis thaliana
  unsure at all n locations
  Clone ID: LIB24-049-Q1-E1-A3
ttacgccgccagtggtcgannatcccgggtcgacccacgcgtccgcccacgcgtccgtttgatccagttattatggattatatacgcttgaaactcattttaagccattgttattgaacgtttatcaaatacttaaactgataaacgcaaagtcctcgcaagtacctcttcatttccacacaaaggcaacacacttgcttagcacacaccattcatcttcttctgaccctggacaagttaaagaaatgcatccattcaatggtatggtttaccccgaagatgaggaaagaagagggagtgcccattttgcactaactccaaaccaaaatcctcataccggaattgtaacatttaaacagcctgtagtttccatttcttctgctgtgaanagacactgattatatagacgacgacgnctcatgtcttgccaanagaacgcctccctgcccgctggaaaccanaaattgaaaaacagcagtggggataaattggngattcaaaatgtaaagttctaaaccgtttc

SEQ ID NO: 7944 - DNA, 497 bp, Arabidopsis thaliana
  unsure at all n locations
  Clone ID: LIB24-049-Q1-E1-A6
tgtttacccgccggtaccggtccaanaattcccgggtcgacccacgcgtccgggagtgaggaaggaaggagatgggaggggtgacgtcatcggtggcggcgaagtttgccttcttcccgccgagtccaccgtcttacaaggtggtgaccgacgagctcaccggactgttgcttctcagccctttcccccaccgcgaaaacgtanaaatcgtaaagcttcngaccaggagaggcacagagatcgtgggcatgtacgtgaggcatccgatggctacctccacgctcctctactcccatggcaacgccgccgatctgggacagatgtatgagctcttcantgagcttagcatccatctcaaggttaatcttatgggatacgattactccggggtatgggacaatctactgggaaanccnagttaagcatnanacgtaaggctgatatcgaaggntgtttagaagtttcnttgaangaaaactttggctcctaagtcacga

SEQ ID NO: 7945 - DNA, 397 bp, Arabidopsis thaliana
  unsure at all n locations
  Clone ID: LIB24-049-Q1-E1-A7
actcaaaaaagtctgcgtggatctccagccgttttcagacacttacccacaaaatattcctctcggcgatgatccctttctgctgaatttttggtcctttgtcgctcgactgttttcttcgtctactatttgttccttttggatattcttcggacttttcgttgatttgattttcaagagagagagtttgaacaaggaaggattgaactatggaagatgcatcagagactagctactggtgtcacatgtgctcccgatcggtgattccattgattcaagacgaaatcatcaaatgcaatttctgtcaaagtggttttgttgaagaaatggataataatgatgacnatcatgnggcngattctctctggacccctancttgatngagatgatgaacaa

SEQ ID NO: 7946 - DNA, 481 bp, Arabidopsis thaliana
  unsure at all n locations
  Clone ID: LIB24-049-Q1-E1-B1
acgcgtccgatgttcaatgatgatgtccagggaactgctggtgttgcactggctggactattgggaactgtaagagctcaaggtcggccgatatccgactttgtgaaccaaaagattgttgtggtgggagctggaagtgctgggcttggtgtaactaagatggcagtacaggcagttgccagaatggcaggtatcagcgagagtgaagcaacaaaaaacttttacctgatagataaagatggtcttgtcaccacggagaggacaaaacttgacccaggagctgtactttttgccaaaaatccagctgagatacgcgagggagcaagtatcgttgaagtggtgaaaaagtgaggccacatgttcttcctggtttatccggagttggtggtatccttaatgaagaagttctcaangcgatgccgagaatctgactcatgcaagcctgccaatttttgccatgtcnaatcccactttgaatgcc

SEQ ID NO: 7947 - DNA, 464 bp, Arabidopsis thaliana
  unsure at all n locations
  Clone ID: LIB24-049-Q1-E1-B2
acgcgtccgcccacgcgtccgaattcaccggcgagagagaatgaatacgccgatgtcactctcggcggcgcgtggccgtatgctaccttttttagagaaggagaaatcagaagaagagtctgaaactctggaatcgagtctcttacagctaatcgacgacaatcgtcgatcatcgttacagctccgggaaaaaaccgagagatcnagaaaggaagcaatcaggcacgcggcgagaacggcggatctgctagtgaaggcggtgaacggaggagtagaggaatgtttcgttaacgagaaacggattgaagtcngagattaggaatcttgccattacggtggcgaaattcggcaaacaaacggatnactggcttgccgtcactcacgccgttaatancgccgtnaaaggaaattggagatttgagaattggatgaaaacnatngaatttgaatgnaagaaaatccct

SEQ ID NO: 7948 - DNA, 518 bp, Arabidopsis thaliana
  unsure at all n locations
  Clone ID: LIB24-049-Q1-E1-B3
gntaccggtccaaaaattcccggggtcgacccacgcgtccgaaaatatcttcttgctcattattcatcatcaatctactactccgtaaactttgcttcctctgtttgtattagctcagaagagatatgggaagtactccgactgatttacccggtgaggatgtcgccgataacagatccggcgtcggcggtggtatttctgacgtctacggtgaggattccgccaccttggaccagcttgtcaccccttgggttacctctgtcgctagtggctacacattgatgcgtgatccgagatacaacaagggacttgcgtttactgataaagaaagagatgctcattacttaactgggtcttcttccccctgtgattttgagtcaggatgttcangagangaaggtgatgcacaatctccgtcaagtacactgttccctctgcagcgtttacatggncctgaaggatnntcaggaaaggaaacaagaggttgttccaacaagccttttgaattganaacgttg

SEQ ID NO: 7949 - DNA, 395 bp, Arabidopsis thaliana
  unsure at all n locations
  Clone ID: LIB24-049-Q1-E1-B4
acgcgtccgctcattttcgactttagaaatggcgaccaacgcagatccagctccgacgaagaaaccaaggaacagtagaaaggcgttgaagcagaagaatgagctcgtggagacgccaccatcgcctgtctccgtcaaggggaagtcagcgaagtctttcgagcaagatctgatnnnnnnnnnnnnnnnnnnnnnnnnnnnnnnnnnnnnnnnnnnnnnnnnnnnnnnnnnnnnnnnnnnnnnnnnnnnnnnnnnnnnnnnnnnnnnnnnnnnnnnnnnnnnnnnnnnnnnnnnnnnnnnnnnnnnnnnnnnnnnnnnnnnnnnncttcagaagatgaangaattcaaacctaacatgacttttgcttgccgtcagtcatctctcacacangctg

SEQ ID NO: 7950 - DNA, 501 bp, Arabidopsis thaliana
  unsure at all n locations
  Clone ID: LIB24-049-Q1-E1-B7
ttttacggccccccgtaccggnaananaattcccgggtcgacccacgcgtcngcttgttagggcttctatacatcaccggcgatattggtttacgcgtcggagagatggttggtgagtgttattgatgacacgaagatttcaattctcggcggtgtaacgtgaagtcttaacaatttcattgtccaatggtggaatttacagagagagaggaccgagtttctttggaactcagcgaagaaattatacagagcatggaacctggcgccgttttcaganactataattgcaggatcagctcaattgactttcacaaaacttcgacttgtatggtgacagctaggcgacgatgactcaantcgtctctatgatgttgccagcgccacatgtctgaagacaantaatancaaaaagtatggtgttgatctngtgtgcctcacatcncaanccgtacnactgncatctactcttccagaaaagngntggggacgactccctngaag

SEQ ID NO: 7951 - DNA, 508 bp, Arabidopsis thaliana
  unsure at all n locations
  Clone ID: LIB24-048-Q1-E2-G7
ctgttancctggccggtaccgagtccgaaaattcccgggtcgacccacgcgtccgaaatagagctcttcttctgtgttttccgtgtcttttccattttgcaggcctgagactgtctcgcatacatcatttacaatgcctgtagtgattcaaccactggattattgtaaagcattggacaaagtcccaagatcactctgcttatacaaatgaacaccatagacattganagaaagaagagtagctcactaacctttgcttttcatggagaatgctcctacaacgtgtttgcttttgatttctactatgacctgcaaaagagaaaccgngcaaaattcaactctagaattcaaccagcatatanctttgttaagcttcaatgagtattcgatgtttaacctgagattttttgttgatgtacacttttacatgcttccaccgcagaacacctgngaaagtccatgagtcaattcatcaatctcgngatatgagttcatcggtccgtgccna

SEQ ID NO: 7952 - DNA, 498 bp, Arabidopsis thaliana
  unsure at all n locations
  Clone ID: LIB24-048-Q1-E2-C5
tnccgtgccgtaccgagtccgaaaattcccgggtcgacccacgcgtccggtttgttattcnnnnnnnnnnnnnnnnnnnnnnnnnnnnnnnnnnttcgacggtcaccaccaaacctcttccgtcggattttcactctccgtttatcgaacatctgagatctctctccacttccgtcaccgaagatgcattccagtcatcttcttctcgaggagccgatcaggatggcttcaatcctcgagccttccaaatctagtttcttcccggcattgactaagatcgtcggaactctaggtcctaaatcccgatccgtcgaggctctctccggctgtctcaaagccggcatgtctgtggctcgatttgatttctcgtggggagatgctgattatcaccaggagacacttgataatttgaaagttgctgtgaggagcactaagaagctttgtgctgttatgcttgatactgttggacctgagctacaagttattaacaaatctgag

SEQ ID NO: 7953 - DNA, 507 bp, Arabidopsis thaliana
  unsure at all n locations
  Clone ID: LIB24-048-Q1-E2-C6
ctgttacgcctggccgtaccgagtccgaaaattcccgggtcgacccacgcgtccgctaaactcatccaccttccaaaacagagaaggggaaaatatgacaccggctattttttctccgacgactcttcctccatcaactgctacatggccatgttcaacatctcagaagctcatcaccgttagatcaccactcaagttcaagtgtagagcaacttcatcatcatcgtctatcactgactttgatctttatgacctcttgggtattgatcgaagttctgataagtctcagatcaaatcagcctatcgtgcgttgcagaaacgatgtcatccagatatcgcaggagatcccggtcatgatatggccatcattcttaacgaggcttaacagcttctctctgattcgatctcgcgccaagcctatgacaaaggagcaagcaaaactagaaagaactcaagaggctatacagggaaaaccgatatactcggtttggtgtggaccaaaaacan

SEQ ID NO: 7954 - DNA, 499 bp, Arabidopsis thaliana
  unsure at all n locations
  Clone ID: LIB24-048-Q1-E2-D3
ctgttaccttgccgtgccggtccgaaattcaacgggtcgacccacgcgtccgcggacgcntgggcggacgcgtgggcggacgcgtgggttttaagtttcaacttttcagttatccacacacatacacacatacgcttccctgaatttggtgacgttagtcttcttccttccttctcactctttgtttcgccgtgaaaatgagctctgatanatanaagcgacagagagaaacttgaagcagatgtcgtctttcttcaaatccttcgcggggaaatcccagggaagctgctgcaatggcnatggttcaatcttcatcttacagagttttgtcaggtaaaagttgttcaaatttaaggagaaacacgccgttggattcttttcttgccaagggaaaggtcttccgtcaagggctttttcattcttaaangtcccacggttttcaactgaaccaanncaatgagttttgggtcanttcatcagaacgaaggtctcntggggc

SEQ ID NO: 7955 - DNA, 430 bp, Arabidopsis thaliana
  unsure at all n locations
  Clone ID: LIB24-048-Q1-E2-D4
gacttaaaaattaaaataaaacgaaaagggaaagcgaaattgttccttcctttttagccttttaggtcttcgaattctcaattttcttcggtgatttctaaaatctgctttggatttggagaaacaactctgtctatgtatgaatctcgtttcgaatctccggagtttgctcaatgttgcttctcttggcgtgaantttgttanatgacggatgatgatttctganaaaccattgggantggaggattctatacggcaggatctggaggttttaaccgtgtcaaggaggcttgtgaaaagtgttagccagaanttgaagaaaaagattcataaaactgaggtggtggaagatgaagagattgcaaggggaccggtgaattgtttaagtancagtgttggttgcaaanttccngatacgggtgaggatttt

SEQ ID NO: 7956 - DNA, 499 bp, Arabidopsis thaliana
  unsure at all n locations
  Clone ID: LIB24-048-Q1-E2-D8
tgccgtaccgntccgaaattcccgggtcgacccacgcgtccgcccacgcgtccgcagatttcgtgagcttattcttacctttctctcgaaggaagctctcatcttttcactcagatcacgttccctgggcttattcgcttgtatctgttgatatacaagatggcatctgcgactctgagaaggcggcttcatcacggtgatgtagatgggaggaagtatgaacgctatgatgcaacagactctgaaactttaagtgaacccttgttaggaagtaagtagtactgataataagtagaaatgagtacattgaggagcgtactctggaggatatttgggaagaagaacggaagagacagcaaagttcactgggacgttaatcctttcccaattgattgcacagttgggctcagtggatagccaaaatagtctttgggatctggctcaacttgttgggaagtttccttccccnccctacatttggtccaaataagtactggtg

SEQ ID NO: 7957 - DNA, 474 bp, Arabidopsis thaliana
  unsure at all n locations
  Clone ID: LIB24-048-Q1-E2-E2
atcangggtcgaccacgcgtccgctgaaaaccaaacaagaccatatgggcactcgaatactccattttgttatcggctacttccactagcctcctccttcgctgcgtctcctgtttctctacttcacgattactcgctagattcattgaagcagttgtgagttaagttggagaaaatggttgtgtttgggaatgtttctgcggcgaatttgccttatcaaaacgggtttttggaggcactttcatctggaggttgtgaactaatgggacatagctttagggttcccacttctcaagcgcttaagacaagaacaaggaggaggagtactgctggtcctttgcaggtagtttgtgtggatattccaaggccanagctagagaacactgtcaatttcttggaagctgctagtttatctgcatccttccngtntgctcctncgtcctgctaagccnttgaaantgtaattgccgggtg

SEQ ID NO: 7958 - DNA, 508 bp, Arabidopsis thaliana
  unsure at all n locations
  Clone ID: LIB24-048-Q1-E2-E3
ctggttaccttggccgtnccggtccgnaattcangggtcgacccacgcgtccgcggacgcgtgggcaaaaataaatcatcacaagaccagagttaaaagagagacatgtcgacttcattcacaatgatcggcggtgaaggtcccaacagttaccgggaacattcgaaataccagggagcactggttatagctgcaaaggaaaagatcaatgaagccatctccacgaaactcgatatcgactttacttcaaatcttgttaacatagctgattttggttgttcctctggaccgaacactttcaccgcggtacaaaccttaattgatgctgtggaaaacaagtataagaaagaaagtaatattgagggaatcgagttccaagttttcttcaatgattcttcaaacaacgattttaacactctcttcaaagacacttcctccggctagactgtatttcgcaagtgggagtancgggttctttccttggtcgtgttcttcctaaaaaatagtc

SEQ ID NO: 7959 - DNA, 514 bp, Arabidopsis thaliana
  unsure at all n locations
  Clone ID: LIB24-048-Q1-E2-F5
tgttaccctggccgtaccgantccgaaaattcccgggtcgacccacgcgtccgcagatattcaaacaactcaatcctcattccctttgtttcgcctctctggatttcgaagagctgagagattagggtttctcgattttcgagattagagtctaatccccaccaccagcatanctgatatcctggaggagagaatgacggattcgggtcnaatgatgccggcggagattgctggaattctaaccacggcgattacgagttggtgggatgatgttaatgagtcaactcagtggcaanatgggatctttttccgctctttgtggtgcctatgctcttgtttccgccgttgctcttgttaactgataaggatncaaatgaagaantgcctgagtatgggttgggacnactcagaaacgtgtttcaatcttatggaactttgncgtcaatggnantttcgttgccggtcctgtttgggatttcacaatgcanctnantccttggtcaaccccaanggt

SEQ ID NO: 7960 - DNA, 511 bp, Arabidopsis thaliana
  unsure at all n locations
  Clone ID: LIB24-048-Q1-E2-F6
gtttcncttgcccctggccgtaccgatccgaaaattcccgggtcgacccacgcgtccgcaacagattgggtttgggatcaagtgggcaaaccaatatggatccttctccgatcgctcagggaaatgacgatgacacaccggcgccggggaatcagtttgcccaattcggagctggatgtttctggggtgtcgagctggcgtttcagagagtcccaggggtgactcagaccgaggctggatacacccaagggaccgtagacaatccttcatacggagatgtttgttctggtaccacaggccattcggaggttgttagggttcaatatgatcttaacgattgcacctatgaagtctctgcttgatttgttctggtctangcatgatcccaccactttgaatcgccaaggaaatgacgtgggaacccaatacagatctggaatatacttctacacaccccgagcangagaaaactaagcccgtgantcacttgaacgtcaccagcaacaaaatg

SEQ ID NO: 7961 - DNA, 497 bp, Arabidopsis thaliana
  unsure at all n locations
  Clone ID: LIB24-048-Q1-E2-F8
gttacgcctgccgtnccggtccgaaaantcaaagtcccnggtcgacccacgcgtccgtgaagcgtttcttttttctcggaaaaagattattagtattttataactaatgttttgcttttcaattgctaaagattggttattatctggttgctgttgagaatgattcaggaactgttggtttttcttccaagaatcactctcttgaatcttgatggctcctgtgttgaacatgcagatcaggatatgctctgttttgtgttagaaggaagtctctgaagaacaaggtacatattatataacagggttccaacggagaaccgtgcagataacttatttgggacagcttctacaaaaaaacatattccggcaaaagaaaacaatgcaactacctacacatggcttattaaaggcaaacaacacgattggtagacttgtttagaaccattcttcctagctgcatgtttgttgatgtgctttgggaagcngattgctaggcc

SEQ ID NO: 7962 - DNA, 211 bp, Arabidopsis thaliana
  unsure at all n locations
  Clone ID: LIB24-048-Q1-E2-G2
ccgtccgnaaatcacgggtcnacccacgcgtccggaattattatgatcaagaatgggtttgttgtgtcgatgcataattaaaattagttaatgatagttatgaggaaagtcacgtatgttgcttatctttcttcttcttgttaaaacaaagccaatcttaatgcataatatatcttggttgtcnnnnnnnnnnnnnnnnnnnnnnnnnngg

SEQ ID NO: 7963 - DNA, 465 bp, Arabidopsis thaliana
  unsure at all n locations
  Clone ID: LIB24-048-Q1-E2-G3
acgcgtccgaaaacaaactctcgcttctcgcatcgttgattctccaaaaccagttttcactctctattgccgattctcgtttcgtttgatatcttaggaatctataaacaaaggttgaacaatgtttctcaaagtccaattaccatggaacgtgatgattccagctgaaaacatggatgccaaagggctgatgttgaagagagctatactagtagagttactagaggcgtttgcttccaagaaagcaaccaaggagcttggctactacgtggcagtcacaactttggacaagattggagaaggcaaaatcagggagcacaccggtgaagttttgttcccggtaatgttcagcggaatgactttcaagatcttcanaggagagataattcacgggtgtggtgcacaaggtgttgaaagcacggtgtcttcatgangtgtgggtccaatccgagaatgttaactctc

SEQ ID NO: 7964 - DNA, 421 bp, Arabidopsis thaliana
  unsure at all n locations
  Clone ID: LIB24-048-Q1-E2-G4
aaatggagaaactaacttttctcaagccttctcctgcatttcgtcgtcttcatcgcttcaacgataccgtcttcatcgttcctcttgaatgatcgcacctttgagagatcgaacttgccgtctacgcgcgcggagaagctgatccgtgagctaaaccttttcccgcagcaggatctgaatgtgatcgatgtcgctgatttgcctctcactgctgcggagggaccggggattgttgaacggaagttcgtattcccgaatatacttgccgatggtggccctactgtcgacgatttaggtcatcatgctggntattacaagctcccgaaatctcgtggngcaagcatgttctacttcttcttcgagtcacggaacaagaaaggatgctcctgttgtgatttgggtgacgggaagggccggatgt

SEQ ID NO: 7965 - DNA, 497 bp, Arabidopsis thaliana
  unsure at all n locations
  Clone ID: LIB24-048-Q1-E2-C4
angttccttgccgtgcggtccgaaatcacgggtcgaccacgcgtccgatttctctttctctcttaaacggagcaacgcctttgaaatcgaattcgctccacaaatctagactcactccacttcatcttcgaactatctcttgttctagactatcttactctccctcgagtcgcgaaatttctctcaaaactcaatctactgttcctatttcgtgtaggcgtagtaggtttgacttcgttcctcgttgcggcatttcgtcgaacgatttgcctactgagaaaaagaagagctttggggagtgggttgagtttgtgggagaggcggtttcgacggcgtttccgatatgggtttctctgggatgcttgttgggactgatgagaccaagtactttcaattgggttactccaaattggaccattgtaggtcctacgatnactatgcttggaatgggaaagactttgacccttgatgatcttcgtggcgctttaccgatgccn

SEQ ID NO: 7966 - DNA, 474 bp, Arabidopsis thaliana
  unsure at all n locations
  Clone ID: LIB24-047-Q1-E1-B4
ctgtttacgttgcccgggcccggtccaaaaattancgggtcgacncacgcgtccgaagagaggaatggcgccagttcttcagagctcacagccatgggttgagaaataccggccgaagcaggttaaggacgtggctcaccangaagaggtggttcgtgtcctcaccaacactctccagactgctgactgcccgcacatgctcttctatggaccaccaggcactggaaaaaccactactgctcttgccatcgctcaccagctctttggacctgaactatacaagtctatggtgttggagcttaatgcaagtgatgacagaggtattaatgttgttcggactaagatcaaggattttgctgctgttgctgttgggtctaatcatcgtcaaagtggttatccttgcccatcgtttaagatcatcatcctagatgaggctgattcgatgacagaagatgctcagaatgccttgaggcg

SEQ ID NO: 7967 - DNA, 431 bp, Arabidopsis thaliana
  Clone ID: LIB24-047-Q1-E1-B5
acgcgtccgagaaaatggtgaacattagagtacaaaaagctccggaatctccgaggacgatggaggtgggagaaatagacacaagagcaccgttccaatcggtgaaagctgcggtgagcttgttcggagaagttgcagtctcaaagcaaagaagtactccaaggcgatctcgactctcctctgagagcgtttgcgacaaggaaacacagctaatgctggtccacaaggaattcatgaagatcaagcaaaagcttgacaacgctgagagcacaagatctcgtgctctagacgatctctcaaaggcgaagaagacaatggaggatcttagcaacaaacttgagactgtcaacaagtctaagcaatcagctattgacaccaaagaaactgtccaacagcgggaagaacagcttgagcatgataagtgtcatggc

SEQ ID NO: 7968 - DNA, 448 bp, Arabidopsis thaliana
  unsure at all n locations
  Clone ID: LIB24-047-Q1-E1-C12
ccanaaattcccgggccaaatgcaaacacaccacatgcacgcaacaacaactccatcacttcgtctttgtccacggctcatgtcatggagcatggtgctggttcaaactagctgcaaagctcaagctcgatggtcaccgtgtgacagctatcgaccttggtggctccggtgtcgacacgaggcagctccatgaggttcgtttggtgtcggcgtatctagagcctttgatgagtttcatggagtctctccctgaaaacgagaaagtggttcttgttggtcatagctatggtggcattggaacttctcttgctatggaaaggtttccgaccaaagtctctgtcggaatcttcctctctgcttacatgncgcaccatgantctcctccggcggttttgattcaaggagtattttacgagactaccanaggggtttcgctatggactgtgag

SEQ ID NO: 7969 - DNA, 415 bp, Arabidopsis thaliana
  unsure at all n locations
  Clone ID: LIB24-047-Q1-E1-C4
acacgtgggctcaattcaagctcaaaaacgggcatcagaggtccctttatgcaggatgaaagctggaaagatgattttttgaatcctttggagcgaagagttatgaattggcattttgctcacacagaatatggttgtgctgctgtcctcaaggaagtttcgcttcctcactggnatcaagatgagttttatggcgggtttggagggcctcatgctatgattaagggtggttatagccgagttgttgagtcgcttgcagaaggactggacattcacttaaacaaaatagtttcagatgtatcttatgtctctgatgtatctgccatggataacagcaagcataaagtcagagttagtacatcaaatggctgtgagtatcttggagatgctgttctgggtaactgttccacttgga

SEQ ID NO: 7970 - DNA, 413 bp, Arabidopsis thaliana
  unsure at all n locations
  Clone ID: LIB24-047-Q1-E1-C6
gccctcancggtcaagtaagcataaccctgatagctacgggtttcaaacgacaagaagagggagaaggacgaacagttcagatggtacaagcagatgctgcgtcagttggagctacaagaagaccctcntcttcctttagagaaagcggttcagtggagatcccagagttcttgaagaagaaaggcagctctcgttatccccgagtctaaagcccaatctaatcactaccctgcacactgcagcaataacaaacgtgtgtgtactggtagtctggtactgccttctgggatacagcaagatgtgttgatgtatgatcaagaatctgtgtgggtgtgtatatgttctgtcactgcctctgngtcgtgttcttgaataggttgttttagaaatcggagtttctctctatgtcact

SEQ ID NO: 7971 - DNA, 405 bp, Arabidopsis thaliana
  unsure at all n locations
  Clone ID: LIB24-047-Q1-E1-C7
tgtnnnnnnnnnnnnnnnnnnnnnnnnnnnnnnnnnnnnnnnnnnnnnnnaaacaagcatcatcatcacatccacttccttcgtcttcctttctctgtctgtctcttaacccaaatgtggactctttgagccgttattagatctctgccgcttcaatantggggagcttatcttcngaggaagacgacgaagtctcttccgagagatgcggaagttacagtcccagcgccgacattagcgagtccgagagttccagcagcttctcctgccancgcttcgacggcgagggtgcctctagctccatcccttcttcncctcgagttgtcnctggnagaggattttacntcccggccccagtcatgcttccggtgatcggcggnaaagatgtggtctggggatgacaaa

SEQ ID NO: 7972 - DNA, 391 bp, Arabidopsis thaliana
  Clone ID: LIB24-047-Q1-E1-D1
aaatatgagatagttaagcgactacaagcgaggaagcatatctgtggaatgacaggtgatggagtaaatgatgcgcctgctcttaaaaaggctgatattggcattgcagttgctgatgcaactgatgcagcacgtagtgcttcagatatcgttcttactgaacctggtcttagtgttatcatcagcgctgtcttaaccagccgtgctatcttccagagaatgaaaaattatacaatctatgcggtttccatcactatccgtattgttcttggcttcatgctgctagctcttatatggaagtttgactttccacccttcatggttcttatcattgccattctgaatgatggcacaattatgacaatatcaaaagacagagtgaaaccttccc

SEQ ID NO: 7973 - DNA, 473 bp, Arabidopsis thaliana
  unsure at all n locations
  Clone ID: LIB24-047-Q1-E1-D10
aacttgtccgccgnccggtaaaggtccanaaattcccgggtcnacccacgcgtccggtggtaggttctttaaaagggaacccttttcaccactagttcttgaatccacatacaagccgaggcgtttcaatattaaatgtaaattttacccttaaaaccatttgatttctccttcaaaattcctgcaacgacattaatttgaaaaaaaaaaaacagagacgtaagatcaaagatgaggagcaagagcggttttagtttcttctctaaaatgacttcttcaaggaagaggccttctctctcactacctatcaagagtcacgagtccacggatgttaacaagaccatcgacaatgcagccgagattatcgagaaatggaacacagagtatgtttccgataagaaattttantctctgttttgcgagagcaagcgagacgcgaagaatttgttaaacgcgtgaaggaactgcagaac

SEQ ID NO: 7974 - DNA, 415 bp, Arabidopsis thaliana
  Clone ID: LIB24-047-Q1-E1-D8
gtaggttctttaaaagggaacccttttcaccactagttcttgaatccacatacaagccgaggcgtttcaatattaaatgtaaattttacccttaaaaccatttgatttctccttcaaaattcctgcaacgacattaatttgaaaaaaaaaaaacagagacgtaagatcaaagatgaggagcaagagcggttttagtttcttctctaaaatgacttcttcaaggaagaggccttctctctcactacctagcaagagtcacgagtccacggatgttaacaagaccatcgacaatgcagccgagattatcgagaaatggaacacagagtatgtttccgataagaaattttattctctgttttgcgagagcaagcgaagacgcgaagaagtttgttaaacgcgtgaaggaactgcaaga

SEQ ID NO: 7975 - DNA, 411 bp, Arabidopsis thaliana
  Clone ID: LIB24-047-Q1-E1-D9
actttgaagatagcgaagagcaaaaagataatctctggctcgatttttgttggagtccttgattcgagcaagtttaaagactcgagggttttcttctggataacgtaattagatactcgtgttttctgaaagggtcatcactgctattgtcatagcttgagaaaggatctatttttaatatcagtgatattggtatctatgagatttggagtagttgtttggaggaacgtgtcctcttgcttgatgtgaagattgcttcttgttgtttgctgtttcttaatggagtggaggggaatcctctgctcgttgctttttattgtttccgtgggagagtcgtcaagtagatttgggataatgtggcatcctaatcttggtgttgattctggacaatacgtgacttggccaatctta

SEQ ID NO: 7976 - DNA, 415 bp, Arabidopsis thaliana
  unsure at all n locations
  Clone ID: LIB24-047-Q1-E1-E11
tcacgccaaatgaaagtttaaaacctttgaattgtttattgaaagtttacatttttctgttgaatccaactatgtttagattgagaagtctcttgtcgctgaagagttcttcgattgtagaattgtcatcacaaaacgtcacagaagcaattcgtttcgctccatttcattcgacaagtgttctgtctgaaaaatcgaggagtagatttggttctgctagagattccgaaggcgaacgatcttcaaagaactcctccataagatttacatgtaccgtaaaggagaagggtcgtaccaagtgctaagaagactgtgggataaactccttttccacagggggaattaatgatccgcttcagaatgagtggcatttcgggccaagtccgcttatccgggatangcatatgaagaaaaa

SEQ ID NO: 7977 - DNA, 416 bp, Arabidopsis thaliana
  Clone ID: LIB24-047-Q1-E1-E2
ttcattacgtgcttcctcaatggcggcacgatccctatggagaacccgtacgaagctcctcgttgttggtaccgccttatgcggtggttccggcgccgccttcattgcttcctccgatgacccatcaacaaccctcaagctttgcacctccatccccgttcgtctctaccgcaataccgttaccgccgcctctattgctttcgattatgagtactcgttgttgggtttggctgagggaagcagtgagagagctaaggtcaaacatgaagtccacctaaggtcagctcaaaagcttcaagagctctgttttaaaaatggaggaatctatatcaaactcggccaacatataggacaactagaatatcttgtgcctgaagagtatgttcctactatgagggagtccatgttgaacaaat

SEQ ID NO: 7978 - DNA, 465 bp, Arabidopsis thaliana
  unsure at all n locations
  Clone ID: LIB24-047-Q1-E1-E3
ttacnttgcaggcccggtccagaataacgggtcgagcacgcgtccgactgaatcaaatataattattgaatcagatatgatttaattggttaaaacactgcgagggatttgctaggcgctctcgcagttccctcgcaatgtaagcagcattttgattgttttaaaagacggttcctcgcaatttcctagtaaggtttgcgagtgatttgcgaggaaatatattcttatatatactcgataacctagtttgagcggagctcaaacctgccgcatcaaaccctaaacctaatttttttcttcgattctcttcttctccgatctattttcctcgtcgccggcttctcttcttctccgatctattttcttcgccgccgcctctcttcttcttcgatctgattacgtcgccgcctctcttcttcttctccgccgcgtctcttattctccagcagccggccgcaactcttc

SEQ ID NO: 7979 - DNA, 411 bp, Arabidopsis thaliana
  Clone ID: LIB24-047-Q1-E1-E6
gaaacagaaatcatctagagacgattaagagaaaactaagaacgataactctcgccttcgattctttttgttgattgaggcgcaagctacctgcacacaatggagaacaatcgagagggaccatactctgttctaacgagagatcaacttaaaggaaatatgaagaagcagatcgccgaaatctctgagatcttctcgttatcaaaacccgatgcgaccgtactcctcatgtttctccgatgggactctcatgaagtttctgagtttttggttgaaaacaacgaaaaagtcttgtcggaatcaggtttgaaaccagtggtagttgatccgaatcaagacttatataagatttcttcttgtgggatttgctttaagacttgtgatgatggtgattacttaatctccacgccc

SEQ ID NO: 7980 - DNA, 424 bp, Arabidopsis thaliana
  Clone ID: LIB24-047-Q1-E1-B3
agagtcacaggacactggtatggatgtgtgactctagaggatgttcctcttttgttggagcaacacattaacaaaggcgaaattgtagaccggctttggaggggtgaaatgggtctgccagaagaagatcagaagaaaactcaagaacaaaggttacaattaaacagcgaaaagatcagcaacagagaggtgactcaagaatcagttaataatagtatctgttgccagtctcgagctgtcccagagctgaacggtagtggttgccaacaaaatgggaactcctcttactgtctggaggagattcacacagagaaaaatacctcggagagagtaacctctgtaaaaaatgcatctcttcggataggaagcagcgagaatggatcttctggtggattcaaaggtttgtgccgtgaatgtcaatgtt

SEQ ID NO: 7981 - DNA, 407 bp, Arabidopsis thaliana
  unsure at all n locations
  Clone ID: LIB24-047-Q1-E1-E7
gggcggnnnnnnnnnnnnnnnnnnnnnnnnnnnnnnnnnnnnntggcgatggcgagcttagctaggagaaaagcgtactttctcaccagaaacatctctaattctcccactgatgctttcagattctctttctccctcactcgcggcttcgcttcgtcaggatccgacgacaacgacgtcgtcatcatcggcggcggtcctggaggttatgtggcggcgattaaagcggcacagctcggtcttaagactacctgtatcgaaaagcgaggcgctctcggtggtacttgtcttaacgtcggctgtattccttcaaaggcccttcttcactcttctcacatgtaccatgaagcaaagcacgtttttgctaaccatggtgttaaggtctcttcggttgaggtagatcttcc

SEQ ID NO: 7982 - DNA, 419 bp, Arabidopsis thaliana
  unsure at all n locations
  Clone ID: LIB24-046-Q1-E1-G2
tttcattggcacaaagagagaaaatctgaaattgagagagacagagaaaaatggcgtcgcttctgaaagcattcatcgatccaaagaagaacttcctcgctcgtatgcatatgaaagccatatctactcgccttcgcagatacggtctgaggtacgatgatctgtacgatcagtattacagtatggacatcaaagaggctatgaacaagattggcccaggganggtcnttgatgccccgttaaccaacgttctcaaagcctnccaatgggacctccccatgaaacacgaatacctccccaaggatnttcaaggcgggtgcaaaccccattccgtggctatcttcaaggacatgccttgctccttgtttaagaagggaaaagcaaagggaacgaagaaggccttggggaagcctcctanc

SEQ ID NO: 7983 - DNA, 460 bp, Arabidopsis thaliana
  unsure at all n locations
  Clone ID: LIB24-046-Q1-E1-G4
cttcnacctgttcgggcccggtccntaaattaacgggtcnacncacgcgtccganacgcactctcaaaagtcgaatatcccaaattcgatccgttttccggcgataatctccgatctagatccgatggcgaaagaaccagttcgtgtgctcgttactggagctgcaggacaaatcggatatgctcntgtacctatgattgcaaggggtatcatgcttggtgctgaccaacctgttatcctccacatgttggatattcctccagctgctgaagctttgaacggtgttaanatggagttgatcgatgctgctttccctcttcttaaaggtgttgttgctaacaactgatgccgtttgangggangtactgggactcaatngttgctggttaanggcntgnngggttncccgaggaaagaagggtatgganaaggaaggatgtgatgtccaagaaatgtttcc

SEQ ID NO: 7984 - DNA, 410 bp, Arabidopsis thaliana
  unsure at all n locations
  Clone ID: LIB24-046-Q1-E1-G5
acgcntccgnnnnnnnnnnnnnnnnnnnnnnnnnnnnnnnnnnnnnnaggaacttaagtttctgagtccatgaagatgccagtggcattggtctggctactggcattcactattctactgatcagtggggaaggcaataatgccatctgcaaggagaattttaagttagaccctagacctcatantgtttcgatcctcgagtttggagcggttggtgatgggaagacgctcaacactattgctttccagaacgctgttttctatctcaagtcttttgcggataaaggcggtgctcagctttatgttccaccagggaaatggctcaccggaagcttcaatctcacaagccanctcactctcttcttggagaaaggagcaacaattcttgcatcaccgggatccgtcgcatt

SEQ ID NO: 7985 - DNA, 456 bp, Arabidopsis thaliana
  unsure at all n locations
  Clone ID: LIB24-046-Q1-E1-G7
acttttgccccgnccggtacanatccanaaattcncgnggtcnacccacgcatccgnccactttccttttcctctacgtcaccgttttgacagtcatgggtgttaagagagctcccaatatgtgtgcctctgttggaatccaaggcatcgcttgggcttttggtggcatgatctttgctcttgtttactgtactgctggaatctcaggaggacatattaatccggcggtgacttttggtttgttcttggcgaggaagctatctttaaccaagagctctgttctacatagtaatgcagtgccttggagctatatgtggtgctggtgtggttaaagggtttcaaccagggctgtaccagacgaatggcggtggagctaatgtggtggctcatggttacacaaagggttcaggtcttggtgcagagattgttggaacttttgttctggtttacactgtt

SEQ ID NO: 7986 - DNA, 123 bp, Arabidopsis thaliana
  unsure at all n locations
  Clone ID: LIB24-046-Q1-E1-H3
ggtccanccacgcgtccgagatgnttgtctctgtttaacatagttttgccatgtggatcttgaattctgtcaaactatttcaatagttgattcaacttgtttttaaaaaanaaaaaaaaaagg

SEQ ID NO: 7987 - DNA, 380 bp, Arabidopsis thaliana
  unsure at all n locations
  Clone ID: LIB24-046-Q1-E1-H6
ccgaggacgcgtggggcgaatcttcgaaaatgggtgcgtacaagtatgtatctgagctatggaggaagaaacagtccgatgtgatgagattcctccagagggttaggtgctgggagtacagacagcaaccttcgattgttcgtctcgtcaggcctactcgtcctgataaggctcgtcgtttgggttacaaggccaagcagggctttgttgtgtaccgtgtacgtgtgagacgtggtgggacgcaaganggcanntgcctaagggtattgtgtatggtaagnccaacaaaacaaggganttgacacaactcaagtttcaacctnacaaagcnttccggttgcctgaaggaaccctnccttggcaaggaaaattngggttgg

SEQ ID NO: 7988 - DNA, 416 bp, Arabidopsis thaliana
  unsure at all n locations
  Clone ID: LIB24-046-Q1-E1-H8
ccgggtcgacccacgaatccgnccacgcgtccgtgggaactcgtgcgcggctgtggcagaggccaaacccacccgtgtactccatccgtcggatccaccaaaccaannnnnnnnnnnnnnnnnnnnnnnnnnnnnnnnnnnnnnnnnnnnnnnnnnnnnnnnnnnnnnnnnnnnnnnnnnnnnnnnnnnnnnnnnntgggcattttagggtttctcaaatttttgacgctttctcttaaaagggttgacgaaataaccctttaagggaaaaaacaaaggttgaggaagaccaccaaggtgaaaaaagaaagaagaattcgaacaacagcagcaacaagataaagttacgaatttttccctcttttggnacctttgtttcccttcntcctccttcctccatttttttccaantaaaa

SEQ ID NO: 7989 - DNA, 344 bp, Arabidopsis thaliana
  unsure at all n locations
  Clone ID: LIB24-047-Q1-E1-A1
acgcgtgggtccaaatcagggttttatcactcaactttcagaccaaatatcaacactgaacgagaggatggatgaattcacatcccgcattgaagagttgaattccaagatcccgaacaggatatctccttcaggtagtcaacataacttggctttaccaatcgaaaacggtaatgggtctgtcttatcattctccgcatccgcatctcagctcgtaagggaatctcctctgaatggaagagtcgtactgggttgctcgtgggacagcgtcagataatgcatcaaatgggncacactgaantaatcttcctttcgggagtatggtttgganaaaaagactcgca

SEQ ID NO: 7990 - DNA, 429 bp, Arabidopsis thaliana
  unsure at all n locations
  Clone ID: LIB24-047-Q1-E1-A10
cccggtaanaagtccaaaaantcccgggtcgacccacgngtccgcatctccgttaaaccctagcgattggaatacggatatactccaaatggctttcttaagtaaagttggaaggttattcagtcagaccagcagccatgtcactgcctctagctcgatgctacagagcatccgttgcatgtcttcatcaaaaatctttgttggaggtatctcctacagcactgatgagtttggcttaagagaagcttttagcaaatatggagaagttgttgatgcannagattattgtggaccgtgaaacaggcagatctangggctttgctttcgtaacatttacttccactgaggaggctagtaatgccatgcaattggatggacaaggaccttcatgggtcgaagaattanggtgaattatggcaacctgaaana

SEQ ID NO: 7991 - DNA, 442 bp, Arabidopsis thaliana
  unsure at all n locations
  Clone ID: LIB24-047-Q1-E1-A2
aattaacgggcctcgggctctctctcntccnaagtttcctctccctttagaactgtanacagagaaaagcctccatttttcncaaggcaatctctctctctctgcctcatctcacaaacccattacaccaaaacctcatcgtagagagagaaacacaccaaccattgttacactctaagagaagagaagagagaaggaaaaatggncggtgtatcaccaaagtttgtgttgccggagacattcgacggcgtgangatggngatcacaggccaactaggcatgatctgggaagcttgtnaaagcaccangtgattgtccctcttcttcaattagctgtttacatctgtttgcttatgtctgtcatgcttttatgtgagagggtttacatgggaatcgtcatcgtcctngtcaaactcttctggaaaaaaccagncaaacgtta

SEQ ID NO: 7992 - DNA, 417 bp, Arabidopsis thaliana
  Clone ID: LIB24-047-Q1-E1-A4
acacgtgggcgggcattctttcccaaatcataatggttacaggggacgtggaagaggacgaggaagaggagcagggagatcacaccaagtaatgaaattcactgaagattttgatttcacagcaatgaacgaaaagttcaataaggatgaagtatggggtcatcttgggaagagtactaccttagatggtgatgaagatgatgattccccgactgtagatgaggctgagcttcctaagatcgaggccaaacctgtttacaacaaagatgactttttcgatagcctatcatcaaacaccattgaccgagagtcccaaaattcaaggcctaggttctcagagcaacggaaactagatactgagacatttggtgaattctcgagattccgaggaggtcgaggagggcgtggtgggttatg

SEQ ID NO: 7993 - DNA, 405 bp, Arabidopsis thaliana
  Clone ID: LIB24-047-Q1-E1-A6
tcttctttcttcttcttctcagatcctttcaccgagtaagaagattttaaagatgccgtcaacgccgacgacgccgactacaacaacgccgatcacggcttcgtattggtgttacagctgtacgcgtttcgtcagcgtttgggctgatcaaggcacaacaaccgtcggtagcgtcgcttgccctcactgcgacggcggttttatcgaacagattaacgattcttcctccgccgctaccgaattaacgattccggcttctactgaagtaagatcgatcaataacaaccgtagatccgtgattagacgccggagatccggtcgtcgtccgtcctttaatccggtcatcgtacttcaaggaggcgccggcgagagagaagagggagaagaaggagatgcggctagaga

SEQ ID NO: 7994 - DNA, 418 bp, Arabidopsis thaliana
  Clone ID: LIB24-047-Q1-E1-A7
aaataagataccactcaccaaaaacttcctcaaaactaacaaatggatactaataaagcaaaaaagcttaaagttatgaaccaactcgttgaaggccatgacttaacaactcagcttcagcaactcctctctcaacccgggtccggtctagaggatctagtggctaaaatcttagtgtgtttcaataacaccatctccgttcttgataccttcgaacccatctcctcctcctcatccctcgccgccgttgagggatctcaaaatgcttcatgtgataacgacggcaagtttgaagattccggcgatagtcggaaaagattgggacccgttaagggtaaaagaggatgctacaaaagaaaaaagagatcggagacgtgtactatagagtcgactatacttgaggacgcattttcctgga

SEQ ID NO: 7995 - DNA, 439 bp, Arabidopsis thaliana
  unsure at all n locations
  Clone ID: LIB24-046-Q1-E1-G11
attatanggtccacggacccgtccgnatcttaattctctangttttttcctcagtctctgttcttagatcccttgtagtttccaaatcttccgataaaaatgtcgggtaaaggagaangaccagctatcggtatcgatcttggnaccacttactcttgcgtcggagtatggcaacacgaccgtgttgagatcantgcnaatgatcaaggaaanagaaccacgccatcttacgtttctttcaccgactccgangaggttgatcggtgacgcanctaagaatcangtcgccatgaaccccgttaacaccgttttcgacgctaagaggttgatcggtcgtcgtttcnctgacagctctgttcagangtgacatgaaattgtnggccantcaagattcaaacnggggcctggccgntaagccaatgattctaangtcggaata

SEQ ID NO: 7996 - DNA, 417 bp, Arabidopsis thaliana
  unsure at all n locations
  Clone ID: LIB24-047-Q1-E1-A8
gcttctcccataccctcttacctatcttcttattcttcttagatttctccatcgatctcgaacanaggattcacctttgcattcatattctttatcttgacttcaaagtcaaacctccgattcgataaacaaattggggaatggatgcttgctttcgtctttctcaccacgatctgaagcacccaagttccaaattcatattcgattcaccggcggctaggtatttctcaaatcggtcagatttctgagatttatttatgagaacaatggtgacgaccaaattgggaatgctccattatgtaattgaccatatatatggagcgtttatgcaccgcaccaagatgaccccacccttcttctctccgatgttggggtggtcccaaatctcgaattgctcgangccgtaaggttcaaacg

SEQ ID NO: 7997 - DNA, 453 bp, Arabidopsis thaliana
  unsure at all n locations
  Clone ID: LIB24-047-Q1-E1-A9
ccanaaagtcccgggtcgacncacgcgtccgnacangaaggaagaaagattttacaacaaatgaaaagtgatgcagctttgcttaacctggaataggagaactgccttcttccaggttaagactcaagattagcatctctcatttctctggatggcattttgaagcaagtcaaggaaatcacaagacaagcctctgtccatgttttgagtaaaagcaagaagaaagcattacttgagtcccttgatgaactcactgagcggatgccttctcttcttgatatcgaccatccatgcgcacaaagagaaattgctacagcacaccaagttggtcgagacgattcctgaacaagaggacactaatattctggaacaatcacacgaccggagaccctcattagaatcaatatcctcangtgaaactgatgtatctcagtggaacgttttgcaattcaa

SEQ ID NO: 7998 - DNA, 401 bp, Arabidopsis thaliana
  unsure at all n locations
  Clone ID: LIB24-046-Q1-E1-C7
aaatggaagaagtgtcgtcggagatggaagtggaggttcaaaatcgtcagctttcggattcttctccggctcaaaacgtgaagaaatttgggctcaagaactctattcagaccaacttcggctctgactacgtcttccagattgtcccaaaaatcgattggacagcaatcgcggtttccttatcaaccaacaccgtcaagctttactcgccggtgactggtcagtactacggcgaatgtaaaggccactccgataccgtcaatcagattgcgttttcctccgactcggcggcgtctcctcacgttttgcactcttgttcctccgatggtaccattagatcttgggacactcgaagtttccaacaggtttcgcgtattgatactgggaatgatcangagaat

SEQ ID NO: 7999 - DNA, 440 bp, Arabidopsis thaliana
  unsure at all n locations
  Clone ID: LIB24-046-Q1-E1-D2
ggtaccggtccanaaattcccgggtcnacccacgcgtccggcaacaaagaaaaagtctgtttatcatcttcttcttcttcaaatcgagatcgaagaagaaccaacaaaaaaccaaaaatggagacgaagccaaaccctagacgtccttcaaacacagttctaccatatcaaacaccacgattaagagatcattaccttctgggaaaaaagctaggccaaggccaatttggaacaacctatctctgcacagagaaatcaacctccgctaattacgcctgcaaatcgatcccgaagcgaaagctcgtgtgtcgcgaggattacgaagatgtatggcgtgagattcagatcatgcatcatctctctgagcatccaaatgttgttaggatcaaagggacttatgaagattcggtgtttgttcatattgttatggagggtttgtt

SEQ ID NO: 8000 - DNA, 399 bp, Arabidopsis thaliana
  unsure at all n locations
  Clone ID: LIB24-046-Q1-E1-D4
ccaccaagctcaacaaggcacgatagatctgcagagtgggattcttcatgctgaagagaaagactacaaaaccggatacagttacttctttgaagcctttgagtccttcaacgctctcggagatccgagagcggttttcagtttgaagtacatgttactgtgcaagatcatggttagccaagctgatgatgttgcaggaataatctcctcaaaggctgggactacagtaacgttggccctgacctggatgccatgaaagcagtcgctgatgctcactcgaagaggtccttgaagttgtttgagaacgcactccgtgactacaaagcacaagcttgaagatgacccaattgtccacangcatctctcttctctctatgacacgcttctgggagcaaaatc

SEQ ID NO: 8001 - DNA, 441 bp, Arabidopsis thaliana
  unsure at all n locations
  Clone ID: LIB24-046-Q1-E1-E1
ccggtccaanaattaacgggtcgacgcacgcgtccgatttaagttctgtttcttgatttttcactttctggttttctggggtgtttcaaaagatctgtctttttttgttctctttgatgtctctagtcttgttgggatgtgaaacacatgattttcgaggagtagagagagacagagagaaattaagggaaagagctcacttgtgtgacttgttctgtgagaaaattctctaagcaaaattctcaattttttcagcttctttctaatttatgcatattaaaattcagagcttttacacttgaaagtnnnnnnnnnnnnnnnnnnnnnnnnnnnnnnnnnnngtttgcatagaagaaacaatttttgtgttgatttagtcagttcacctaatctgaagagaagttaaaaagtttggctaanatttgtcaaaaagttaaaact

SEQ ID NO: 8002 - DNA, 412 bp, Arabidopsis thaliana
  unsure at all n locations
  Clone ID: LIB24-046-Q1-E1-E11
cgcntccgctttattgactgagagaaagcttttgacaatgggccacagacacagcaagnnnnnnnnnnnnnnnnnnnnnnnnnnnnnnnnnnnnnnnnnnnnnnnnnnnnnnnnnnnnnatgttaaacctgccggagaacgccgcggatcatccggttccggaaccgtcggatcgtcaggctccggaacaggcggatctcgttccaccacatctactcagcagaatggtcggatcttaagtcggccgatggaggaagtacngagaacctatgaagtttggtcgtgagcttggtcgtgggcaagtttggtgtcacgtacctcgtaactcacaaagagacganacaacagggtcgctttgcaaagtcantccctacgcgccgnccntgttcacaaagacgacnttgaagatgtt

SEQ ID NO: 8003 - DNA, 445 bp, Arabidopsis thaliana
  unsure at all n locations
  Clone ID: LIB24-046-Q1-E1-E3
ctgtgtacgttgnccgggcccggtccataaataancgggtcnanccacgcgtccgnaacgnntccgcggacgcgtgggcggacgcgtgggctggaactaaaggatatatatggctggtcttatgaagttaggatgcttggtctttgtcttcgtgattgcggccggtccaatcacagcaaaggcggctctgagctgtggcgaagttaacagcaatttgaaaccgtgcactggctacttgaccaatggtggtatcactagcccangcccacagtgctgcaatggtgttagaaagcttaacggcatggtccttacaaccctagaccgtcggcaagcatgtcgttgcattaaaaatgccgctagaaacgtcggccctggtctcaacgctgaccgtgctgctgggattcctaggagatgcggaatcaaaataccttacagtacccanatc

SEQ ID NO: 8004 - DNA, 446 bp, Arabidopsis thaliana
  unsure at all n locations
  Clone ID: LIB24-046-Q1-E1-E6
acgttgccccgcccggtacaatccaanaattcccgggtcgacccacgcatccgnggacgcgtgggcaggcaaccacaactttgatctattgaggaagctggttcttcctgatggttcagttcttcgggctaagctcccgggtaggcctacccgtgactgcttattcgctgatccagctagagatggaatcagcttgctcaagatctggaacatgaataagtttactggtattgttggtgtattcaattgtcaaggtgctggttggtgcaaggaaacgaagaanaaccagatccatgatacttctcctggcacactcacggggttcaatccgtgcggatgatgctgatctaatctctcaagtggctggtgaanattggagtggagattcaatagtctatgcatacagatcaggtgaggtggtaagactacctaaaaggtgcttcaat

SEQ ID NO: 8005 - DNA, 401 bp, Arabidopsis thaliana
  Clone ID: LIB24-046-Q1-E1-E7
gaggcctgcgcgactgcgtttgccacgtctccgccgcctcctccgattcttttaccctaactaaatttgccgatgttgtcactcatcaccgaagaatggccgccgaaactagcatcaggaagctcccatctctctccggcctccgtcaccgacgtaatccactggaagataatccctacttccacccctccaatggcttctacatcactccttctgacgtcatcctcgcccaggtcgcctacgaccactccgcccactcccaatcacgcgtggcctaccacagggctgggcctcgccgtgagatcatgtacgagccatcagctgtcaaggcggcgatcgttacgtgcggtgggctgtgccctggcatgaacacagtcataagagaactcgtggtgggtctt

SEQ ID NO: 8006 - DNA, 438 bp, Arabidopsis thaliana
  unsure at all n locations
  Clone ID: LIB24-046-Q1-E1-F1
ccccggtccaaaaatnaacgggtcnanccncgcgtccgacataaaaaatattaaacaaaaagaacaaaaaaaatggcaaaactttcattagcattaggtctattgctactattagcattaagtgaggtctacgaagtgcaagggtcgttcttattgaggcattacatgaggaaatttcccagaaggtccagagactttcggccattcgcttgcagaggtatgttgaagttcgtggacgttttggagcttaagtgtccattaaagccacaatacaagagcttcttcggaaacctaaggtcttacatgaacttcataaactcggcatccgggtcgaaaaactttgatgccgagctaaaagggaaagcccagggcctcttctcagctatgtctgcaatgantggcaaaggcgccgcatcggctgattctagcaangttatg

SEQ ID NO: 8007 - DNA, 461 bp, Arabidopsis thaliana
  unsure at all n locations
  Clone ID: LIB24-046-Q1-E1-F10
cgtagccgtccanaattcaagggnccacccacgcgtccgnaactgtaaaaaatctgatccaatggagaaagacgatgcaacggcgtcgttttcacctagcttcagtacttattccggcgatagactcgtcgaaatcgccgaacgagtctgttacaaagagaaatcagacgccgaattcgagttttcgacggcggcgacttcttcttccggtgacggtggactagttttccctgtatttaacaagaatctaatctccggagatgtttctccggagaaagtaattccgttgaaggatctattcctccgtgaacgtaacgatcaacaaccaccgcaacaaacatactcatcgtcttccgacgaagaagaagaagacgacgaagtttggttcgatnccgagcgagatctattgtccatggacaccagcgagatntacggcggntatgtcaccaagtnggaggatg

SEQ ID NO: 8008 - DNA, 444 bp, Arabidopsis thaliana
  unsure at all n locations
  Clone ID: LIB24-046-Q1-E1-F11
attcangggcctttttcacatgggaaaggataagactttgccgttgcttgaccctcgtgagccaccggaactcaccggaaccaagtcggcgtcaaaagtatgggccaaagagttcggcgaagagtcgaagcggctttgggagttagcaggaccagcgattttcactgccataagtcaatactctcttggtgctctcactcagactttctccggccgtctcggtgaacttgagctcgccgccgtctcagttgaaaactctgttatctccggtcttgccttcggtgtcatgttanggatggggagtgcattggagacgttgtgtggacaagcatatggcgcgggacagattangatgatggggaatatatatgcaacgttcatgggtcattcnctttactactgctttgtttttgcctcccgtctacatttgggctcctcctaatc

SEQ ID NO: 8009 - DNA, 470 bp, Arabidopsis thaliana
  unsure at all n locations
  Clone ID: LIB24-046-Q1-E1-F12
tagctgcccgtgnccgtccaaaattcananggtccacngacncgtccgnaagaataattagtgtttttgtaataacgttatggatcataagggttgatgctagggttttcggaggacgaggaatcgnaaaatttgtaactttcggtcagaattatattgttacgtggggacaaagtcatgtttctacactccattctggcgaaaaagttgatctttacatggatcaatcttcaggtggtgggttcgaatccaaggacgcctacggatcaggtctctttgaaatgagaatcaaantgccttcaggaaatactggcggcatcgtcaccgctttttacttgacgtcgaaaggaggtggtcacgacgaagattgacttcgaagtttctagggaacaacaactgaaaaccggtaacgttacagacaaatctgtttctaaatggagaangaancnnanaagacaagttttttcttt

SEQ ID NO: 8010 - DNA, 385 bp, Arabidopsis thaliana
  unsure at all n locations
  Clone ID: LIB24-046-Q1-E1-F2
agactcagaatcttcatcctcaaaccctagattccttaacgaaatggcgatggagatctcggtagatctgataaaccaactcaaggtctcgcttcgaaaggaggccaagctcacctccgtcgacgattgctcggactcatccttccccagccttcccacatccgaggaggctatcgcagaacttgatgcttcagctccctaccttcgttgccgaaactgcaaaggaaaacttttacgaggaatcgagtctctgatctgtgtcttctgtggaaatcagcaacgcacgangtgataatccctcctgattccatcaaatttacctccacttctggcntacaagtgggtttctcanctctcttaaatctcgaatgggattcgggtanaa

SEQ ID NO: 8011 - DNA, 402 bp, Arabidopsis thaliana
  unsure at all n locations
  Clone ID: LIB24-046-Q1-E1-F9
ggtccanaaattcacgggtccacccacgcgtccgatcacctctggctcagttgatccggtgatccatgtttttgacatcaggtacaatgctcgtaagccgacacaatcaataaaagcgcatcagaaacgagtgtttaaagcggaatggcattactctcaaccacttctcatctccatatcttctgatctcaacattggtctgcacaagatctcatgaaacttttgaagctctcacatgtctttgttcctcatttcttattatctgaggatacaggttcaggtggcgaatatttatcaagccatcataccaattcttaagttttaggtataaacatcattcccatgtattaaactctcaatttttataaaggattcgttaattaaaaaataacaaaaaaaagg

SEQ ID NO: 8012 - DNA, 444 bp, Arabidopsis thaliana
  unsure at all n locations
  Clone ID: LIB24-046-Q1-E1-C4
tgttngtaccggtcatcaattnccgggtccacccacgcgtccgatcannnnnnnnnnnnnnnnnnnnnnnnnnnnnnnnnnnnnnnnnnnnnnnnnnnnnnnnnnnnnnnnnnnnnnnnnnnncgcaacagatctctcatctccttcacttgttgactgtttataccacaggacaatggctgacaaagatgaagcagcgacgcgtggaaatgattgggaagttgtttctcttactgcttcagcttacgctgctgctcctgggtcctaaaccagtagtggactcgaaagatgatgatnacaaggaagttactccttgttacgaagctgagacatctcatccctttatanatgtctcgncactttgttttcccaccaactggtcagcttgagaatactangtgaccttancgaggctagcttaacggggtccaattgcaanggaaa

SEQ ID NO: 8013 - DNA, 383 bp, Arabidopsis thaliana
  Clone ID: LIB24-044-Q1-E1-F4
agtcttttggtgaatgggaagcctgtgataagggtttctgaaggcagtgaagtagaggttctgctggacagaactccgttctatgctgaatcaggaggtcaaattgcagatcatggttttctttatgttagcagtgatgggaaccaagagaaagctgttgttgaggtaagtgatgtgcagaagtctcttaaaatttttgttcacaagggcactgtaaaaagtggagctctagaagttggcaaggaggtggaagcagcagtagatgcagacttgaggcaacgagcgaaggttcaccataccgccactcatttgctccaatcggcacttaaaaaagtagtaggacaagaaacatcacaggctggttcattagtagcttttgaccg

SEQ ID NO: 8014 - DNA, 385 bp, Arabidopsis thaliana
  Clone ID: LIB24-044-Q1-E1-F5
gatcaaggagctcaattcttacgttgctctaagaaaaacgtatatgagtacccttggcaacaagaaagttgagctttttgatatgggagctggagttagtggcgaacctacagctgaggaaaatgttcaagtggcttcatctatgtcaaaccaggagcttgttgatgctggaatgaaaagaatggatgagactgatcaggccattgagcgctcaaaacaggttgtagaacaaacactcgaagttggaactcaaactgcagctaatttaaagggacagacggatcaaatgggacgcgtagttaaccacttggacactattcaattctcaatcaagaaggcctcccagctggtgaaagagatagggagacaggtggctacccgataa

SEQ ID NO: 8015 - DNA, 381 bp, Arabidopsis thaliana
  unsure at all n locations
  Clone ID: LIB24-044-Q1-E1-G1
ctgctccagggggaaggcattgttgggaaagcatttgaagccaccaaactcttttttgtgcccgaagtggccacatttagcaagactaactacccccttgcacaccacgccaagatatctggactacatgctgctttagcagttccattaaagagcaaatctggtttggttgagtttgtgttggaatttttctttccgaaagcatgccttgacactgaagcgcaacaggaaatgctcaagtcactatgtgtgacactgcagcangatttcaggagttcaaatcttttcatcanagacctagagttagaagtcgtagtacctgtaagaagagacaatggctcttctcagaaaaaccngctatgttggagcagaanccgtaga

SEQ ID NO: 8016 - DNA, 427 bp, Arabidopsis thaliana
  unsure at all n locations
  Clone ID: LIB24-044-Q1-E1-G11
aaatccaaaacacacagagagaaaaaaaactgaaacatcccaaatggatcatcatcttcaaccataacaacacgaaacccttcttctccaaaatccccaaaaccttgaaacaaagtctcaaaatttcacttcgtggatccgaatgtctcagaacccatcactcttcttcctcttatgtcnagggttaggtttttgcgttgacctgggtcaatccctgaaagttcctttcagcgttaacgatgttcttccgatgctacctcgtcaagtctcatggcctgttttgaacagttnccacaacgctgtggatttgttgccggtttttaagngggtcagttactcntaatangtgtagnctattgaggtgggnaangtgcnntgctttantgggtaatngcaagctcggcttgatatcaccgggtagtggatn

SEQ ID NO: 8017 - DNA, 378 bp, Arabidopsis thaliana
  unsure at all n locations
  Clone ID: LIB24-044-Q1-E1-G7
aaaatggaggccaagaacaanaaagcagtagcctcccgtctctgctgcttatgcaacctgagacgtcccgtcctcaaaagacctaaancccttcaacanatatgcanagagtgcttttatgaggtttttgaggaggagattcatcaagtcattgttcagaatcgtttattcaaatctggtgaacgtgttgctataggtgnctctggtggaaaagattctactgttctggcatatgtgttatcagaactaaacagacgccanatttatgggctagacctctttctcttgtccatagatgaaaggattacgggttatcgtgatgattctcttgagactgttaancggaaccaagtccantatggnttcctcttaagaatg

SEQ ID NO: 8018 - DNA, 413 bp, Arabidopsis thaliana
  unsure at all n locations
  Clone ID: LIB24-044-Q1-E1-G9
tgcagaaatggagactggtgctggtataggtttgtaccctttgcatcgctgcaaaaccatttacctagtgagacatgctcaggggattcacaatgtggatggggagaagaattataaggcttacatgtctcatgactactttgatgctgagttgacccagcttggctggaaacaggtagatagtttgcgtaagcatgttcattccagtggacttcacaagaagatcgaactggtcatttcgtctccactgatgagaaccttgcaaactgctgttggtgtttttggtggagagggctacacggatatgagtgatgtactacctctaatggtagcaaatgcaggaaataagcagccgtgcaactatatcgagtttaaaactgcccaccagttattacagagggagtcctgcanag

SEQ ID NO: 8019 - DNA, 385 bp, Arabidopsis thaliana
  unsure at all n locations
  Clone ID: LIB24-044-Q1-E1-H2
anacgaaggaaggaggcagaggatagagagatagcgaggctaatggatcagtgactcactgagtcagattttaccgattcattgcctccattgaagcctcttttctcagattctacgcttcactgtctcttctccatgtgcgtctcctcctcctccgtttcttcagatcttgctttccggtgacggttttaatcttcttctctctggtaacacgtataaagcatggcttacctgatgtagacatgtagtgttaggctaaagactcctcttttcacttctgtcttgttgagtttgtgttggtttaaggctttaagccaaaggcgttgttggtctgacaagatggcaatggcggtgtttaaggctcctctaaaaggggaatttcatg

SEQ ID NO: 8020 - DNA, 383 bp, Arabidopsis thaliana
  Clone ID: LIB24-044-Q1-E1-H3
aactctaggaacagcttacttcttgggactgagacggacttataggctcgctctgaagatccagcgtcggcttgttactccgaaacatcccaaaatccgtcaatttcttcatcggaggactcgtaaaatcttcgatgtggcgatttcggttcacaagaacatacaagaaagagacatagaagttggtaggaatctcggaaattggattcttcgttggctcgataagatgaaaccagcagctcagatccgtactcggccagaactaccacacaacagcaattccaacatggacaaggcaaagagactaacggaattgtcccgtcccaaatcgcacacgaacacgacgcagactccacaaaaccgtgaatccgataggcatttgt

SEQ ID NO: 8021 - DNA, 395 bp, Arabidopsis thaliana
  unsure at all n locations
  Clone ID: LIB24-044-Q1-E1-H4
gggatgggtnccaacggcacaggtgataaacccggccattggacaggccttgacagctttattggcatctcagggagctggtttggcttttaatccggcaattggacaggctttgttgggttccttggggacagctgctggtgtaaacccagggaatggagttggaatgccaactggttacggtactcaagctatggcaccggggacaatgcctgggtacggtacacaacctgggttgcaaggcggttatcagactccgcaacctggtcaaggcggtacaagtagagggcaacatggtgtcgggccatacggtactccttacatgggtcactaaatgtatcatgtatccatccactcagatatcagaaatcagtgttttaatattggcctggtga

SEQ ID NO: 8022 - DNA, 386 bp, Arabidopsis thaliana
  Clone ID: LIB24-044-Q1-E1-H5
gacctcgcttgtgaatggggctcatgacacttccaaacttgcaggattattggagaactttattaagaagtatgttcagtgttatggatgtgggaatcctgaaactgagatacttatcactaagacgcagatgcttcagctgaaatgtgcggcttgtgggtttctctcggatgttgatatgagggacaagctaacgtcgtttattttgaagaatcctccagagcagaagaagtcgtctaaggacaagaagtcgatgaggagagctgagaaggaaagactcagagaaggtgaagcagctgatgaagagatgaggaagctcaagaaggaggctgctaagtaagaagaaagcagcgaccacgggtacttcgaaagacaaagtgtcgaag

SEQ ID NO: 8023 - DNA, 464 bp, Arabidopsis thaliana
  unsure at all n locations
  Clone ID: LIB24-044-Q1-E1-H6
taccggtcnaaaattcacgggtccacncacgcgtccgnacangcgtccggttaatgaactttgatcannaattctanggngtttttgctcttctcgtcggtgaaagaaaaatcgagatgggttcaactccgttttgctactctatcaatccatctccatcaaagcttgatttcacgaggacccatgtgtttagtcctgtttctaaacagttttacttagatttatcatcgttttccggaaaacccggaggagtatctgggtttaggagccgtcgagctttgctcggagtaaaggcggcgacggcgttagttgnnnnnnnnnnnnnnnnnnnnnnnnnnnnnnnnnnnnnnnnnnnatcgagggttttaagttgccggangtggaatcggaggattggtgtttgctttagcggctaanaagaaaggattcgatgtgttagtgttttgagaaagatttgagtgcta

SEQ ID NO: 8024 - DNA, 384 bp, Arabidopsis thaliana
  Clone ID: LIB24-044-Q1-E1-H7
gagtgaagatgatgaatgttgcagtgacagccactccctcgtctctcttgtactctcctctgcttcttccttctcaagggccaaaccggcgaatgcaatggaaaagaaacggaaagagacggttagggacaaaggtggctgtttccggtgttatcacagctggatttgagctgaagccacctccatatcctcttgatgctctggaaccgcatatgagccgggaaaccttggattatcactggggcaaacatcacaaaacttatgtagagaacctgaacaagcaaatcttaggcacggatctagatgcattatccttggaagaagttgtgcttctttcatacaacaaaggcaatatgcttcctgctttcaacaacgctgcacaag

SEQ ID NO: 8025 - DNA, 457 bp, Arabidopsis thaliana
  unsure at all n locations
  Clone ID: LIB24-044-Q1-E1-H8
cnataaattcacgggtccacccacgcgtccgtaagccatctcatggntncttgcaaagttcaaatgggtcgngtattggctacaaagcaggccttgcttttcattgttttggtccagtatataccgcgattcctacgtgtcttacccttgacgtcagaattgaaaaggacagcaggtgtctttgctgaaacggcttgggctggtgccgcttattatctgcttttatatatgcttgcaagtcatatagttggagctttttggtaccttttagccttagaacgtaacgacgcctgctggcaggaggcctgtatagatgcagggaattgcagcacagatttcttgtactgtggcaatcaaaacatggacggctatgctgtttggaacagagccaaggaatctgttcttaagtccaagtgccgagctgacctcgatgataataatcctccatttgactttg

SEQ ID NO: 8026 - DNA, 411 bp, Arabidopsis thaliana
  unsure at all n locations
  Clone ID: LIB24-045-Q1-E1-A9
acgcgtgggcttcttcctcgcctcgtctacgcantaatactactcttatatcacaaaatctccacgaaaggtttgtatagagatgctataacatagcacacatctcctttcaataattcgctttttcctctctctcttctttttcatgttttcttgttcctgatcnctctccattacttttttgcccatctctttgtcttcctcagcgctactcgaaggatctgtcntttcaggtcgtttatgtattttctcttganggaagagattagccactaatacaanntgtcggggtcaacaagnagtantgggtcctgcgtttcaaggagtgggggcaagaaaccaggtacngaaatctggngaatcgaagnantttgagccangtcncaagtnncaaagtctgaacangggaaa

SEQ ID NO: 8027 - DNA, 427 bp, Arabidopsis thaliana
  unsure at all n locations
  Clone ID: LIB24-044-Q1-E1-F11
acgcgtccgaatattatgatgattactatatatgcagctattggtacaactttgattcaaacatgtggagtgctgtgtacaaacgcacatatggtaaagactacaaattaaaagctggctatgattctgatgttcgccttggctgggcatctctctgggtaaatcatcaacctttagttttcttttctctcttctctcatcagcgtaatctttttactcgcttaagcccgaatccgagtcatacgagtaagatgctatagcatatagaacattcattcaccacacaattgtacctaatgatgcatctaccatctaatantatctanngggacaccatcantccntggagcaagctttttgttttgagtgaagtttgtgaccanngcatggagtcctcaattttttaaaccggtnggcaggttggttg

SEQ ID NO: 8028 - DNA, 402 bp, Arabidopsis thaliana
  unsure at all n locations
  Clone ID: LIB24-045-Q1-E1-B11
gaggagggttgtgggaagcagcaaggaatctgtttgatganatgacgaatagaangattgagcaagatgttttttcttataatacgcttttggatgcaatttgcaaangtgggcagatggaccttgctttcgaaatccttgctcagatgccagttaagagaatcatgcctaatgttgtaagttataccaccgttattgatgggtttgcaaaagccggaagatttgatgaagctcttaacttgtttggtgaaatgagatatcttggtnttgcattaagataagagtttcttacaatacattgctttcantctacactaaagttggtaagatctgaagnagctttggntatctgaagagaaatggcatctgttgggattaaaaaaggatgtttgtgacttaana

SEQ ID NO: 8029 - DNA, 384 bp, Arabidopsis thaliana
  unsure at all n locations
  Clone ID: LIB24-044-Q1-E1-C3
tcgttagaaacgttgctgtatcttcggattttgaggtggaggaagatgatatgttcgctgacggtgacgattcagcgcctgtggagcgtaactccttctctcctgaccttaagctctttgttggtaacctttcttttaacgttgatagcgctcagcttgctcagctctttgagagcgctggaaatgttgagatggttgaggttatctatgacaaagtgactggccggagcaggggtttcggatttgtgacaatgtcaaccgcagcggaagttgaagcagcagcctcangtatttttgggatccggattcaagatcctagacctggaaccggtagggtccaagcccggttcggggttcagtttcggaaaaaagaaaccggctccc

SEQ ID NO: 8030 - DNA, 384 bp, Arabidopsis thaliana
  unsure at all n locations
  Clone ID: LIB24-044-Q1-E1-C6
tctctccgttgtccggcgcgtgtacctcactctctacaattggatcgtctttgctggatgggctcaggttttgtacttagcgataacgacgttgaaggaaacgggttatgagaatgtctatgacgccattgagaagcctctccagcttgctcagactgccgccgttctcganattcttcatggattagtaggtttggtcagatctcctgtttctgcaactctgccacagataggttcaaggctatttctcacttggggcatcctatacagttttccangaggtccgatctcattttcttgttacgtcgctggtcataagctggtctancacagagattattcgctactcantctccggctttaangaagctctagggcttgcac

SEQ ID NO: 8031 - DNA, 414 bp, Arabidopsis thaliana
  unsure at all n locations
  Clone ID: LIB24-044-Q1-E1-C9
ttccaaatgagaatccttgaacgttctggcctcggtgaggagacttgtctccctccggctattcattatattcctcccacaccaaccatggacgcggctagaagcgaggctcagatggttatcttcgaggccatggacgatcttttcaagaaaaccggtcttaaacctaaagacgtcgacatccttatcgtcaactgctctcttttctctcccacaccatcgctctcagctatggtcatcaacaaatataagcttaggagtaatatcaaggagcttcaatctttcggggatggggctgcagcgcgggcctgatctcagttgatctagcccgcgacttgctccaagtncatcccaattcaaatgnaantcatcgtcagnacgggagatnataacgcctaattactatcangggaa

SEQ ID NO: 8032 - DNA, 384 bp, Arabidopsis thaliana
  unsure at all n locations
  Clone ID: LIB24-044-Q1-E1-D1
gaactccaacatttttgcaattcataaaggcggaaaccggtattttgttgtgtactaatgtcgctgcccgaggtcttgattttcctcatgtggactggattgtgcagtatgatcctcctgataacccaacggattatattcatcgagttggtagaacagctcgtggtgaaggagcaaaaggaaaggctctgcttgtcctaactccacaggagttgaagtttatacagtatctcaaggcggcgaaaattcctgttgaggaacatgaatttgaagaaaagaaattgctcgatgtgaaaccttttgtggagaatttgatatctgaaaactatgcattgaaggagtcagcanaagaagcatacangacatacatttcaggatatgatt

SEQ ID NO: 8033 - DNA, 475 bp, Arabidopsis thaliana
  unsure at all n locations
  Clone ID: LIB24-044-Q1-E1-D10
cgtctgcccgtcccggtccaaaatncccgggtcnacccacgcgtccgtnaagtttgatttatttagangagataagttaaaaaaaaaatggtcggtatggatttgttcaaatgtgtaatgatgataatggtgttggttgtctcttgtggtgaagctgtttctggagctaagttcgatgagctttatcggtcaagctgggctatggatcattgtgtcaacgaaggcgaagtcacaaaactcaagcttgacaattactctggagctgggtttgaatcaagaagcaaatacttgtttggtaaacgtctctatccagattaagcttgttgagggtgattcagcaggaacaagtcactgctttctacatgtcntcagatggtccgaancacaacgaattcgattttgagttcttacggaacactaccggcgaagccttacataggtccagacccaantatctaccgtggaaccggagttt

SEQ ID NO: 8034 - DNA, 387 bp, Arabidopsis thaliana
  unsure at all n locations
  Clone ID: LIB24-044-Q1-E1-D2
taagttaggtgaaaagcgaaacaacacccacagagcaatggcccctgctctcgccgttacacgagatctcaccgccgtcggatctccggagaatgctcctgcgaaaggacgtgcttcggtttacagtgaagttcaatcaanccgtattaacaacactcttcctttgccttctgttctcaaaggagctttcaaaatcgtcgaaggtcccgctagttccgccgccgggaatccagatgagatagcgaagttgtttccgggtctatatggccagccatcagtagcaagtggttccagatcaggatgcaccttcgtcggcaacgaaatgaagattggtgttgttttgtctggaggtcaagcacctgggtgnggcagaaatgntaatttctg

SEQ ID NO: 8035 - DNA, 382 bp, Arabidopsis thaliana
  unsure at all n locations
  Clone ID: LIB24-044-Q1-E1-D3
ctgtttcgagaatatgaagatggaaggagttttgatctctgagtggaaagatatccctgtggagcttctcatgaagattttaaaccttgttgatgatcggactgtgatcattgcttcttgtatttgtagtggctggagagatgctgtttcccttggcctcactcgcctctccctctcttggtgcaagaagaatatgaacagtttggttctatctcttgctcccaaattcgtaaagcttcagactttantactgcgacaggacaaaccgcagcttgaggacaacgcggtggaagccatagcaaatcactgtcatgagctacaagatttggacttaagcaaaagctcgaaaatcacngaacaatccctatattcacttgcncgt

SEQ ID NO: 8036 - DNA, 382 bp, Arabidopsis thaliana
  Clone ID: LIB24-044-Q1-E1-D4
gctggacaacgaaaatagcgacgatagctacaaactttgaaggtatgaaaacagtagatgaagctgacgtgggcatctcctgttttatctcccagctccctggcttccgtggaatcctcaaacaaagatacgcagactttattgttaatgaagtagatatggatggtaatgtggttcatttgacatccttggacttgcctcctgagatggctgtgaaggaggaggataaagcgaaaagttgtgataatgtaccccaaaattatacttctgcagttgagtctttcaaatctatttccagtgttactgatgcagagcgtttggaaatattgatcaatcaagtcacctcaggaactgatggtgaagtcttaccagttgttcttga

SEQ ID NO: 8037 - DNA, 385 bp, Arabidopsis thaliana
  unsure at all n locations
  Clone ID: LIB24-044-Q1-E1-D5
ggccaaagttccgactttttgcttctcccagaggctaatcatggacgctgtggcggcgaatttgtttcaatctccttccttactgcgtcaaacttccgaaaggttgatattttcgacgcccaactgtcctggcttcatgcgaattagctccggacctcaatttcgtctcagacaaaactcttctcttaaattctcgagaccatttcaaagcggaacaacttgtgttaaatctcggagaagctttgtggttaaagcttcagcttctggtgatgcttcaacagaatcaatcgcgccgcttcagttgaagtctcctgtgggacangtttctgtcacagatattagtgagccatcctcatcttgttccagcagctgttgaacagcagct

SEQ ID NO: 8038 - DNA, 384 bp, Arabidopsis thaliana
  unsure at all n locations
  Clone ID: LIB24-044-Q1-E1-D6
acttagttgactgagaaaactaagcaaaaagatctccgatcggaatcttcttattcgccatggatgctctttctcaggcgatcagttccgggatctccgttccttacaagaacaattcttcttctctcgttccttctcacggactcacctccttaatcctccggaaatcgagatctccggtgaatccctcatcacgatctcgcgtctcggtgcgagcttcggagattcaacacagcaaaacctcagcttcatcgatcgatctcaagcgatccagattggnaattaaagtatgagaaagatttcgagcaacgattcagcatanctcacatcactgatgtcttacctgatgctgaagccattcgtncaacgttttgtcntaagatg

SEQ ID NO: 8039 - DNA, 397 bp, Arabidopsis thaliana
  unsure at all n locations
  Clone ID: LIB24-044-Q1-E1-E10
acgcgtccgcccacgcgtccgggaagaagaagaagaagaactgaagaagcatattcgacggtcaccaccaaacctcttccgtcggattttcactctccgtttatcgaacatctgagatctctctccacttccgtcaccgaagatgcattccagtcatcttcttctcgaggagccgatcaggatggcttcaatcctcgagccttccaaatctagtttcttcccggcattgactaagatcgtcggaantctaggtcctaaatcccgatccgtcganggctctctccggctgtctcaaagccggcatgtctgtggctcgatttganttctcgtgggggagatgctgattatcaccaaggagacacttgataanttgnaagttgccggtganggagcacta

SEQ ID NO: 8040 - DNA, 394 bp, Arabidopsis thaliana
  unsure at all n locations
  Clone ID: LIB24-044-Q1-E1-E12
attttgattgtagtttatgcttactacaatgaagagatgatccccttttggattttctattgcttgttttgttgttgtggtgtccttttgatttctaaattctttctccttcttattcaggaactggatttccgtctctaagaggacttcgaggacagaacacccgcnatctacganatgtctcccggtgggcaaatgacaaagatgcagaattgttacggattggcaatgtcaagcctgaagtagtcagttggtcccctcgaattantgtgcttcatgactttctcaagtccggaggaatgtganatacctaaaagcaatcgccccggcntcgncttcaagtttcnacngttgttgatgttaaaaaccggggaangggaagttaaaaaggtgg

SEQ ID NO: 8041 - DNA, 385 bp, Arabidopsis thaliana
  unsure at all n locations
  Clone ID: LIB24-044-Q1-E1-E4
ttttgtatatatatccaacaaaggaatcagatcggagatgtcggatgtttccggtgacggagatttatcggcgacggttactgaacatgaagtaactccacaaccgccggtttcttcggcgacgtatccgtcattaacggtgtcggcgtcttacaaagagagcagcggaggtaaaagctcgtcgaagaggagaccaataaggccgagtttcgacgctgcggctgataatgagtttattactttgcttcatggctcggatccagtgaaagtggagcttaatcgactagagaatgaagttagagataaggatcgggagttaggagaagcaaacgctgagatcaaagcgcttangttgtctgagagacaaagagagaaagctgttgaa

SEQ ID NO: 8042 - DNA, 385 bp, Arabidopsis thaliana
  Clone ID: LIB24-044-Q1-E1-E6
aaccacttctgtctctgcgaatctccataagactctttgagaagctttcctctgtttctccgctgttatgggtagctccggcgacgttaactggaaacttgcggaccaccccaagcttcccaaaggcaaaactatcggtttgattgttctcgatggatggggtgaatctgatcccgatcaatacaattgcatccataaagctccaactcctgccatggattcccttaaagacgggaagcccgacacatggaggttgatcaaagctcatggtaccgccgttggtctccccagcgaagacgacatgggaaacagtgaagttggccacaatgctcttggagctggtcgaatttacgctcaaggtgctaagcttgttgatctcgccctt

SEQ ID NO: 8043 - DNA, 387 bp, Arabidopsis thaliana
  Clone ID: LIB24-044-Q1-E1-C2
atagccagtttaataattctggattcccatcaggatcaccttttccgtttccatttcctcctcaaacaagtcctgcttcctcgccattccaatctcaatcccagtcttcaggtgctaccgttgatgtgacagcgacaaaagtagagacacctccttcaactaaaccgaaacctacacctgcaaaggatatagaggtggataagccaagtgttgtcttagaggcaagcaaagagaagaaagaagaaaagaactatgcctttgaagacatttcacccgaggaaaccacaaaagaaagcccatttagcaactatgcagaagtctctgaaactaattcccccaaagaaactcgcttgtttgagggatgtcttgcaaaaatggagctggtcc

SEQ ID NO: 8044 - DNA, 375 bp, Arabidopsis thaliana
  unsure at all n locations
  Clone ID: LIB24-044-Q1-E1-E7
tcataaaattttccattttctcacgattttcctcgtcttaaaaaaaatttctgagaaagaaaaaaaaattcaattttgtcgttttatttattttcctggtttcagaccaaaccagttagaaacaaactcgtttttttttcacaaatttggattttattgttccactgtgaatgaaaggaaaccaaaaagactcatcggagaaacccatatgggatcggagctcatcgggtatatccatgacccgacccggtcgattaataatctggctcatcctcttcatctccgtcacttacatcatctacactctcaagatcgtctccactacacacccttgcgaangatctaacctccgagtcaattctccaacaangaccg

SEQ ID NO: 8045 - DNA, 382 bp, Arabidopsis thaliana
  unsure at all n locations
  Clone ID: LIB24-044-Q1-E1-F1
cattctcactaacactcttgctaagcttagcagttgaaggagcctttaacataaaccagaaatggtctggtggaagtcattttggttacgagggcgggttctgttttcccggtctctgcattggaggatctggtggtagtagagtccattatggcagggaccattacggtggtggaagtcaatatagaggtggtattggttacagagagaccatgtactgcaaaccgttgacttgttatggtggctcatgtgatgcactccatttgcatttagacaaagggttatatgaatctctcatacgcaatactaagacagcgaaacaatcgtcgactgttgatttcaacatgccagagactttganacacaatgtcatcaacaataa

SEQ ID NO: 8046 - DNA, 499 bp, Arabidopsis thaliana
  unsure at all n locations
  Clone ID: LIB24-043-Q1-E1-H1
ngttagccttccgtagccgtcgaaattcaaaggcgttgcgacccnagantttgtccggnggtaagatatggnggcgttgatgggagtcagtccgtccgggccgagcctcctaanaattctcaatcgacgggnggaatttcaggtcaatccgacgcggcgaaacaccaacactctgtatcaaatcattctccaccattatgtcaccaccgtcaaaagccatcgtctacgaagaacacggctctcccgattccgtcaccagattggtgaatctcccgccggtggaagtgaaagaaaacgacgtttgtgttaaaatgatcgccgctccgatnaacccctccgatannaaaccgaaattgaagggtgttgtatcccgggtgaaggcaacccggtancancggtttggtggttatgaaggtgttgggtgaagtttatgcagttggctccaatgttaatggtttttctcctggtgattggggtcattccaactccaancttcctc

SEQ ID NO: 8047 - DNA, 495 bp, Arabidopsis thaliana
  unsure at all n locations
  Clone ID: LIB24-043-Q1-E1-H4
nttangcccccaaaaagtccaannttcacgggtccatccacncgttcttnattcgtcttcgtctttcgccatggctgctctacaatacttggaatctctgaaaaatacgcatccagagctcggcgaatggtacaattcccttgcagatctgtatcagaaaaagctctggcatcaactcacccttaagctcgaacagttcatcgctctcgctgtctttcaggctggtgatgctttgattcagttctatcacaatttcatcactgactttgagacgaagatcaatcttctgaagcttgcgcattttgctgtggtggtctctcgacagtactctgagaaagaagctgcagttagctatcttgaaagcgtgattgagaaacttagagctactaaagagcctaggattactgaaccaatcatttatattgaaacacaaaaagctttattcaaaccttgnaccaaggtgattcagaaaggagtgnaaaaaaatccttgggc

SEQ ID NO: 8048 - DNA, 478 bp, Arabidopsis thaliana
  unsure at all n locations
  Clone ID: LIB24-043-Q1-E1-H5
gtaacggtccanaaattcccgggtcnacccacgcgtccgaaaatgctcgagtcacttgacatgcgaagggatgtgcaggagattttcaagatgactcctcatgacaacaagtaatgatgttctcagcaacgctcagcaaagagatacgcccagtctgcaaaaaatttatgcaagatccaatggaaatatatgtcgatgatgaagccaagttgactcttcatgggcttgtccagcactatatcaaactgagcgagatggagaaaaaccggaagttgaatgaccttcttgatgcgttggacttcaatcaagttgtcatttttgtgaagagcgtgagcagggctgctgagctgaacaagttactggtggaatgcaatttcccctcaatatgcatccactctggaatgtctcaagaagagaggttgactcgatacaaaagtttcaaggaaagggcacaaaagggattcttgtgggccantga

SEQ ID NO: 8049 - DNA, 469 bp, Arabidopsis thaliana
  unsure at all n locations
  Clone ID: LIB24-043-Q1-E1-H8
cacgggtccanccacgcgtccgnnacaaatccctanttccaaaatcctctcggatctaaaagagtgtgtgataacataagatgtcgtcttctcgggaagagaatgtgtacttagccaagttagctgagcaagctgaacgttatgaggaaatggttgagttcatggagaaagttgcaaagactgttgacaccgatgagcttactgtcgaagagagaaacctcttgtctgttgcttacaagaacgtcattggtgctaggagagcttcctgggaggatcatatcttccattgaacanaaagaanaaagcannaggaaacgatgatcatgtttccattatcaaggactacagaggaaagatcgaaactgaactcagcaaaatctgtgatggaatactcaatcttctggattctcaccttgttcccactgcatccttngncgagtcccaaagtcctttacctcaaaatgaaagg

SEQ ID NO: 8050 - DNA, 415 bp, Arabidopsis thaliana
  unsure at all n locations
  Clone ID: LIB24-044-Q1-E1-A11
cacttgctcacttccttttactccactatccaaatcccttaaacccattcgttccccaattctacgctcagactatggaaccagcagaagctttgttataagatccatgacggttcaagaagatgacaagagaacaagcgatgaatcaatgagtattgacaatttacgaggattcgtcgatcttaatgtcggaaaatggactggctcctttcatcaatttgatggtaatgggaatttgttacataagattgatacacgtctttcagctagttcttatggagaagatgagctccttagtcttaatcaatcgttanatataaagcagcctacatcagctacttcagtttccgaagaggaggaagangaaccggaatgggtagaagtacannattaangaaaccaatatgttcactgg

SEQ ID NO: 8051 - DNA, 383 bp, Arabidopsis thaliana
  unsure at all n locations
  Clone ID: LIB24-044-Q1-E1-A2
agagagcaaaaatggcgacgtcgggaacgtacgtgacggaagttccgctaaaaggatcggccgagaaatactacaagaggtggaagaacgagaaccatgtcttccctgatgctatcggccaccacatccaaaatgttaccgttcacgaaggcgaacatgactctcacgggtctatcaggagttggaactacacatgggatgggaaaggaggaggtgttcaaggagagaagagagatagacgatgagaccaaaacgttgacgttaagangacttgagggtcacgtgatggagcagctcaaagtgtacgacgtcgtctaccaattcattcccaaatctgaggatactgcatcggcaaaatcactttaatatgggagaagccaacg

SEQ ID NO: 8052 - DNA, 386 bp, Arabidopsis thaliana
  Clone ID: LIB24-044-Q1-E1-A3
tcactggggaggtttgtgctgatcatttggttattcgtggttctgatcatcaactcgagctacacggccagtctcacttcgatcctaaccattcgacagctgacatctcggattgaaggaatagatagcttggtaacgagcaatgaaccaattggagttcaagacggtacctttgctcggaactatctaatcaacgagcttaacatactaccttcaaggattgttcctctgaaagacgaagaacagtacctttctgctctgcaacgcggtcccaacgctggcggtgtggcagccattgtagatgagcttccttacatcgaagttcttttgacaaatagcaactgcaaattcccgtacagtagggcaagagttcacacgcacaggct

SEQ ID NO: 8053 - DNA, 383 bp, Arabidopsis thaliana
  unsure at all n locations
  Clone ID: LIB24-044-Q1-E1-A6
gatgggaacacatgtagcaccatggaagcagcttctctttggcgccattgaagccaattctcatctaagccactcttcttatgttcagctcgcaacgattggtttaaatggacggccttcgaatcgtaccgtcgtattcaggggatttgaagagaacagtgacaggattcaaatcaacaccgatcttcgcagtcgtaagattgaagagcttaagcattgtcctttttctgagatgtgttggtatttctcggatacttgggagcaattccggatcaatggaagaattgaggtcattgatgcgtccaatcctgaccagaccaagcttcaggttttatgtacattattacaatttaatattagtantttggaaaggaagaaacact

SEQ ID NO: 8054 - DNA, 432 bp, Arabidopsis thaliana
  unsure at all n locations
  Clone ID: LIB24-044-Q1-E1-B11
acgcgtccgcngagatgatgaagaacaatctgcaaagagactaagtatgcttgaagagatcgaacgggaatttgaagctgcttcaaaaggtcttgaacaactaagggctagcgattcaaccgcggacaataacgaagaagaacacgctgcaaagggacaaagtttgttagaagagatcgaacgagagttcgaagctgctacagagagccttaagcaacttcaagttgatgattctactgaagacaaagaacactttacagctgcaaagaggcaaaagtctgctggaagagattgaacgtgaatttgaagctgcaacaaaagatcttaaacaactaaatgatttcactgaaggcagtgcctgatgatgaacaatctgcaanggagaaacagaaatgttggggagatatcnaacgcgaatttgaagctgctaca

SEQ ID NO: 8055 - DNA, 384 bp, Arabidopsis thaliana
  Clone ID: LIB24-044-Q1-E1-B2
gcgtcttgtttacaagcatccatgaattctctgcttccacgctcttcttctttttctcctcatcctcctctatcttcgaattcatccgggagaagaaacttgaagacttttcgttacgcctttcgcgccaaagcctctgccaaaatccctatgcctccgataaatccaaaggatcctttcctctccacgctcgcttctattgccgcgaattctccggaaaagcttctcaatcggccggttaacgctgatgtgccgccatatcttgacatctttgactcccctcagctcatgtcttctcctgcacaggttgaaagatcagtggcttataacgagcaccgaccgagaactcctccaccaagacttgccatctatgcttcttgacgg

SEQ ID NO: 8056 - DNA, 386 bp, Arabidopsis thaliana
  Clone ID: LIB24-044-Q1-E1-B3
gacaacattttgatttgtttttgtctcaacttggaaacaggagatattgtccggaactgttcttcagtgtttggtgtcttagaagaaagaaacacttttggagcattatgcataggagtttctgaagatttcaagctaattactatcattaatcagctatgaagtttatgaaacttggatctcgtcctgacactttctacacttctgaagatttaagatgtgtgtcctctgaagtttccagtgattttactattgaagtgtcaggaagcagatatcttcttcacaagtttccactgctctcaaaatgcttgaggcttcaaagaatgtgctctgaatctccagaatccatcatccaacttccagagtttccaggaaggagtgggagg

SEQ ID NO: 8057 - DNA, 384 bp, Arabidopsis thaliana
  Clone ID: LIB24-044-Q1-E1-B6
gcgtttgtgactcttttggtagcagtagctttgcagccactaccgtcagtgttgtctttggacgttcaccttcttcggcagctagccgcaaagcacaatgtgacatcgatacttgtgtttggagattctagtgtcgatccagggaacaataatttcattaaaaccgaaatgaaagggaattttccaccttatggtgaaaatttcatcaaccataaacccaccggtagattatgcgatggattactcgctcccgattatattgcggaggccatgggttaccctcccataccggcttttcttgatccatccctaacccaagctgatctaactcgcggtgcaagttttgcctctgctggttctggctatgacgatctcacagctaat

SEQ ID NO: 8058 - DNA, 387 bp, Arabidopsis thaliana
  unsure at all n locations
  Clone ID: LIB24-044-Q1-E1-B7
ttttgctcagattcatttaaccaccggcgccaagtgacgacgacgacggagggagcagattcgaattgtgtgaagacagcaatggagtctactgagtcatatgcggcaggttcaccggaagagctggctaagagatcccctgaaccgcatgattcttccgaagctgattctgctgagaagccaacacacattcggtttcttgtatccaatgcggcagctggttccgtcattgggaaaggtggctcgaccatcactgaatttcaggcaaagtctggggcaaggattcagctttcacgtaatcaagagtttttcccggggacgactgacagaattattatgatatcgggatcaatcaaagaagttgtcaatggactggaacntatcctt

SEQ ID NO: 8059 - DNA, 384 bp, Arabidopsis thaliana
  Clone ID: LIB24-044-Q1-E1-B8
tccgtcgccgtcgtgtcgggttttctccgtatcccgtcaattcaaaagtctcaaaacccttcctttctcttttctcgacccaagaaatctttggtgagacccatttcagcttcaagctcagagttgccggaaaatgttcggaatttctggaaatggctcagagaccaaggagtcgtatccgggaagtctgtggcagaacctgcggtggtaccggaaggtttgggacttgtagccaggcgtgatattggaagaaacgaggtcgtattggagattcccaagcgattgtggataaacccagagacagtgactgcttccaagattggacctttatgcggcggattaaagccgtgggtttcagtagctctgtttttgatcagagagaag

SEQ ID NO: 8060 - DNA, 458 bp, Arabidopsis thaliana
  unsure at all n locations
  Clone ID: LIB24-044-Q1-E1-C12
ctgttactttgccnggcccggtccgaaatanccgggtcnacccacgcgtccgctggttttgagttttggagaatggtgtttttccgcagcgtatcggcctttactaggctgaggtctcgcgtcggccaacaatcttcactcagcaattctgtcagatggattcagatgcagagctctaccgacctggacctgaagtcgcagctgcaagagttaattccggaacagcaggaccgtctgaagaaactgaagtcaagaacatgggaaggtccaactgggaaacatcactgttgatatggttattggtggaatgagagggatgactggattgctttgggaaacctcattgcttgacccggaagagggtattcgctttaggggattgtcgattcctgagtgccagaaagtattacctacnggccaagtctggagcttnaaccattacccggaagggtcctttn

SEQ ID NO: 8061 - DNA, 459 bp, Arabidopsis thaliana
  unsure at all n locations
  Clone ID: LIB24-043-Q1-E1-G9
gtacggcccganagttcccangtccacccangcgtccgaatttcttcncccttgtactgttttttgttttttaccaaangaccaaccgttcataacaatgatcgcgcgacggatctggcgaagccaccggtttctccgcccattcanctcgtcatctgtttgctctccgccgttccgggtaccggagtatctttctcagtcgtcttcctctccggcgtcgcgcccattctttgttcaccctcccactttgatgaaatggggtggaggaagtagaanctggttttcgaacgaagccatggncactgattcaaattcagggttaattgatgtgccactagctcaaactgggggaaggtattgctgaatggtgaagcttctcaangtgggtttgtcanangcnnggagattcngttggnaagagtttcagccactctgtgaagttcaagagcgatanaagca

SEQ ID NO: 8062 - DNA, 452 bp, Arabidopsis thaliana
  unsure at all n locations
  Clone ID: LIB24-042-Q1-E1-B5
gacggtaccanaccataaattcgcnggtcgacccacgcgtccnaactaatccaatgggttatgtaatctacatatcgttcccggcgattcttctccttctgatcgtcgctatcgccttttatctcatcggacgaaaaatcggccggagagaagggattcaatcaacgtcgcagttacactacggaccgccgttggctaattttccggcacctgcaccaccgcataaagctatggagaagccaccggagccggtttagtgtatgtatgatgacgtaataatacttacgtattacgtaaacgttctatatatgtagtttgtgtgttaaataagatgtaattgggccgatgctgaaaccaattttaanacaactctttattgggcctggggtttaaggaaacacttcgtgccgtttaaattcngtactcacctaatgcaaccctagaaactangc

SEQ ID NO: 8063 - DNA, 399 bp, Arabidopsis thaliana
  unsure at all n locations
  Clone ID: LIB24-042-Q1-E1-B6
gacgagtcaattttaaccatgatttagaggatttgtggatgtgatttcttcttttggtgagttttctcctctttttttattgtttctttcattctctttggatcttcatagtttcagaagcttcgagtgttttttaaaggtagttcctttgtcgctgaagaaacatagtttcaattttagagcttcttgaaacttattttcttatctggctcaatcttgagagttttgagattctgtgggagagacaatcttagggtttctgcatctagcaaaagtttgaatctttaaatatcttttagcgtttgcgattgtgttattgcctctgttctgtgttcaatgggaatcttcccttttgggacagaatgattctcttttctcgttttaagnattcctcggttc

SEQ ID NO: 8064 - DNA, 433 bp, Arabidopsis thaliana
  unsure at all n locations
  Clone ID: LIB24-042-Q1-E1-C1
cgggtcggnccacgcgtccgtctcagtccgtacgacgtcgaatatctagattgttcgacggcgatgggagctgggagagaagtcagcgtatcgctagatggagtcagagacaaaaacttgatgcagcttaagatactcaacacggttttgttcccggttcgttacaacgacaagtactacgccgatgcaatcgctgccggcgaattcaccaagcttgcatattacaatgacatatgtgttggagctatcgcctgtcggctggagaagaaagaaagtggggccatgcgagtttatataatgacgcttggtgttcttgcaccctaccgtgggattggcattggctcaaatctattgaatcatgttcttgacatgtgctccaagcaaaacatgtgtgagatatacttgcatgtgcagacaaacaacgaagaccaat

SEQ ID NO: 8065 - DNA, 423 bp, Arabidopsis thaliana
  unsure at all n locations
  Clone ID: LIB24-042-Q1-E1-C3
cacgcgtccgaacaagcgtccgatggcataattgtgaactctctccgagctangagtatgtttacttgcttcatgcaagaaccttttcaaatctttgcctcttatttgggtcatcaatgaagaaactcttgctgttcggtctagacagtacaactcaacagggcagactgaactcctcactgactggaaaaagattttcagccgggcatcggttgtagtcttccataattatctccttccgatactctacaccgagtttgatgctggcaacttctatgtgattcccggatctcctgaagaagtatgtaaagcanagaatctatagtttcctccacagaaagatgatgtggtcatttccattgtgggaagtcagttcttgtacaagggtcaatggctggaacatgccctgcttctgcaaactct

SEQ ID NO: 8066 - DNA, 407 bp, Arabidopsis thaliana
  unsure at all n locations
  Clone ID: LIB24-042-Q1-E1-C4
gcagaaacagaagattgcattggcgaagcagttgaatcttcgtcctcgtcaggttgaagtctggtttcaaaacagacgagccaggttagcttatatcattaattatttatcttcattttcntcctgtgtaaacggtttattttcttcantggaagtatatttttttgcnatgattaatttctgaaaagagggatgaggactaaaaatgcatcacgagtaataataacaaattgtcgcatgtctatccttgtcatttttcgtgcaaaagtagtatatcacttccgctcatcatttccatatataattgcttatagtgacttattcacaaaaagaaaaaaattcataatccttctttatataatttgaacccaaggaaaaacgtcntctttaatctttacaaaaacaaa

SEQ ID NO: 8067 - DNA, 404 bp, Arabidopsis thaliana
  unsure at all n locations
  Clone ID: LIB24-042-Q1-E1-C6
agataaactcgaggagaaggttaaagttcgagctatagggatctttgctctcgggttctggatcctcgacgtagccaacaacaccttacaaggaccttgccgtgctttcttagccgacttagccgccggtgacgctaagagaacgcgagtcgcaaacgcgtttttctctttttttatggcggttggaaacgttttgggttatgcggctggttcgtacactaacctccacaagatgtttccgttcacaatgacaaaagcttgcgatatctattgcgccaatctcaagacttgtttcttcttatccatcactctcctcctcatcgtcaccgtcacgtctctttggtacgttaatgacaaacaatggtctccgccgccgcgaaatgccgacgacgacgagaanactc

SEQ ID NO: 8068 - DNA, 408 bp, Arabidopsis thaliana
  unsure at all n locations
  Clone ID: LIB24-042-Q1-E1-C8
aaaccgctctcgagagacgaannnnnnnnnnnnnnnnnnnnnnnnnnnnnnnnnnnnnnnnnnnnnnnnnnnnnnnnaagatcacactacctcgcacaacaatggagttctggggtgttgaagttaagaanggcaaacnacttcacctagatcctgggctaganaggctcgtgcacatctctcaggttgctttgggagagagtangaataatgtaaccganccaatccagctttacgtgactgttggatcggatangcttctcattggaacgctatctcatgataagtttcctcaanctgtctacggagattgtcttggaaaggaactttgcgctgtnncatacttggaagaangggaagcgttttcttctctggttacaaggttgatgcanctgaatgccgaagcct

SEQ ID NO: 8069 - DNA, 422 bp, Arabidopsis thaliana
  Clone ID: LIB24-042-Q1-E1-C9
actttgacatggaaggagagattcaagactgggaaatacttcagagctcgagatctaccacggaagatgacaattcgaggagcttggaggagattgatgatggcacgcaaggtatgattaggtttgatcatttctctcttgagaaccagagtggtttgtctcgtttggaggcaaacgatgaagatgggtctgttcaatcgggtagtccaggatggatcgaacctagctccgatgttccttatggtccgaagcattttagtgagttatggtctgattcaagcagtgatcggcttgatgatcagaggttagtggatgatgatgtgaataacgagatgggtatagagagaaacgaagtgggtattgttgaatatagtgaaagtatagctcaagacatggatttgataagctctgatgagagaaaa

SEQ ID NO: 8070 - DNA, 466 bp, Arabidopsis thaliana
  unsure at all n locations
  Clone ID: LIB24-042-Q1-E1-D1
tttattcgnccgggcccccgggtccaaacanacccgggtcgncccacgcgtccgnggtctgacacgtgtccggttgttttaacgaagcagcgttcggtgagtgagaaatcagccgggtcgtcgtcgtcttcttcatcaaatttttcgagaatgagtttagattcgggtcgggttcacgggtcgagtacaccgagatgggttgagttttggagtgacgcggcggttgatcgtcggaggagaaactctgcttcttctatgtcgtcgtcacactcttcatcgccggagagatatttagatttaccaagatccgagacaccgaaatgggtcgacgattacgtgaaccggatcgggtcggttttaagaggaggcgggtggagcgaatccgacgttgatgatattgtacacgtgtcagcatctggtttttttgagggtgaaatggtaattttggataatcaagcccgttctt

SEQ ID NO: 8071 - DNA, 421 bp, Arabidopsis thaliana
  unsure at all n locations
  Clone ID: LIB24-042-Q1-E1-D12
ttctggaggtggcttatcttctcatgtatgggaatctgccctctgaaagtcagctatctgattgggagtttgcagtttctcaagcattcagctgtgccacaaggtgtattagatattatacagtctatgcctcatgatgcacacccaatgggagttcttgtgagtgcaatgagtgcgctttccatctttcatcctgatgctaatcctgctcttaggggccaggatatttacgattcaaaacaagttagagataaacaaattatccgcattattggaaagggcaccagcaatngcagcanctgcttanctgaggatggcaggaaggcctccggtncttccttcaggaaaccttccttaangcanntaatttcctcnaaatgcttgatccctgggaaataattcctaaaancctaaacccccg

SEQ ID NO: 8072 - DNA, 414 bp, Arabidopsis thaliana
  unsure at all n locations
  Clone ID: LIB24-042-Q1-E1-D3
aagcgtccgcggacgcgtgggcngacgccgtggggcgccngagtccccgatagattgntcaccatcacntttgtaccttccttgtactacctatggcgtctgctagcttcgttaagcctaacacnnnnnnnnnnnnnnnnnnnnnnnnnnnnnnnnnnnnnnnnnnnnnnnnnnnnnnnnnnnnnnnnnnnngagtctccttcgcgatccgcgccggtgcttactccgacgagcttgttaaaaccgccaaaagcattgcatcccctgggagaggtatcttggagatcgatgagtccaatgcaacctgtgggaagaggcttgcttctatcggcttggataacaccgaggacaaccgtcaggcctacaggcaacttctgcttaccactcctgggcctcggcgattacatctctggt

SEQ ID NO: 8073 - DNA, 409 bp, Arabidopsis thaliana
  unsure at all n locations
  Clone ID: LIB24-042-Q1-E1-D4
ctaatggggaggtttcataaatttcctctcctangtttagttctgttcctcggtctgaccggctcacttatcgccgccaatgagtatgcctgttctagtaccgatatacactttactcgtgccaatttccctaaaggtttcatttttggtaccgcaactgctgcttttcaggttgaaggagctgtaaatgaaggatgtagaggtccaagcatgtgggacgtatacaccaagaaattcccacataaatgtaattatcacaatgccgacgttgctgtcgatttctaccatcgttacaaggaagatatcaagttgatgaaaaatctgaacactgatggctttagattttccattgcatggcccagaatattcccccatggtaggatggagaaaggaataagcaaaagcangt

SEQ ID NO: 8074 - DNA, 433 bp, Arabidopsis thaliana
  unsure at all n locations
  Clone ID: LIB24-042-Q1-E1-D5
attcgcnggtcgacccacgcgnccgattctggttctgctctttgcttcactgatgcttctagctctcttgctttaagacgcgattgtggagctctttgcttgcctcctaggacagttacgtttggatttgtcgataaacctcttgtcaatctcgagcgattaagattatccactttgaagattagagcatcaaatgctactgctgtggagaatggaaagcaagaaggaagtgctgctgattctgataaagttccaactccagttgttataatcgaccaagattctgaccctgatgcaaccgttcttgaagttacattcggagatcgtcttggagctttacttgacactatgaatgcgctcaaaaactggggattgaatgtcgtcaaggcaaatgtttaccntgattcttcnggcaagcacaacaaattgccat

SEQ ID NO: 8075 - DNA, 405 bp, Arabidopsis thaliana
  Clone ID: LIB24-042-Q1-E1-D6
ttggagacgcatcaactcatgatcaagacgtgtttagtttctatccagagggaagattctgtaatggatttgaggaagtattggctcgttatagagaaattgtacctcagcttaagctcgcaggaccaacttcttttgccccgatcattgaaatggcaatgacagtggttgagcagagtagtggccaatatcatgtgttagtgattatagctgatggccaggtcacaagaagtgtcgataccgaacacgggcggctaagtccgcaagaacagaagacagtagatgcaattgtgaaagcaagtacccttcctttgtcaatagtcttagttggggtcggggatggaccatgggacatgatgcaggaatttgatgataacatacctgcccgagctttcgataacttcc

SEQ ID NO: 8076 - DNA, 409 bp, Arabidopsis thaliana
  Clone ID: LIB24-042-Q1-E1-D7
ttaaaacaagtagagtattatttcagtgatgaaaaccttgagaatgatcattacctcatttctttgatggatgaagaaggatgggttcccacaaaaattatagctggcttcaaaagggttaaagcaatgactatggatgttgattttatagtctatgcgttggggttttctaattctgttgaagtgcagggtgaccagatacgcaagcgtgacaagtggtctgactggattcctgcatctaaaaagtcaacctctgcggagacaattggagacggtgacaaagattccccaaaaagtataacaagcggggataattttggaaacccttcaaagggttcttcaaagcctaccgtgtccgatttctcttcagagggagctcagtcatcaagaaccaataattataaaagtg

SEQ ID NO: 8077 - DNA, 409 bp, Arabidopsis thaliana
  unsure at all n locations
  Clone ID: LIB24-042-Q1-E1-B2
ancaccggttttttgggctctggcaagacaacattgctgaatcatatactgaccagagatcatgggaagcgaatagccgtgattgagaatgagtttggtgaagttgacattgatgggtcacttgttgcttctaaatctattggagctgaggatattgtgatgctcaacaatggctgcctttgttgcactgttaggggtgatcttgtcaggatgattggagaattagtcaataccaagaaaggaaagttcgatcatatagtcatagagactacaggattggcaaacccggcaccgattatccaaaccttttatgccgaggaagaaattttcaatgatgtcaaactggacggtgttgttactctagttgatgctaagcatgctcngtttgcatctagacgaggtcaaaccc

SEQ ID NO: 8078 - DNA, 407 bp, Arabidopsis thaliana
  unsure at all n locations
  Clone ID: LIB24-041-Q1-E1-G10
gaatgatccnantccgtttagcttttaacaaaatangaagacatatttatcaacttgatcaacttgagcaagttgcagcagatattttcctcggccaagatctacagttttgagaatggcgatggnatcaggaagacnatctactctaaaccccgacgcacctctttttantccggcagctgtacgacangtggaagatttctcaccggagtggtggcaattggtgacaacttcgacttggtaccctgattactggatcagtcagcagcagcanggcgcggatggtntctattacaacggnagaagaangagaatggtggaggtcatatcgatgtagctggatcntcntccagaatcatttgattttgatgnanagtggnagatttctttgacactggntgctgccg

SEQ ID NO: 8079 - DNA, 406 bp, Arabidopsis thaliana
  unsure at all n locations
  Clone ID: LIB24-041-Q1-E1-G12
tgattctgataacctcaccgacgttgacatatctccgtcaccgtctccacagttcccaaatcaaatcgccacaaattcgccgccattttcttcggagtagagaaatctccacagtcgatcgctgctacaatccatggcagtctacgaatcgtttcaaattacgaacacgagacagttccttcttatgctgtgctcgccggaaaccggagacggcgacggtanaggttgaagatgattctataaggagaattgttcggtatcttctatggactantgaagctgtgtatatactatgggctctttcttctcccttacgctcctggagatccagtttgggcaattagttcagaagacagtgaattctcttttggggactttcnctgaatttcntcctttgtcttgcctc

SEQ ID NO: 8080 - DNA, 416 bp, Arabidopsis thaliana
  Clone ID: LIB24-041-Q1-E1-G2
tttctagcccctcaaagattgatcttaatcagataccaaggccaggttcaagctccagtccaattgtgtatgaaactcgtgtggaaaataaggctaatcctccaccacctactactgttgattatataactagagacactggaaattccagcccgcgttacatgcgatgcacaatcaatcagatcccatgcactgttgatcttctatctacatctggtatgcaactggcactaatagtccaaccaatggcgctttctcatccatctgaagagcctatccaagttgtggactttggtgagagtggccctgttagatgttcacgttgtaagggctacgtgaatcctttcatgaagttcattgaccaaggaaggaagttcatatgtaacttgtgtggatacactgatgagaccctcgtg

SEQ ID NO: 8081 - DNA, 413 bp, Arabidopsis thaliana
  Clone ID: LIB24-041-Q1-E1-G7
caagtagcagttgttcggaggctatctacatgtctcagccactcgtattattctccaatctataaaaattcaaattttcaatctccctttcttaagattaaaagtggcaaagttgagattttgatcgtcttcttcctctggaaatttcaatcgaaactatatcttcagagatgcagaatctgtgaaattgtagaaacgaatttcacatttttttttgaagaaatgacgacgcagatatttcagttgccgttaaagtactgtgcttcgagtttttcttccaccggccaacggaattacggtgcttcttcttcgccgtctccgattgtaatttgtaagagtaatggaatttccgatggtctttgggtgaagcggaggaagaacaatcggagatttgggtagtttaatagttaagc

SEQ ID NO: 8082 - DNA, 420 bp, Arabidopsis thaliana
  unsure at all n locations
  Clone ID: LIB24-041-Q1-E1-G8
acgcgtccgcttgatcggcgcaatgtctacaatggctcttgcattcatcgtgatctttgttttcctatggatttggatgctctcaaagaaggaaagaaaagtaaagaagtacacagaagtcaagaaacaaaaggatccatccgaaacaagtaaaaagctgattactttccatggtgatcttccatactcttcaactgagctgattgagaagctagagtctcttgacgaggaagacattgtgggttcgggaggatttggcacggtttatcgaatggttatgaacgatcttggaacctttgcggttaaaaagatagataggagtcgacaaggatcagaccgagtttttgagcgagaagtanagattttaggtaagtgtcaaacacatcaaatcctaagtgaaactacgttggatactgccgt

SEQ ID NO: 8083 - DNA, 470 bp, Arabidopsis thaliana
  unsure at all n locations
  Clone ID: LIB24-041-Q1-E1-H3
tttacgctnnccgtgccgtccanagattcaagggtcnacccacgcgtccgcaactancttcttctcactctgttttcgtttagagagattttgcagagatgtcgagacgagcaatggtgataaagatgccaatacttatgatactgatttcatcaatggtgatgacgatggtcgagtcttcgagatcagttaataatggtcatgacgattctgagatcttacgaagacacttgctcactaatggcctcggagtcactcctcccatggggtggaatagctggaaccattttagctgcaacatagatgaanaaatgatcaaagaaactgctgatgctttggttaccactggcctctctaagcttggctacaactatgttaacatcgatgattgctgggctgaaatttctcgtgacagcaagggaaatctggtgccaaagaagtcaactttcccttcnggaattaaagcggtt

SEQ ID NO: 8084 - DNA, 381 bp, Arabidopsis thaliana
  unsure at all n locations
  Clone ID: LIB24-041-Q1-E1-H4
agtattgtcacagagaaagcttcagatctagaagaagaagcagagttcataaagagaaacccattttaaaccctagaaatcaagtgtcaatctcggaaaccttctgattccgcaacaatggcagttacagatactgaaagtcctcatcttggggaaattacttgtggtaccttacttgagaagttgcaggaaatctgggatgaagttggtgagagtgatgatgaacgagacaaactgcttcttcagatagagcaagagtgtcttgacgtttacaaggagaaaagtcgagcaggctgcgaaatcccgagctgagcttcttcaaaccttgtcaaatgctaangcgngaactttccancctcanaaggtctcttgggagacaaa

SEQ ID NO: 8085 - DNA, 417 bp, Arabidopsis thaliana
  unsure at all n locations
  Clone ID: LIB24-041-Q1-E1-H5
aagttttcaacaggattcgccggagaatcttcgaatcaacggcggagaaatggctctatcangcctctcatcacgatccaacatcatcactcgtcccttcnccgccgccttcagccgattaatctcaanggacacaactccgatcacaatcgagacttcgcttcctttcacagctcacttatgtgatccaccgtcacgctccgtcnaatcancgagtcaagagcttctngatttcntcagaancatggcgttgatgcgacgtatggaaatcgcagccggattcgctttacaangcgangctaatccgagggttttgtcatctctaggacngccangaagntgtaactataggcatggaagctgcgattacnnagaacngaacgcgattattactgcttagcgtgatcactgtagttt

SEQ ID NO: 8086 - DNA, 494 bp, Arabidopsis thaliana
  unsure at all n locations
  Clone ID: LIB24-041-Q1-E1-H7
aacttttccgccgnccggtacagagtccanaaattcccgggtcgacccacgcgtccgngctggtgtaaagcgaaaattaagtaccgagtcagatgttcatgctcttcacaaagaactggatgaggtttcatgtcctgtttgcatggatcacccacataatgctgttctactgctgtgcagctctcatgacaaaggttgcaggtcctacatctgtgataccagttaccgacattccaattgccttgaccggtttaagaaattgcattctgaatccgcaaatgaccctactcccgaggcgaacttggcttcaagggaacataataacgaatctctatacgagcatggtacagncagtcgaagcagttttcaccgttgagtccgggaaaccgaaggctccttccttggggattccgaatcaactgaaggaaggacgaangagaanttnnaaggaaacaagtttnagntcaacaangataatcacaaaattttggaat

SEQ ID NO: 8087 - DNA, 469 bp, Arabidopsis thaliana
  unsure at all n locations
  Clone ID: LIB24-041-Q1-E1-H9
ctgttacacctgctcacgccgnccngtaacggtccaaaaattcccgggtcgacccanncgtccgncgaacaacagagttccgtaggctttgtgaaattataagaaatcatttggcaaacctgaacaagtacagagaccaaagggaccgacctgacttatcagcccctgagagcttgcagctgtatctggacacaaggtttgatcagttgaaagttgctactgangcttggactttggcaggaagcttttcgctctgttgaagatatctatggattaatgtgcatgggncaaaaaaacgcncaagtcatctttattggatggtttantattccaaattgactganatcttccngggatttcttcctaagccatctttatcaagcttatgcatggtttaagcctgtttangtctgcagaaaanatttcaacaaagaattttaagccaaaagggattttgcatcctaataan

SEQ ID NO: 8088 - DNA, 427 bp, Arabidopsis thaliana
  unsure at all n locations
  Clone ID: LIB24-042-Q1-E1-A10
gaagaanaagatgaacgatgcggatgtgtcaaagcagatacagcagatggtccggttcatccggcaagaagnagaanagaaagcaaacgagtatctccatctccgccgaggaggaattcaacatagaangacttcagcttctcgagtctgccangcgtaagctccgtcaagactatgaccgcaagctcaagcaggttgatatccgcaagcgaatcgactactccacacaactgaatgcaagtaggattangtaccttcaagctcaagatgacgttgtcactgccatgaaagactccgcagctaaggatcttctccgtgtctccaacgacaagaacaattacatgaagcttcttaangagtctcatcattgagagtttgctgcgcctgaaagagccatcaantgctgctgganatgcaagagaaattg

SEQ ID NO: 8089 - DNA, 426 bp, Arabidopsis thaliana
  unsure at all n locations
  Clone ID: LIB24-042-Q1-E1-A11
aaaattgtactggaatgagcataagctctctatttacagcaaagtgtgcacaacggctanaaatcagactcaatcattgtcacctcctgatgtttctcgagttggttatcaagcacccatggggggccatggagcgccagatagcggctccaatgatcaagataaatcaactgaagattcttcagcggataagtcagatggagaatctcaatcaagtttggaaaagggttgtgataatgatcttggtcatcctctataagatcaagacgcaccgtcatcttcctcatgcaatggaagtaaaggtttcctgtctcaccaaattgacaccaaagacctgaaggacaacgacgcgtacaacttttatcagtctgttgatggtcagcacattanccttcacactttgaatgtgaagtgccttctgcatca

SEQ ID NO: 8090 - DNA, 410 bp, Arabidopsis thaliana
  unsure at all n locations
  Clone ID: LIB24-042-Q1-E1-A6
acgcgtgggcggttgctaaagtttggaagaaaaagccgcggagcggaaagcttgatgatggattgggtatctgtaacgacttctgaaggagatgatgaggttgaagataggagagactttgcggatagatcatcagaggatttaagaaagtcgagaatgggatctctacaaaatcatctctctgaggatggattcaatgagagtgagttccctgaacaagcttctaacaccgagctgaaagatgatcatcaaatgtctggaagcaactttaaagcgcaaaagtcattcttctcgctctccacattccgcggcaaaggaaatgattcgaagccaagatagagagcagacacagaaagaagaaacttggatgtggatcaagttgcgtgangtaaagagagaaaaagagacag

SEQ ID NO: 8091 - DNA, 414 bp, Arabidopsis thaliana
  unsure at all n locations
  Clone ID: LIB24-042-Q1-E1-A7
gaaaggtatcccatttgctaaagatcaagcaatgggtgtttacagctccatttggaatgcagatgattgggctacacaaggaggtcttgttaaaactgattggagtcacgctcctttcgttgcttcttacaaanaattccaaatcgatgcatgtganattccaacaactactgatctaaccaagtgtaatgganaccagaanttttggtgggatgaaccaactgtctctgagcttagccttcatcagaatcatcatcttatttgggttcgaagctaatcatatnatttatgattattgttttgatgctactaggtttcctgttactcctcttgaggtgccaacatcatcngtcatttgtagttnatagattagtctngagtaanaatggntcanganaacacatgtggtttatt

SEQ ID NO: 8092 - DNA, 407 bp, Arabidopsis thaliana
  unsure at all n locations
  Clone ID: LIB24-042-Q1-E1-A8
gattgcctacaccattgcttcatgacaaatctccttttganagtgcttactancaaaatgcctgattttaanggtcttcgtgtggtntggctgtctttgttacagttctacatcaaccacaaaatcgagataagtttcaaccaagagctaaggcgtgtgtgtttcttggttatccaccaggtgttaagggttatcgacttttggatttggnaaccaatatcatatacntctcacgcaatgttgtttttcatgaagacatttttccatttgctaaaagtggatctactgtncttccngantattttgctactgaaacatcnaatgttgangcatcntctacngaagcatctacntctgaagcacctgcagttgtgaatgattctgtcactccatccaaaatcaancct

SEQ ID NO: 8093 - DNA, 416 bp, Arabidopsis thaliana
  unsure at all n locations
  Clone ID: LIB24-041-Q1-E1-F6
tcgacttggaagactttctatccaaggattatggttttactgtcagcccatgatgggatccatgcgcgcattggctgcagtaattcagcagtgcttcaacgaagcagtttgtgggttctggtgttcttaatctcttgcaaagtcaggctaaagcgatggctggtgataattcagtgaggtcattgttagagaaaatgacggagtgtgcaagcaacgcatacctaagcatattggaaaggtgggtctatgaagggatcattgatgatccgtatggggaatttttcattgccgangaacaggtctctcaaaaaggagagcctcagtcaggactctacagctaaatattgggagccaaagatacagccttaaggatactattcctggnttcntancaaacattgctgcaacaatattga

SEQ ID NO: 8094 - DNA, 415 bp, Arabidopsis thaliana
  unsure at all n locations
  Clone ID: LIB24-041-Q1-E1-A6
tctcagacaaagcagttatatcccggaacttctactggctgcatctgcctggaaaaaattacacactcttggagccgtacaggaagaagcaaatacctctcaagatcacttgcaatgcagttatggtgggttcaagatatgagctggaggtcaatgttcataacacatctagagctaacttagccaaaaacgttgtccaggaagacgaaaaacgtgatctggggttgctccagaaactctttagtagatgtgttgtttctgcagatagcaaccgtggtttgaaaggtagtggaaatgaagggatcggattcaggagttgctttcttccttcgtttctcagttcacaatgcagagacagagaaacaagatacgaggattctaccagtacactactcagacanctatttctcactag

SEQ ID NO: 8095 - DNA, 447 bp, Arabidopsis thaliana
  unsure at all n locations
  Clone ID: LIB24-041-Q1-E1-A9
gtntttccgggccgtacggtcatgaattcccgggtcnacccacgcgtccgancacgcgtccggcgcagaacaaggtcacgatctccatcgaaaagtaagcagcgagtcagtggattcgatatggcacctccagcctctgcaatgttagctgctggtgctgctgttacaggccaagttcctcccgctccaccaactcttcctggggctggaatgtttcccaacatgtttccattgccgactggacagtcatttgggggactctctatgatgccaattcaggctatgacacagcaggcaactagacatgctcgcagagtctatgtcggtgggctttcccctacggcaaatgaacagtctgtggctacattttttagtcaaagttatggctgctgttggtggaaacactgctggtccaagtgatgcagttgttaagtgtcnacataaacc

SEQ ID NO: 8096 - DNA, 467 bp, Arabidopsis thaliana
  unsure at all n locations
  Clone ID: LIB24-041-Q1-E1-B9
acgccgnccgtaaacggtccanaaattcccgggtcnacccacgcgtccgngaacttaacaggggacctagagctaagggcacaaagaaccagaagggaaatctagatgatagcttagaggttaaggagcagactggagaatcaaatgtaactgaggttggggaggcggataacacatgtgttgttcctgacagagaacagtacaataaacgaagatttcccagtggattatgcaaatgccatgttctttatcatcaagtcatacagtgaagatgatgtgcacaagagcattaaatataatgtttggggctaagcacaccaaatggaaacaaggaagcttgctgcagcataccaggaagctcaacagaaagctggcggctgtcccatctttctgtttttctcggtcaatgcaagtgggacaattttgttgggtcttgccngaaatgacaggaccagttgattttcaac

SEQ ID NO: 8097 - DNA, 420 bp, Arabidopsis thaliana
  unsure at all n locations
  Clone ID: LIB24-041-Q1-E1-C10
ttcccgggtccnacccacgcgtccgaaaaaagggtttttgtgttcttcgatattatctcttattactattaggctattatcatcgccttattggggaaaaagcttcaaacttttatataaagtctcttcctttttctttctttctcggtggaatttgcagcaatggaagataaaccattagggattctcagggttcatgtcaaaagagggattaatcttgctattcgtgatgccaccaccagtgatccttatgttgttatcacattggctaancagaaactgaagacgcgtgtgattaataataactgtaatccagtgtggaacgaacaactgaccctttccatcaaagatgtgaatgatcctatccgtctgacggtgtttgataaagatagattctcgggagatgacaaaatnggtgat

SEQ ID NO: 8098 - DNA, 406 bp, Arabidopsis thaliana
  unsure at all n locations
  Clone ID: LIB24-041-Q1-E1-C12
gaatttgaaggctttcaagcaaggtgctggttctagttctacagagccacttctcaaggattcgactggagccatttccactgatatggaagatgacatagacgtgcaagaggaaagagacagggtgatttcggggttgtcagacaacacgatgctctacttacagaacctgaggaaggtctatcctggtgacaaacatcacggcccaaaagtagctgtacagtctttgactttctcagtccaagcaggagaatgttttggctttctagggacgaatggagctgggaagactactaccttgtctatgttatctggagaagaaactccaactagtggaactgccttcatctttggcaaangacatanntanccaatcccnaagctattcgtcagcatattggctact

SEQ ID NO: 8099 - DNA, 455 bp, Arabidopsis thaliana
  unsure at all n locations
  Clone ID: LIB24-041-Q1-E1-C3
ggtccaaaaattaangggtcgacncccgcntccgaaancnnttcacttgtttcaacgaatctgaatctcagagcaacccttctccgaccgagtctaaggtatgttcagattaccttcctgtctttaagtacatcaatgacatgttgatggaagaagatcttgaaggtcagtcttgtatgttggaagacagtttggctttacaagccgcagagagatctttcttcgaagtgcttcaagatcaaactccaatctcgggtgatctagaggatggttctcttggaaacttcagttctataacgagtttgcatcaacctgaagtttcagaggagtcaaccagaaggtatcgacatanggatgatgatgaagatgatgatcttgaanagtggaaggaaatcgaanctccctgcgatttctacggtggatgagttagcanagaagtttgaaggaagtgtttg

SEQ ID NO: 8100 - DNA, 459 bp, Arabidopsis thaliana
  unsure at all n locations
  Clone ID: LIB24-041-Q1-E1-C4
gggnccggtcaaaaatcaacgggtccacgnccgcntcngnaggttncnanccccgcaaagatngntcttaancaganaccaaggccaggttcaagctccagtccaattgtgtatgaaactcgtgtggaaaataaggctaatcctccaccacctactactgttgattatanaactanagacactgganattccagcccgcgttacatgcgatgcacaatcaatcagatcccatgcactgttgatcttctatctacatctggtatgcaactggcactaatagtccaaccaatggcgctttctcatccatctgaagagcctatccaagttgtggactttggtgagagtggccctgttagatgttcacgttgtnagggctacgtnaatcctttcatgaagttcattgacnaatgaatgaagttcatatgtaacttgtgtggatacactgatgagacccctcgt

SEQ ID NO: 8101 - DNA, 441 bp, Arabidopsis thaliana
  unsure at all n locations
  Clone ID: LIB24-041-Q1-E1-C5
attcccgggtcnacccacgcgtccgnggacgcgtgggctttgttgaaaaaacaggctaagaggtatcaagctctttcagggaagatcgatgatctatgtagaagaatgcagagtagtgatccgtgcgatgctacattaggacctgagttcaggacgcaaagacaaaacgagtttctgctcgagtgtttcagacttcagcaacgggcatcggagacagggcagaagctagtttcattgcagacggaaatcaccaggagtaatcaaggagatcagttaagccaagccaagatgaacacagggaggtcattggatttgatcaagaacaacttgaaagaagttcagagaaacttggagatttggctggctagaattattggagatcttgaacgtatacttgctagagacggggcttcacgtgtaagagaattctacgttgctcga

SEQ ID NO: 8102 - DNA, 419 bp, Arabidopsis thaliana
  unsure at all n locations
  Clone ID: LIB24-041-Q1-E1-D3
acgcgtccggaaacagagagcattatcaattattaacaattacacannnnnnnnnnnnnnnnnnnnnnnnnnnnnnnnnnnnnnnnnnnnnnnnnnnnngctttggccacgacggcaccgttagctccggtcaccagtcagcgaaaagtacggaacgatttggaggaaacattaccaaaaccatacatggcaagagcattagcagctccagatacagagcatccgaatggaacagaaggtcacgatagcaaaggaatgagtgttatgcaacaacatgttgctttcttcgaccaaaacgacgatggaatcgtctatccttgggagacttataagggatttcgtgaccttggtttcaacccaatttcctctatcttttggaccttactcataaacttagcgttcagctacgttacacttcc

SEQ ID NO: 8103 - DNA, 473 bp, Arabidopsis thaliana
  unsure at all n locations
  Clone ID: LIB24-041-Q1-E1-E2
gtttacgcttnccggtgccggtccaaaattaacgggtcnacncacgcgtccgcgctggcggcatgcttaacacatgcaagtcggacgggaagtggtgtttccagtggcggacgggtgagtaacgcgtaagaacctgcccttgggaggggaacaacagctggaaacggctgctaataccccgtaggctgaggagcaaaaggaggaatccgcccgaggaggggctcgcgtctgattagctagttggtgaggcaatagcttaccaaggcnatgatcagtagctggtccnacaggatgatcagccacactgggactgagacacggcccanactcctacgggaggcagcagtggggaattttccgcaatgggcgaaancctgacggagcaatgccgcgtggaggtagaaggcctacgggtcctgaacttcttttcccagagaagaagcaatgacggtatctgnggaataagcatcggc

SEQ ID NO: 8104 - DNA, 381 bp, Arabidopsis thaliana
  unsure at all n locations
  Clone ID: LIB24-041-Q1-E1-E5
tttatcgattctacaacatattttgtttaccatgatttgatagattttggaagatgacattagggttgttattcgggattggaagaacattccgaagaaagagagcttcttcgcttgatattctctctcccaaacgagctcccagagacttttacaagggaaaaaactgtaaacctcctggtttccacactcgtaaagctgaaaccatatgtatctcagtgccctttagacgtcaacaaaacaaacgagtcaactgaagcttccaagtgacgaagttagaagaaacatgtttttaactttgaagtcttcattaagcttaaagttaaggactgtgttattctatcatccttagatatcttttgttactcaaaagatangggc

SEQ ID NO: 8105 - DNA, 361 bp, Arabidopsis thaliana
  unsure at all n locations
  Clone ID: LIB24-041-Q1-E1-F11
caatcgaaatcccaaagatcagcgatggtgactctaaacgcttcttctcctctcacgaccaagtcgttcctcccctaccgtcacgctcctcgccgtccaatctctttctcccctgtcttcgccgttcattcgactgaccccaagaaatctacccaatcagcctccgcttcggttaaatggagtctagagagttggaagtcgaanaaagctttgcaattgccggattatcctgatcagaaggatgttgattcggttctacangangctttcttcttttcctcctatagttttcnctggtgagggtaggaaactataggataagcttggtcaagcngntatgggtcaaggnctttatgcttca

SEQ ID NO: 8106 - DNA, 408 bp, Arabidopsis thaliana
  unsure at all n locations
  Clone ID: LIB24-041-Q1-E1-F12
aagcgtccganagaagggagaagaatctcgcgagagacagaaagggacgattattggttggtgaaatttagagcatttttgggaattgggtaaacttttcgatggcgacttcgaagcttcaagctatttggaatcaccctgccggacctaaaaccattcatttctgggcaccaacgttcaagtggggtattagcattgccaacattgcagactttgccaaacctccagagaaactttcctatcctcaacaaatcgcggttacatgcactggtgttatttggtctcgttacagcanggtaatcaatccgaaaaactggaacctcttcagtgttaatgttgctatggcanggacaggcatataccagcttgctcgtannatannacacgattatgcaaccgaaagctnga

SEQ ID NO: 8107 - DNA, 421 bp, Arabidopsis thaliana
  unsure at all n locations
  Clone ID: LIB24-041-Q1-E1-F4
attttcatggcggcgaggtcaccggacgttatataatttgtatcccaaatcaaaattctgagaaggaagagaaagcaatggaggacgaattggaaggtctacgagctcattttcctgtttcgttcggtaagacatcgaaggtttcggcgtcaactgaagccattcacagcgcaactcgccgcaccgatgtagccaacgacgccggagtttcgtcggatatcaccacgaagaaacctgattccgataaatctggattcccgtctctatcttcctcatctcaaacctggctccgaagtgttcgcggtccgaatcgtaaccctaacagctccggtgatgtagcaatgggtccgccaccgccaccgtcatctaaacggacgcaagaggaagangaggaggatgaaagaagtttatgatggggacc

SEQ ID NO: 8108 - DNA, 413 bp, Arabidopsis thaliana
  Clone ID: LIB24-041-Q1-E1-F5
ccacaacaatgcctcgcctacaatgcctaacaatggcgacttcactaattctgctgcttcaagctctgagtttagtgagctcaactattctgtcccgggccgatcggatcacccgtttacccggtcaaccccgagtcgggtttcagcagtactcaggttatgtcactattgacgagaagaaacagagagctctgttttactacttggctgaagcagaaaccaaacccatctctaaacctctcgttctctggctcaatggaggacctggatgttcatcattaggtgttggtgcattctctgagaatggacctttttagaccaaagggatcaatcttggtgagaaatcaacacagctggaatcaagaggctaatatgttgtatcctggagacacctgttggagttggattttctt

SEQ ID NO: 8109 - DNA, 421 bp, Arabidopsis thaliana
  unsure at all n locations
  Clone ID: LIB24-041-Q1-E1-A5
tcnctcatctttctctctctgtcggcgatgcagaggatatcgttagactcatcagcttcgaagctccatanctatggangacgaaaggacgatacctacgatattgatgacttgaaaccagcttcctcttctccttcttcgtcgtcatccgcagtagattacgacgatcacgagctcaaagactttaagccgcgacggttatcacncgttgcaatctccntttgttacgacgaatcagaaacaagagaagcttgttcacttcattccgattctcactctcatctgctttatcatcctttacctcacttcttacgctccgtctcaatcanatttggctcangtttaatggattcatgcgtccttcnangacatcnanantcatccgaacgaaaatggggacgaaaattttctgggattttag

SEQ ID NO: 8110 - DNA, 375 bp, Arabidopsis thaliana
  unsure at all n locations
  Clone ID: LIB24-038-Q1-E1-A9
acgcgtccgnacttgctcttggncgctacggtctcggcatcngttccagggctcatcgaactcgtcgattcgaaaaccatctttgggaacgtagccgaactcttagagaaagagaaactttccatcaactacgccaactgcagaagcnggcaccttggtgttgagacctctaacatcatanacttcgacacggtgcccgcaaattgcaaagactatgttgangactacttgatcacttccaaacagtaccaatacnactccaaaaccgtgtgcanagaggcttatttcnatgcnaaaggacttgccctaaagaacgacaccgtcaatgtttggatctttgacctaagatgataccctcctctcnaagtattccct

SEQ ID NO: 8111 - DNA, 431 bp, Arabidopsis thaliana
  unsure at all n locations
  Clone ID: LIB24-038-Q1-E1-B11
cgcgtccgnaaatttttgttttttcttcggtgagacgaagaagataccatgggtcgacctcccagtaatggcggtccggcgtttcgatttatcctgcctgaggtaacggagatggaagcaattttgctacagcataatacagcaatgccaggtcgacatattcttgaagctcttgctgataagtttagtgaatcacctgagcggaaggggaaagttgttgtgcagttcaagcaaatctggaactggtttcaaaataggcgatatgctttacgagcaaggggaaacaaagctcctgggaagctaaatgtatcttccatgccgcgtatggatttaccaaatcagatgagaagtgtgattcaaccattatcaagttccctaaaaccactcatatgactgggaatttaccggcatgacgcctggccccttctggt

SEQ ID NO: 8112 - DNA, 444 bp, Arabidopsis thaliana
  unsure at all n locations
  Clone ID: LIB24-038-Q1-E1-B3
cccgggtcnacccacgcgtccgaactggaaaacacaaaaacagacgccacgatggatgaatgatttcgcaaatcgtcgagattttggaattcgatgaagagcgtatcaacctgggctttgtctttcttctccgacgaactttctcggcgagctgtttccgattgttatttatggaccaccgcgatttcgnnnnnnnnnnnnnnnnnnnnnnnnnnnnnnnnnnnnnnnnnnnnnnnnnnnnnnnnnnnnnnnnnnnnnnnnnnnnnnnnnnnnnnnnnnnnnnnnnnnnnnnnnnnnnnnnnnnnnnnnnnnnnnnnnnnnnnaaggatatccaaactagtctctgatgaagatttgaaatttctgatcgaagaatttgggaggaggaaacaaatgattccacggagatatgggaacatgttattcacaaaagcaacgatngca

SEQ ID NO: 8113 - DNA, 476 bp, Arabidopsis thaliana
  unsure at all n locations
  Clone ID: LIB24-038-Q1-E1-C10
ctgtttacgctgnccggtgccggtccaaaattcacgggtccacccacgcgtccggaggtggtgaaaatggctcgaaacgactcgcgatctacgtcgccgtctcaccgccgacggtactctcgctcgcctgtgactcatcgtagcagccgtcgtaccangcgcgaccgcanccgctcaccctacacatcaaggcataagaatagcanatctcctgcaccaaggcaacaccaaagggatanaagtagttcattgtctccttccgagcatagaattgcgattgaagtgaagaaagaacaggaagacaaggcaagattgcagcatgaggcggagctcaagcgactagaagaagagactgcacagcggattgaggaagcagtaaggaaaaatgtagaggaaaggatgaaaaccgaagaagttaaagaagaaattgaaagacggncaaaggaancttatgagaagatgtttcctgacgtggg

SEQ ID NO: 8114 - DNA, 473 bp, Arabidopsis thaliana
  unsure at all n locations
  Clone ID: LIB24-038-Q1-E1-C2
cttgccgcccggtcnaactaaccgggtcnacccacgcgtccgcaccanttcacggatcaatcctgtgtttgaaacaatgggtgttgaagttgtaaactctggtggatttgaggttgctccggctcctttcgaggggaaacctgagaagaacgggaagctggaccaaggaaaaggagatgatgcccccatcaattttggttcagtcggtgagctaccaaagaatgccgaagagaataataacaaagtggtcaactctgatgcacccaaaaatgcagcagaagagtggcctgtggctaagcagatccactctttctaccttgttaaataccgttcttacgctgaccccaaaattaaagctaagcttgatctagctgataaagagcttgaaaagttgaacaaagctcggactggagttttggacaagttgagagctaagagggccgagagatcagagttatttgatctgctggacc

SEQ ID NO: 8115 - DNA, 433 bp, Arabidopsis thaliana
  unsure at all n locations
  Clone ID: LIB24-038-Q1-E1-C9
gcacgcgtccgnaattctggtccttcgataatggcggcctcctgcttcgcaattcccttatcttcttcttctcgatcgtctcacaatgcaattcccaaatacaaaaccctaatcnnnnnnnnnnnnnnnnnnnnnnnnnnnnnnnnnnnnnnnnnnnnnnnnnnnnnnnnnnnnnnnnnnnactcttctctttctcgtccctttgnagctcaaccacttcaaatcaaggtctcttcttcagaattatcagttctcnnnnnnnnnnnnnnnnnnnnnnnnnnnnnnnnnnnnnnnnnnnnnnnnnnnnnnngtgtcgtctccaaagcagaaccagtaaagaaaccgagaccttgcgaagctctacgtgtgtaatatccctagaagctacgacattgctcaagcntcttgacatgtttcaagcttttgggaacng

SEQ ID NO: 8116 - DNA, 450 bp, Arabidopsis thaliana
  unsure at all n locations
  Clone ID: LIB24-038-Q1-E1-D11
ctgttacgcttnccgtgccggtccaaaaattaacgggtcnacccacgcgtccggtttttgtttctggtttaataggagtaaacaagcctgaaagagattacaacatacaaggatcatcaataaacaaactctttaccataacaggagcagctgcaaatctagttttcgcattcaacacgggaatgctcccggaaatacaggccacggtgaagcaaccggtcgttaaaaacatgatgaaggctctgtattttcaattcactgttggtgttttacctatgtacgcggttacattcatcggatattgggcttacgggtcctcgacatcgacttatctcttaaacagcgtcagtggacctgtttgggtcaaagcactcgctaacatttcangcttttctccaatctgttatctctttacatatttttgcaagtccgacttatgagtanatggga

SEQ ID NO: 8117 - DNA, 487 bp, Arabidopsis thaliana
  unsure at all n locations
  Clone ID: LIB24-038-Q1-E1-D3
ctgttactttgccggcccggtccaaaataaacgggtcnacccacgcgtccgcnttcntctctctctctctcgtttggatctggccgttgattttctcccgacggcgataagtttgttgcatgaacgccggtgatggcttctgtttgcgtcaacaatgttactgtttctcaggattttcctacttacggatgtttcaatccacgagcttctttcagccgtgacgacggtggtcggagttctggatccgtcgcatcggagattccgaaggaggaaacagcagtcggagctggtgatttcgagtttaggttagaggaggatccagtcggaatgctcccagccgatgagcttttctccgacggtaaactcgtgacgaagcagcaacaacaacagacgacggagatcggcgggaaatgcangaggatggaagtcgtggagattgagatntncggggggtggcgaaaaantgctcgttttctccnaagggggc

SEQ ID NO: 8118 - DNA, 457 bp, Arabidopsis thaliana
  unsure at all n locations
  Clone ID: LIB24-038-Q1-E1-E1
gttattttgccggccccggtccnaactaaacggggatcgtnttgttaccaactacaagaaagatggcaagcaatgatcaagcgacaagggtttatccagaatgtgtcaactccaccaagaaacatgcctccggtgacagaaatgggaagtgctgagaagagagggaggaaaggaggggaagcaggagaagaggatgtagacattggagaagatataccagttgaggattatccatcagtggagattgaaagggatggtacagctgccgctgctagtggtggctctagttcttctggcagcttcagttcgagtggcagttcttcttctagtgattcagagtcagggagttcatcangaagtgattcggatgcggatagtgtgcagtctccatttgtggaagcaaaagaaacccccgtaataattgttgaccgtacgttgaaatatgcttaacanctcc

SEQ ID NO: 8119 - DNA, 466 bp, Arabidopsis thaliana
  unsure at all n locations
  Clone ID: LIB24-038-Q1-E1-E3
cgttattcgnccgcccggtccaaactaacccgggtcnacccacgcgtccggaaagataaagctagaagagaatcgacattacgaatcttttgttccagatcgtgagagaggaggagttggaagaatgaagatgactattgggtctttgttccaaccctaattttgcagattaatttcgtttttgttgatttctgttttgggtttgcgttgctgattccggtggattaaagggttctttttgganagcacaaatttgttgggtttttttttggggaaagagaattaaaattttctcctttagagtcggcgtttgggttgagagagattattacaggtttttagggttttggatttctgaattggtgattancgatggagcctcgtgtgggaaacaaatatcgtctcggccggaaaattggnagcggttcatttggagagatctatcttggtactcatattcaaaccn

SEQ ID NO: 8120 - DNA, 485 bp, Arabidopsis thaliana
  unsure at all n locations
  Clone ID: LIB24-038-Q1-E1-F1
tattttgccgccccggtccaaacanaacgggtcgncccacgcgtccggnccnncacactcgataatgatccatcaagctttagctctccctcgtcctattctcaccagaggatttgtgtcnaatggtggcggtatgtttgtccatcaatgtcgaacaaaaacccctagggttacattttgcgctgctgatgatcagatagccagttccaagtcgaacaagacaaggaaagtagtggagcatgtgtgtttactcaaagcaaaagagggtttatctgaggaagtanaaaaagatatgcttgactatctttacacaactcaataccaaatgagaggcattgttgctatatctgttggntgtatccgtgatacaaacaatggaatatttcacgcacgctctctacatgcgattccaaaangaangaaagacctttgacaaggttctatgaggaaccctttcctcttgaaagttctcaaatgaaanatgt

SEQ ID NO: 8121 - DNA, 426 bp, Arabidopsis thaliana
  unsure at all n locations
  Clone ID: LIB24-038-Q1-E1-F12
taaagatnctattgatgcctctgaaagtgggaattaaaacaaaagccgggcttgagtcctcctcgtgngtggttttgatcctgatgatccanatcaacaaatcntcgctgaagatatatttgacgaatatggagggttccttgagggcagcatcccaatagaaatactgaagagtatgtcgtcggataagaaaagaanatccaaaaagaacaanaggcacaagaagcattcatctcggactgttgaggaaactgatgaatcttcaacaggctcanaacatagtanagagaagaggggatnaaagaagcgcaagaaacttaagaagaagagcangaagcantatgattctgattcactctccttttgaacggttcaangctctggatncttaccgtccaanttcgggcgaagacacatcaaggccnt

SEQ ID NO: 8122 - DNA, 452 bp, Arabidopsis thaliana
  unsure at all n locations
  Clone ID: LIB24-038-Q1-E1-F4
ctctgnccgggacgtaccgaaaccanaaattcccgggtcnacccacgcgtccgaatttcttttccatgactttcctcttatcaagaacatttatttctctcactctcagaccttcttgttcgatttccatggcgaatttaacgacgaacgctaaaactcgcctgagaggtgttgtattcgatatggacggaaccctgactgttccggtcatcgatttcgccgcaatgtatagagctgttcttggtgaagatgcttacaagcgaatcaaagcagagagccctagtgggattgatattctgcatcatattgagtcgtggagtcctgataaacagcangaaggcgtatgaaatcattgctgattatgagaaacanggaatagataagcttcaaatcatgcctggtactgctgaactatgtggcttccttgattccaaaaagataaagaanggggc

SEQ ID NO: 8123 - DNA, 475 bp, Arabidopsis thaliana
  unsure at all n locations
  Clone ID: LIB24-038-Q1-E1-F6
tatttggnccggcccgtgtccanactaaacgggtcnanncacgcgtccgnactgtcccaacctcacggcttctctaacaatcccttcatatttaccattttgccactacactagacaatttcgtccttctcatttccgatcatctgataaaaacccgaatctcgtttctatcatccgagcaaaacccagaatttctcattcgcttaggtgctttgtatcatcttcaatggcgactcctcctccgacgcagagcagcgaaaccaaaccttactctgttctttttgtctgtctcggaaacatttgtcgcagcccagcggctgaaggtgtctttagagatatcgtgaagaagagaggtctcgattccaaattcancattgattccgctggaacaattgattatcacgaggggaatatggcggatccaagaatgagaagtgctgcgaaacgtcgcngggattgagatnacatcactatc

SEQ ID NO: 8124 - DNA, 477 bp, Arabidopsis thaliana
  unsure at all n locations
  Clone ID: LIB24-038-Q1-E1-A8
atttagccggccgtaccggaccanaaattcccgggtcnacccacgcgtccgttcagctgtgccacaaggagtattggatatcatacagtccatgcctcatgatgcacacccaatgggagttcttgtgagtgccatgagtgcactttctatctttcaccctgatgcaaatcctgctcttagtggccaagacatttacaagtcaaaacaagttcgtgataaacagattgttcgcattctcggaaangcaccaacaattgcagcagctgcttacttgangacggcaggcaggcctcctgttcntccntcggccaacctttcttantcagagantttcctctatatgctggattcaatgggcaataggtcttacaagcctaatcctcgtttggntcgagtgctggacatcctcttcatactgcangcttgaagcangaaatgaactgctcctactgcngctggctccgggcatcgntgcct

SEQ ID NO: 8125 - DNA, 478 bp, Arabidopsis thaliana
  unsure at all n locations
  Clone ID: LIB24-037-Q1-E2-G11
gtacngctccaaaaattcccaaggtcnacccacgcgtccgnaatctccctcaaaactcataaacatattgctctcctttgttcatttctgggtttacgcttctttcgactttatgggtttcggagcttagttttactacaatttcgtttggaaaagagctcttatttgatgttcatggcgtctctctccttcacccaattcttatcattccccagatgcaatgcagatgttccttgtctgctccagtcgcatggttttgtgaagtttagaggtgaaagatggaatgggaaacaaagcttttctaaggctgctggtangagaaagttatcaagagtcagcacctcttgaagaagaaggtaatgatggaaacggtgcggttgtgggaaaagaaaccatctaaaagtgttaagagaacaacgaagaagaaaggtgtggttaaaggattaaccattagaagaaatttccgaatttttggttg

SEQ ID NO: 8126 - DNA, 520 bp, Arabidopsis thaliana
  unsure at all n locations
  Clone ID: LIB24-037-Q1-E2-G2
ggtcgacccacgccgtccgcttnaaaaggtctattattttantccgctcatctcccctttttaagaatctngttttgaaccttcatgaaagctttgcccgtnaaaaaatcaacaaactccgttgactcctggcaaaaccctcaatngtgctaatttcaagtttaangtccttttgagcccaaatgggcggggtaagatatgtgaaaccaaanctccctgagaaagcttcaagggggaaagtatcaangcaatgggttgtttgctgtaatcntgggattgggatctctcgtttcttgggnacagtatgctcactataagcaagattactactacaaagtttttccgggattatcaaccttcaaagggtactcacacttgtataccaancgttttgcgcctggnacaatccttgantctcgcataccacgaatcgaaaaatcaatactcgaaaaacgtaacccccattggggtaaaatccaattcccaantattccaaaantccttggcncaaaagttttgg

SEQ ID NO: 8127 - DNA, 582 bp, Arabidopsis thaliana
  unsure at all n locations
  Clone ID: LIB24-037-Q1-E2-G6
aactggtttctnctttgcccctggcccgtnagcgaaanccggaaattcccggggtcgacccacgcgtccgcccacgcgtccgttcttttactgagaatcctttgggagacttgattacttttcatcatcctgagtttaaagggttttgggctggagataatatggggtgggttttgattttgaataaaagacgggtnacaaagcaagaagaaagaaaacgggagaatccttgggcaattgcctggaatcctcataaaacatgggccgctcctaaaagtgcgtcgtcagagcgggatcttcacacttcctggtaatgggagcttcacaatctgcaaacaacttcactaagaatgcaaggcatcctctgttcaaacaacagcanacaaggagaccaaaaaccaactgcataattgtcagatgtttaactaaaaaacaatgttgtcttctaacgacaagagcatccttggaacgcgatgtttgaancagncttcaccttccgtcntcaacagggagaaatcctatgaanaaatgggtgttagaaaaaaccattgggccnttgcntccgaaccantttgtccccaa

SEQ ID NO: 8128 - DNA, 478 bp, Arabidopsis thaliana
  unsure at all n locations
  Clone ID: LIB24-037-Q1-E2-G7
acgcgtccgctcaatcgctagaaaccttactcacgattccttctctccgtttcttaactgtancnacaanacngacccttccgtnaaancnccganggttncaacggtaatncgccgtctccnaantccggattcctccgttcgctcggcttgcgccntcgcnacggctgaaatgtcggctcatgttacaaaggcagccttttgcttccgtcgcgaanccgttgattganactttgattcaggaaggtgattcgaatctgcatatcggagcggcgttgtgtttagcggcgtctgttgatgcggngacggatccggaatcgggagcatttgagaaaatcgttgcctaagattgggaaattgcttaagagtgatggttttaaggctaaagcctgcgtttgtttgagtgccgtcgggaagtaaaattaccgccggtggtgcnggaactaaaaccggttttgggattgggttaattccgggt

SEQ ID NO: 8129 - DNA, 230 bp, Arabidopsis thaliana
  unsure at all n locations
  Clone ID: LIB24-037-Q1-E2-G8
aactgttcgttgcccggccgnngaaaccgaattcncgggtcgacccacgcgtccgcggacgcgtgggtcggaatccagcttggtgttgttctgatagggattttgattttccagtttgtgagcgccaaatttacatgagagagatatgaatgaataaacaaaccaacggcactgtagactcnnnnnnnnnnnnnnnnnnnnnnnnnnnnnnnnnnnnnnnnnnnnnnngg

SEQ ID NO: 8130 - DNA, 463 bp, Arabidopsis thaliana
  unsure at all n locations
  Clone ID: LIB24-037-Q1-E2-H10
ccaggtccacccacgcgtccnaaacgganagaggcgganaggagaaggaagacggcgtgaagcaatggtgtcgctgaagatccagaagcggctcgccgcatccgtaatgaaatgcgggaaaggaaaagtttggctcgaccccaatgaatcgggcgatatctctatggccaattccaggcagaacattangaagcttgtgaaggatggtttcattatcaggaagcctactaagatccactcacgttctcgggctaaggctttgaacgangccaagcnaaagggtcgtcactctggatacggtaagagaaagggtacaagagaagcaanggctaccaaccaagattccttggatnaangagaatganggtgttgaggcctttcctgagcaanttaccgtnagtcaaagaagattgattacgcacatgtaccatgacatgttcatgaaagttgaaaggtnatgttt

SEQ ID NO: 8131 - DNA, 485 bp, Arabidopsis thaliana
  unsure at all n locations
  Clone ID: LIB24-037-Q1-E2-H11
aactgttacgcctgggccggtaccggtccnanaattcccgggtcgacccacgcgtccgtaagaacaaccgcgttacaaacttctctcgtctttcctggaaatttctgtccacaaatattagtctttaattttcggtatgaacactgacccttccttgatctattgatctttgtcgcagtatttattaagattttatctctatcagacggctcttttgattaatatttttccgactcttatttcttatcttctttgctcagaaacttctctcaggcgaattcaagtttcatagttttggtctagtttttgtccaccgatctatctctttaggtgagttttgtttatttttttcggctttatagtttgtctacgcttcatgttgttgttgttaataaaatcctggtgtttgaattgaggccttgatcccgttccttccgaattaaaaaagtgttaatccgaattcaaatctttaaaatncggggttg

SEQ ID NO: 8132 - DNA, 428 bp, Arabidopsis thaliana
  unsure at all n locations
  Clone ID: LIB24-037-Q1-E2-H12
cggcccganacattccaaagtcnacccangcgtccgantgcggcngatcaagagctgagtgaaaaatggtgtctggatcaggaatttgcgcgaagcgcgtggtggttgatgctcgtcaccacatgctaggtcgcttggcttcggttgtagcaaaggatctgctcaatggccagaatattgtggttgtccggtgcgaggagatttgtctctccggcggacttgttcgtcagaagatgaagtacatgangtttctccgtaagcgtatgaacactaaaccttctcacggacctattcacttccgtgctccctccaagatcttctggcgtancgttcccggtaagattccacacaaagactaaacngtggaactaaagcacttgcccgcntgaaaggnccttgaaagaattcctaacccnatatgaccaaga

SEQ ID NO: 8133 - DNA, 477 bp, Arabidopsis thaliana
  unsure at all n locations
  Clone ID: LIB24-037-Q1-E2-H5
acgcgtccgcttcatcttcttctcccgtaaagctctcgcgtctatggcggtcaaatgtttctctctttatctgattctggcggcgattgtaatcggcggcgtcacctccgagtacatagagtacaacacaaaaccgagaatcgtccctgagaaaatcaatgttcacttagttcctcactcacacgacgatgtaggttggcttaagaccgttgatcagtactacgtaggctccaataactccattaggggagcttgtgttcagaatgtattggattctgtaatcgcttcattgcttgatgatgaaaatagaaagtttatttatgttgaaatggctttctttcaaagatggtggaggcaacaaagcaatgctaagaaagttaaagtcaagaagcttgttgactctggtcaacttgagttcataaatgggtgggaatgtgtatgcatgaagaagnaaactccacattataattgacatga

SEQ ID NO: 8134 - DNA, 474 bp, Arabidopsis thaliana
  unsure at all n locations
  Clone ID: LIB24-037-Q1-E2-H7
acgcgtccgcccacgcgtccgaaaattcttcatcgactcaaattcaaaaactcatctctctctatctctatttctctggttccatagctcaccgtcgcatcgcagatctactccttccgcaataaattttaccggcggaggtatcagatctcgccgatctgttgtagcagctactgtattttgggcttctcatttgatattggggaaacgaggagtagaggacgatggaaaatctgatctctctggttaacaagatacagagagcttgcacggctttaggagaccatggagactccagcgctttacctactctttgggattccttgcctgcgatcgccgtcgttggtgggtcaagagctcanggaagtcttcagtcctggaagagcatcgtgggaaaggactttttancccgtggatctggcatgttactccaaaggcccctgtctaaanttgcaaaagattcaatgaaggaac

SEQ ID NO: 8135 - DNA, 470 bp, Arabidopsis thaliana
  unsure at all n locations
  Clone ID: LIB24-038-Q1-E1-A2
ctgtttacttggnccgtcccggtccanaaatncccgggtccacccacgcgtccgggagatcttgtgtacatacattcaaatgataaaagttcttcttcacgagacattgttgtgtatactgattcagattccgacaaggaaaacctcatgaaggaggcaaaggacgaacgcaagagattggcagaaagaaaaatacaatctgcaatcgggttccgtcaagtgattgatctgcttgcttcagagaaaaagctgatcgttggtcacaattgtttcctcgatattgcacatgtatacagcaaatttgtgggtcctcttccttcaacagctgagaaattcgtggcctccattaacaagtcactttccttatagtgttgacaccaanatacctcttaaacgtgaatccaatgttgcatcagcggatgaaaaagtcnagtacatcactgtcttccgcgttttcctcggntatgtcc

SEQ ID NO: 8136 - DNA, 461 bp, Arabidopsis thaliana
  unsure at all n locations
  Clone ID: LIB24-038-Q1-E1-A3
cgggtccagncacgcgtccgnaagaccgtgaaagtgtggaacctttcgaactgcaagctcagatcgactcttgctggtcacaccggttacgtgagcactgtggctgtatcacctgatggntctctttgtgcaagtggaggcaaagacggtgttgttttgctgtgggatttggctgaggggaanaagctttactctcttgaagctaactctgtgatccatgctctttgcttcagtcccaacaggtactggctctgtgctgcaactgaacatggtattaagatttgggaccttgagagcaanagcattgttgangatttgaacgttgatcncaangctgaagctgaaaangctgacaacagtggtcctgctgccaacaaagangaaggttatttactgncacaannccttaactgngagcgctnatgggaacaaccctcctcaagtggttacaccgantggag

SEQ ID NO: 8137 - DNA, 483 bp, Arabidopsis thaliana
  unsure at all n locations
  Clone ID: LIB24-038-Q1-E1-A6
tgtttagccgnccgtaccggaccanaaattcccgggtcnacccacgcgtccgtccaatctatcactttataacaaattaaagtctacgttgagatatggctttaaaaacatggaagccattcataactgttgtttctctacaatttggatatgctggattgtcgatcatagcgaaattcgcactgaaccaaggcatgagtcctcacgttctagcgtcgtatcgccatatcgtcgctacaattttcattgctccatttgcctatttcttggatagaaaaatacggccgaagatgacgctatccatcttcttcaagatattgttgcttgggttattgggaaccaacaattgatcaagaacttatactacactggtatgaagtacacttccgccactttcacagctgcaatgacaaatgttcntcctgcctttgcctttattatggcatggntccttagacttgagaaaggtaacgtcaagaaaaa

SEQ ID NO: 8138 - DNA, 496 bp, Arabidopsis thaliana
  unsure at all n locations
  Clone ID: LIB24-037-Q1-E2-G1
ggtcgacccacgcgtccgctaaaagatctacatcttcaaggtgctgaagcaggttcatccagatatcggaatttcaagcaaagccatggggattatgaacagtttcatcaacgacatattcgagaagctagctcaggaatcttcgaaactcgctaggtacaacaagaagccgaccattacatctcgcgagatccagacggctgtgagactcgtcctccccggtgaactcgctaaacacgccgtctctgaaggtaccaaggcggttaccaagtttactagctcttgaagagacccggttagggtttttagggatttcaatttcggtttggnttttaagtacttgtaaggaaattanatgcattattcgcttaacttccgtattttgtgggctttgtnactccaaggaagtanagaanaatgttccttcccttttaatgaaatttaaatgttgggnttaaaananttttaacgaatttttttttccaaaaaaaaaaaa

SEQ ID NO: 8139 - DNA, 487 bp, Arabidopsis thaliana
  unsure at all n locations
  Clone ID: LIB24-037-Q1-E2-E11
tccanaaattcccaggtcgacccacgcgtccgnaaaaatggcttcgtcttccaaagcactgatcgaatccataggctctcttgacaaagactcatacgtttctctcttatcaaaactcataggcgaatctaaattcgtccagaacaatccgccggagctcatccctcaagaggacctaatcgtcaaacacgtccttgactctctccgtccttatagcacagaaactggtggtggtcctctggtgatcaatcatgtcgcgtatcattcaggtagaggtaatctcatcgttgagtacccaggatctgttcccggaaagatcttgtctttcgtcggaatgcatatggacgtcgtcactgcgaatcctgatgaattgggaatttgattcctttcctcgctaaancataaaatggtgataaagccttcgtgggtccgtggggaaaaacaagaattgtccttggtcacgtttgctccntggtcaactgaaact

SEQ ID NO: 8140 - DNA, 430 bp, Arabidopsis thaliana
  unsure at all n locations
  Clone ID: LIB24-037-Q1-E2-E12
ttctgtgtcgcaatctcttcttcttattaattcattcaaaacagaaaagtacgggaaaaaggaattgagacggtgggtttcgatggggtcaggtgcatcgaagaatactgaggaagatgacgatggttccaatggcggaggtggtcagctctacgtttcactcaaaatggaaaactctaaggttgaaggagagctcactcctcatgtctatggctctcttcctctcatcggttcctgggatccttccaaagctcttccgatgcaacgtgaatctgcgttaatgtcggagctaagcttcgttgttcctcctgatcacgaagacttgggactcaaagtttttgttgaaaccaaagaacagaaatacgccctgcataatggaagaaggttaaaatangctcctaacggtggttccttgcaaggagatgcaaat

SEQ ID NO: 8141 - DNA, 523 bp, Arabidopsis thaliana
  unsure at all n locations
  Clone ID: LIB24-037-Q1-E2-E3
acgtttgcttgncctgccgtccgaaatcaagggtcgacccacgcgtccgcccacgcgtccggacgaagaagtttctgaatcaatggctcaagcagcgagattaagcctgagaatgcagaaagagctaaagcttctcctctccgatncacctcacggcgcttcgtttccacatctctcttccgccgccaatggctccggcgatttctccactttctccaccatcgatgctcaaatcgaaggtcctgaagatactgtatatgctaatggaatcttcaatttgaagattcaaatccctgagagatatccatttcagccaccaattgtgtcgttcgctacaaccgatttatcanccaaacatcgataacaattggccgggaatttgcctttgaacattctaaatcctcccctcccaaagggganccttgggcaaccaatcgnttgaaataancncgaacagtttttgaccnanttatgaanaattgtttgcctaagtgaanccaanattcctgatgaatggaantga

SEQ ID NO: 8142 - DNA, 465 bp, Arabidopsis thaliana
  unsure at all n locations
  Clone ID: LIB24-037-Q1-E2-E6
acgcgtccgatnacgggctgtgtgaattctatttctccgccgccggtgactttataccggcatcgtgcctctccgtcacggtcgtccttctcattatccggcgatgccttacactctctttaccggcaccgacgtgtatcaagatctccgtcgattatcgctcccaaatttcagattgtggcggctgaaaaatcggagcctctgaaaattatgatatcaggagctcctgcttctggtaaaggtacacaatgcgaagctgattactcacaaatatggtttggtgcatatctctgctggagatttgctganggctgaaatcgcttctggaantnaaaatggaagacgtgctaaagaacntatggagaaaggacaattggtcccctgaagaaataattgtaatgatggtaaaannttgtttaatcccaagncggattcgagccaaaaaggatggcttttggatggana

SEQ ID NO: 8143 - DNA, 467 bp, Arabidopsis thaliana
  unsure at all n locations
  Clone ID: LIB24-037-Q1-E2-E7
acgcgtccggcacaatcggaagaaaggagaagacgaagatgtcgttggtatggttggaagcgatgttgcctctcggaatcatcggtgggatgctctgtatcatgggcaattctcagtactacatccacaaagcttatcatggccgtcctaagcacatcggccacgatgaatgggatgttgctatggaaagacgcgacaagaaagtcgtcgagaaagctgcagctccttcctcatgattcgctttatctcttttgtgttcctcaggggcttaaggtgaccacttgtggtgacaaataaagtgcattccagaagaagaagaagctgggggatctagtactttcattcccatttgattttccttggacatattaaagctttcagaaatcagactcaataacatttggttaacaatatttcncantcgtgataannngaaaaaaaaagggcggccgctccaanaaggttca

SEQ ID NO: 8144 - DNA, 464 bp, Arabidopsis thaliana
  unsure at all n locations
  Clone ID: LIB24-037-Q1-E2-E8
acgcgtccggaactccttactcaaggtgaactaactcgccgagcgtgggaaaaagatgtgcaggtgatgaatgaanggccagggcatgtcccaatgcacaagattccacgagaatatgcagaagcagttggagtggtgtaacgaggcaccattctacacccttggtcctttgactactgatattgcccctggatatgatcacattacctctgccattggagctgccaatattggagccttgggtacagctcttctttgctatgtaacaccaaaagaacaccttgggctaccaaacagggacgatgtgaangccggggttatagcatacaagatcgccgctcatgcagctgatctagccaaacagcatccacatgctcangcatgggacgatgcgctgaancaaancnccggtttnnanttaaatggatggaccaatttgcnccggtcctttggaccccaatgaa

SEQ ID NO: 8145 - DNA, 432 bp, Arabidopsis thaliana
  unsure at all n locations
  Clone ID: LIB24-037-Q1-E2-F10
gaacaaaaaaagacttctatangccaaatgctgaaaaaacttgcgaggaatgcgcgtaaagcttgtccaaatgggaattcacttccacaatgggtccttacatcgagagacagaggtggtcttgcatgcaacctcgagggcattatagaatcaccgattacaaatggctacatgaacaagtgtgagttctcggttggattatctcttcaggggaagccaactgttggattcagtctangaagtttttgtgcgggtgtgacagcagtcgaagaacctgtggattgccccaacgtctccaaaattgcntctcaataagcctcaataattcagaagttatagaaaattcaaaaattccaangtttggaataagtttcaacntaattggttccggccgcaaattaccgttcgagaagggaaaaaacccggcgtntt

SEQ ID NO: 8146 - DNA, 388 bp, Arabidopsis thaliana
  unsure at all n locations
  Clone ID: LIB24-037-Q1-E2-F11
gaagacacgtcgtctctgtgagaactttttctttttcttctggtatattctggagacagatattgttttttcttctgattagagaataatatgacggaagtgattagcaaaacgagtttgttcttaggagcttgtggtaatcatcaccgtgttgatgatttctctttctctccggtgagttttggtgggtttggtttgaaaaagagtttctcttgtctgaagcttaagagtcagaagcctcttagaantgtattttacggaaaacagatcgttttcggagattctcaagacgagagnttcagaagattatcagcctatcacagctcanacaaacctttgaggattggggacannctcaagaaantggttgggaanaaaagttctgaaa

SEQ ID NO: 8147 - DNA, 511 bp, Arabidopsis thaliana
  unsure at all n locations
  Clone ID: LIB24-037-Q1-E2-F3
gccgtccggaaatcaagggtcgacccacgcgtccgcccacgcgtccgcccacgcgtccgcccacgcgtccgctctctcctccgtcaccgaggggagagcaacatgccaatctcaattccccttaacgccactctacaatacnnnnnnnnnnnnnnnnnnnnnnnnnnnnnnnnnnnnnnnnnnnnnnnnnnnnnnnnnnnnnnnnnnnnnnnnnnnnnnnnnnnccttaccggaattcgccaagcgatgcctcaagatggtcacttcttgcgtctccaacgctcagaaatccgtcctgaatggtgccaacgattccgtctctgtcgtcgggcgggagcagattcgtcttggncctcctancaaaaggacgcatgggcgccgattcgctggattttctcaaaggattgccaattgtttggtcaaaacaagtcaatccacgacaataatgttggctcaaaattcctcaagttaccaaataacggaaattttgggttcaacgnacaaaaagaaa

SEQ ID NO: 8148 - DNA, 530 bp, Arabidopsis thaliana
  unsure at all n locations
  Clone ID: LIB24-037-Q1-E2-F4
actgtttcgttgncctgccgtcggaaattcaagggtcgacccacgcgtccggagaattaagctgcaaatctgggatactgccggacaggaccggttccgcaaaancacaacngcgtacnaccgtgganccatggggattttgcttgtgtatgatgtgactggatgaatcatcttcaaacaaacatcagggattgggatccgtaacatttgagcaacatgcttctgataagtgtcaacaaagattctaagttggggaacaaagcaagatatgggatgaaagcaaaagagctgtgccaaaatctaagggccaagctcttgcaagatgaatatggaatgaagtttttcgagactagtgccaagactaacttaaacgttgaggaagttttcntctcnaatgctaaagacattaagcaaagacntgcagataccgatgcacganctgagccgcaaacaatcaaaatcaaaccaatccgancaaggtgccggaanatctcaagctactcaanaaatcaacatgtttccggacaana

SEQ ID NO: 8149 - DNA, 422 bp, Arabidopsis thaliana
  unsure at all n locations
  Clone ID: LIB24-037-Q1-E2-F6
tgttttaatacttgaatcgacaagaatgcaaactatccaagtcgtcaagaaagcgcatcttggtttggtcacagcactgactttctctcctgattcaaggggattagtgtcngtatcntttgactcaaggggcaaggctgaccatgattgaacaaaagggggacaaacctggagtaangtggtggctactggttttattgatagtgttgctatacgtggttgcatactattatatgaaggcaaanggtatcataccttagaaanggctttaagttgaccacacaagncgatacaaccggaatggcttgtaaccaacatatcatacgattacgccttgagttanccttttaaggtttgncatctaccanaaaacttgcntgctttaaaancanttaaaacatgtttactaaccctaaaaccgn

SEQ ID NO: 8150 - DNA, 514 bp, Arabidopsis thaliana
  unsure at all n locations
  Clone ID: LIB24-037-Q1-E2-F8
ttgcccnggccgtaccgaaccggaaattcccgggtcgacccacgcgtccgtgtgtgtgtgtgaatcttctcagcgaaagccaagttcttttctttgttggtgtttctgggtttattgcgacaatgggagctgagcattttagcctggtgaagttcaatagaggtttctttgtgtgtttatgggtgatgctctcgctatcttgcgcagcancgagctatggctcttcaaggcaaaagtttgaggtgaagaagcatttgaataggctcaacaaacctcctgttaagactattcagagtccagatggagatataatcgactgtattcctatttcaaagcagccagcttttgaccaccccttcctcaaagaccacaagattcagatgaggcctanttaccacccaagaaggggctctttgatgacaataaggtatctgctgaaccaaaggggaaagaaaccatatccctcaattgtggnancggtatggcaaaatgtactgaaaggaacantcccaag

SEQ ID NO: 8151 - DNA, 438 bp, Arabidopsis thaliana
  unsure at all n locations
  Clone ID: LIB24-037-Q1-E2-F9
acgcgtgggatcctcgtaatcctctcctttctccttcagacncctcctagttgctgtttaaacaancaaaaaaagactgcttctctttcttanttctctcatcatcatcatcaatggttttatgagatttatatcaaaaaacattgaggagctagagagaaagagagagtgtgtgtgtagaaaaagattgaaacatcatcaagattgatggagcaaggaggangtggtggtggtaatgaagttgtggaggaagcttcacctattagttcaagacctcctgctaacaacttanaagagcttatgagattctcanccgccgccggatgacngtggattaagaagtggaggtggaaggangangaagaaggaatgcttcctcctcatccgggaaatccaatggccgagagaagaaacttaactcntccttcggattcgatt

SEQ ID NO: 8152 - DNA, 490 bp, Arabidopsis thaliana
  unsure at all n locations
  Clone ID: LIB24-037-Q1-E2-E10
ctgtttacgccggntcgtacggctccaaaattcccaaggtcgacccacgcgtccgctcactatcgccatcgattttagcagacattgaagaagatgggagtattcacattcgtatgcaagaatggaggcggcgcgtggagcgcgaagcaacacgaaggagaacttgaatcttcagcttcttctacctacgagctccagcgtaagctcgttcaggtatctctctccgctgattcctccggtggcgttcagtcttcgttttctcttgtctcccctacctccgccgtattccaggtaatnnnnnnnnnnnnnnnnnnnnnnnnnnnnnnnnnnnnnnnnnnnnnnnnnnnnnnnnnnnnnnnnnnnnaactgcagctgcccctnnnnnnnnnnnnnnnnnnnnnnnnnnnnnnnnnnnnnnnnnnnnnnnnnnnnctccgattcnatttccttgggtaaaaatnaaatantaatttggaagtgttggnttgag

SEQ ID NO: 8153 - DNA, 361 bp, Arabidopsis thaliana
  unsure at all n locations
  Clone ID: LIB24-036-Q1-E1-F7
aggattgggtcgaaagtgacattggaccagatgtttaagccttcttttatttttaatctgccaccgatttcttggtacgttcgtcggataaccatcaagaccatgaaaactctgatcgaagatcttcaaattacaagtgccatgatccgaggtatttgaaacgtcccaaatccgctacaaattgatagaacatcaaataaagttataaaatcactttttataaatttaaatagcagaatattacatatgactttagaagtgtatgttcttatggtcactttnnnnnnnnnnnnnnnnnnnnnnnnnnnnnnnnnnnnnnnnnnnnnnnnnnnnnnnnnnnnnnnnnnnnnnnnnnnnnnnn

SEQ ID NO: 8154 - DNA, 428 bp, Arabidopsis thaliana
  unsure at all n locations
  Clone ID: LIB24-036-Q1-E1-F8
acgcgtccgtcatgtctgtgtctctgatttcggtatagctccattgatgagccatcacaccttgatcccatcaagaagcttaggttacagagcacccgaggccatagaaacacggaaacatacccagaagtccgacgtatacagctttggtgtactgttgctagaaatgctgactgggaaagcagcagggaagactactgggcatgaagaagtggtggatctgccaaagtgggtgcaatcagtggtgagagaggagtggactggacnaagtgtttgacgtagagctgatcaagcagcaacacaacgtagaggaagaaatggtgcagatgttgcagatagcaatggcatgtgtgtctaagcatccaagattctaggccttcaatggaggaagtggttancatgaatggaangagattccaccttcagcg

SEQ ID NO: 8155 - DNA, 443 bp, Arabidopsis thaliana
  unsure at all n locations
  Clone ID: LIB24-036-Q1-E1-G11
tccanaaattcccaaggtcnacccacgcgtccgtacatcgccaggttcgtaaatatgtcagaagcatagtgaagcctggaatgttgatgactgatatatgtgagaccctaagagaatactgttcgtaagttgatatcagagaatggtcttcaagctggtattgcattccctacaggatgctctttgaattgggtcgctgctcattggacaccaaactctggagataagactgtacttcagtacgacgatgttatgaaattggactttggaacacatattgatgggcatattattgactgtgcatttacagttgccttcaaccctatgttcgatcctctcttagcagcctctcgtgaagctacgtataccggtatcaaggaagctgggatcgatgtccgtctctgtgatatcggtgctgctattcaggangtcatggagtccct

SEQ ID NO: 8156 - DNA, 443 bp, Arabidopsis thaliana
  unsure at all n locations
  Clone ID: LIB24-036-Q1-E1-G12
gcctccaaaattcccaaggtcnacccacgcgtccgngaggagcacgggtggctcttcgtcggnatatacgacggattcaacggtccagatgcgccggattatcttctctctcatctctatcctgtcgttcatcgagagctcaaaggattgttatgggacgattcaaatgtcnaatccaaatctcaggatttagaaaggtctancggagacgaatcttgttcaaatcaggaaaangatgagacttgtgagcgatgggtggagatgtgaatgggatcgctgaaagtcaagatcttgaccgtcgattaaaggaacacattanntcggagaagtggggtccgatcggttaacgaatcattcnggaagtattanaggctctgtcacaagctctgatgaaaacaagaggaagccgtanttagatactgcaggattaaagatgcnccacg

SEQ ID NO: 8157 - DNA, 477 bp, Arabidopsis thaliana
  unsure at all n locations
  Clone ID: LIB24-036-Q1-E1-G4
acgttgccctgccggtccaaanantaacgggtcnacgcncgcgtccgttttcntgtgaggtcagaaaagaagatggganatccannganatngattnccantccgacgaacttggcgaaggcggcgtttgggttaggtgtggcggcgacggcactaaactcgtcgctctacactgttgatggtggcgagagagctgttttgttcgatcgattcaggggagtgttggatcagaccgtcggcgaagggactcatttcttgatcccgtatctccagacgccgcacatatacgatattcgtacgaaacctcacactttctcctccaaatctggtactaaggatcttcagatggttaatctcacccttcgtgttctctttcgccctgaggtttcgcgtctcccgtacattttccaaacattgggtccttgaatacgatgagaangttcttccatcgatttgaaaatgaagtcttgaaaactg

SEQ ID NO: 8158 - DNA, 432 bp, Arabidopsis thaliana
  unsure at all n locations
  Clone ID: LIB24-036-Q1-E1-G7
acgcntccgaaaaagagcacaaggaacagttaaaagtcgggatttttgggtatttgagaagcaatcggaacaacaacggcgtttgtaacgcggatttatgtcggctgtgtctgaannnnnnnnnnnnnnnnnnnnnnnnnnnnnnnnnnnnnnnnnnnnnnnnnnnnnnnnnnnnnnnnnnnnnnnnnnnnnnnnnnnnnnnnnnnnnnnnnnnnnnnnnnnnnnnnnnngcttctgctccgaacagaggcttattcttgaggttccttccatttccatgggcttaagacttaaaaggacttgttctggtgttgaagtatttgggggttttcacgaaaagcaaaaaataccctttttcatagttcgctgaaacagagaaatctttttcctgaaaaaaacctcatccgatttaacagttttttttgggtgtgt

SEQ ID NO: 8159 - DNA, 430 bp, Arabidopsis thaliana
  unsure at all n locations
  Clone ID: LIB24-036-Q1-E1-G8
ttttcttaatttccaagaatcgtctcttttctctcaatcctccaattcccaaatttcaacaacaagacgaagcaaacgatgtggattgaaatcatctgcggtctcgtcatctacaaactcgtccgccgtttcttctacgacgacgaattctccgacgtcgaaacttccgattccactgctctcttctccgttgctcacagacttgagaaactttatggtggaaaagcttatgtaggacttcgaattccagatgccgacactgcttctagacaagacattgatgttgttcttgttactaaaggagatgttgtangtgatttctgtgaagaatctatcggggattgttacggtaactagtgatgggtagctgggtttgtgaangggtgggcaagcatcatactantggagancttccnctgatcctccgggc

SEQ ID NO: 8160 - DNA, 475 bp, Arabidopsis thaliana
  unsure at all n locations
  Clone ID: LIB24-036-Q1-E1-H1
gcttgntcggcccggtccacaattaacgggtccanccacgcgtccgncgagttgtggaatcaaaagctcttcgggagagagttttctatggaggcattgagcaccagttgcgtagagaggtatggccctttctcttgggatattatgcatatgactcgacatatgcagagagagaatatcttcgatctgtcaaacggatggaatatgcaacattgaaacagcagtggcagagcatttcccctgaacaagcaaaaaggttcacaaaatatcgggagagaaaaggattgatagataaagatgtggtaagaactgatagggcatttgaatactatgaaggggatgacaatctacatgtcaatagcatgcgtgatattctgttgacctactccttctacaattttgacctgggttactgccanggaatgagtgattatctgtctcctatccttgttcntgatggangatgaatcaaaat

SEQ ID NO: 8161 - DNA, 473 bp, Arabidopsis thaliana
  unsure at all n locations
  Clone ID: LIB24-036-Q1-E1-H10
ccgcnggttccgtacggctccataaattcccaaggncccacccacgcgtccgntcagattctacgctgtagagatgtcgctaccatgtttatgtccatgcccatcatcgccgatttctctttcattgtgttctccgagattcaatcttcttaacacaacaagcaggagactaggtttgtctagaaactgtagaactctgcgaatcagttgttcatcttcatctactgtcactgaccaaactcaacaatcgtcttttaatgatgctgagttgaaactcattgacgctttgatcgggaattcaaggccgtggcaaatctgcttctcctaaacagctcaatgatgttgaatctgctgtgaaagttcttgaaggtttagaaggcattcaaaatcctacagattctgacctaatcgaaggtcgttggcgattgatgttcaccacaagacctggaactgcatctccaatccaaaagaac

SEQ ID NO: 8162 - DNA, 445 bp, Arabidopsis thaliana
  unsure at all n locations
  Clone ID: LIB24-036-Q1-E1-H11
gtcnacccacgcgtccgcacgaatggttctcatctcattgattactcaatctctagggtttagtggttcatccaaattcgtaccctaatgggtgccgtagcgatcaatcgtaaacgcagcgacgaatccttcaatttcattaatcaacaatcaaccaaccctttacgaaattcaccgtatttccaagcttccaagaaacgaagattctcattcgctatgtctgaagattctggtaagccagcgtcttcaaacccaacaatttcgaggatttcaaggtaccctgatgctaaagctcctcttagacgaagagattcatgctcctagtanaggaattcttagatatggaaaggcaaaatctaatgantactgcgaaaagggacgcaaatttccnttggttcggaaagtatgatggatgccanagngattaagcttttngggaagcttt

SEQ ID NO: 8163 - DNA, 466 bp, Arabidopsis thaliana
  unsure at all n locations
  Clone ID: LIB24-036-Q1-E1-H2
cgtacatatctcnaatgcccaggcccacgtccgaacacantcaaagctactgaactgangctaggtcttcctgagtctcaatctcctgatgagagagactgatttcggtttgctgagtccgagaacacccgatgagaagcttctcttcccgttgctaccttctaaagacaatggttctgctactacagggcataaaaatgttgtttctggtaacaagagaggatttgctgacacttgggatnagttttcgggtgtgaaaggatctgttagacctggaggaggaatcaacatgatgttgtcnccganagttaaggatgtctcgaagagtattcaagaacaaagatctcatgccaangggtggcgtgaacaatgcaccaacctgccaanggcacnacgttgttggttggcctcccaancagnntcntagccgggnangaatacaatnggccttccttccaacttccna

SEQ ID NO: 8164 - DNA, 449 bp, Arabidopsis thaliana
  unsure at all n locations
  Clone ID: LIB24-036-Q1-E1-H3
gggtccagcccgcgtccgancacangtccgcgctgagccaccatcgtcctcttctcttcctcttcgatctctcctgaatcctcaaaccctggagagagagagagagagtgacgggggaagaagatgacttctgctttgtatgcttccgatttgtttaagcagctcaagtcaattatggggacagattcgttatccgacgatgttgtacttgtgattgcaacgacgtctttggcactagtagctggatttgtggtgttgttatggaagaaaacgacggcggatcggagcggggagctgaagcctttgatgatccctaagtctcttatggctaaggacgaggatgatgatttggatttgggatncgggaagactanagtctctatcttcttcgggtacgcagactgggacagctganggatttgccaaaggnattatcccgaaggaaatca

SEQ ID NO: 8165 - DNA, 479 bp, Arabidopsis thaliana
  unsure at all n locations
  Clone ID: LIB24-036-Q1-E1-H4
gggcccngtccacgatctaaacgggnccaggtccacgtccgannccnngaggcatgcacntcttccactctggatccgagagattggagacgtcaataaggacatatactatagagataaaagcggattttccaacaatgactatctcacacttggagtcgatcaacttcctttgttcggtggccgtactgctgttcaatgctatgaagattttatgctcagtttttcaacaaaatttgagccatatcttgggaatgtgattgaagaaataagtataggtcttggtccttcgggggagcttagatatcctgcacatccttctggagatgggaggtggaaatttcctggaattggtgaattccaatgccatgacaagtacatgatggaagacttgatggcagtggcatccccaagaaggcaaaacctcaatgggggaagcagaagattctccgaataccggctgctataatnagctttcc

SEQ ID NO: 8166 - DNA, 450 bp, Arabidopsis thaliana
  unsure at all n locations
  Clone ID: LIB24-036-Q1-E1-H7
ttcccgggtcnacccacgcgtccgagattctctctttaccttgaagcttcaatatcaaccaaatcttttttctcaaaatctcaaagaatctctcaaactcagtctcctatctgtctctctgcaaactattaccaaccagataatttagatatggaagctactcagaaacatatgattcaagaaggatcttcaatgttttaccatcaaccatcttcagtcaaacaaatggacctttctgttcagacatttgattcttactgcacacttgaatcctcttcaggcaccaagtctcatccttgtcntaacaacaaaaacaactcttcttcaaccacaagcttttcctctaatgaaagtcccatttctcaaggccaacaacaacaacttatcaaggtttaacaatcattcccctgaagaaaacaataactctcccttgagcggttcctcagcgac

SEQ ID NO: 8167 - DNA, 488 bp, Arabidopsis thaliana
  unsure at all n locations
  Clone ID: LIB24-036-Q1-E1-F4
ctgtttacgttgnccgtgccggtccaaaaattaacgggtcnacgcacgcgtccgntcctccaatcatcctccactcanaagatatcaaacggaattcaacggccacgatgtcttgggatgacggaaaacacacgaaggtgaagagagttcagcttacgttcgatgatgtcatccgatctatcgaggtcgaatacgacggaacctcccttaagtcccagccacgtggcaccgctggcaccaaaattgacggatttacactgagctctgatgagtatataacggaggtgaatggttactacaaaactacgttttcgggagaagtcataacgtcgttgacgttcaagacgaacanaaggacatatgggacttacggaaataaaaccagtagctacttttctgttgccgcacccaaagataaccagattgtcggttttcttgggaangtagcagccatgctctcaaactccntccgacgctcantttgcccc

SEQ ID NO: 8168 - DNA, 437 bp, Arabidopsis thaliana
  unsure at all n locations
  Clone ID: LIB24-036-Q1-E1-B5
attcccgggtcnacccacgcgtccganctcgtgataatgaaaccggcggtgaactcttgatttccgattagttgacgccgtgattgtgtgtaattgtgttatctgaggcttctanacgccggattcatcanaacgaaagacggtgaagaccatcggcggaagagaaacccaatcggagaatagcaaatctgatttggagagtaatcgttgccgaagtctccaaattaggtatgaatcaagccattcttgcttgtatatcgtgattacatgttgtatttggtggtttaatctttcaattcaacataagataannattcaggtaaaacanttgtaaaaccantgtttnnatattnattttaanattgatgantnctggttttgacccnacctgtttggttttttcccaacttgggttttgcggattntgacctttcccg

SEQ ID NO: 8169 - DNA, 421 bp, Arabidopsis thaliana
  Clone ID: LIB24-036-Q1-E1-B8
atcttcaagtccacgacgaaacttttcatcgatcttcaaattccagaaaaaactcgatgaatcttcaagctgtttcttgtagcttcggattcctttcgagtccacttggtgtcactcccagaacttcgtttcgtcgcttcgtaatccgagcgaaaacggaaccgtcggagaaatcagtagagattatgaggaaattctccgagcaatatgctcgtcgctctgggacttacttctgtgttgataaaggagttacttcagtcgttattaagggtttggctgagcataaagattcatatggtgcaccgctttgcccttgcagacactatgatgataaagctgctgaggttggacaaggcttttggaattgtccgtgtgttccaatgagagagaagaaggagtggcattgtatgcctttccctaa

SEQ ID NO: 8170 - DNA, 425 bp, Arabidopsis thaliana
  unsure at all n locations
  Clone ID: LIB24-036-Q1-E1-C5
nnnnnnnnnnnnnnnnnnnnnnnnnnnnnnnnnnnnnnnnnnnnnnnnnnttgtcttgctctgttctatttaacttttcttatatataaaaaaaatggcgaaaaatttactagcaatatgtctggtgtttatggttgcatcaagtgtggtttatgaagtgcaagggactttcttgttaaagctttacttgaggaggaagtttcccagacgttgtatcgactttgccccttatgctggcaaaggtatgttgatgctcgtgagcaaccttgaaggtggatgtcccgcanctagaagagttcanacaattcttttcaacgttcaagtcttacatgagctttatcagctcaagcancgatatccgcatcganaaacatcgatgtggagatgaatgggagatgtgaattgctttcnaagggctatgtctg

SEQ ID NO: 8171 - DNA, 410 bp, Arabidopsis thaliana
  unsure at all n locations
  Clone ID: LIB24-036-Q1-E1-C6
acctaactctttctctatacaagagcgcaagctcgaaggcgctcttgttctttcttcattttctccttaacaatcaccctcatagtaactttaaaactctctgtttctagtaattcacacacaaaatggctattaaactagcaattctatttaccacatttgttctttttagcctcgccgacgctagaatccccggtatttactccggcggcgcatggcaaaacgcacacgccactttttacggtggcagcgacgcctccggcacaatgggaggagcttgtggttacggtaacctatacagccaagggtacgggaccaacacggctgctttgagtacggcgctgtttaacaatggtatgaagttgtggancctgctttgagctaaaatgcgccaacgaccctcantggtg

SEQ ID NO: 8172 - DNA, 460 bp, Arabidopsis thaliana
  unsure at all n locations
  Clone ID: LIB24-036-Q1-E1-C7
acgtttgcccagccccgtacaagtccanaaattcncgggtcnacccacgcgtccgaatctctcttccattttctccacacaaatttctcttcaatctccgataatggaaggaaccggcgttgtggcggtgtacggtaacggtgcgataacggaggcgaagaaatctcccttctccgtgaangtcggtttggctcagatgctccgtggtggtgttatcatggatgtcntcaacgccgagcaagctcgtatcgccgaggaggctggtgcttgcgccgtcatggctttggagcgtgttcctgctgatatccgcgctcaacgaggcgtcnctcgtntgagcgatccacannngattaaagaaatcaaacaagccgttacgantccggtgatggctaacgctangattgggtcatntcgttgaatctcagatnctctgaagcaantggaagctaattacagccan

SEQ ID NO: 8173 - DNA, 416 bp, Arabidopsis thaliana
  unsure at all n locations
  Clone ID: LIB24-036-Q1-E1-C8
gaataaaaaccagaagaatccgtataaattatcctaacagtttcttccaatatccaacaaatttcagatttttgtttttgttttcttcttctctacttgagtaatcatcaacgattatggcgtcaagtcagtggacgaggtcggaggataagatgtttgagcaagctttggttctttttcctgaaggatctcctaatcggtgggagagaatcgctgatcagcttcataaatctgctggtgaagttagggagcattacgaggtcttggttcatgatgttttcgagattgattctggtcgagttgatgtccctgattacatggatgactcggcggctgcggcggcgggttgggattccgctggtcagatctcttttgggtctaaacatggcgagagtgaacgcaanaagaggaactcc

SEQ ID NO: 8174 - DNA, 462 bp, Arabidopsis thaliana
  unsure at all n locations
  Clone ID: LIB24-036-Q1-E1-D3
acttgccnggcccggtccaanataacgggtcnanccacgcgtccgnngacacgtgggctcttatcaatgagattgggagggacaattcgatcgactgtttgatccgttgctcgaggtctgattatgtttctattgcttccttgaaccggaatttccgttctttggtaaagagtggacagatttanacattaaggcgacaaaacgggtttgttgaacattgggtttacttctcttgccagctcttggaatgggttgcgtttgatcctgttgagagaaggtggatgcagttgccaactatgccttccagtgttaccttcangtgtgcagataaggagtctctggccggttgggacggacctgccttgtcttancgnaaagatgatttttcntcncatgtaatntacagatacactcctactcactaanttccntgggncntcctggggatcaangatggaactc

SEQ ID NO: 8175 - DNA, 386 bp, Arabidopsis thaliana
  unsure at all n locations
  Clone ID: LIB24-036-Q1-E1-D6
cccgatcacggagctcacctttcatcgtcaatctccggcggacgaatttctcttcgtagccgttacttctcattatttctttgaaactttcttagaaaattctctgttttggttaggacaatacaaacagaggatgttgatgacactagcggcgacgacctccgtttcatttaactcgaagcttctcctatttcgaatacgttgctcggattctaaccctaagcgtggcttcggctcaaaaaaggaagagaaanacccggcantgcagcangggaaatcatcttctaaacagtctgtntctgtacccagaaangnacctggtctgaanactcagtttgaaggaaaatctggtcgatnttttgananagacttngagtgaacggctg

SEQ ID NO: 8176 - DNA, 425 bp, Arabidopsis thaliana
  unsure at all n locations
  Clone ID: LIB24-036-Q1-E1-D7
tctcctttggtggnaancacancgacagatananagaaacgatggcgtcgaactcgcttatgagctgtggcatanccgccgtgtacccttcgcttctctcttcttccaagtctaaattcgtatccgccggagttccactcccaaacgccgggaatgttggtcgtatcacaatggctgctcactggatgcctggcgagccacgaccagcttaccttgacggttctgctcctggtgactttgggtttgacccacttggacttggangaagttccancgaaccttgatagatacaaagagtcatgagctnatccactgtagatgggctatgctcgctgttcctgggattttggtaccagnaagcattaggatatggaaactgggttaangctcanngaatggcancactaccagggggggtcaagcca

SEQ ID NO: 8177 - DNA, 453 bp, Arabidopsis thaliana
  unsure at all n locations
  Clone ID: LIB24-036-Q1-E1-D9
tacgccccaaaattcccaagtcnacccnggcgtccgaacactcccnctctcactttctccttcaatgttctctcctctgcgttttcacgaaacaganaaccttatcgttccgtcttcgtagacattgaaatcgatagagaggtgttgatttgattaggtttaatattgattcggatgaagggaagagatggttactaatagctacatggatacgcgatcaaatttgacaagtgtgaatcgaggatccaatgtggatctcgaagatcgattccagagggagctcgaatctttgctccaacaacatcgtaatcagcaatcanttggcccgagaacganaacgagacattgangttcacagaagcggaagcgcgcctccctaccgtggaaggattgttgagagctatggatnaatcaggtacttgaacaataacaactctgatcataagangatgt

SEQ ID NO: 8178 - DNA, 459 bp, Arabidopsis thaliana
  unsure at all n locations
  Clone ID: LIB24-036-Q1-E1-E10
tacgnccccaaaattccaaangtcgacccncgccgtccgatttattcatctcacttttcttcaccggagaatcacgacaacatcaaattctccggcgacatctcagtggcagtgcatctgtaaaatgcttcaaggactgttgttcgctactcttgcttaattattactatagctggtgaaaatgggaggttgctgtanttcttcgaggaagtcacatcttgttggnacacctgtttactattattgtccagaatcttttgaagagcttgtcccttcaggaacccntgctggtgtgggatcagcattcaccacaggcctcttggttgatataggtttggagacatctatacctgacaccttttgtgctcctgctcctcgtccatatgatttgcttttggggcgaccacaatgcacagattctggagncnatcnannggaagggtnaagtggcaagccatt

SEQ ID NO: 8179 - DNA, 423 bp, Arabidopsis thaliana
  Clone ID: LIB24-036-Q1-E1-E5
cgaacggaaatgttcactccgcaaaggaatcgttggccggagacagaccggaagggaaaggccatagctttttccgacgaaatcattacacctcctccacaaagggtgcttctccgagaggatgatgattggcagaagttcaaagaggttggcttgcttgatgaagcttctctagaaagaaaagatcgtgatgctcttatagagaaaatcttgaagcttgaaaaagagttgtttgattaccaacataatatggggctattgcttattgagaagaagcagtggacttcaacaaataacgaacttcaacaagcttatgatgaagctatggagatgcttaaacgtgagaagacgtcaaatgcaattactttaaatgaaagtgacaaaagagaagagaatcttagaaaagctttgattgaatgagaa

SEQ ID NO: 8180 - DNA, 425 bp, Arabidopsis thaliana
  unsure at all n locations
  Clone ID: LIB24-036-Q1-E1-E7
acgcgtccgctttctctggccaaagttccgactttttgcttctcccagagtctaatcatggacgctgtggcggcgaatttgtttcaatctccttccttactgcgtcaaacttccgaaaggttgatattttcgacgcccaactgtcctggcttcatgcgaattagctccggacctcaatttcgtctcagacaaaactcttctcttaaattctcgagaccatttcaaagcggaacaacttgtgttaaatctcggagaagctttgtggttaaagcttcagcttctggtgatgcttcaacagaatcaatcgcgccgcttcaagttgaagtctcctgtggggacagtttctgtcacagatattagtgagccatcctcatcctgttccaagcagctgttgancagcagccntgaacagctccaaaantgat

SEQ ID NO: 8181 - DNA, 488 bp, Arabidopsis thaliana
  unsure at all n locations
  Clone ID: LIB24-036-Q1-E1-F1
acgtttgccnggcccggtccanaataaacgggtcnagncccgcgtccggtggaagacctggaagaagtcagcgagtactaccagaacagagggtgcttcaatgaattaatctcacttatggagagtggacttgggcttgaacgtgctcacatgggtatcttcaccgagttgggtgtactctatgctagatatcgttatgagaaacttatggaacacatcaagttattttcaactcgcctcaatattcccaagcttatacgggcctgtgatgaacaacaagcactggcaggaacttacctatctgtacattcaatatgatgagtttgataatgctgcgaccacccgtcatgaaccattctcctgaaagcatgggaagcacatgcaattcaaangacattgttgccaangtagcgaaatgttgaactggtaccacnanggcttgtgcacttcctacgtgcaaggaagcaatcccgganataatcaacgat

SEQ ID NO: 8182 - DNA, 443 bp, Arabidopsis thaliana
  unsure at all n locations
  Clone ID: LIB24-036-Q1-E1-F12
caccgnccagtacgcctccaaaattccaaangtcgacccncccgtccgcgaaacatcatcgagaagccgagggaagattcacggcggatcatcgaagaaagttattaagattctcggtgttccatgcgacgccgtttcagtcttcgtcagattcctctattctccgagtgtcacggagaatgagatggaaaaatacggaatccatctactggctttatcacacgtgtatatggtgactcagttaaagcaacggtgcactaaaggcgtcggtgagagagtaaccgccgaaaacgttgtcgatattctccaggctggctcgtctctgcgacgcacctgacctctgtctcaagtgtatgcgattcattcactacaagttcaagaccgttgaacagacagaangatggaagtttcttcaagaacacgatccttttccttgaacttng

SEQ ID NO: 8183 - DNA, 263 bp, Arabidopsis thaliana
  unsure at all n locations
  Clone ID: LIB24-036-Q1-E1-A8
attcccgggtcnacccacgcgtccgnttgtagaatctatgcctgcggagagctcccgttagatgcttgataatcactattgaccgatgcattgtctttgccatctttgttctgttttttgctattatgactattgaggaatccaaaccatcaaaaagccaaagattttcaaattctggtcttttatttattatatatttcggatacatgagttataagttcttttaatcgatgtgggattcttattaaaaaaaaaaaaaaagg

SEQ ID NO: 8184 - DNA, 481 bp, Arabidopsis thaliana
  unsure at all n locations
  Clone ID: LIB24-035-Q1-E1-E3
ctgttacgcctgntcgtacgcctccaaaattcccaaggtcnacccacgcgtccgtgatgaggtcacaaacgttgcctgtggggctgacttcacagtgtggttatcgtctactgaaggagcctctatactgactgccggtctcccacagtatggtcaacttggtcatggaactgataatgagttcaatatgaaggatagttcagttanactcgcctacgaagctcagccacgtcctaaagccatcgcctctcttgcaggggaaaccattgtcaaagttgcatgtggaacaaatcatactgtggccgtagataagaatggatatgtttacacntggggatttggtggatatggaaggcttggacatagggaccanaaagatgagtgggctccacgccgtattgatgtgtttcagaggaataatgttttgcctcctaatgccattccttctgctggttctgcaaactccgcttgtacaagctgg

SEQ ID NO: 8185 - DNA, 434 bp, Arabidopsis thaliana
  unsure at all n locations
  Clone ID: LIB24-035-Q1-E1-F1
tacgnccccgaaaattccanaagtcgacccagnccntccgcaagattcantttctcntttatcactcccctcggcgatctctcttcttgctccggcagggtttttctgctgctccttgcttgtccggactctagcttgcctgtaactgttaacagattacaatgggggactccgataatgctataccattttccagaaaganaactgctctgaaagagctgtctcgtgacaagcctggtcttgatgatgatgatgaaggacacttctgcactcnagantggtaccttcaacactgctagtaaggaggtgttggcaagcanaagaattatcagagntaggcgcacagatcgatctgcnactgcaccaccagcttctaatccatttacngggaattcgtntggttccttttactgctcctgctccttctactgctg

SEQ ID NO: 8186 - DNA, 420 bp, Arabidopsis thaliana
  unsure at all n locations
  Clone ID: LIB24-035-Q1-E1-F5
acgcgtccggaacagctagggaatgttttagatgttgtacatggagatcttcttccagaagataagtccagaatcatacaagagtttaagaaagagggaccaaccgcaatggtaggggacggtgtgaatgatgcaccagctttagctacagctgatattggtatctccatgggaatttctggctctgctcttgcaacacaaactggtaatattattctgatgtctaatgatataagaaggataccacaagcggtgaagctagcgagaagagcacgatgcaaagttgttgaaaacgtgtgtctatcgatcattttaaaagcaggaatactcgctttggcatttgctggtcatcctttgatttgggctgcggttcttgttgatgtanggacttgtctgcttgtgattttcanatagtatgtt

SEQ ID NO: 8187 - DNA, 410 bp, Arabidopsis thaliana
  unsure at all n locations
  Clone ID: LIB24-035-Q1-E1-F6
ccaagctcaaagctgccgacttgacctctccaacgagctattcggtggcgtcaacgaagcttgcggaagaaaccttgaccggagtcgatgttgccctgttttagccgcttggctcttcgcagctcacgctcgctctgctctccagttaccagctcctgctccaacgccggaatcttctgatcccgacgaacccatgaagcctgacgactctcagaagtgcgtcaacacattgcaaagtgcgcttttgactaaacaaatcaagatccctcagcctaattctagctgtgacgcaatcttgtgcttctgtggtattcgtctccacnaagattagctcactctcttgtcccgccgctttcaatgtctcctccggcttcaaaaacgcaantccgaccgctgncgtgaagaatctt

SEQ ID NO: 8188 - DNA, 422 bp, Arabidopsis thaliana
  unsure at all n locations
  Clone ID: LIB24-035-Q1-E1-F8
acgcgtccgcccacgcgtccgcccacgcgtccgcccacgcgtccgcttcatcagttccagtcaccaggcaaatgaggtattaccagctgaaggagataatgagatgatgatggtgccattgggggaggagaagtttatggtaatgaatgaaacaagaaggaaacttggaagttttcagatatgttcagtttgtacttgttgtggtggtgctaaaggtctttgcttgccttctccttgttgctatgctattaactgcaatatccctaatagaccctttggttactgttctttcactcccaaaacttgcaattgctttggttgccatatctgagatcttctacttcattgtaatttgggagagaaacaagtgaatctaaatcttgattcatcttcaagtgtgaaagggangaaaaaaagaaaga

SEQ ID NO: 8189 - DNA, 473 bp, Arabidopsis thaliana
  unsure at all n locations
  Clone ID: LIB24-035-Q1-E1-F9
gcaacanccacgccgggaccgtaacggtccntaaattcccgggtccnacccacgcgtccgnatgtgaatggcatctagaacatggtttgcttaccactgagaatgtggttgatgtgttccagcttgcgctgctgtgtgatttccctcggcttagcctcatatctcaccgtatgatcatgaaacactttaacgaactctctgcgacagaagcatggacagctatgaagaaaagccatccctttcttgagaaagaagttagagactcagtaatcatcgaagcaaatacgcggaaagagaggatgagaaaacgcaatgatcagaggatatattcgcagctatacgaagcaatggaancacttgttcatatatgcagagatggatgtanaacaatagggccacacgataaagatttcaaacngaaccatgcaacgtgtaactatggaancttgcaagggattagaatcacngatccg

SEQ ID NO: 8190 - DNA, 454 bp, Arabidopsis thaliana
  unsure at all n locations
  Clone ID: LIB24-035-Q1-E1-G2
tcnacccaggcgtccggctatcctncatgaatgtctttgatacattaaaaacatgttgaaagattcatggaatctggaatgtttgttttccaagttgtatatgacttgtaattcttgattttangctagacaaaacagttatatatgttccataggtacacaaaaacatacgagtctatatttgagatttcgatgtcttatctttacatattatgttcgtagaacaaatgtttgacatggagtgtgacgttgtaatgatcctctacacgtgtatatatcaacagtttgtatcacctatccatgtnaaagcactgtctccntctcttagcctctanttgcagcaataanatctttaaagcccttangtcncatnagcttgattagtgnagaantgggntcattgccttgtangganaanactggtcggaacgangtcaggagtgttgatnaaatc

SEQ ID NO: 8191 - DNA, 420 bp, Arabidopsis thaliana
  unsure at all n locations
  Clone ID: LIB24-035-Q1-E1-G5
aaccgcacttgctggtatagtgacattgttgcatgcatgccttgacatgaaatccattatactggggaaatatcactatgtgctctacttccttgttttggcgatgcagccaaggatgatgctgacggtggatcagagcctgaagcccatctcggtgccagtgcgggtaggacaagcggttgatgtggttggacaggcaggccgacctaagacaatcactgggttccaaacgcactcaacacctgttctccttgctgctggggagagagctgaactcgcaaccgagaagtacattccgttgtcgcccatattagaaggtttcgtcatattgaaggaaaatccagactacagagaggagtaaatccaaagttgcaagcatttgaagaaagagagagagcctttgaatacnttcactacggt

SEQ ID NO: 8192 - DNA, 423 bp, Arabidopsis thaliana
  unsure at all n locations
  Clone ID: LIB24-035-Q1-E1-G8
aaagctcagtgaaaagaagaagaaaaacaagaagctaaaaatgtctatcctttcgtttcctcacactttctttaacatctctccttcactcttctacactatccttatatccagtttagttctactgatcctcacgcgccggagtgctaaatcaaagatcgtgaagcttcctccaggtcctccggggtggccggtggttggaaacctcttccaattcgcgcgctccgggaagcagttttacgagtacgttgacgatgtaagaaaaaaatacggtcctatctacacgttgaggatgggaagtcnaacaatgatcataatctctgattcagctctcgtcnacgacgttctgattcaacgtggancaatgttcggcaaccctgacccaccnangaatccgacnccgaaccatcttcagntccaaca

SEQ ID NO: 8193 - DNA, 404 bp, Arabidopsis thaliana
  unsure at all n locations
  Clone ID: LIB24-035-Q1-E1-G9
ttctatacatcctttgtttcctcaactttcgaaatactcatttgtcaaatagtaacacttggcccatcatttgtttattcaatgaattaaccaaataaagttctattttctaactttttcattaatggcagaagcttgtttgctgctcttgtctactgacttatttattcaatctcatgttgctaattttgtaggtgttaactttctaagaaaaggagtttgttaaaacaatgaagtataangatgagaagtangagaaagctgagaagggttcaaggattttgcccaagacagttttacngantcttctttgtggactttcgttctanctnggagggttgtantgtgggaagaacanaattgaagtnagtgatgttgcaaaangctgaatcctctgncctgaa

SEQ ID NO: 8194 - DNA, 453 bp, Arabidopsis thaliana
  unsure at all n locations
  Clone ID: LIB24-035-Q1-E1-H2
cgaaacggnccaaagaccacncnggcgtccgaacanattcacggcggcgattcgaattccggcggcggaggaggaggaagtagccggaacgatgagatttctgtgacgagagcgtcgcgtttcgatgcattgccggaagattgtatctcgaaggtgatttcacatacgagtcctcgggacgcttgtgttgtggcttcggtttcgaaatcggtgaaatctgcggcgcaatcggatttggtttgggagatgtttcttccgtcggagtactcgtctcttgttcttcaatcagcgaatcatttatcgaaaaaggagatctttttanctctcgctgataactctgttttggttgaaaatggcnnaaagagcttttgggtggagaaaagctannngggaagaaagtgttnatangttatcagcgatgggaattngancnattaattttggggangaatc

SEQ ID NO: 8195 - DNA, 474 bp, Arabidopsis thaliana
  unsure at all n locations
  Clone ID: LIB24-036-Q1-E1-A10
cgttccccgntcgtaccgcnccanaattcccnangtccacccacgcgtccgcaggatccaaggagctgtatttgatctaccagaggagatcgcgaaagagctcctagagaaagatgtccccgaaggcaacagtttatccatgataacaaagttacctccacttcaagatgacggaccatctagtgataactacggacggttctctnnnnnnnnnnnnnnnnnnnnnnnnnnnnnnnnnnnnnnnnnnnnnnnnnnnnnnnnnnnnnnnnnnnnnnnnnnccgtgatanttggggaggtgntgatgacnagaggtngtagaaggagcagtggtggangaagcagctggtcccngaggtggtagtagttccagaggaagttctgangattggttgatcggtggccagaagttcatcaagcancaganctccttcccngggagannanttttgggggttcatgcttcatttntcgga

SEQ ID NO: 8196 - DNA, 448 bp, Arabidopsis thaliana
  unsure at all n locations
  Clone ID: LIB24-036-Q1-E1-A4
agttgcccggccggtccaaaattaacgggtccagcncgcgtccggaccanattgcccctgttatacatgagtggacatatgatgctatgtgccatgatttactgaacatggaaggaaacaaatatgtacatgtgattccaagcaaatcaggcggacaaccagagaagaaagatgtgctcttagaggaacatgatcctatttggctagagcttcgacatgcacatatagcagatgctagtgaaagattgcatgacaagatgaccaatttcttatccgaaaaacaaagctgctcagcttcagggtaagagagatgganctgagctttctacaaggagatttgcagaagatggttcaagcattgccacagtacagtngaacaaattgacaaactctctctcnaccgtagagattgctagnaaactcaacgacccttatcaganagcaagga

SEQ ID NO: 8197 - DNA, 414 bp, Arabidopsis thaliana
  unsure at all n locations
  Clone ID: LIB24-036-Q1-E1-A7
acgcgtgggcggacgcgtggggctgaagctaagataaaattagaagccttggacaagaaagatagggaaagaagaagaacggctgagttaaaaaacaaccttgaatcttatatatatgctaccaaagagaagctggaaacacccgagtttgaaaagatatccacccaagaanagcgcaaggcgtttgttgaaaagcttgatgaggtgcaagattggctttacatggatggagaagatgctaatgccacagagtttgagaagcggcttgactcacttaaagccatcggcagtcccatatctttccgatcagaggagcttacagcacgaccagtagcaattgaatatgctatganatacctaactgaactcanagagatcataaggagaatnggagacgaacancacttggcttcc

SEQ ID NO: 8198 - DNA, 479 bp, Arabidopsis thaliana
  unsure at all n locations
  Clone ID: LIB24-035-Q1-E1-E2
tacgnccccaaaattcccanaaganagaattttccgtttcaagtactnaatctccgtctcttttcctccgcatctaaaaccatctgagaaatatctccgacgaaggagaagaaacgaaaatgacggagactggagtaatcggatgtggctgtcgcggagtcaccggcggcaatttcttccatcccggaggattttctttgaaatcttgtttcctcgagcagagtacaaaagcgtaatcgtaactttttccgaagcgtttctatgattcctcctttcaaacgcggtcgtttcatcactaagnttgcgttccgtcgccgggaacagccgaatctttancatggatgctcgangagaaatcacgatcgtttgtgttggtatcatcaangcacaagaganttccagtttttgtgatgatgccgattgannacatttgggaattgangcctctggggtgtnccaaagtattaaaaanggtcaag

SEQ ID NO: 8199 - DNA, 424 bp, Arabidopsis thaliana
  unsure at all n locations
  Clone ID: LIB24-033-Q1-E1-C6
cgtactatgcttgcatatcagggaacatcctctgtcgttaattatgattcttgtttggctagtttgatagccaagacaaatgtctttgttgtggaaggctatttgtttgagcttcctgatactataagaaccataacaaaagcctgcgaagaagcccacagaaacggggcacttgttgctgtgacagcatcagatgtgtcctgcatagagaggcattatgatgatttctgggacattgtggggaactatgcggatattgtatttgcaaatagcgatgaagcaagagcgttttgtcacttttccgcagaggaaagtccaatttcagcgacaagatacatgagccactttgttccgtttgtttctgttaccgatggaatcaacgggtcatatattggagtnaaaggagaaggcatctacattcccc

SEQ ID NO: 8200 - DNA, 481 bp, Arabidopsis thaliana
  unsure at all n locations
  Clone ID: LIB24-033-Q1-E1-C7
tgttagttggccngccggtaccgatccaaaattcccgggtcgacccacgcgtccgctctgctccatttctctcactttcttcacatctctgaagctcttcgtcacgcatctacaatggcatcgatgatgcaaccgcagatcatactgctgaaggaagggacggacacatctcagggcaaagcgcaactagtaagcaacatcaacgcttgcactgctgttggagatgtagttcgaaccacgctcgggccacgagggatggacaaactcattcacgacgataaaggatccgtcaccatttctaacgatggtgctaccatcatgaagctcctcgacattgttcatcctgctgctaagatcctcgtcgatatcgccaaatcccaagactccgaggtgggtgatgggacaactacagtggttcttcttgcaacagagtttttgaaggaagcgaagccatttattgaggatggtgttcacgctcana

SEQ ID NO: 8201 - DNA, 407 bp, Arabidopsis thaliana
  unsure at all n locations
  Clone ID: LIB24-033-Q1-E1-C9
acgcgtccgccacgcgttccgcccacgcgtccgcggaccctgggtttgatcgtcccaccaagatggccgggaacgattgggtaaacagttacttagaggcgattctcgacgtcggtcagggtcttgacgatgctcgctcttctccatcacttcttcttagggagagaggtcgattcactcccagccgttactttgttgaggaagttatcactggttacgatgagactgatcttcatagatcctgggttaaggctgttgctacgaggagtccacaagagaggaacacgaggttaagagaatatgtgttggaggatctggaatcttgctcgtcaaaagaagcagcatgaggaaaaagaagcacaagaggctggntaagcgcangcttgaacgtgagaaaggtcgcagan

SEQ ID NO: 8202 - DNA, 458 bp, Arabidopsis thaliana
  unsure at all n locations
  Clone ID: LIB24-033-Q1-E1-D10
cgccgnccgtaccgagtccanaaatcccgggtcnacccacgcgtccggaaaacaaaaaaaacaatggcggataagctcactgacgatcagattacagaatacagggaatctttcaggttattcgacaagaatggtgatggttccattacgaaaaaggagctcggtaccatgatgcgttcaatcggtgaaaaaccgacaaaagctgatcttcaggacttgatgaacgaagcggatttagatggtgatggaaccatcgatttccctgagttcttgtgcgtaatggctaagaatcaaggtcatgatcaagcgccgcgtcacactaaaaaaacaatggcggataagctcactgacgatcagattacagantacagggaatctttcaggttattcgacaagaatggtgatggttccattacgaaaaagganctccgtaccgttgatgttttccctcggttaaa

SEQ ID NO: 8203 - DNA, 423 bp, Arabidopsis thaliana
  unsure at all n locations
  Clone ID: LIB24-033-Q1-E1-D4
taaccaaagacgcaatttcaaggtaagagctcaaatctctggtgaaaacaagaaggcgacatcattggaaccagtgaacaacaacggttcggtctctttgtctactactgttcaaaaccaaaaaggggcaaatgaagtgaatgggaaagggaaatccaagagaaagatagtgagtgatgaaattgagttgttatgggatgatgggtatggctccaaatctgttaaagattactttgctgcggctaaagagattttgaaggctgatggtggtcctccacggtggtttagtcccgttgattgtggtcgacctgttgaagatgctcctacgttactcttcttacctgggatggatggcacagggatgggccttgttccacatcacaaagctcttgggcaangcttttcaagtctccgtgnccggaa

SEQ ID NO: 8204 - DNA, 409 bp, Arabidopsis thaliana
  unsure at all n locations
  Clone ID: LIB24-033-Q1-E1-D6
taaccaaagacgcaatttcaaggtaagagctcaaatctctggtgaaaacaagaaggcgacatcattggaaccagtgaacaacaacggttcggtctctttgtctactactgttcaaaaccaaaaaggggcaaatgaagtgaatgggaaagggaaatccaagagaaagatagtgagtgatgaaattgagttgttatgggatgatgggtatggctccaaatctgttaaagattactttgctgcggctaaagagattttgaaggctgatggtggtcctccacggtggtttagtcccgttgattgtggtcgacctgttgaagatgctcctacgttactcttcttacctgggatggatggcacagggatggggccttgttccacatcacaaagctcctgggaaagnttttcaagt

SEQ ID NO: 8205 - DNA, 458 bp, Arabidopsis thaliana
  unsure at all n locations
  Clone ID: LIB24-033-Q1-E1-D9
tatccgncggcacggtcgaaaatccggggtcgaccaagccgtccgccacgcgtcgcccacgccgtcgcccacgcgtccgcactcanccaaggtgtttacaccaagtgtcattgggttgccatatcgctactatctaccactatggatttgccacccttatgttgcggaggtatgtcgatgctgttcgtgagttcaacaagattctcctctacattttcaagactaagcagtaccatcaaaagtcacctcagtacgagcaattactcaagaagaatgagcagatgtacgctttgcttgctctctccctctccctctgccctcaaactaaactcgttgacgagtctgtcaactctcagctgcgagacaagtatggtgaaaagatgatgaggatgctgaggtctgacgacgaggcctttggtatttangatgagctcttctcttacgcatggcccaangtt

SEQ ID NO: 8206 - DNA, 470 bp, Arabidopsis thaliana
  unsure at all n locations
  Clone ID: LIB24-033-Q1-E1-E4
antgttagtttgcccggcccggtccaaaatnnacgggtcganccacgcgtccggagaggcatcagggataaagtagagattcaaacagtttcagggtttcaaacaggataacagggatacacatgattaaaagtttgaaaagggttacaaaacagaattagagagtaaaagcagagacactaccgggatgcatagagaagatacctccacttctcggtgaggtgaaaacagttgaaaacgccggaaaaaggtcactggaactccatctttgcccgttgtgtaaagccatttttggaaggaactgttggataattctgttttagtaaaaagaggtagctgagatctggtttttcaaaagtttccaactgctaatagactgcattggagaaagtgcctggggagaaaactcaacgctctttttaaccttcagtcaatancctcctgaattcntttcctccggttttttcnca

SEQ ID NO: 8207 - DNA, 421 bp, Arabidopsis thaliana
  unsure at all n locations
  Clone ID: LIB24-033-Q1-E1-E6
acacaagcagcagtatcatcgtcgtcatcactcactagcaaagctcgagcttcttccttcttcttcaatggtcgctctcttccttctctgaacccgatctctccgtttctgttcctccccacaagtagatccttcgctctcgtcgtcaagagcactctcggaaggaatggagacaaatctttacttaggatgactttaagtggggatagctcggaaactgtagagatgacttcaactgatatgattttcgagccgattttggagcatggagttttccggtttgattgttctgttgaccataggaaggctgcttttcctagtgtttcatttaagaacagcaaagaccgggaagttcctattgtgaagtcacattgttccaagcatatattcctacttgtggttgtcctcanggacaacaaat

SEQ ID NO: 8208 - DNA, 482 bp, Arabidopsis thaliana
  unsure at all n locations
  Clone ID: LIB24-033-Q1-E1-F1
ttagttgnccggcccggtccaaaaatanccgggtcnacccacgcgtccgnaagacncgtgggctgctgaatcagagaccagtgtaaactttctcatcaacagtaacaaaccgcagaggtcattgaactccaatctccgtcatcaaagccggaatccctctatagaatctgataaagcggttggagttgttgacaaactaagagttatctagaaacatcgaagacaaggcaaagattctggagagacttttgtctgattcaaggagactgtcaagtctccggattagcctaacagatctgaaaagaaagctggagatgaatgagaaacaaagaagattcagcaacgctgatttggttataagtgaagagacagttgaaagaaatggaagaagctgtctcgcagctggaaaacacaaacgagattctttcaaaggaaattgaangaagactgggagatgccagagatatatncagaaaaggggg

SEQ ID NO: 8209 - DNA, 450 bp, Arabidopsis thaliana
  unsure at all n locations
  Clone ID: LIB24-033-Q1-E1-F10
ncaccggtccaaaatcccgggggnaaacaancanaaattgcagaaaataggcttaatctgaatctcttctcctccgtcgaagttttgaattctctctggttctccaattctcctctcgagctgccttaagcttcgcatttacgtttacgttatgcacgaatgagatcatcgtagatcgtgattgaagaagcgagagataaattaggagagcgaagatgagcgagggccagaagttccagttgggaacaatcggcgctttgagtttgtccgttgtgtcatctgtctcgattgtgatctgtaacaaagcgcttattagcacccttggcttcacattcgcgactactttgacaagttggcatcttttggtcacattttgttcccttcatgtggcattatggatgaagatgttcgaacacaagccttttgatncacgagctgtgatgggattgg

SEQ ID NO: 8210 - DNA, 464 bp, Arabidopsis thaliana
  unsure at all n locations
  Clone ID: LIB24-033-Q1-E1-F12
ctgttatcctgccgctacggtccgaaaatccggggtcnacccacncgtccgatcaccaattcggttgacatctacaacgcacctagtggctcgttaagggttatgaccgcgaacaatgactgtactgtccggctatttgatgccacaaactttgccttgctcaacagatttgcctttcactggtctgtaaataacatctccaccagtccagatggtaagctagtggctgttctaggagacagtcctgagtgcttactagcagataccggatctggaaaagtgatccacggactcgaaggccatctcgactactcgttttcatcagcatggcacccaaacggtcaaatcttagccacgggtaaccaagacacaacctgtagactatgggacgtaaggaacctgtctcaatcactcaaagtcttgaaaggaaacatgggagctatcagaccttgaagttcacgtct

SEQ ID NO: 8211 - DNA, 467 bp, Arabidopsis thaliana
  unsure at all n locations
  Clone ID: LIB24-033-Q1-E1-F3
tattgncggccggtccaaaaaaacgggtcganccacgcgtccgcttttcccacccaagatctctccttcttgtttccccagatctgaaatttcaaaagctacccaattttaactcaagactctgaacaacacatctagatccatttccatggcgagcgcctggaaaaaagacaagaaccaaaaacttttatcaccaaagacactaannnnnnnnnnnnnnnnnnnnnnnnnnnnnnnnnnnnnnnnnnnnnnnnnnnnnnnnnnnnnnnnnnnnnaatactccaatccaaatctctccatcaattccccataccctatccctccttttgattgcttcaaatgtccacaatcaaaacccataatcgcaaacgtcgtcgaaaatctcaagtacccttttgtttactctctcgctgatctcggtaatctcccggagaaaccacataaagaacattgntaggggtacctaa

SEQ ID NO: 8212 - DNA, 481 bp, Arabidopsis thaliana
  unsure at all n locations
  Clone ID: LIB24-033-Q1-E1-F4
ttagtttgccggnccggtccaaaatnacgggtcgagcacgcgtccgtgaatctgtagtttcgtcagaaattgatgataatccatatcagacacagagccatccagtagagcaccacaaagatgaagatgatgtttcatctggttcagccagttttcaacaactagatagtcatgatcaagaagtctcacatgaaaaggatagacctgctgttgtaattccaaaccatttgctaattcacacagaagaatgcgcgcaattaagttttggaagctttggaggttttggatcaaggcctttgancaacagcgtagaagcgacttctgatgtagctccacaaatcgancattcangatgcaanaaatactgagttctatggnngatgaacatctgggaaagtacaaccagtggaaatatggtccacacacctgctactggaaattatgaggattcctttagaaccaaggggaanagggggtttaa

SEQ ID NO: 8213 - DNA, 424 bp, Arabidopsis thaliana
  Clone ID: LIB24-033-Q1-E1-C5
tactaggattagattaaaccagtagagagcatcaattttgttttgttagaaaattaagttttagttaatatttattcccatgaaaatgtccgctactactaaagaaagaatcgtaacagacggatcacaaacagtcacagatccgagccctgttttgagtttacgagaagaatattaaaattctcatctttaaccattttatccgatcatgaatgtgagagacgagggaaaaactacggcggagaaacacggcggaggagaggagaataaatcaccggagaacaaatggcgatttaattctcctctagctcaagtgagcttaatgggattcgtttgtttctgttgtccaggaatgttcaacgctctctccggcatgggaggcggtggtcaagtagattcaaccgctgctaacaacgctaacacc

SEQ ID NO: 8214 - DNA, 414 bp, Arabidopsis thaliana
  unsure at all n locations
  Clone ID: LIB24-033-Q1-E1-A6
acgcgtccgtttgtttttcttgatgcgagaatgaatcttagttcaagtgggttacaaggaccaatagccttttcctttagagatctctccctcctcgagttatcgtaagtgtacaaatgcaagccatacaaacacacactttccaagagctttcttcagttgaaatggaacttattgacaaacggtttgaagatgaaggattgtttggctgcaaagaaaatcattcagtagccaacaaagaaataactttgtgtgaatctgctgatgtatctattaaggagttgataaagagacttaatgaaggtaagcttttgtaacgaattggtaagagacaactgaaattttcctancttgctttcngttaatttcctaaatgtgctacgaaaagtttaaggcccnaaatccttggggttt

SEQ ID NO: 8215 - DNA, 435 bp, Arabidopsis thaliana
  unsure at all n locations
  Clone ID: LIB24-033-Q1-E1-A7
acgcgtccgcagatacaaagactgtagttgatttgataaagacacattttgaggataaaagatcaagtagcgagcctccacagataccagtgtttcctgttccttctcatgaagagacgcggttttcttgctttgttgagtcagaggcagctgggtctgcagtaatgatcagctataagatgcctgtaagtgatctgaagacagtgaaagattatagggatatgcttgcagaatcaatgtttctacatgctctaaaccagagactcttcaaaatatctcgtaggaaggaccctccattttttgcgtgttctgttgctgctgatgtcctggtgagccctttgaangcctatataatgagttcgtcttgtaaagagaaaggaactcttgcatccctagagtctaagcttctcgaagttgctaaggtacgccttcaag

SEQ ID NO: 8216 - DNA, 410 bp, Arabidopsis thaliana
  unsure at all n locations
  Clone ID: LIB24-033-Q1-E1-A8
ttcgcaagtatcaccgggaattgcaaagaagcagaggaccatgtacggagacgctacaaactggaatgaagatgagtatagagaatcaattttgaaggagcgagagatagagacacgcaccgtcttcagaaccgcctgggctcctccggcgagaatctctaatccagacgcatttgttgtagcctccagcgatggaactttagctttccattcactgaactcgcttgtgtctcaatcggcgagttttggctactcgaaaggtcaagatgttatggtggctgaacctgagagagtggttagggcacacgaaggtcctgcttatgatgttaagttctatggtgaagacgaagatgctttgctacttagttgtggtgatgatggtaaagttaaggggatggaaatggngaaaa

SEQ ID NO: 8217 - DNA, 443 bp, Arabidopsis thaliana
  unsure at all n locations
  Clone ID: LIB24-033-Q1-E1-B1
cgtccggatggnannnnnnnnnnnnnnnnnnnnnnnnnnnnnnnnnnnnnnnnnnnnnnnnnnnnnnnnnnnnnnnnnnnnnnnnnnnnnnnnnnnnnnnnnnnnnnnnnnnnnnnnnnnnnnnnnnnnnnnnnnnngaaaactnnnnnnnnnnnnnnnnnnnnnnnnnnnnnnnnnnnnnnnnnnnnnnnnnnnnnnnnnnnnnnnnnnnnnnnnnnnnnnnnnnnnnnnnnnnnnnnnnnnnnnnnnnnnagagtccatggaagtggatacctctgagttgganaagaaggctgggagtggagaaggagctgaagaaccttccaaagttgaaggnctcaaggacactgaaatgaaagaagcgcaagaagttgttactgaggctgatgttgagaaaaagcctgcagacggaaaagacctganaacaaaggcaaccttnacaa

SEQ ID NO: 8218 - DNA, 402 bp, Arabidopsis thaliana
  unsure at all n locations
  Clone ID: LIB24-033-Q1-E1-B10
acgcgtccgaaaacataagagagtctaaacactgtggtagaaaaaaatatagacttttagatatgtgtagtaaaataacattaagtgttaactttattttccagttatttcatatcaacagatgctgtgaatggatcatttcctgcgcttttggcttttggagattcaattctcgatactggcaacaacaattttctcctgacttttatgaaaggaaatatctggccatatggaaggagtttcagcatgagaagggcgacaggaagatttggaaatggaagagttttctctgatatagttgctgaaggtttagggatcaagaagattttaccaagcttatcgtaagttgttcaattctccaagtgaccttagaactggtgtttgcttcgcatcangtggtgc

SEQ ID NO: 8219 - DNA, 407 bp, Arabidopsis thaliana
  Clone ID: LIB24-033-Q1-E1-B11
acgcgtccggtttcttactaaggttgaatcatggtttccgaaacaaccaaatcttctccacttcactttgttctcttccctttcatggctcaaggccacatgattcccatggttgatattgcaaggctcttggctcagcgtggtgtgatcataacaattgtcacgacgcctcacaatgcagcgaggttcaagaatgtcctaaaccgtgccattgagtctggcttgcccatcaacttagtgcaagtcaagtttccatatctagaagctggtttgcaagaaggacaagagaatatcgattctcttgacacaatggagcggatgatacctttctttaaagcggttaactttctcgaagaaccagtccaaaagctcattgaagagatgaaccctcgaccaagctgtctaat

SEQ ID NO: 8220 - DNA, 413 bp, Arabidopsis thaliana
  unsure at all n locations
  Clone ID: LIB24-033-Q1-E1-B3
agagcaatattgtagcgcctcagaaacatcctctaacaaatttgtgcaatgagttggctgatgagcagagtgtagagcacagcagagtaacctctggagggattatagcacctaaaaaaacctgcattgctctttcaaatgaatcctcaacagaaagaccaaaggataatgtagaagcaagtgaaagtgaacctttagcacctgatagtggagctgtaacggtgtcagagaaattatcagccgatgagccaactgaaaaaaacaatgaaggccttaaagatgttaaatttctctgggatttaaatattccttgtgatgtagaagatgaagcgtctcgaagagatgaagagggagaaatcacaagagtctattgcccctaaagggagcgaaccttttgatggaagtnaacacag

SEQ ID NO: 8221 - DNA, 446 bp, Arabidopsis thaliana
  unsure at all n locations
  Clone ID: LIB24-033-Q1-E1-B4
atgttacttgncggcccggtccaaaataacgggtcnagcacgcgtccgggattgctcatggccgtccccgggttcttctcttccatggcgcttctccggcattgtcctgtatcgaacacagaggacggaggaggaagcttcttccatgtcgctcctcgccgaacttttcgtcctcacctcctcaacactagttctgggtgtggatttcttaagtgttatagtgactatattacaagaaaatacctgcggaggaataggactcaagctatagcagagtatttgggttcagcttcagatcctaagaagccaactgggaagtcaagttatcatccttcagaagatatcagagcatatgtgccagagaagaatcctgggagattctaggctttcacctcctgaaaactgctaaaaccatcattgaggtgaacaaaaaaagggaancctga

SEQ ID NO: 8222 - DNA, 478 bp, Arabidopsis thaliana
  unsure at all n locations
  Clone ID: LIB24-033-Q1-E1-B5
cgttgcccgccggtaccggtccaaaattcccgggtcgacccacgcgtccgcccacgcgtccgcccacgcgtccgcggacgcgtgggtggaattctttcttcttcaagatttgtaaatgggtgttagttcttcaaagatctaaaatatcaagatcaggaagaaatgggaggtgacttgaaaagccagctatctagagagagccatgtgtttggacttaaggtgtgggaagtaattggtatagctgttgcattgctcatcatagctatcctctctgttctttcgtgttgtcttacttcgaaaaagaaatcaagaagatcgaaaaccggtcttccggttatccaaactcctccggtggtctccaaagagatcagagaagtgagagttgagcatgtctcaagctagtaactttgctcctggtgaaggcattcttctaacaattcangacaaaaataacaaagactcagaaaaagtcatgggt

SEQ ID NO: 8223 - DNA, 421 bp, Arabidopsis thaliana
  unsure at all n locations
  Clone ID: LIB24-033-Q1-E1-B8
cgacggagacacaaaatcgattgaaaatttcgacgccacaaaatcgattggaagtcttagctaggaatcgagaatgctatagctaaaagttgattgatcttcatattcgaaatttacacagcaggagcttccagcttgcaaaccaattcttacgcctggttgggtgatttcaactcttgttttgtggcccttgtcacggcttcgaatctacacaatgatgcctggtgcttaaactttttattgcatactctggtttaatcactcactataccaatatatatgctaataattgtggttctaatcactaatcaatgaaatgctgtttctaaagttgcgtacttggtttaagatcctattgtggttcagtttgggaaaagaacttgttgaaataaaatccaaaagggtancttcacaagattta

SEQ ID NO: 8224 - DNA, 389 bp, Arabidopsis thaliana
  unsure at all n locations
  Clone ID: LIB24-033-Q1-E1-B9
aagaattgaaggaacttgaaatgcatctcagcttccataggaagcaaacgagaactgtttactgctgagatgcatttgaagaacacaatcaaacaagctacagtgagcttcttggacagtgaagaattgaaggaacttgaaagttgccttgaggaggtaagaaatgtcatgcagaaaagtgaagaagagtatagagatacaaaaacatgaaagaagaaaagacttgtcactatcatcatagattagcatttggtttctgggtgttgtaaaattaaatcatttctgttgtttgggtttatgggtgttgtaaaattaatcatttttgttgtttgggttaaagacattgttgagatgataacttaatgtttctttttttgcgattaacnagg

SEQ ID NO: 8225 - DNA, 445 bp, Arabidopsis thaliana
  unsure at all n locations
  Clone ID: LIB24-033-Q1-E1-C10
ggnccgtaccggtccaaaattccggggtcaaccnacgcgtccgcngacgcgtgggttttgtaaggttttgagtgatcctcaaaaagagagccatctatgatcaatatggagaagaagtctaacaagccaggctccgcctcccggagcaggcggcgggttttcggatggaggggcttcgttccggttcaacggtagaagcgcagatgatatcttctcggagttctttggcttcacaagaccatttggtgactcacgtggtgcaggtccctctaatgggttccggttcgcggaagacgttttctcgtcaaatgttgttccaccgaggaaagctgcccctattgagaagacaacttccttgtanntttggaagatctctacaagaggagtcagtaagaagatgaagatctctcgggacgtcctcgattcaagcgggaagacccanaac

SEQ ID NO: 8226 - DNA, 408 bp, Arabidopsis thaliana
  unsure at all n locations
  Clone ID: LIB24-033-Q1-E1-C11
atcccaaatcctcccagatgtttttatcatcttcttcttcctgaagatttgatttcattttcctctctttcagatccctattctcatggcttctggatcttactggtgctatagttgtagccgattcgtttgggtttccgattcaatctcttgccctgattgcgacggtggtttcctcgaactcatccaagagcctctcgatttcacaccttccgattnnnnnnnnnnnnnnnnnnnnnnnnnnnnnnnnnnnnnnnnnnnnnnnnnnnnnnnnnnnnnnnnnnnnnnnnnnccatccgcttctatgcacgccgataacagtcccactcctaccatcgttactcgtacacgaagcaaatcgatctcctaatccaagttattgttctccgtggatctgctgctgctcct

SEQ ID NO: 8227 - DNA, 458 bp, Arabidopsis thaliana
  unsure at all n locations
  Clone ID: LIB24-033-Q1-E1-C3
tagtttggcccggncccggtccagaatnaccgggtcganccacgcgtccgcccacncgtccggtgccttcagaaaagttgaagctagaatcgtcgagaagagaagaaaaggcttacactgagggactgtctattgcggttgaaagacttgaagcaggaaggaaaagaagaggtaacacatctggagatgagactagcgaaccaagcaataacaaaaagaggaaacatgatgttacccaaaaatattctgatgaagctgatacccagagtgtcatatcaagcccgcaaaatgtgcctgaggacaaacatgaactaccatcaagccaaacccagacgccaagtggtatggtagtcatcagtgaaaccgttaagatcacaagagtaacgtgtgagacagaggtgaccaacanagtcacaacccttgactgctcaaaaagtccttccggaaacaaggganaa

SEQ ID NO: 8228 - DNA, 467 bp, Arabidopsis thaliana
  unsure at all n locations
  Clone ID: LIB24-033-Q1-E1-A4
agnccggtcgtgtcgaaacaaacgggtcggtcangcgtccggaaacaacttgatgccnatgatgatncatcangaaggggaggagggtctccatanagaananaagaactcagtgaaatcacaccaactaggcttangaanacgtcacaagcacaggaagcacaattcaagcaccctgatagttccatgtttgagaatggggtgagagatagatggcataaaaagggagctgctgatagagatggtgccttgttgatggatatggaaggacttgttacccaaaaggaaaaaattgtgagagttgaacaagcagaatgaaatattctgatgatgatgatgggattangagctctgaagacattggctgaaatgtcagcntcactggctccggctggttttgtttngatcagaatcatctccaaactgggaaanaataaatgaaanactaaacaacgttggattngaaa

SEQ ID NO: 8229 - DNA, 472 bp, Arabidopsis thaliana
  unsure at all n locations
  Clone ID: LIB24-032-Q1-E1-D4
ctgtttattcgnccgcacggtcganaaatcccggggtcnacccacgcgtccgcatctcttgtaatccccagcgaatgtcgtagtggatactctgtccctgaggttacaaccaccgggcttgacgatatcgattggctctcgtttatggagtttgattccccgaagctgttctctccgttgcactctcaggtgcaatctgagctcggttcctctttcaatggcttacaatctgagtctagtgaattgttcaaaaaccacaatgaggattacattcagactcagtncggtacanatgatgcggatgaatatatgtccaagttcttggattcttttcttgacattccctatgagccagaacagatcccatatgagccacagaatcttagctcatgcaacaagatcaatgatgaatctaatagaggaactangattagaagctcgannnagcananggccccgggttgtgcggagc

SEQ ID NO: 8230 - DNA, 417 bp, Arabidopsis thaliana
  unsure at all n locations
  Clone ID: LIB24-032-Q1-E1-D5
acgcgtccgcccacgcgtccgaacagtgataatgtctccattgccttatagttcttggcctctgatactattgttagtattgtggtgcatggtagctagattatcaaacggagcttccaanaatgtaaaggttggaatcatttcaaaggtggaanatgctacgaatttccatatctattanggacaagacctttaaagtcatcaaaaacgccattganggcaagagctatctccttanntcagaacacttctangaatggcggttcggacaaagtattgtacttccaggataaagtcntatgtgattccacttctaaattactcattagacactcaatcttctcaaggaantgttccgngtttctttctttttagttacttggattacncgggaagcttgaagggaatancatcgga

SEQ ID NO: 8231 - DNA, 437 bp, Arabidopsis thaliana
  unsure at all n locations
  Clone ID: LIB24-032-Q1-E1-F1
cacgcgtccgcaagaaacgtccgcccacgcgtccgtgatattttctgtctcttccaaggacacattgagaacctaccgtttctgaagcagcagtatggactgaacaaaatcacaaacgaggccatcattgtgattgaggcttacaggacactacgtgatcgaggtccttaccctgtggacaaagttgttagagatttccatggaaagtttgcgtttatacgcttcgatagcgtcaagaaaactgtctttgctgcggctgaccccgatgggagtgtgccgttcttctggggaaccgatgctgannggcaccttgtgttttctnatancaccnagatggtgaanaaagggttgcgccaaatcttatngnccnttccctaaanggtggtttcttnancgnccntcggggtnngntttgagggaactttgancaacccaaa

SEQ ID NO: 8232 - DNA, 440 bp, Arabidopsis thaliana
  unsure at all n locations
  Clone ID: LIB24-032-Q1-E1-F2
ccggggcccaccaagncttcggancaananagaaaaggggtcnagaatggcggtcgcaatatcngggagtagtttgatatcgtcgactcttcagcattataataatcggatttatatccgagattatccgattccgtgtcactcttctaatccaatttgcaattcttttaatttcaaaagacgttcgttctctccttcttcccccaaatttaacgaccatgtcgttaacccttcctcttcttatttatcctccaagctttctccaattcgaacccattcctctttcgctgcgtgtggctgctcctggattcaagacaattcaatggttcatgattatgctacaacaactaatgggacgtccaagcgttgctcggcgttaccaacaacaaacacagtgggatgtctcttcggtgtcagatctttttgaattcatatgctcg

SEQ ID NO: 8233 - DNA, 470 bp, Arabidopsis thaliana
  unsure at all n locations
  Clone ID: LIB24-032-Q1-E1-F3
natcagttcgcgcggtcctggaatcccgggnccacccacgcgtccgcacatagacttactcctggancctnggtnggtaataatattgaggggaatggtgtgaaaaagacgaaacttggaggagggattccgagtcgggcgatttgttgtcaggtagacaactgtggagctgatttaagcaaagttaaggattatcatagacgtcataaggtctgtgagattcattctaaagctactactgcacttgttggaggaattatgcagcggttttgtcagcaatgtagtaggtttcatgtgcttgaagagtttgatgagggaaagagaagttgccgtagacgtttggctgggcataataagcgtagaagaaaagcaaatcctgatactataggcaatgggacttctatgagtgatgatcaaacaagcaattatatgtttgattactcctcttgaaagatactctccaatattca

SEQ ID NO: 8234 - DNA, 441 bp, Arabidopsis thaliana
  unsure at all n locations
  Clone ID: LIB24-032-Q1-E1-F6
tcgggnctcgacccacgcgtnaggccgaccttttttctttctttctctcctctacctctcagcttctgctggatctctccancanacacgatcttgttcggagagattcgtaggggaccgatctatcaaggcttcaagggcaaacagaaatggaccacgacaagacaggatgccaaagcccacctgaangtcncaagctatgtactaacaactgcggtttctttggaatcgctgccacaatgaacatgtgttctaagtgtcacaaggatatgttgttccaanaggagcagggcgctaagtttgcatctgcagtgtctggaacatcgtcatccancancatcatnaanngaaacctttaccggctgcgttggtcgaatantganganccnaatccggttgagccgattacngtttctgtagnggcattcctctgtccnaagt

SEQ ID NO: 8235 - DNA, 465 bp, Arabidopsis thaliana
  unsure at all n locations
  Clone ID: LIB24-032-Q1-E1-G1
ttatccgnccgcacggtccananatccgggtccacccacgcgtccgcatcattgacggtaggagtcaccacttttggcggcgattccttgttctctattttttttgcacaagcaacatttagcttctgcaaactccagttcatctctcaaccctcatatcgccgtgttttctcgctctagtaccgcgagctcggacgaaccaggaagcaatccgttaatctagaagcggtgttgagaagatgacgattacatcaaatatctctgtacagaacgataacctcgttgttcaagggaagactatccttaccaaaatccctgacaacattatcctaactccggttaccggtaatggattcgtttccggttcatttataggcgcgacgtttgaacaaagcaagagtcttcatgtgttccccatcggtgtattggagggtcttcggttcatgtgctggtttccgggtttaa

SEQ ID NO: 8236 - DNA, 407 bp, Arabidopsis thaliana
  Clone ID: LIB24-032-Q1-E1-G5
gggcggacgcgtgggtttcgattagctcaagcctcaaggtgaagcttgaagcccatcaatggcggatgggtagcttctggtctccttgaagatgaatcggatttcagctatttctactcttgtcactcctctccctcttcttccgtcgtgctcctttgttccgacacgacggtgttatcctcgcagagctactccttattccaggcgaatcaatctcaagcctctcacttctcgcattgttctcctcacgcgccgtcgtcagcttggtcagatcgtggaggaggtagaagccgctaagaaacggtatgggaggctcaacacaattgtgatgaactcagttctcgaagcttgcgttcactgtgggaaatattgatttggctcttcggatgttccatgagatggcggga

SEQ ID NO: 8237 - DNA, 419 bp, Arabidopsis thaliana
  Clone ID: LIB24-032-Q1-E1-G8
gtccgaattttttttttttttacttcattgactctttttctctatctctctagatcgaaagggaaaaggagatagagattgaagatgcgtgacgcaatcatcgccgatcctcttctggccatcgaccatgaaacagtcgcagagaagaagaaacagagcaaaaatctaaagatttctcttttactgcttctgattctcttagcaacttcaggttattatagctttagtgacaacattacaacagttttcttatcaagacaagctattgatgatgatcatagtcttagccttggaaccatcagtgacgtggttgaatctgagaatggtgttgtggctgctgacgacgctcgatgttccgagatcggtgcctctgttcttaaaagtggcggtcatgcggtggacgccgccgtggctattac

SEQ ID NO: 8238 - DNA, 461 bp, Arabidopsis thaliana
  unsure at all n locations
  Clone ID: LIB24-032-Q1-E1-H1
gnaantgttactcctgccggcaccggtccaaaaaatcccgggtcnacccacgcgtccgcnacgattgagagtaggattgaagctactttcctttaatcatttctaattttgcaaactaatttcttcactttcatctttgatctctctggaaaaataactaatttgacgttgttggaattaacttgttgaatttttctctgcaaattgtttggaataaggtaacgtttcctctatgtccacaattttgtgtgttattccaataattgattgtttttctctcnttctcaattgttcatcggntgatatcnagaatgcatgaagatctataggaaatagttttacattcgcgtagattcggattgcaattgtgtagattcngattgcgatttttgcttcangcattangcncttgatcgatagttaagaatggacccgttnggattggaaatgtctcctgagng

SEQ ID NO: 8239 - DNA, 424 bp, Arabidopsis thaliana
  unsure at all n locations
  Clone ID: LIB24-032-Q1-E1-H3
aaaatatcttcgcgacaaagaaccatcggagaagaggaagaagatcagtgtanagctatcgggaaatttatctgaagaggaaactgaaattganatcgaagttttgagtttgggtaaaaaatggtaggaggagtagaagaattgagtattgaacagttagcttcgagtatctctacctacaaagaacaactcgaacaggttaggcagcttttgtcanaggatcctaaggaactcgngaatatgcatgacatggggaaaggagcttaaagaggtgattgcatntnacagaggaagttcttgcaactgcaanagcaaaatgagatttctcnatcanatgccggagttagtgctgaagcaactcctggntcacccganttanagggtgcntgggaaaagacggntttaagggaaatgacccaatcca

SEQ ID NO: 8240 - DNA, 410 bp, Arabidopsis thaliana
  Clone ID: LIB24-033-Q1-E1-A11
acgcgtccgcccacgcgtccgcccacgcgtccgcggacgcgtgggcgaaaaatcaggaagaagaagaagaagattgacaaacaaaaaggattcacctttagtgactgagtgagagaaagagattgaaggaaaaaaaaaaaaaaaagggtgaagctttggagagaggataaccacgtagaggattctaatccgtggttgcaaacgaaggacccagaatttctggaatctcttgcttcgatcgaatcactctcatgtctaacgaagactctcttccgcctttcactttgtttggtttggatgatgtcgaaaattacggtctggtcactgaagcagacaattcgttacctttagatatacacaatcaggtttttcaacttgtggagaagggaaaccaatcattcaaaagagtc

SEQ ID NO: 8241 - DNA, 418 bp, Arabidopsis thaliana
  unsure at all n locations
  Clone ID: LIB24-033-Q1-E1-A2
ggggtttatatatagagaattagatatcccctccaattactcaaaattattatcaaaataagaaagagctcaacattgttctctgactctataaataactgttcttggaaattttccaagagaacaagaaacaaaaacaaaacgttgtttaagtgtggttctatagatttcttgtgaatgtcttctgaacaaggaaatggatcgaatccttccacgtcaccggaggtagaagggactaaaacaatcccctttcgccggagattgcaaagaggacaaagagttttcgctccaaagctgatggaggctctacgtcgatcaagggtaagctctgaagaagctccggtaaggcatcttantcgtanatggagaaccacaacggcgcaaaangtatantccctaaaagctctaagaaagctcn

SEQ ID NO: 8242 - DNA, 455 bp, Arabidopsis thaliana
  unsure at all n locations
  Clone ID: LIB24-033-Q1-E1-A3
taccgatccaaangggtcgagccacgcgtccgaaaaaaaaaaacagaacaatttcttcttcctctgggatccataagttttgagattttggtggtcagtgtctgatggagtgtaatgcaaagccaccgtttcaatgggaattggaaaacttgatatcttttggcacttctacagctgaagttcctagaaagctaaaaccaatggagtgggaaattgatggatttgattgcacctctctgtattcttcaagctttgcctatgctggtagttcaggttctgatatagctcatgctttctctaaaagctcaaagtcaacttccattagctcttcatcagctgaagtaagaacacacaattttacatccgaaactggtgaaagtcttcctggagaatttgcaaaggggattgatacttctccaagtcttgaactttcctttggctctggggattcggnt

SEQ ID NO: 8243 - DNA, 417 bp, Arabidopsis thaliana
  unsure at all n locations
  Clone ID: LIB24-032-Q1-E1-D2
acgcgtccggagaaacttgaaacaacaatctgagcaaagagcgttttatcttgttgattttggaatctccattacgatggaaggtgcggctgatcaanactacgaaagcgttatctgaattagccatggnttcttctaccaccttgaatgctgctgagtctagcgctggtgatggagctggacctcggagtaaaaatgctttgaagaaggaacagaanatgaagcagaaagaggaagnagaagagacgaaaggacgaaganaaagctgaaaaggntaaacaagcacctaaagcaanctcccagaangcagtggcagcagatgatgaagagatggatgcaacgcaatactatgagaacagattgaaatatcttgcggctgagaaggctaaagggggagaatccatancctcacaagtt

SEQ ID NO: 8244 - DNA, 414 bp, Arabidopsis thaliana
  unsure at all n locations
  Clone ID: LIB24-030-Q1-E1-F2
gaagaaaactctcgtctgttaaagctttcctctgtttaccttcggagtcaatcttgattccgatgggactcgaatcgggttttggagcgtttgggtgaagacatggagaaactaatgactgaatcaggtttgaaaccagttgttattgattcgaatcaagatttatctcgnnnnnnnnnnnnnnnnnnnnnnnnnnnnnnnnnnnnnnnnnnnnnnnnnnnnnnnnnnnnnnnnnnnnnnnnnnnnnnnnccacgcctttttgttctcacaagttctgcaaagcttgttggagcaagtatcttaagaaaaatttcttctctgtggagaaaaaccacactgcaatctcntgtccctgatcgaaattgtcgagctgctgttggaccgggagacggttgaaaagctaaccgtacgtg

SEQ ID NO: 8245 - DNA, 413 bp, Arabidopsis thaliana
  unsure at all n locations
  Clone ID: LIB24-030-Q1-E1-F6
gcggacgcgtgggctcgatccaccaccaccaccaacctcaaaagctttcatctttaccggtcatggacggtggttcaggtcaaccggcggctgatacagagatgacagaagctcctggaggttttcccgcggcggctccatcgcctcagatgcctgggattgagaatattccggcgactcttagccatggtggtaggtttattcagtataacatatttggaaacatcttcgaggtcaccgctaagtataagcctccgatcatgcctattggcaagggtgcttatggcatcgtttgttcggctatganttctgaaactaacgagagcgttgcgattaagaaaattgctaacgcttttgacaataagattgatgctaagangactctccgttgagatnaagctgcttcgtcacat

SEQ ID NO: 8246 - DNA, 477 bp, Arabidopsis thaliana
  unsure at all n locations
  Clone ID: LIB24-030-Q1-E1-G1
ctgttatcctggcggcaccgngtccgnaaaatcncgggcttaaccacagancacagacgatgtgaagcaagaagcgtatcttatctctacgtttcatattaaagcgcatgaaaacgaacataataaagattctcttttttttttttgaaaaatgctagaaaaataaacatgggtcacttgccacagagcctctactccgccgctggaccaaagtttccatatcctggaagctccggtctaggagtagatcaacggaagctgacgtggagccgcttcccggtgttcctacggtgcgcgtcgacggagtcgttaacgantttgactcagaataatgcggcggagatagagnttgangtanctgggtgagtcaacacgggtggggacgtgaggagattgannagcagacgacganggatgagatcaggagagtgtctccttgtncaaagccgaagntttccacatccctcctggctcttt

SEQ ID NO: 8247 - DNA, 470 bp, Arabidopsis thaliana
  unsure at all n locations
  Clone ID: LIB24-030-Q1-E1-G2
tgttatcctgccgcacggtccgaaaatcccgggctnaaccacagaaaacanacgatggaagcaagaagcgtancttatctctacgtttcatattaaagcgcatgaaaacgaacataataaagattctcttttttttttttgaaaaatgctagaaaaataaacatgggtcacttgccacagagcctctactccgccgctggaccaaagtttccatatcctggaagctccggtctaggagtagatcaacggaagctgacgtggagccgcttcccggtgttcctacggtgcgcgtcgacggagtcgttaacgagtttgactcanaataatgccggcggagatagagttgangtatctgggtgagtcaacacggggtgggacgtgaggagattgaatagagaccaccanggatgaagattnaggagaantgtccccttgttcaancccgaagcntttccanatccctcttgctc

SEQ ID NO: 8248 - DNA, 414 bp, Arabidopsis thaliana
  Clone ID: LIB24-030-Q1-E1-G3
gcttcttcttctctatcctctgtttcttcttcatggagacttgaaagcttttaaagtatatctaaaaacgcagtcgttttaagactgtgtgtgagaaatggctctgtttagagatattgttcttcttgggtttctcttctgcttgagcttagtagctactgtgacttcagaggagggagcaacgttgctggagattaagaagtcattcaaagatgtgaacaatgttctttatgactggacaacttcaccttcttcggattattgtgtctggagaaggtgtgtcttgtgaaaatgtcaccttcaatgttgttgctcttaatttgtcagatttgaatcttgatggagaaatctcacctgctattggagatctcaagagtctcttgtcaattgatctgcgaggtaatcgcttgtctg

SEQ ID NO: 8249 - DNA, 421 bp, Arabidopsis thaliana
  unsure at all n locations
  Clone ID: LIB24-030-Q1-E1-G9
aatttgtttccaaataacattctctctttaacacagccgcctttgtgaccgtccgatcttaaatcagcgtttccggttcatttgacggcaactatctctctctctctctctagagaattgatgaagaagagcatctatcttttttgtttttgaaaattaacaacacttcacgagggttgacctgtttcggtggtgtttcttcaattccggattttgatctttcgtttcgatcgaagatcaatcaaagtctccacctttcttcaatggatttggatagcatggactgtacatcaaccatggatgtgacagatgatgaagagatccaccangatcgccattcctacgcttctgtttccaagcatcatcatactaataacaacaccaccaacgttaatgctgctgcttctgggcgtctccccaa

SEQ ID NO: 8250 - DNA, 417 bp, Arabidopsis thaliana
  Clone ID: LIB24-030-Q1-E1-H1
gcccacgcgtccgtcacatctctctctgtctttctctctcaaacctaacaaaagcttcagacttcaattctttagctacctctctcccatggcacgttcgaatgtaccaaaatttggaaactgggaagctgaggagaatgttccttacacagcttactttgacaaagctcgtaagactcgagcacccggtagcaagatcatgaacccgaatgacccggagtataactctgactctcaatcacaagctcctcctcatcctccttcttccagaaccaaacctgagcaagttgacacggttagaagatcacgtgagcatatgagaagccgagaagagagcgaagttgaaacagtttggtgatgctggtggttcatcaaatgaagctgctaacaaaagacaaggaagagcttctcagaaca

SEQ ID NO: 8251 - DNA, 416 bp, Arabidopsis thaliana
  Clone ID: LIB24-030-Q1-E1-H2
gggaaaattgtacctctccaattctctgcttccgtcatcgtagatccatgagatcttcagcgggaaagcttctctcccattctctacggagaaaccgcgggaaacttggtgatggattttggattccggctacgaggtctcagaagatgtggaattcgacggtaccgtcagatgaaaatcctgatcaaaattcgatcgatgcaggatcttcaatgcggaaaccaattagcttatggcctggaatgtatcattctccggtgactaatgcgctttgggaagctcgtcgtaatatgttcgaaattcctaccggagacgacgcttctcagtcaaaattgacggctaaatctccgtctcgaagccgaacgtcaattctctaaaagttttcttccgattttgttcttcgaagaacaatatag

SEQ ID NO: 8252 - DNA, 407 bp, Arabidopsis thaliana
  Clone ID: LIB24-030-Q1-E1-H5
cgtgggcggacgcgtgggcaaaacgttaaactgtgtgagacttcggagataaaatttcccagaaagcgtgaaaggttaaccggaagaaaatgccgtcacaagatgatgttcaaaatcttccaatcgatatcaccttctctcgtctcggagtgatcggttacttggaggtcaaaaaggtgtatgagattctcctgaagacaactccggaaagccgcaacatctttggtcgactttcgggtgcttctggtgtttgggaagcaattgttcgtgcgtttgaaaaagatcacatttatcttggggaggcagctcagataataattcagaatgttaattacgaaatcccttatttgaaaaagcaagtgcaaaaggttcagcaacaaatgacagaacttgatcgtaaagaagct

SEQ ID NO: 8253 - DNA, 407 bp, Arabidopsis thaliana
  unsure at all n locations
  Clone ID: LIB24-030-Q1-E1-H7
actgacgacgatacaagctctctcaccaacggcgacagtatctttgccggcggcgggagcgcttctgcttaatctgtagctcaaactaaaaattctctgggtattactcatggtgatttggaataacgatgatgatgattttttggagattgataactttcaatcttctccacggtcatctccaatacatgcaatgcagtgtacggtcgaaaatctagctggtgtacccgtgacaactagttctttgagctctcctacttgagacaactgatttagttcagatgggcntctcanacgaggtttttgctacattgtttgacatgggatttccctgttgagatgatttctaagagcgatcaaggaaaactggaccaaatgtagaaacttcggttataantgatactatc

SEQ ID NO: 8254 - DNA, 360 bp, Arabidopsis thaliana
  unsure at all n locations
  Clone ID: LIB24-030-Q1-E1-H8
cggaggactcccaaaacagaaccaagattgctgagttgctccgttaccactcaaccaagagcggtgatgaattgaccagtctcaaggactacgtgacaaggatgaaggaaggtcagaacgatatcttctatatcactggtgagagcaagaaggctgttgagaactctccattccttgagaagctcaagaagaagggtattgaagttctctacatggttgacgctatccgatgagtatgctattggtcagctcaaggaattcgaaggaaagaagcttngtctctgcaaccaanggaaggtctgaaactgggatgagactgaanactagannaacaagaaagaaganctcaagganaaattn

SEQ ID NO: 8255 - DNA, 404 bp, Arabidopsis thaliana
  unsure at all n locations
  Clone ID: LIB24-031-Q1-E1-A10
aaactaattccaaaacgtttcttcatcagatccaaagatcgttccactgtctctaagtcccccacggctttttccttcggatccgcttcctcatcttccggccaagactgtaaaaactccggtggtgatggcggtggcggttccgttaccccgactagcattctcccggaggttccttctccttattcctacgtcgagattctccaagcgtttaagttgatagacagagacaacgacggagctgtctctagacacgatcttgagtcgttacttagccggctaggtcctgatcctttgacggaggaggaagatcaacgttatgcttaaagaggtggactgcgaangcgaaggtacgattcgtcttgaagagcttgcagtcgtgtagtccccttagatccggctct

SEQ ID NO: 8256 - DNA, 464 bp, Arabidopsis thaliana
  unsure at all n locations
  Clone ID: LIB24-031-Q1-E1-A3
tttaccttgcccgtgncccntgnaagtccanaaattcccgggtcnacccacgcgtccgcatatttctcatgcttcactcactctcgagactcgtgtatgttgatttacggtttgttcaagcaaagagaatgatgaatctaggatctctttcgttgagtacgagcaagtcgagtaagccaatggttagcatcagcttttggataccgtatttcactcactggggagagagcctgctggtctgtggctcggctcctggacttggttccgggaatgtgaanaaaggtttgctgctaaagccatcccagcaagatgatcagctcatctgngagtggctctgtctcggttccacctgggtttagctctgactattgttactatgtggtggatgactcgaagagtgtgttaaggtccgagtttgggatgaaacgaaaacttgtggtgcctgagacattgancgggtggag

SEQ ID NO: 8257 - DNA, 500 bp, Arabidopsis thaliana
  unsure at all n locations
  Clone ID: LIB24-031-Q1-E1-A4
tcgttgnccggcccggtccaaaaatnaacgggtccanccacgcgtccgaaaaagaagaagaaaacttttgatccatcttccaactctttcgtaatttgaaagaagaagaagaagagataccaatggcggcgtttacagggacaacagacaaatgcaaggcgtgtgacaagacggtatacgttatggacttgatgactttggaaggaatgccttatcacaagtcatgcttcaggtgcagccattgcaatggcactctcntgatatgtaactactcatccatggatggagttttgtattgcaagacccattttgaacagctcntcaaaggaatcctggaaatttcagccaacgaatttccaaacagcctggnaaagacccgagaaatccnaatggatgcgnacgaaaggctccaaacangggtaacnacccttctttaagcggncancacaacngacaaaatggtgcannccttgtaagnaaaaaccagtttanccctccta

SEQ ID NO: 8258 - DNA, 451 bp, Arabidopsis thaliana
  unsure at all n locations
  Clone ID: LIB24-030-Q1-E1-F1
cgggtccgnaaattcccggggtcgacccacgcgtccgcntgttgggtctcgaaccttcctcttcgtttgcatcaggaaagagcgagaatggcgggaggaggaaactttattgcgagagtgatctcatacgttgcgaacgagttcatagttaatggtttggcaaacagccatgctttccagagatttgctgtgaggacttcaaagagaatagaaaacctctctaaaatggctgcagagaacagggagaaagtcgctcagcaaatggaagaatttgccaagaacattgactccacgaagaaaccctgatcattctagtgtggaatcttaaaacctcagtaaatcacatggggtcagctcaagtanggaggtcgttatctttgtataaagaatgttaaaaagttaataagcttgtggattaaacaaccagtgatcttttggtgctgtttccctt

SEQ ID NO: 8259 - DNA, 467 bp, Arabidopsis thaliana
  unsure at all n locations
  Clone ID: LIB24-030-Q1-E1-B9
gtttacgcttgnccgtaccgtgtccgaaaantcacgggtcgacncacgcgtccgcccacgcgtccggccttgagagaaacttacgtgtgtaagaagctagaagctaagcaaaggctggaggatctcaagcgagattgtgaccctgagctaaagaaagatattgaggagttaatggagatatctaccgaaaacgagaggttacaggaggagattaaactttctggcgagctcaaagaggcaaagagtgcgatgcaagaaatttatgatgaagaaagttcatacaaaagcttggtgggttcactcactgtgnnnnnnnnnnnnnnnnnnnnnnnnnnnnnnnnnnnnnnnnnnnnnnnnnnnnnnnnnnnnnnnnnnnnnnnnnnnnnnnnnnnnnnnncgagtcgtaaagttgatgatttttctgctgagaaagctaaagaagtcattgatttggctaaccaaggang

SEQ ID NO: 8260 - DNA, 472 bp, Arabidopsis thaliana
  unsure at all n locations
  Clone ID: LIB24-030-Q1-E1-C1
ctggtattcctgcngccagcgngtccgagaaatcccggggtcgacccacgcgtccgggaaaactaagaaaggttctgtgtttanggttctggttctgggaagctcgttctcaccggaaaaccgaagaatatgatcggagtcgggaaaatgaaacagtactccaacgtccttgacaagcctctcagcaaaggcaagcaagaggtgagcttgaccgcatttgctttcttattctcggagctcgttcagtacaatcaaacccaggttgacaatatagctgaacttgaaagaagactagaggatgctgggtatgcagttggatctcgagttctagagcttctttgcaaccgggaaaagggaaacagaagagagacacggttactgggaattctgtcnttcgttcacagtactgtgtggaaagtgttgtttggaaaggttgctgattcacttgannaaggaacagaacatgaagatg

SEQ ID NO: 8261 - DNA, 470 bp, Arabidopsis thaliana
  unsure at all n locations
  Clone ID: LIB24-030-Q1-E1-C2
ctgttatcctggccggccagcggtccgnaaaatcccggggtcgacccacgcgtccggcgaaaacgccctggtgggccgccgttgctgcgtgtgacgggtgtggatgattcacagtccacctangctcgtgggggaggactcaccttggtangtgagaggcttgcaactttggcgcagtcatgtggtgtcccgtttgaggtttcacgatgcnatcatgtcngggtgcaaggtgcagcgggaacatctcgggttggnacctggctttgctgttgttgtgaacttcccatatggattacancacatgctagacgagagcgtaagtgttgaaaatcacanagacaggctgctgcatctgatcaagagcctctccccaaaaactggttactccantanagcaagaatccaacacaaacacctcgccattcctgtcacgggtttgtggaaacactgggattactacacaacgatgt

SEQ ID NO: 8262 - DNA, 433 bp, Arabidopsis thaliana
  unsure at all n locations
  Clone ID: LIB24-030-Q1-E1-C5
tttacncctgccggcacaggtccgaanactcgcgggtcgacgcacgcntcngcncacgcgtccgcccacgcgtccnnnnnnnnnnnnnnnnnnnnnnnnnnnnnnnnnnnnnnnnnnnnnnnnnnnattgtcttgctctgttctatttaacttttcttatatataaaaaaaatggcgaaaaatttactagcaatatgtctggtgtttatggttgcatcaagtgtggtttatgaagtgcaagggactttcttgttaaagctttacttgaggaggaagtttcccagacgttgtatcgactttgccccttatgctggcaaaggtatgttgatgctcggtgagcaaccttgaaggtggatgtcncngcaacnagagagttcaaagaatncgtttcaacgttcaangtcntacnngaggtttatnagctcaggcatcg

SEQ ID NO: 8263 - DNA, 409 bp, Arabidopsis thaliana
  unsure at all n locations
  Clone ID: LIB24-030-Q1-E1-C6
gctgaaactaagaagccatggatgctcaatatcaagatctacctcctctcaaaagattaagactgttgcagagagatctcgaagctgctcaacagcaccagctaccgaaccaaccggagatgaagtcgttgcagttgccggcaaagaagaggaagcagactcgtgttgattatgacgatgacgacgcagagaactccaatcccacctatcattgtcttccggcgaagaaaaggatctgggcgattgatcccgatcttctctccggtggtgggtaacccttttccgccttttgatctaaatgtagagtataagccctatgttgaagaaganatccatttgagaaaaaatccactcctaaatgttgaatctagtccaagangtnnaagaaggatgatggttaagnggaatt

SEQ ID NO: 8264 - DNA, 418 bp, Arabidopsis thaliana
  unsure at all n locations
  Clone ID: LIB24-030-Q1-E1-C7
ggaaggagaagaaaagtgtcggagagaaagaagaagccaatcatcatcgccagttgttcttctcttcgagatattcaaatcctccgtctctagagaatttcatatcaagagaatcagtggtttctgtagtttgtggtggtggtggttggaaggtaagataggatatggcgcaggagcaggaaggagcggtcgttgagaaaggtgagccgaatgattcctccgccgctgccgtggccgcaaccgcaaccgcaaccgccgatagcgtgaagaagaagcaaaatggattcttttcgcgtttgtggaatgggatatttagggttagaggtgacgatttcgagaagagacttcaatacatctcaagggaagaagctactgttttatcaaggatgaagcgtanatcgatttcatgganggagac

SEQ ID NO: 8265 - DNA, 432 bp, Arabidopsis thaliana
  unsure at all n locations
  Clone ID: LIB24-030-Q1-E1-C8
ggagtgagacatatanagagagaaagatgccggtgcacgatgagcaagagcatgaggtgtacggtggagagatcccagaagaggaagaaggtgagatggatacggaagagtacgaagaacacggcggagaagaaggtgccgccgccggagatgaggagcttgaacctggctctagctctagggacttggaggatatgaagaaacgaattaaggagattgaggaagaagctggagctttgcgtnaaatgcaaagccaaggctgagaaagatatgggtgctaatccagaaccctcaagttgtgttanttgccggctgaaaaaggnanaaattgaatccncgttccaataataatgtttggcaattgttggaactaatgccatgtnactnccaagaanggaaantccaagccaaccaattttccaatccatgttg

SEQ ID NO: 8266 - DNA, 509 bp, Arabidopsis thaliana
  unsure at all n locations
  Clone ID: LIB24-030-Q1-E1-D2
agntttctgcgccacggtccgaaaaccgggtccggccaagcgtcgggaaaccccannagcatcgangntcgtcgatcgtcgatcggttgctctctttcattaatcagatctaattgatacccaagcttcttcatcggaggccgtatctcacgaggaaacatgggcggtagatttggagtcctcctagtcctcttcctcttgagctggtcttgtcatgctacaaacccgattccntctcgaaaccattcgaaatcagctcatgatggacaaaccaaagtctgtgaaactaatgttgacaagttatggncacgcctaagtcattggantaaccttcaaagactacgacaanccaaggantggaactccgtttgaagggncctttcatnancaagctggctcctcaaggantttccncccntcctcaaaganaaaacaagtggtccttttccaaatngggtaaggattcaattaacaaccccaanccttttntcctttcaagaacnaaggtc

SEQ ID NO: 8267 - DNA, 444 bp, Arabidopsis thaliana
  unsure at all n locations
  Clone ID: LIB24-030-Q1-E1-D3
tatcctgcngtaccgggtccgaaattcccggggtcgacccacgcgtccgccgcaacgcttcctactccaccggattccaaaacgccaccgtcggccaagctccagacagagtcaccggacttttcaactgccgtggagatgtctcaacggaagtttgccgtagatgcgtctcctttgccgtcaacgacaccttaactcggtgtcctaaccagaaagaagccacactttattacgatgagtgtgtacttagatactctaaccagaatattctctcgacactaataaccaccggtggagttatcttggntaacacccggaatgtgacatctanccanctagacctgttaagtganttggttttgcctactctgnaccaagccgccaccgtagccttgaacanttccnaanaattcggtacgagaanagacaagttnactggcgttg

SEQ ID NO: 8268 - DNA, 429 bp, Arabidopsis thaliana
  unsure at all n locations
  Clone ID: LIB24-030-Q1-E1-D4
cacggtccgaaaaatcccggggtcgacccacgcgtccgatcanctgatcacacggngaagataatcgacggcaaggcgattgctcataccatcagatcagagatcgccgaggaagttcgcggtctatctgagaaacacggcaaggtcccaggactagctgtagttattgttgggagccgaaaggattcacagacctatgtgaatacgaagaggaaagcgtgcgctgangttgggattaagtcatttgacgtgggcctaccagaggaagtttctgaagctgatcttantaccaaagttcatgaactaaattcaaatcccggatgtccatggcatattagntcaactcccattnccgaaacatattantgaggaaccatatatttgggtgcaatcagcattgntaaangatgtccaanggcttccatccct

SEQ ID NO: 8269 - DNA, 402 bp, Arabidopsis thaliana
  unsure at all n locations
  Clone ID: LIB24-030-Q1-E1-D7
gaaaaagtctccgacactctctangatttcctttgctccttcgttctggccatggcaatggcaaaactcgcaattttcaccactcttatggccatactcgtaatgacatctcaaggaaggattccaacagaaggaggagagaaagaagcagaggctgacagaattacgtcacttccaggtcagcctaacgtcacgttcgagcagttttccggctacgtcaccgtcgataaactctccggaagatcactcttttattggctcactgaagcttctgacctccctctctccaaacctctcgtantttggctcaacggaggaccgggatgttcgtccgtagcgnacggtgcntcgaaggagattggaccaatcanggataacaaaggtggttccgggttgtancct

SEQ ID NO: 8270 - DNA, 415 bp, Arabidopsis thaliana
  Clone ID: LIB24-030-Q1-E1-E4
gactgattcttcattgacggtaggagtcaccacttttggcggcgattccttgttctctattttttttgcacaagcaacatttagcttctgcaaactccagttcatctctcaaccctcatatcgccgtgttttctcgctctagtaccgcgagctcggacgaaccaggaagcaatccgttaatctagaagcggtgttgagaagatgacgattacatcaaatatctctgtacagaacgataacctcgttgttcaagggaagactatccttaccaaaatccctgacaacattatcctaactccggttaccggtaatggattcgtttccggttcatttataggcgcgacgtttgaacaaagcaagagtcttcatgtgttccccatccggtgtattggaggggtcttcggttcatgtgctg

SEQ ID NO: 8271 - DNA, 398 bp, Arabidopsis thaliana
  unsure at all n locations
  Clone ID: LIB24-030-Q1-E1-E6
cgtcctaagccatgaaatagtcgcaaaggccctttcttcgtcttcgtttctaattgctttcgacgacaatcgatcgtagagaagtctacctcgtagacatctctctcacaaatccaattcaattaccattgtttgttattatctgatgtcgaatatgcaattctctcgtggttttaatccctttgttatcctcttctgtctcgccgtggttgcaccaattatatcggctgatgtcgctatcttgagaacggactattaccaaanaacatgtcctgatttccananaattgtgcgtgaaggccgttacaannagncaagtccaanaaccaacaactgcggccgggaccctccgtcncnttnnccatgantgtttccttgaaggttgtgatgcatctgtc

SEQ ID NO: 8272 - DNA, 402 bp, Arabidopsis thaliana
  unsure at all n locations
  Clone ID: LIB24-030-Q1-E1-E8
aaaaaccctagatttcttctcttaaaacccacatcgaatctcaactcagaaccaacaatgctccaacctttctcttcctcctctgttttctcgagaatcctctggactttcttggtttaagaagattcgttgttgaatcagagagaaagaaagcatccatttttctatcattgcttgcttgctatggaattgggtaaatctcgattctacttatgttgcaattgcttttctcctgttagattttccgattantctttagctgggaagtgattannccagacgccatctccatcactttcaantgtattcctataccttcttctgaagattcttcgtatttctcgattcgatgtttanaaacttcaaattctcttccaaatcttgaaacgaatttctcccana

SEQ ID NO: 8273 - DNA, 456 bp, Arabidopsis thaliana
  unsure at all n locations
  Clone ID: LIB24-030-Q1-E1-B3
ctgttatcctgcccgcaccggtccgaaaatccggggtcgacccacgcgtccnnnnnnnnnnnnnnnnnnnnnnnnnnnnnnnnnnnnnnnnnnnnnnnnnnnnnattgtcttgctctgttctatttaacttttcttatatataaaaaaaatggcgaaaaatttactagcaatatgtctggtgtttatggttgcatcaagtgtggtttatgaagtgcaagggactttcttgttaaagctttacttgaggaggaagtttcccagacgttgtatcgactttgccccttatgctggcaaaggtatgttgatgctcgtgagcaaccttgaaggtggatgtcccgcaactagagagttcaaacaattcttttcaacgttcaagtcttaacatgagctttatcagctcagcatcgatatccgcatcgaaaaacatcgatgtggagatgaatgggganatgtga

SEQ ID NO: 8274 - DNA, 408 bp, Arabidopsis thaliana
  Clone ID: LIB24-029-Q1-E1-F12
gattgattcgcacctcgcaagatggaaagcactagatcagatccagagcttgatgatgactttagtgaaatctacaaggagtatactggtcctgcaagtgctgtgaccaacaacaatatccaagacaaagacaaacctgtcaaacaacgttctgaagaaagatgtgatgaagaagaagagcaacttcctgatcccaactctgtaccaactgatttcactagccgtgaagctaaggtttgggaggctaaatccaaagctactgagaggaattggaagaagaggaaagaggaagagatgatctgtaaaatttgtggcgagtctggtcattttactcagggatgtccatctacacttggtgccaataggaagtctcaagaattctttgaaagggtaccagctagggacaat

SEQ ID NO: 8275 - DNA, 394 bp, Arabidopsis thaliana
  unsure at all n locations
  Clone ID: LIB24-029-Q1-E1-F3
gccaatattctccacgtccgcttcttccttcaactgagtccgactaagttgactcgttctctcgtgttttcgatagacacaaactatgacggagatcgatcgttcacgcgcgttcgccanggacgttaagcgtatcgtcgtcaaggttgggactgcagttgttactgggaaaggtggaagattggctcttggacgtttaggagctatctgtgaacagcttgcggagttaaactcanatggatttgnggtcattttggtgtcatcnggtgccgttggtcttggtcgacnaaggcttcgatacagacaattaagtcaacagcagttttgcaganttacanaaaccacaanatggaacttgatgggaaggcttgtgctggtgttggggcanagcaat

SEQ ID NO: 8276 - DNA, 402 bp, Arabidopsis thaliana
  unsure at all n locations
  Clone ID: LIB24-029-Q1-E1-G1
gcccacgcgtccgcttagatttcatgggttggtaagaatcaatcaatttgggaggtggagtatagtacaagtacttcaatttgcattgaaccctcacattgaatcatctgatttgcagaaaaaggagatctctttatgtaaaagtctctgagaattttggtttaaagagaggattttacggagatgggtttgttggaatcggtgaaatcaatcaactgggaacatgaatcatctccggtttatcaggattttcgagttcttcctctcttcgctgtgttcttcccttcgattcgatttctcctcgatagattcgtcttcgagaaattggcaaaatatttgatctatggaaaacatagacaggatatgggagatgacacaaccgagagaaagaagaagatcang

SEQ ID NO: 8277 - DNA, 415 bp, Arabidopsis thaliana
  unsure at all n locations
  Clone ID: LIB24-029-Q1-E1-G4
gggaggagctcgatccattgattagaagatgacanctccacaagtgaagaccggtttgttcggttgggttgaacaagggacatgtngttaccagacgtgaattanctcctcgtcctcgttctcgcaaaggaaaaacgagcaagaggacaatctttatcagaaacttgatanaggaacttgctggtcaagctccctatgagaagacaatcantgagcttttgaangttggtaaagacaaacntnctcttaaggttgctaagangaanttgggaanccacaaganaaccanncgaaanaganaggagatgtccagtgttctccgcaagatgaggtcnggcggtggtggtgcaactgagaagaanaagtgaacgtcatcntaantttgtgaatcgctcgtaaagagttatggtttctt

SEQ ID NO: 8278 - DNA, 391 bp, Arabidopsis thaliana
  unsure at all n locations
  Clone ID: LIB24-029-Q1-E1-G5
gaaatctagtaaaacagatgctgagagcaaaatctgcgatcttctgctatttccccatttgaaactccaccgttcaagccggtcactgctccaacggaccggcggaacaaggagacaaaaagatgggtgaatctccagatttcataagcgatctacctcaaagcattattgagaatatccttactcggctttcgattagagatgcaataagaacaagtgtattatctagcaaatggagatataaatggtctacactcactgatcttgtctttgatgagaaatgtgtttctccttctaatgaccgttgtgttgttgagactaatcttgtgagattcattactggagtgcttctccttcaccaagganctatccacaagtttcaagcnctcta

SEQ ID NO: 8279 - DNA, 341 bp, Arabidopsis thaliana
  unsure at all n locations
  Clone ID: LIB24-029-Q1-E1-H1
aaactaattctctggtaacgattgagaagaatctctcttttctccactgagagaatcacattctgagagatcagacaagaagaaacaatggtggaaggaggaattgcgaaagcagacaaaacagagttcacagagtgttggagaacaacatggaagacaccttacatcatgcgacttgctctctccgccggaatcggaggtcttctcttcggttacgataccggagtcatttccggagctcttcttttcatcaaagaagattttgatgaanttgataagaaaacatgggttcagtcaactattgttagtatggcantggctggagccatcgtcngagcaac

SEQ ID NO: 8280 - DNA, 408 bp, Arabidopsis thaliana
  unsure at all n locations
  Clone ID: LIB24-029-Q1-E1-H12
gcggacgcgtgggaaaaaaacagattcctgatattttctgcttcgcttcgctttgctttggcctttgggtttgctttgccttttatctccacaataataatattcgttaacctctcctcgttctcgtcgctgtttcttcccgatctttgctatagttctggattcaaaatctttcttccccaatagatgtttgtctcttaatttttgatttttctgcaaaatcaaatttttaagagctatggaggaagagaatgttactagttcaccttcaacaccgngtacataggcttaggcatcgaagaccgttcnaatgaggttgttacggatngggataaagtgaatgcaagtcctttgttggttaaggatcggaataagtacaaatcnttcatggtccggacctantctacg

SEQ ID NO: 8281 - DNA, 466 bp, Arabidopsis thaliana
  unsure at all n locations
  Clone ID: LIB24-029-Q1-E1-H2
ttacgcctgcatgttaccggtnccaggattcccgggacgacccacgcgtccgatctctctctctctccctctcccaaaatctcacgatgcaacctcagccgcatatttctccgaacaccgcaactgccgcgatctcagccgcgcttgaatctcagcgcagtagaaaaaaccgaggaagttacaattgcggtagatgtggtcaacctaagaaaggccatgtctgtcttttaactgctccacctgatattcccactantccgatcgcttctgagccagtgagctgcatctccgccgccgcatcttcttcccgttctactgtcttatctttaacagcggcgccgtcatcgcgacagaccttcactcacttacgccgagctttatcgttcgatgacgtcgatgcgcgtaattcactcgatgaatccgatctggatgctgcatcgatggatctggatctacaattggatac

SEQ ID NO: 8282 - DNA, 408 bp, Arabidopsis thaliana
  unsure at all n locations
  Clone ID: LIB24-029-Q1-E1-H3
gcccacgcgtccgcccacgcgtccgggacgaggttccaagagaacttagcttcttgttctacgtacgacaccaaaaattaattcaaaaaagaaaaagaagagagttcaatgagaaaacattctcttgatcgatggcttttaacagctgttcttgtcgttctcctctcgtcttcttcctccttcgcggccaagaaggacgccaagaagaanaagaanagtaataaggaggtgacatatgatggaacctctttgatcatccgatggcanaagagagcttctttattctggctctattcattacccgagaagcactccggaaatgtggccangtatcatcaaagagagccaancaaggcgggtttgaacacgattcagacatacgttttctggaatgtacatgaagcctca

SEQ ID NO: 8283 - DNA, 338 bp, Arabidopsis thaliana
  unsure at all n locations
  Clone ID: LIB24-029-Q1-E1-H5
gctctgcgtttctttctcggggaaaaataatatctgagaagaagattcgagagagagagatctgaacggtttttcgcttagtctccaatgggaacgctacagtcatggcgaagagcttacggagccttaaaagacaccaccaaagtcggccttgtccgagtcaatagcgattacgccgaattagatgttgccatagtgaagntactaaccatgtcgagtgtctcccaaagatcgtcatctcaaggaaaattttcctcgcaacgtcagcnattaggcctcgagcaaatgttgcttactgcattcatgctcnctcccnanaattaacccaaanccagaaa

SEQ ID NO: 8284 - DNA, 426 bp, Arabidopsis thaliana
  unsure at all n locations
  Clone ID: LIB24-030-Q1-E1-A12
ccnaaattaacgggtcgacncacgcgtccgcacacacgtccgccaacgcgtccggcacaaaatggcgactcnttanaagtcaagttccttctgtatcagcagttttctctctttacacatctttttccgcaatcacgatgctttttcgaacaatcctcaacgagattgtgcctaaaagaatcagagagtacatagctatgaaagctgtagacttcttctcttcttactttcaatctgatttcacttttgtgatagagcaacgttgggagtttgttgagaatcagacgttccgtgctgctgaagtttacttacctacctgtctcgccggactttcnacaggcaaacttcttgtgggttcaagtaatcttaagaatccaactgctgagccaanacttggtaatccctgtggaacaccnaagatcattg

SEQ ID NO: 8285 - DNA, 427 bp, Arabidopsis thaliana
  unsure at all n locations
  Clone ID: LIB24-030-Q1-E1-B1
gcgggangcgtgggagaaaatatgaggcgaagaactaagtcaaaagccatcatcagctcagtctctgtcactgagagagggcagaaataggtttccttttctgtccctgtcacagagagagggcagattttttccttctctatctctttcagagagagatggaagaaagttttcttttctcagtatgttctcttttctcatgccactgttggaggttattaagattattattgcttctgtggcctccgtantcttcgtcggtttcgcctgtgtaaccctcgctggntctgccgcagcattagtcgtaagcaccccggttttcatcatatttaagtcctgttctcgtaccaagctacgantagccacggttgtctttggcgacagggattcacggnccgggtggctcntttggaagcgaanagcactt

SEQ ID NO: 8286 - DNA, 423 bp, Arabidopsis thaliana
  unsure at all n locations
  Clone ID: LIB24-030-Q1-E1-B10
gcncattttacttatctgaagttcgtctacgatggaggaagagaaggtgagggttcgtctggtgtttgaagaccgacggattctgagtaagtatcaaaagaagcaaggtttaacacggagctgggttgttctaaatcgtaaatgtcaccgaactatatcagagttttctgatcatatctttcacacatttagcctctgtgaagcgtgtcctcatggcctctctctatctatggaaggtttcgttttgccacctttcgagtccagctgtgtattgaaggataaagatatcgtttgtgttaagaagaagaaagagtctttgttggagattgttggggaagacagtgatgagaatgtttacaacgctattgaagttgaagaaaaggctcaagatcctcctggtgaaaaagctgcccttccnaatga

SEQ ID NO: 8287 - DNA, 469 bp, Arabidopsis thaliana
  unsure at all n locations
  Clone ID: LIB24-030-Q1-E1-B11
tgttatttggccngccggtccaaaatncgggtcgacccacgcgtccgctgagtcgagatttggtgacgtgatgaatcatttggtgataatctctgtgttcttgagctcagtattgttgttatatagaggagaatctggaatcacaagtagttttattcgatctgaatggcctgcggttgatataccacttgatcatcatgttttcaaagtcccaaaaggatataatgcaccacaacaagtacacataactcaaggtgattatgatggtaaagctgttatcatctcttgggttacacctgatgaacctggttctagccaagtacattacggtgcggttcaggggaaatatgagtttgttgctcaagggacttaccataactacacgttttacaagtataagtctggctttattcatcactgccttgtctctgaccttgagcatgatacaaaatactattacaagattgaa

SEQ ID NO: 8288 - DNA, 402 bp, Arabidopsis thaliana
  unsure at all n locations
  Clone ID: LIB24-029-Q1-E1-F1
ntaccaccacaatangttangcttcacaccttaangtgaattcaanngaaactattgtcggctggtattcanctggtgctggggttaatggcngtagttcgctgattcatgatttctatgcnagagaagtacccaacccaattcacctaactgtgganactgggtttactaatggtgagggtactatcaaagcttttgtctcttcaaacctctcactcggtgatcgacaactcgttgcacattttcnagagattcctgtttatctccgcatggttgatgctganagagtcggattcgacgtactnaaacgcaacatcagttgacaaactcccagatgacttggaangaatggagttaacaaatggngangctgttaactctaagcaacgatgtctacaaata

SEQ ID NO: 8289 - DNA, 413 bp, Arabidopsis thaliana
  unsure at all n locations
  Clone ID: LIB24-030-Q1-E1-B2
gcntgcattggatgcctgaagctcttaagatgcctgagcgtgagctgattgatcatgctggtttagactctgttgtctatctccggatttactggctcgggcttaagatttttgctccaatagcaatgcttgcttgggcagttcttgtaccggttaattggacaaacaacgagttggagttggctaagcattttaagaatgtgacttcaagtgatattgacaaactaacaatttcgaatatcccagaaggttcaaataggttttgggctcatatcataatggcttatgcctttacaatctggacttgttatatgctgatgaaggagtatgagacagttgctaacatgaggcttcagtttcttgcctcagaaggccgtcgacctgaccagttcactgttcttgttaggaatgta

SEQ ID NO: 8290 - DNA, 429 bp, Arabidopsis thaliana
  unsure at all n locations
  Clone ID: LIB24-027-Q1-E1-H9
gcggacgcgtgggcggacgcgtgggtgagccgatggctatgggaaaagataagaagaaggtgtgggaagaagctgttgaacgcgagagttgtgtacctcggtgaggcggagcaagtgcctaccaaagacgacaaagagcttgaactcgaaatcgttagaaacctgaggaagagatgcgttgagagcgagcgtcaaatctctgtagcactggaagcattccctctcgatttgcaggatcagcttaatcaatacatggataagaggatggacggagagacattgaagtcttatgtgacacattggcctgctcaacgttggcaagaatatgaacctcctttaagttantgccgcgataactctgttagactaattgcttgtnggnactcctctcaaggttttaagaactgtccaagcaaaangtatcccttg

SEQ ID NO: 8291 - DNA, 427 bp, Arabidopsis thaliana
  unsure at all n locations
  Clone ID: LIB24-028-Q1-E1-A1
gagatatattaaagaggtttgtgaagacgaaggagtccaaaacctccctcaggagcttccgccttattcagagtgtagaggaggatccaaaagaaaagaggaaaaaatggactatatgtatggaccagggagacaccatctgtttgtaccaggaccagtgaacataccggaaccggtaatccgggcgatgaaccggaacaacgaggattaccggtcaccagccattccggcgcttacgaaaacattgttggaggatgttaagaagatattcaagaccacatcagggacaccttttctgtttcccacnaccggaactggtgctttgggnaaattncctngccaacnnctttnccctnganaanaggattgntccttcncgnttgggncaatttacctgccccnggatttgccaccaaaaanggttttt

SEQ ID NO: 8292 - DNA, 414 bp, Arabidopsis thaliana
  Clone ID: LIB24-028-Q1-E1-A10
gcaacaacaaagtcacttacaaagaatgtctcaagaaccacgcggcggcgattggtggtcacgcgcttgacggttgcggcgaatttatgccgtctccttcgtcaacaccttccgatccaacttctctcaagtgtgcagcttgtggttgtcaccgtaacttccaccgttctcagatctaaacttcgccgccgcggctaaccatctctccgccacgcctggctcgaggaagcgattcaggacgaagtttagctcaaatcagaaagagaagatgcatgaattcgccgatcgaatcggttggaagattcagaaacgtgacgaagacgaagttcgtgatttttgccgtgagatcggagttgataaaggtgttctcaaagtttggatgcataataacaaaaactccttcaaattctccgg

SEQ ID NO: 8293 - DNA, 479 bp, Arabidopsis thaliana
  unsure at all n locations
  Clone ID: LIB24-028-Q1-E1-A2
ctgttacgcctgccagtancggtccganaattcacgggtcgacccacgcgtccggtttacctaattcaggtccaccaagtaaggcagtcgtctggagagaaagaacgtttattgacctagaggctgatactgataccaatagtagtcatgaagccgtcattcatcaaaatcacttggattcaagtttaacttctcaccaacagcgccccttgtatccatatattcgtccagattctgctgtctcctggaaccatttgcactcttcttggcaaaatcctagctttggattccctcagaaagttgcttcagctcagagatatccggttctaaacatgtctgatacactgattggtaatgctcagaagcaagggtatcttggagatagattgcagtttgaaagcaattctagatttgactcaaggtgcgggaattccagtcggntaaaccacnatnagnttttaaaatggaatggtcccctt

SEQ ID NO: 8294 - DNA, 402 bp, Arabidopsis thaliana
  unsure at all n locations
  Clone ID: LIB24-028-Q1-E1-A5
atacaatattagatatataaataacacaaagtgaactcctaatcagggttcattttataaatttattatttagttattgcggataaagaacaataataatatggggatgtctaaaagtatcaaggttatcttatctcttgctctcgtantgttcttggcccttgctgcaaccaaggttgaggccacaagatacataacttatcctgctatcgatcgtggagatcatgctgtacattgtgacaaagcccaccctaacacctgcaagangaaagaagcaantccttaccagagaggatgcgaggaagatcaatcgttgccgtggtggatagggtggaaaacagtgaattanncaaacccacccaatgaggnatannnttttccatccagtnccgttaaccaagg

SEQ ID NO: 8295 - DNA, 377 bp, Arabidopsis thaliana
  unsure at all n locations
  Clone ID: LIB24-028-Q1-E1-A6
gatttactggagaagagatggtgggatcagaggttttggaggaatgtggagaaaaaataagcaagaaagagtcaaagaagcgagccgctaaactggagaagttgctccgtaaacaggaacgagaagaagccacatcatcatctctttctctggaggaggaggatgaatcgtgttccagcaactacggtgacgtgactactaacgagttgcagtcggctgttgagggaaaagagctcactgatgtgagcaacttggttgaagagattgtggggtcagaggtttcgatcagaggtccactgcacaagaatcgcttaatcngtaccaaattgtttgtgatcctgaaggaaattggttcacgggtcaatgcctngtggaag

SEQ ID NO: 8296 - DNA, 490 bp, Arabidopsis thaliana
  unsure at all n locations
  Clone ID: LIB24-028-Q1-E1-B1
ntgtttacgcctgccaggtagcggtccagaattcangggtcgacccacgcgtccgtttgactactccactacctataactttaaccaaagctcgtttctccggcgaaccattgcgactcaaacaatatgttttgagtaatcagatttgctcccgaccaaaacatctcctctcagagtttanacccaccagaagatggaccttctcctgcaaatgccgtaccagaggaagaaatggttacgcgaaaattccgatgacgaagggagaaagattcattgttgttaacttctatccggtttgtatcaatccggagatcctgaggctgngattgagaagcacctctcattcttaaaggatttgaatatacgaggtcgaatatatctcaatgaacaagggaatcaacgcgcaantacagtggaccatctaaagatgctccttgcatatgttgaaatggttaaaagggaatgatnnatccccggatttgnctggcca

SEQ ID NO: 8297 - DNA, 359 bp, Arabidopsis thaliana
  unsure at all n locations
  Clone ID: LIB24-028-Q1-E1-B10
gcggacgcgtgggcaaatcgatgcatgtgagattccaacaactactgatctaagcaagtgtaatggagaccagaagttttggtgggatgaaccaactgtctctgagcttagccttcatcagaatcatcagcttatttgggttcgagctaatcatatgatttatgattattgttttgatgctactaggtttcctgttactcctcttgagtgccaacatcatcgtcatttgtagtttagagattagtcaagaataaaaatggatcaagagaacacatgtggttactctttgatgattctgttttaatgtataaataatcaatcttctattgnnnnnnnnnnnnnnnnnnnnnnnnngggcg

SEQ ID NO: 8298 - DNA, 404 bp, Arabidopsis thaliana
  Clone ID: LIB24-028-Q1-E1-B11
attactgttaaaccagtaacgtactctcggagatcgaactttgtagttttctcgtcgagttctaatggacgagatcctttagaggagaattcagtacctaatggtgtgaaaagcttggagaagcttcaagaagagaagcgtcgtgctgagttatctgctaggattgcttctggagctttcactgtacggaaatctagttttccatctacagtgaagaatggtttatctaagattggaataccaagcaatgttcttgatttcatgtttgattggactggttctgaccaagactaccccaaggttcctgaggctaaaggctcgattcaggcggtccggaacgaagctttcttcatccctttgtatgaagcttttccttacttatggtggaattttcaagttgacct

SEQ ID NO: 8299 - DNA, 412 bp, Arabidopsis thaliana
  unsure at all n locations
  Clone ID: LIB24-028-Q1-E1-B12
gcacaattctccgaacatgcgnnnnnnnnnnnnnnnnnnnnnnnnnnnnnnnnnnnnnnnnnnnnnnnnnnnnnnnnnnnnnnnnnnnnnnnnnnnnnnnnnnnnnnnnnnggttttacgtttttcttattttatttctctccatggggattctttgggattcgtttctcttgttacttgtgtcaacgtttgctctgttcttagttaggatcctgttattcaaaactggattgatttacatggtcaagttatggcgtaggaagatcatcgactggtttcatgtttaccaattctacaaagtcccagaattcaacgacaacgttcaagagaatcatctctaccaaaaagtctacatgtatctaaattccttaagctcgatcgagaattctgatttcacgaacctcttcaccgg

SEQ ID NO: 8300 - DNA, 418 bp, Arabidopsis thaliana
  unsure at all n locations
  Clone ID: LIB24-028-Q1-E1-B3
gaagataacaaaaatagaaaaatctaaggtgtgggaagctctgcagctcatccatccatggcgacgacgattcccactacagctaccgcaactatgtgtccgtctcctcctgtccctacaatctctcccttactcagaacgactcaccaatgtcaaccatctccttctttatcatccccattttctataaagcttagtacggctctggtttgcggtgacactacagtggatagagtggttgatagctccgtgatgatcaaacctgnnnnnnnnnnnnnnnnnnnnnnnnnnnnnnnnnnnnnnnnnnnnnnnnnnnnnnnnnnnnnnnnnnnnnnnnnnnnnnnnnnnnnnnnnnnaaatgctggcgtagaancagaaagcagngacaantantggttcctggttgttgggggcntca

SEQ ID NO: 8301 - DNA, 401 bp, Arabidopsis thaliana
  Clone ID: LIB24-028-Q1-E1-B9
gaagtttctatctttatctctcttaagatctctttctctcttgggttatctgactctaaccagaattgtgtcgatttcaaggatggatgatactacgtataagccaaagaacattctcattactggagctgctggatttattgcttctcatgttgccaacagattaatccgtaactatcctgattacaagatcgttgttcttgacaagcttgattactgttcagatctgaagaatcttgatccttctttttcttcaccaaatttcaagtttgtcaaaggagatatcgcgagtgatgatctcgttaactaccttctcatcactgaaaacattgatacgataatgcattttgctgctcaaactcatgttgataactcttttggtaatagcttgagtttaccaa

SEQ ID NO: 8302 - DNA, 412 bp, Arabidopsis thaliana
  Clone ID: LIB24-028-Q1-E1-C11
gcgctggatggcttcaaaacctcgtggaatagggaaaggaagaacttcttttgacgattctttgcttaggataaacagaattcctgacatcatgggactttctgaagcttcttctgctaatgataatgatccagagtcttggcatgttcaggttttccgttctattgattcgacttcagtcaaagggtttccaaaggacccagaggaagctactggaagaaatcttctatgtgggaagaacattctcatagatatgagcatacatgcagcttatgttaaggcgatacgatctgctcagcacttcatttacattgagaaccaatattttcttggatcttcattcaactgggattcaaacaaggacttgggtgctaataatctaatcccgatggaaatcgcgcttaaagattgc

SEQ ID NO: 8303 - DNA, 415 bp, Arabidopsis thaliana
  unsure at all n locations
  Clone ID: LIB24-028-Q1-E1-C12
gctgtcacggaggacacggggaatcaacgcggcggagagtgatggaagagctttcaagcctaaccgtgagtcagcgcgagcaatttctggtggagaacgatgtgttcgggatctataattacttcgacgccagcgacgtttctactcaaaaatacatgatggagattcagcgagataagcaattggattatctgatgaaaggcttaaggcagcttggtccgcagttttcttccttagatgctaatcgaccttggctttgttactggattcttcattcaatagctttgcttggggagactgtggatgatgaattagaaagcaatgccattgacttccttggacgctgccagggctctgaangtggatacggtggtggtcctggccaacttccacatcctgcaactaacttatgctg

SEQ ID NO: 8304 - DNA, 465 bp, Arabidopsis thaliana
  unsure at all n locations
  Clone ID: LIB24-027-Q1-E1-H8
nagccgccaggtaccggacaagaattcncgggtcgacccacgcgtccgcccacgcgtccggtttcgcctctcaaaacattttcaattcccgccaattttcttctccgagaatacccccaaccttctagaaaccctaatttggtttaatttcattctccactactttctctgaaaccaaactcgagatctctcccccaatcatgcctgcgatacaatccccatcggggaagatcttgcagcttgagatggagaatttcaaatcttacaagggtcatcaattggttggtcctttcaaggatttcactgctattattggtcccaacggttctggcaaatctaacctaatggacgctattagcttcgtcctcggcgttcgtaccggtcaacttcgtggttctcagcttaaggatctatctacgcttttgatgatcgtgacaaggaacaagagaagtcgtaaaagctttt

SEQ ID NO: 8305 - DNA, 470 bp, Arabidopsis thaliana
  unsure at all n locations
  Clone ID: LIB24-028-Q1-E1-C4
ctgttacgcttccngtggccgtccngaattcanggganaaacgtaagcaaaaaaaaataaaacagagcaaaatggccgtagttttacgtggaggcatcaccggaggatttcttcaccatcgtcgtgacgcttcatccgtcatcacaagaagaatctcatccgtcaaagccgcaggaggaggcatcaacccaacggtggctgttgaacgtgccacgtggctacctggactaaaccctcctccttatcttgatggaaatttagctggagattacgggtttgacccactcgggttaggagaggatccggaaagcttgaagtggtatgttcaagcagagcttgttcactctcgtttcgctatgctcggtgttgcaggaatactcttcactgatctccttcggaccacanggattcgtaatttaccggtttggtatgaagctggaactgttaaatttgatttgccantacaaaaa

SEQ ID NO: 8306 - DNA, 425 bp, Arabidopsis thaliana
  unsure at all n locations
  Clone ID: LIB24-027-Q1-E1-F12
gcccacgcgtccgaaagaaacggcaaaaatttatgctgaaatctttttttcttccttattctcctctttcgcttgatttcgccgtccgattatctctatcgccgataaatatccggcgtcactcagtagatcttgaagctgttgctttcttgctttgctcttcgcncaagattctctttctctgttttcattgaggattcgaagttgatcgctatttgattcgattggttttgagttttcgatcctcgacggatggagattttgaagtgaatcggaggagcgaataagagaaagtgagagatggatgataganaaggntcgttcgtagctgttaggcggatttctcagggtctcgaacgaggaagcgtttacaantcatcatctgctgaagctgtgcctggatnaacaacttgggtaaggncgag

SEQ ID NO: 8307 - DNA, 468 bp, Arabidopsis thaliana
  unsure at all n locations
  Clone ID: LIB24-027-Q1-E1-F3
ttngccgccacgtaccggtccaaaaattcccggggtccgacccacgcgtccgcggacgcgtgggcacaacctccgcatctcagcaagtttcagtcccggcagtgattcgctcctccgcggattgggatgctagtaatttcnnnnnnnnnnnnnnnnnnnnnnnnnnnnnnnnnnnnnnnnnnnnnnnctacaatggtggttcgattaagatcttgagcgaagctagtactagtagtagcgtcgcttgcgcagcgattcctgatgtttggtgtggtcctggagttgggttttcaacggatgctgtcgtcggaggctccattgacacagttgtttcagatcctccgagaaggaatattccggtgagacgcaaaatcgatggagataaaaccaatagtaacagtaataatcatagaganggttcttcttctcttcttcctagacgatctctcaatcaagagtctaatcctt

SEQ ID NO: 8308 - DNA, 463 bp, Arabidopsis thaliana
  unsure at all n locations
  Clone ID: LIB24-027-Q1-E1-F4
cccgngcctaccggtccaaaaattcccgggnccaaccaagccgtcnaaanaaccattaangcagagaaaaaacaaagacaaataatctccatttgctttcttctccatcttcttctaattttcttcaagttttatcaatggctggtgttactggaatcttaaagcttgaagcttggagcatcttgtgaagaagattaactagnnnnnnnnnnnnnnnnnnnnnnnnnnnnnnnnnnnnnnnnnnnnnnnnnnattaccggaagtaatggcatgtcggagtatgatcgcttttagtttagatcctgaaagaaaacaaagtggaggacttaggacaaaacaagctggaagaggatcttgccgtggaagttagtccttgttcaaatccattttcctcttaaagaatttgaaattgcactgttgcaagtgaaaaagtttgttcctgttggagcttaaaagaagagag

SEQ ID NO: 8309 - DNA, 419 bp, Arabidopsis thaliana
  unsure at all n locations
  Clone ID: LIB24-027-Q1-E1-G1
gcggacgcgtgggtttttctgatgatgatgacgaaaacaacaatgagattggtgtanagctcgatctcgaatcagtaatgtctgacacttttgtctctgtcgggaaataccgagtcagatcgggttcatccactatactaagtgctgtcatcgaaaagcacggagacattgctcaaaactgtaagctggaatcggattcaatgcgatcacgttacctcgagtgtttatgctcactgatgcaggaacttaggtcaaccccggtagggcagttgagcaaagtcaangtcaaagagatgcttgcggttctcaaagacttggagtctgtgaacattgaagtaacttggctacgttctgttcctgaaaaatttgcgcagtctcaagaagatgtanaanatgagaaanagaagcatgatggtttt

SEQ ID NO: 8310 - DNA, 427 bp, Arabidopsis thaliana
  unsure at all n locations
  Clone ID: LIB24-027-Q1-E1-G11
gcccacgcgtccgacttgattgtacttaaagatgtaatcaacaaagtttataaaaattcttggttacacaagcctatacttgtcgctcctgnagggttctatgaacaacaatggtacaccaaacttcttgaaatttccggtcctagtgttgtcgacgttgtgactcatcatatatacaatcttggttcaggaaatgatcccgcgctggtgaagaagataatggatccgagttatttaagccaggtatcaaaaacattcaangacgtgaaccagacgattcaagaacatggaccgtgggcttctccttgggttggagaatctggtggagcttacatagtggtggcgtcatgtntctgacacattcatagatancttcnggtatcaagattagcttggaatgtncagcangaccaacactaaagttact

SEQ ID NO: 8311 - DNA, 421 bp, Arabidopsis thaliana
  unsure at all n locations
  Clone ID: LIB24-027-Q1-E1-G2
gantacactgtaccttgangtccgtcgtatgcaacaacnnnnnnnnnnnnnnnnnnnnnnnnnnnnnnnnnnnnnnnnnnnnnnnnnnnnnnnnnnnnnnnnnnnnnnnnnnnnnnnnnnnnnnnnnnnnnnnnnnnnnnnnnnnnnnnnnnnnnnnnnnnnnnnnnnnnnnnnnnnnnnnnnnnnnnnnnnnnnnnnnnnnnnnnnnnnnnnnnnnnnnnnnnnnnnnnnnnnnnnnnnnnnnnnnnnnnnnnnnnnnnnnnnnnnnnnnnnnnnnnnnnnnnnnnnnnnnnnnnnnnnnnnnnnnnnnnnnnnnnnnnnttaaagttccctttcgtcgtgttcatttgtctggtggtgagccagcttttgataattatgacactagtggtcctcaaaatgttaatgcacacattggggc

SEQ ID NO: 8312 - DNA, 422 bp, Arabidopsis thaliana
  unsure at all n locations
  Clone ID: LIB24-027-Q1-E1-G4
gagaaaattcaacggcgaagagaccaagagaacgatcacagatcaccgttggatcagtcgtcgtcgtcctaatctaacggccaggagactcttctccgatatcttgtgcttctttcccgttacgacttcgtcggaccccaaaacctaatccttaatctcccattcttcaccatggttaccnnnnnnnnnnnnnnnnnnnnnnnnnnnnnnnnnnnnnnnnnnnnnnnnnnnnnnnnnnnnnnnnnnnntcaaactttcataaaccttccttgtgatctcttacaactggtaatttctcgtctcccgttgaaagataacatccgtgcttctgctgtctgcaaaacatggcacgaagcttgtgtttctcttcgagtgatacatacatctccttggnttattacttctccaaaacagacgattcc

SEQ ID NO: 8313 - DNA, 419 bp, Arabidopsis thaliana
  unsure at all n locations
  Clone ID: LIB24-027-Q1-E1-G6
gctgcgttttcgtggagcatcttcttcaacaatggctgcttctccgatctgatcatatcctgatttgaattttgctatctctcatgcctcgaactcgttttgtcgacgtagcatcctagtgactgaggaagaagaagaagatgagcttctttatcctctccgtcgtcgttttcgtttctctcgctttcttctctcttccgcattccgttgattcatctgtttccgcttcacaggatcctctcagactcatattaggttcaccgaattttggaacatggaaaggtggaatctcattagcaccaggacctgaatctgatgatgttgtctctgattacctcctcttagcagctcatagaaccaagagacctgacattcttanagcttttaaagccttaacaaggtggctgggaacatcanca

SEQ ID NO: 8314 - DNA, 435 bp, Arabidopsis thaliana
  unsure at all n locations
  Clone ID: LIB24-027-Q1-E1-G9
acccggtcgatgttcccaatgggtggataaaagatgttacggtggagattcttccaccgaaccctatatcgttgcgcataaccagcttcttgctcatgccacggtcgttgatctatacaggacgagatataagtaccaaggagggaagattggacctgtgatgataactagatggtttctaccatatgatgacactctagagagcaaacaagcaacttggagggccaaagaattcttcttgggatggttcatggagccgctaacaaagggtaaatacccatacatcatgangaaacttgttggtaatcggcttccaaaagttcaacagcacanaagctcgccctttaaaagggttcaatatgaatttccttggtcctcaaactaataacgtcactcaatangnccaagccccttgacccaantcctccgggaaaa

SEQ ID NO: 8315 - DNA, 437 bp, Arabidopsis thaliana
  unsure at all n locations
  Clone ID: LIB24-027-Q1-E1-H10
gcccacgcgtccgctctcgctctctatctctcacgctctcacagtagaagaaaaaattagaaaggttgtgagaatggcggctacagcagcttcaagcttacaaattgctacacgaaggccgagcatgtcttcgcctagcaaaattcttaaagcaggaacctacattgttggtgccaatcctggaaacgcttcatgggataaactttcatgcactcgccaattatcaaaccttggatgtttgagaaaccacagtgctgttccaacttgtaagaaaaccttttcnttttccaaaagggcaatgtctgaatccaatgaaaacaangntccctcaagggcttccaattgatttgaagaagggaaaagagcttcaatgctggtaaaanctgatgataaatggtaagggttggggcaaaacaaaaatcccttgctgcggcngg

SEQ ID NO: 8316 - DNA, 441 bp, Arabidopsis thaliana
  unsure at all n locations
  Clone ID: LIB24-027-Q1-E1-H12
ggcaaaactgaatctggaattgtcgtcgggatgggttctaagtccgttgttgacatgatcgaagctgcctcgcgggcanatttttctggtttacacgtnaatgggcacatgaatgggttggaaccaantgcacttaacgaaaccacttctgcatcagaagatatccaangacagccttttgtaataggtgttgctggaggcgcagcatcgggaaagactactgtttgtgatatgataatccagcaactgcacgatcagcgtgttgcacttattaacctggactcgttctatcataatctgactgaagaaagaacttgctaagagttcatgaatacaactttgatcatccagacgcatttgacacaagancatttaatgtcctgtaanggataaantnaaggcaanggcaaactgtaaatantcccaaaataaggattttaa

SEQ ID NO: 8317 - DNA, 403 bp, Arabidopsis thaliana
  unsure at all n locations
  Clone ID: LIB24-027-Q1-E1-H2
gacaattcatcgagaactctaaaaaaggcaccttctacaggaggatgtcgagttgaaggatacatgcgtgtgaagaaggttccaggcaatttaatggtttcagctcgctcgggatctcattcctttgattcttctcagatgaatatgtcacatgttgttaaccatctatcctttgggcggaggattatgcctcagaaattttcggagtttaagcgcttgtcaccttatctcggcctaagccacgaccgtttagacggccggtccttcataaaccaacgagatctcggcccaaacgttaccattgagcattatcttcaaatagtaaagactgangtagtgaaaagcaatggacaagcattggttgaggcgtatgagtacacagcacatagcagcgttgctcata

SEQ ID NO: 8318 - DNA, 418 bp, Arabidopsis thaliana
  unsure at all n locations
  Clone ID: LIB24-027-Q1-E1-H5
gcccacgcgtccgctcagtctctccatttcccggagcaaaaatagctctccgaccatgaagtttggatctttaccatccaaatcccttctcttccgcctctcttcttcctccacaacccaatctcaccgtcgaanaattanccttttcatcantaacattcattcctctccattcnccaccagaaccacctcnggctccaatttcgtctccggatccagccattctcnctctcgacgtcctcagcangacnaagagtcncgatccgttagggtttcggtctggtgggacttccngagctgtaacttanctgtagacaccantgtcnacnaagtngcacaatnaatcancgccgctatcagaaacagcggaatcaaaggaccantcagaatcacagccttcggtgacgttttacagctn

SEQ ID NO: 8319 - DNA, 411 bp, Arabidopsis thaliana
  Clone ID: LIB24-027-Q1-E1-H6
gtctcaataaagatcataatcatgaccttgaaccagggaagaagaatgacgctggtatgaaaaagataccggacgatgggacaggaggattggattctgttgatcttattgaactaaacgacttcggcaacaaccatatcaagaaaactcgagaaaacaggattggtaaagaatggtatccgctgcttctcgattatttccagtctagacaaaccgaagacatgggattcttttacgctgtcgaattggatgtcaataatggaagttgcatgagcattttctgggcggatagccgagcaagatttgcttgcagtcagtttggtgattccgttgttttcgatacttcatacagaaaaggaagctactctgttccgtttgctactatcatcggttttaaccatcataggcaac

SEQ ID NO: 8320 - DNA, 432 bp, Arabidopsis thaliana
  unsure at all n locations
  Clone ID: LIB24-027-Q1-E1-F10
gcaactacagagcttgcaccattccttatagattcccttccgataatctcaagaaagccactcctactgaaatctcctggatcaacgtcttcgccaattccattccttctttcaagttcctctctctctactttgacctcatttagatactgctcatgggtcgaatcaagttttgattttgaaaccaaaaattgcttcttttaggctcatattccaatagtctgcttgattaattgcaaattctgtcaaaactcatgaaacttttagcccttaagctattgatagtgtagttgctagttgttgctttgactttcctctgtgtttacttaacatcacgagattgtttctggaagcttataggaaacagatggaatcctaattttaacaataattaatctccantgttccaaagctgtttcaattgcaagaaaa

SEQ ID NO: 8321 - DNA, 433 bp, Arabidopsis thaliana
  Clone ID: LIB24-027-Q1-E1-B12
ggcaatacctacagcattgggaaattgcacagcattggaggaaattcacttgcagagtaactacttcactggaccaatcccagctgaaatgggagacctgcctggccttcaaaagctggacatgtcaagcaacactctcagtggacctatccctgcttcgcttgggcagttaaaaaagcttagtaacttcaatgtctcgaacaacttcctggtggggcaaataccttcagacggagtgctctctggattttctaagaactccttcattggaaatcttaacttgtgtggaaagcatgttgatgtcgtgtgccaagatgatagtgggaaacccttcatcacattctcaatcaggtcaaaatcaaaagaaaaactctggtaagctgctgattagcgcatcagcaactgtaggtgcgctactcctagttgcactcat

SEQ ID NO: 8322 - DNA, 412 bp, Arabidopsis thaliana
  Clone ID: LIB24-027-Q1-E1-B4
agaaaaagtatttctccaagttttggaattcgccatggctgttgatagcagaatggatctgctaagcgaaagagctgtgttgatgagagcatctcttcaaaagagtcaaaccatcaccgataatgttgtttctatcctcggctccttcgatagtcgtctgtctgctcttgaaaccgccatgcgtcctactcagattaggactcatgctataaggaaagctcatgagaatattgataggactcttaaggctgctgaagttattttgtctcaattcgatctcctccgtcaggcagagactaaagtactcaaggggccacatgaggacctggaaagttatctggatgcaattgctcaactcagaaagattattcgttattttatgagcaacaaaagctttaagagtagtgatgga

SEQ ID NO: 8323 - DNA, 415 bp, Arabidopsis thaliana
  unsure at all n locations
  Clone ID: LIB24-027-Q1-E1-B7
gctggtttggctataatcttcaactctccttcactaaaccctgtcacaactcaagcgaccttcctttcttcgaatcggattcgttcctctcctcgcgttttcagtggatttcacagcctccgacgtcgcggcttccggcgattctctcaaaatgttatccccgaccggtttaatagcttctcatgtaattgcttatccgccgtatccaccagcactatcgattacgagttcacggatggtggcaaagaggtggaattaagattgaggttaaagacaggtgagatactttctccaaangatatatctgttgacgcagatggaacatcgttagccgttaaagaaaagcggaatggattgctgattacacttctagagactaaccatctctttgagaagattatgccctctgaaacaa

SEQ ID NO: 8324 - DNA, 461 bp, Arabidopsis thaliana
  unsure at all n locations
  Clone ID: LIB24-027-Q1-E1-C2
ttgccgnccgtaccggtccaaaatccgggtcgaccacgcgtccgatggtcagctttgatcttctaaattgtttcatctttaccctcatattcctcatctcaactctctttctctttgttttattctataagaaaccaaacgatggatttgatgtacctccaagccctccttctcttcccatcattggtcatcttcatcttctcctctttgcttcaatccacaagtgttttcaaaaaatctcatccaaatacggaccttttctccatcttcgcattttccatgtccccattgttcttgtatcctctgcctcaacggcttacgatatcttcaagacaaacgacattaatgtctcttatcgtggtgatgttgcaatcgatgaatgcattgtgtttggttcttttggatatttccgagctccatgtgaagattactgggaaattcatgagaaagctcatcatggg

SEQ ID NO: 8325 - DNA, 448 bp, Arabidopsis thaliana
  unsure at all n locations
  Clone ID: LIB24-027-Q1-E1-C3
gtccanaaatcccggggtcgncccacgcgtccgctaatggttacggtgatgatgggtatgattttgatgttagtgatgatgagatcgcaacgctgaaggttgaggaagttaagaagccaaagcctaagaaggagaagaagcctaaagtttctttgcctgaagctgcatcaaagatcgatcctttaaatctcgaagcttttctcgttgaagcatcggaatcgtatgcgagtcagcctgagattcagctaatgagatttgctgattactttgggagagcactttctggagtctcatctgtgcaatttccatgggtgaagatgtttaaagagtctcctttgtctaagctgattgaagttccgttagctcatattccggaaccagtgtataagacatcagttgattggatnaaccatcgtccaattgaggcacttggagcctttgtgttgtg

SEQ ID NO: 8326 - DNA, 430 bp, Arabidopsis thaliana
  unsure at all n locations
  Clone ID: LIB24-027-Q1-E1-C4
gnnaaaagtttnataannaaanaanccattctcctcccctcccctcccctgaaggtcnttgggaatcctgaattccccgatngaatccgaaccaatcncaagagggtaaagaaagaggacctttgagaagaatctccgagtcaggatcaagaaaaaacggtgatacggaagctagttctagggctaatgggcgccgcgggctccaaactcgagaaagctctcggcgaccagttccccgaaggtgaacgctactttggattcgagaatttcggcaacacttgctactgtaacaagcgttttgcaggctctttatttctgtgttcctttccgtgaacaactgctcgaatactataccaagtaataaaagcgtggccgatgctgaaagagaatcttatgacctgcctggcagacttgttttcgcagataagtt

SEQ ID NO: 8327 - DNA, 418 bp, Arabidopsis thaliana
  unsure at all n locations
  Clone ID: LIB24-027-Q1-E1-D1
gcccacgcgtccgcggacgcgtgggttactgtcttgcttgcttccgacgatctatcttccccgagtagatttgaaatggctgctcctcctgctagagctcgtgctgattacgattacctcattaaacttctgctgatcggagacagcggtgttggtaagagttgccttctcttacgtttctcagatggctcgtttaccaccagtttcattacaactattgggattgattttaagatacggactattgagctcgatgggaagagaattaagctgcaaatctgggatactgccggacaggagcggttccgcacaatcacaactgcgtactaccgtggagccatgggggattttgccttgtgtatgatgtgactgatgaatcatctttcaacaacatcangaattggattcgtaacattga

SEQ ID NO: 8328 - DNA, 428 bp, Arabidopsis thaliana
  Clone ID: LIB24-027-Q1-E1-D11
gcttccctttggttctcaaggcatgcaccagagcctcgagtcgcaagcttgggattgatcttcattcccttgtggtcaaatgtgggtttaatcacgatgtggccgctatgacgagcctgctctctatctactctggatccgggcgtttgaatgatgcccacaaactgttcgacgaaattcctgacagaagcgttgttacttggacggctttgtttagtgggtatactacttcaggaagacacagggaagccattgatttgtttaagaagatggtggagatgggtgtgaaacccgatagctactttattgttcaggttttatctgcttgtgttcatgtaggggatctcgacagtggggagtggatagttaagtacatggaagagatggagatgcagaagaattcctttgtgcggacaacacttgtcaat

SEQ ID NO: 8329 - DNA, 416 bp, Arabidopsis thaliana
  unsure at all n locations
  Clone ID: LIB24-027-Q1-E1-D3
gaaaagatcgagtttctctttccctcctcgaaatttcctaaatccacacatcacgaagccgaagcagccatgagtaatcttcactgatctctctacacattcaccgtcggcttctcaaatgcaggatattctcggatcggttcgccgatccttggttttccggtcgtctttggccggagacgatggtactancggcggaggtcttagcggnttcgtcgggaagattaactctantatccgtagctctcgaattgggctcttttctaagccgcctccaagccttcctgctcctaganaagaanaagcgccgtcgattcggtggaggaaagggganttaatcggttgcggtgcttttggaagagtttacatgggaatgaacctcgattccggcgagcttcttgcaattaagcangttt

SEQ ID NO: 8330 - DNA, 420 bp, Arabidopsis thaliana
  Clone ID: LIB24-027-Q1-E1-D4
gcggacgcgtgggcggacgcgtgggctcgtactctaaggattaaccctaaagggatcgactttaaacagattgatcacgaatggcactgggacaattacataatcctacaagcaataatagtgagcctgatctgttacatgtcaccaccattgatgatgatgataaacagtcttcctctgtggaacacgaaaggactcatcgcattaattgtgctacatgtgactttctcagagcctttatactactttctgcacagatctttccatcgtaacaactacttcttcacacattaccactctttccaccactcatctcctgttccacatcccatgactgctggaaacgcaacgttattggaaaacattatcctctgtgtcgtaactggtgttccattgattgggatgttgcctggttgggtg

SEQ ID NO: 8331 - DNA, 418 bp, Arabidopsis thaliana
  unsure at all n locations
  Clone ID: LIB24-027-Q1-E1-D6
gctaaatccaatccagacaagaaaccgtcgttgttttgtctgatcacataacacatttcagtttatagatctgcagaatttgttttttgtatttttgttctgttttcttttgattttcttcttcatcctgtaaaacctagaattttgtttcttcaaccaaaaatgaacagagaagtctctgagagaattcatattttgttcttccccttcatggctcaaggccacatgattccaattttggacatggccaagcttttctcgaggagaggagccaagtcaacccttctcacaaccccaatcaacgctaagatcttcgagaaacctattgaagcattcaaaaatcaaaancctgatctcgaaatcggaatcaagatcttcaatttcccttgtgtagagcttgggattgcctgaaaggatg

SEQ ID NO: 8332 - DNA, 401 bp, Arabidopsis thaliana
  unsure at all n locations
  Clone ID: LIB24-027-Q1-E1-E11
gcagcaggacacattatccgatttgatcaataagcttccagagccgaggaagcttgatttgcttgaagctcttgctgagatctcaccacacacaacaactctgatagcatccgagatgcttcccccaatatttgagctcttaaagaaatacatgcctgccaggaacactgtggaaaaatcagactccagatatgttgagtgcttattatacgtgtttcatcatatggcgcacaangttcctnaagcaacaaataacttgtgcgggtacaaagttgtgccacacaancatcagatagatccgggatgactttcgaattatcaaggatcactgagaatgatcatcttgagatcatcaagcacantggacactggacaaaatgatgacacacaaactattgctt

SEQ ID NO: 8333 - DNA, 434 bp, Arabidopsis thaliana
  unsure at all n locations
  Clone ID: LIB24-027-Q1-E1-E5
gaaaaaaaaaaaataattgtaaatagagagaaaaataaggcggggaaaaggatcacgattcacaaaattagtggaaaaatcataagtgtttcgtcttcttcatcggagatctcgtgctctgaattcgagaattgaggtttgagatttctgggtgatttggtctaggctatataagtttttagaacaagacggagctgaaggaatcattgtgtttttggttgatgagtttagatttagattagtgccttagtggtttgtttctatatcttattttgaggagcatatgggaaagagaaacacgtcttgggctagaaattctaatagaaaaggttagattctaaagggataangggttcaagatgaagtccagaatgaaggattaaggtgaattcccgaacgaaggatgnaanaaanaantcctgaagggctgattt

SEQ ID NO: 8334 - DNA, 412 bp, Arabidopsis thaliana
  unsure at all n locations
  Clone ID: LIB24-027-Q1-E1-E6
ggtccacagcattgtgagtaagatgatgattaatgaggaactgcatgcaagctgggatcagccaacacgatgcatcgtcttccatgaantgcaacacancatattacaatcattggctttccagttaangganaaactctcgattttggcanaaagcaatgatgagggcaatggaatctagaaccggtggaggtggtctggatctgagttcaaggagaagggacaacaatcaggactatgcangagcagcatcaggtggtggtggatattggcaagacaaggcgaattacggacaatgaagacanngcancagatcangttatggtggatgaagatcatctggacaaaatggtcagtggtcagggcaaaaccgangangatggtatcacgaagagttggttcaggaaacaga

SEQ ID NO: 8335 - DNA, 417 bp, Arabidopsis thaliana
  unsure at all n locations
  Clone ID: LIB24-027-Q1-E1-B1
gaataaacagagctaaaatgtttcctctaatctccttttctccaacttctcttgatttcaccttcttcgccattatcatctcaggtttcgttttcatcatcactcgatggaattccaattcaaagaaacgtttaaaccttcctccaggtccgccaggttggccggtggtcggaaacttattccagttcgcgcgctcaggtaaaccgtttttcgaatacgcagaggatctcaagaaaacgtatggcccgatttttacactgagaatggggactcgaacaatgatcatcctctccgacgcaactctagtccacgaagctttgatccaacgcggagctctcttcgcttcacgaaccgccgagaatcccgaccgaacaatcttcagctgcaacaaattcancgtcaacgccgctaaatacg

SEQ ID NO: 8336 - DNA, 439 bp, Arabidopsis thaliana
  unsure at all n locations
  Clone ID: LIB24-027-Q1-E1-E9
gcccacgcgtccggacgaaaccgagagaaacaatgggagacgctgcgatccgtaccgtcgtcgaagccattcactcatctccgacgcaggccgtcgtctatctttgcggcggtgcctctctggctttaggttggttgatgtcggttcctggagcgtcgaacacgcttctcgagtccgtggttccttattcgagagtatctatggttcaattactcggcagggttccgagccaacactgtagccaagcattggccaaggagatggcttgttagcctacaatcgggcgcttaagctctctaaaccaagatatccgggttctcggtgtcnggtttacgggattaattggtaaacttctccgtcctaaacgttggagattaacagggtcctttttggccaatgagaacatccgaaccgggattttgggaatcctcagtcactc

SEQ ID NO: 8337 - DNA, 449 bp, Arabidopsis thaliana
  unsure at all n locations
  Clone ID: LIB24-025-Q1-E1-E12
gaaagtctctgtttttgagaatttttctaccgatagatccaagcgaattgatctagaggaattgatccaacatgggtaacacagataagctgatgaatcagatattcgatttgaaatttacgtcaaagtctctgcaaaggcaatcaaggaagtgtgagaaggaagagaaagcagagaaattgaaggtgaagaaggctatcgagaagggtaatatggatggtgctcggatctacgctgagaacgccattcgtaagcgtagcgagcagatgaactatctccgtctcgcttctcgccctttgacgcctgttgttgccccgtccttgatactcaaggctaaagaatgaacaaccatcaaccaaaatcccatggaccaantaatccgtcaaaatccccttgaagtcctncncctggccacaagggaaatccaacagaaagatgtcncgagacaa

SEQ ID NO: 8338 - DNA, 423 bp, Arabidopsis thaliana
  unsure at all n locations
  Clone ID: LIB24-025-Q1-E1-E3
gcttggaagtggacatggaagccacgaagagaagagttttgttttccaaaaacaggttacactaaaagcaggagagaatcatcttgtaatgcttggtgttctcacaggattcccagacagtggatcttacatggagcatagatacaccggtcctcgtggtatttccatcttaggattgacttctggaacacttgatctcactgagagcagcaaatggggaaacaagatcggtatggaaggtgaaaaacttggaatccacactgaggaaggtttaaagaangtcgaatggacaaaattcaccggaaangcaccaggacttacatggtaccagacatactttgatgcaccagagancgtaagcgcagcaancgaattcgcatgcatggantgggaaaaagggtttgattttgggtgaacggagna

SEQ ID NO: 8339 - DNA, 413 bp, Arabidopsis thaliana
  unsure at all n locations
  Clone ID: LIB24-025-Q1-E1-E4
gcccacgcgtccgcgcatgtgcgttatatcgcctagaacttaaagtaggaaatggaaagaagagtcctaagggaaagatttcaaaagaccctctggctgatctgcagaagaagatgggacagtttaaagtggcttcagacaaaccctctcctccaaccaaaggtcgtaaggagtgaagttagctattggtaatctaactcaagactcctgcaacaatagctccaagttgtctccagcattctacanaagagccatcgccacctctgttttctttntttttttctttctgactgtattatgaagagatangatctttgatgtgttgtgttaanatggacaagtcnggtctntgccctttttcttgatagaatcngtanatgggtttgtaanntttttgcattttanttgtccct

SEQ ID NO: 8340 - DNA, 442 bp, Arabidopsis thaliana
  unsure at all n locations
  Clone ID: LIB24-025-Q1-E1-E9
gcacaattccatggctttcgcttcaaaattcgctcgttctaaaactattctctcttttctccggccttgtcgtcagctccactcgacgcccaagtcaaccggtgacgtgaccgtactttctccggtgaagggacgccggagacttccaacttgctggtcgagctctctgttcccattggcgatagctgcctccgccacttctttcgcttacctgaatctgtcgaatccttctatcagtgaatcatcatcggctttggattcaagagatataactgttggtggaaaagatagcactgaagctgttgttaaaggagaatacaaacaagtccctaangagctaattctcaattgaaaactatcctcgaagataacttgacaactgactacgatganaagnacttccatggggaaagccccagaacaatttttccaaagggagtnt

SEQ ID NO: 8341 - DNA, 514 bp, Arabidopsis thaliana
  unsure at all n locations
  Clone ID: LIB24-025-Q1-E1-F10
gttacgcctgccgtaccggtccaaaattcccggggttcacagatttacaaagaaacttgtcttcacgttaatcacgccacgtgtctgaacccaatttccaacgtgtctctcacattctcgaattcgactcttttagtggttctcgtcctctctgggcttttagactgggctcgaaccatctccattccaccgataacatcgaaacccgccacgtgtcctccctcctctgtctctcgtctatatatccacgctcttgttcgtcgattcgagatcacacacacaaccaccaaacacaaagcttttcaaaacccagagaaaatgttcatcgagagcttcaaagtagagaatccaaatggnaaatacacagagaatgagattnattncggggtacgaattaacgaaaacaacaagaaggtcgtccaacgaagaaatccgttaacgggttacatatcaaatgggggtcnttgaaagcccaaaagactnggcaaaatacgaatttcaaaaancaggacac

SEQ ID NO: 8342 - DNA, 436 bp, Arabidopsis thaliana
  unsure at all n locations
  Clone ID: LIB24-025-Q1-E1-F12
gcaaataattaattctgttcttggtttacttaatcttctttctagttaagtatattcttgttgctcatcaccaaagcttgtgatggaggctctcttcttgagttcttcttcttcctccattgtagcgtcaaacaagcttactaggttacacaaccattgtgtctggtctacagtgattagagataagaaaaggttcggtcccacttggtgccgtgtaggtggtggtggtgatggtgggagaaacagtaacgcagagaggcctattcgggtttcttcgcttttgaaagacagaggtcaggtactgattagggaacagagttcgccggctaaggatgctgagacatttggttctgtctcaaaacgggaatggganaaacaatganataatggaagtaaagacttgaagncctttaatngcgcctcaaggggggggaat

SEQ ID NO: 8343 - DNA, 434 bp, Arabidopsis thaliana
  unsure at all n locations
  Clone ID: LIB24-025-Q1-E1-F2
ggaaactctctgcaattcctggagaaatcgaccatcatcatcttagctttgattctctctgtgtttcttcactttcaatttctgttttggtttatcgataagagaaagtaaaattcgtctgtgggggtttaagcttttttggggtgagagatgggtcaaacttttcgcaagcttttcgataccttcttcggcaaccaggagatgagggtcgttatgctgggtctggatgcggctggcaaaacaacgatactatacaagctccacataggagaagttctgtctactgttcccacaatcggtttcaatgttgagaaagttcagtacaagaatgtcatcttcacagtttgggatgttggtggccaagnagaagctganggccttgtggaggcattacttcagtaataccggatgggacttaatatacgtggtaanac

SEQ ID NO: 8344 - DNA, 435 bp, Arabidopsis thaliana
  unsure at all n locations
  Clone ID: LIB24-025-Q1-E1-F3
gattactaactcctgatttacggttaaaacgcctcttccctctctccgacgcttctcgtcggaaatctgggtttaagtttcttctgcagatcggaagagattctattgaagcggcgttgacacgatttcatctataattgtnnnnnnnnnnnnnnnnnnnnnnnnnnnnnnnnnnnnnnnnnncgatcctgcgccgcgaaaccttccggtgatggaacgacgtcggacgggaacaaaaaagatgtggaggaagagaggaaggacggtgaangaaagagggagatagannacgttggaaaaaattttatcgantcgttaatggaagccttttgctcggtttcaatggaggaagcgatggctgcttataagggaagcaggcggagatctgaacaaagccgctgagattttatcggntctgggtgaaagcggtgantg

SEQ ID NO: 8345 - DNA, 416 bp, Arabidopsis thaliana
  unsure at all n locations
  Clone ID: LIB24-025-Q1-E1-F9
gcccacgcgtccggtcnaantttttgattctgcagatgactangtnaanctaatgaagtcaatcttcgactttgaatccatcaagaaattgctatcttatccaaaatttactttctgctatgatgcattgcatggagtggctggagcatatgcacatcgcatctttgtcgaagaactaggtgcaccagaaagttcgttgttgaactgcgtacccaaggaggactttggagggggccacccggatcccaatcttacctatgctaangagctcgtggcacgcatgggattgagtaaaactgatgatgctggtggcgagcctccagagtttggcgccgctgctgatggtgatgcataccgaaacatgattctcggtaaaangttttcgnaactccttcggattcaattgctanaaattg

SEQ ID NO: 8346 - DNA, 453 bp, Arabidopsis thaliana
  unsure at all n locations
  Clone ID: LIB24-025-Q1-E1-G10
ggatactctctcctcgaatcctctattgcagaattttgacttccctccgtttgactccgttgatgctcaccatgtcagacctgggattcgtgctctgttgcagcagctcgaagctgaattggagcagctagaaaaagctgtagagccttcatggccaaaactagtggagccattagagaagattattgatcggttatctgttgtttggggaatgatcaatcatcttaaggctgtcaaggacacacctgagcttcgtgctgccattgaagaagttcagccggagaaggtgaagttccagctcangttgggacaagancaaacccatttacaatgcatttaaaggctaatccaagaatcctccaagactgggaattcaattgaaccaaagctcgtcaaacgantaatttgaagccccaaattaaagggaagngggttcctgaattggtaattgcc

SEQ ID NO: 8347 - DNA, 416 bp, Arabidopsis thaliana
  unsure at all n locations
  Clone ID: LIB24-025-Q1-E1-G11
gcccacgcgtccgaacattttcctttcttcttctttaaatctttctgattgcctcttaaattttctgggtccatggcaagtttgcaccttggaggtgcttcgttgatcaatgaggtcgtttttggctcctccttgattggtttcagaagtaaacggtttaaacgagcttcagagagatgtaggttttgtgttcaacaaatgtcagagaatgaacagagaactaaacacgaactggctcgttctgctaaaagaagcgagtctttgagacgtattttaaagcaatatggagtatctgtagaaaaccctgaagaaagtaagacaagtagtanacttgatgacctaaattgtgaagagaagcacgatgctgttacttctccggcatagatgacgacccaagatgaatacaactgaggagt

SEQ ID NO: 8348 - DNA, 492 bp, Arabidopsis thaliana
  unsure at all n locations
  Clone ID: LIB24-025-Q1-E1-G5
cttctatccgntcggcaccggtccaaaaantcccgggtcnacccacgcgtccgntttgccacatcctttagtcgcaaagaaacaggcttcgtctgagttattttcggtccccattgatacccctcctgagttggtcttcaggtgtaagagtgcacccaaaatgcttgtcatattgaaccctangtcaggacatggacgatctatcaaagttttccataatgtcgtggaaccaattttcaagctggccggaattaagatggaggttgtcaaaacaactaaagcaggtcatgcgagagaattggcttccactgtcgacattaacttatgctctgacggaattatttgtgttggaggggatggaatcatcaatgaggttcttaatggtctgcttactcgaaagcaatcccgaaagaangagtttcctatcccaaattggaataatacctgctggttcctgataactcgtttagtttggactgtnccttggtgtaa

SEQ ID NO: 8349 - DNA, 472 bp, Arabidopsis thaliana
  unsure at all n locations
  Clone ID: LIB24-025-Q1-E1-G6
cgncggtatccaacaacccgggtcgaccnacgcgtccgntcaggcgaaaggtcttgatatccgagtacgccacagggttactaagattgtcaggcggtacaatggagtgaaggtaacgacagaaaacgggcaaacttttgttgcggatgctgcantcattgctgtccctcttggagttttaaaatcgggaaccataaagttcgaacctaagctacctgagtggaaacaagaagcaatcaacgacctaggagtangtattgagaacaagatcatactacattttgagaaagtcnggtnggncgaaagtagagtttctaggagtggtagctgaaacctcctacggttgcagttattttttgaacctgcacagggccacnggtcatccggttctgggttacatgccggctngtcaacttgccaaagacatgganaaaaggtctgatggnncagctgcaatttccccgtccttgca

SEQ ID NO: 8350 - DNA, 467 bp, Arabidopsis thaliana
  unsure at all n locations
  Clone ID: LIB24-025-Q1-E1-G7
cctcaaaacttgttttgcctttagcatctccgagtaaggaatccaggtccaaagcctcttctcttcctcctcctcgcttccttctcacgcaaccttggatccaccgcagctatgaagatcaccgccttgctcgttctcaagtgcgctcccgaagcttctgatcccgtcatcctctccaacgcttcggacgtctctcacttcggttatttccaagcgatctagcgtcaaggagttcgtcgtctttgtcggtcgcactgtcgctaagccgaaaccctccttcccaacgccagtctggtcaaacacgaaagagtacaaagttcaacgccttaacaatangaaatgggccttttggccccggtggggtttcaatgggacgaattaattaaccctggtttcgaaagtggcttttctccnccntcctcaaatcaanggtccctaagatggagntaccaaagaaagaagttttt

SEQ ID NO: 8351 - DNA, 442 bp, Arabidopsis thaliana
  unsure at all n locations
  Clone ID: LIB24-025-Q1-E1-E11
gcccacgcgtccgcaaacatttggcttctgtcacttatcttcgtcatttgtattcttgtagccgtgttcaaccacaagaatcggaggaattatcaacggacaccaccgtctcctcctggctgtcctatcatcggaaacttgcatcaactcggagaattaccacatcaatctctatggaaactctccaaaaagtatggccctgtgatgcttttaaagcttggaagagtaccaacagtcatagtttcttcctctgaaacagcaaaacaagctttgaaaatccatgacctccattgttgtantcgtccaggctttgcangggcaagagagctctcttacaactatctagacattgctttttctccttangatgaatattgggaagaagttagggnagctcgctgttcaagaacntttcaagtagtaaacaagttcactcnataca

SEQ ID NO: 8352 - DNA, 466 bp, Arabidopsis thaliana
  unsure at all n locations
  Clone ID: LIB24-025-Q1-E1-A3
ccgccggtaccggnccaaaattcncgggtcgacccacgcgtccgctccatctctgtggagagacacaaaacttccaaaaaggaacattctttcagttctttacttaatctttcacaatgctaaatcattagccgttgataaagtcttaatctttgattcattcaaacgcgtttttgtttagtaatgtcgtcgcgtttttctttgacggtggtgtgtttgattgctctgttaccgtttgttgttggtatacggttgattccggcgaggatcacgagtgtcggtgatggcggcggcggaggaggtaataatgggtttagtaaacttggtccgtttatggaagctccggagtatagaaacggcaaggagtgtgtatccttcatcangtgaacaagagagaacttcgtgtcgtcctcttccagttctaatgatccttcgcttggtcacaacgctatgaactttggactca

SEQ ID NO: 8353 - DNA, 405 bp, Arabidopsis thaliana
  unsure at all n locations
  Clone ID: LIB24-025-Q1-E1-A8
ggcanaaatcactgggtgttagtgggtgngtgggttacatantaagagctctctgctactagtagaagaagaagaagaanattgattataaagacttaagatggctgcggcgcattttagtaaggagagggtcttcagagggtttctggtttggttctgcttttggggactgatgtctctaacatgcgctgggagactcagtgtttcaaggcagaattttgaantgcacaaacacttgaatcgattgaataaaccagccgttaagagcattcagagtccagatggtnacataatagactgtgttcacatatcgaagcaaccagcttttgatcaccctttcctcanaggatcacaagattcanatgggacctagttacactcccagaatccgctgtttggtgacan

SEQ ID NO: 8354 - DNA, 462 bp, Arabidopsis thaliana
  unsure at all n locations
  Clone ID: LIB24-025-Q1-E1-B1
gcggacgcgtgggcggacgcgtgggatttagggtttttctctcccccgagcttgcttttccgttgggtgaacgactaccgttgattttcttcgtttttttggataccgattcgattctctctcaccgatttttgaggttctctatttttcgtggataagaagataaagttattgtttattgataagttttctgctgggaagttgcaactttttctagatttaggacgttacaaatttcaatcatgagtgcatcatgggcagatgtggctgattcagagaaggccgtttctcagtcaaagcctcccttaatgttcccccanacctacgggaacanggccaacaagaagcctggttggctgctcctttgccacaaaaattgatnaattgcaagggtaatgggtgggtcaaaccaagcctggggtcctccgtttggggctcctccctaagcaaattggggggtgg

SEQ ID NO: 8355 - DNA, 439 bp, Arabidopsis thaliana
  unsure at all n locations
  Clone ID: LIB24-025-Q1-E1-B12
ggaagagcaaaacaaagatcggagaagatgaagacgattctttcttccgaaacgatggacatccccgacagtgttaccaccacgttcacgctaaagtgatcgaagtcgaaggacctcgcgggaagcttgttcgcgatttcaagcatctcaacctcgatttccagctgatcaaggatccagagactggaaagaagaagcttaagatcgattcgtggtttggaacacgcaaaaccagcgcctccatcagaaccgctcttagccacgtcgataacttgatctccggtgttaccagaagtttccgttacaaagatgangttcgttgtacgcccaatttcccatcaacgcctccatcgggcggtgacggaaantcaatcgagattccgtaacttccttggcnaaaaagaaaggtgnaggaangtagaaatgtttggatgggtta

SEQ ID NO: 8356 - DNA, 443 bp, Arabidopsis thaliana
  unsure at all n locations
  Clone ID: LIB24-025-Q1-E1-B2
aaaaaaaagagaaactcgaaaacgagaaaaatggcgagctccgatgctctcttgccaatctccgccagagaagaagaaccattatgtccttacacgagattaccaatggccgacccgaatcaagaaacccatggcccccggagaagaagaccctttaaaggtctcctcgccgtctcatttggtctcttgttcatcgccttttacgtcgctctcatcgccacacacgacggatctagatccaacgacgaagggatcgatgaaacagagacgataacgtcacgtgcacgtcttgctggtgtgtcggagaaacgtaacgatgggttatggaaactttccggtgatcggaacacgccggcgtttgaatgggaacaatantatgttgtcgtggcaacgaacggcgtttcatttcagcctgagcaaaattggatgaacgattctaacgg

SEQ ID NO: 8357 - DNA, 440 bp, Arabidopsis thaliana
  unsure at all n locations
  Clone ID: LIB24-025-Q1-E1-B3
gcccacgcgtccgggactgtgacgagtttattgccatatcggtacacctaaggaaaatgggcaatgacgagcatctcaagaaagcgtttgcgttctttgatcaaaacaataacggatatatcgaaatagaggagttaagggaagccttgtctgacgaacttggtacaagtgaagaagttgttgatgccattatccgtgatgttgacaccgacaaggatggaagaataagttacgaagagtttgtaacgatgatgaaaacaggaacagattggagaaaagcttcgagacagtacnccgaggagancgggtttaacagtatcaagtctcnaaccngatgcaangatcctccgtttgcaagggtccantgggtgataccangantgangnagaaggntttaatctggtggtcactccaccaagtcctgggaangattggagtc

SEQ ID NO: 8358 - DNA, 436 bp, Arabidopsis thaliana
  unsure at all n locations
  Clone ID: LIB24-025-Q1-E1-C10
gcccacgcgtccgcatttggatcaaacctggtgccaaagttctttacttgggtgctgcttctgggaccactgtctctcatgtttctgacctcgttggccctgagggatgtgtttatgctgttgagttttctcatagaagtggtagagatttggtgaacatggccaagaagagaactaacgttattccaatcattgaagatgctagacatccggctaagtacagaatgctcgtgggcatggttgatgtcatattctctgatgttgctcagccagatcaggcaaagaatcttggncctgaatgcctcattttttcctcaaaaactgggtggacactttggttatctcaatcaagggccaactgtatccaactcctaaagnttgcangcaagaagcagnccttccagaaccnaggtgaaaaaacctgcaaacangaacc

SEQ ID NO: 8359 - DNA, 433 bp, Arabidopsis thaliana
  unsure at all n locations
  Clone ID: LIB24-025-Q1-E1-C11
agaagaagatgagtggtgaagttgttttagctgctagagtttatcgtgaccttctcaaagcagtggtgaaacatgttggtaaagaagatcacaagtctcatttcttagactttgttaagcaagaatttcgaaagaatgcaaactcagagaaaataaaccttgctcgaaattacacatatcttctcaatagcattcactctcacaaggatctgctgttctcatacaacattgcggttgatagaactgaagaaatgaaacgagtgcttaataaatctgcagccagtgtagggcttcgtcttcctgaagtttacgagccttgatcatgcattcattcctctttgtccttccgggggatgagtcgttatgatttcntcaattctgtggacangtccttggttaaattttggnttaaaanagatagttaatgaagcca

SEQ ID NO: 8360 - DNA, 500 bp, Arabidopsis thaliana
  unsure at all n locations
  Clone ID: LIB24-025-Q1-E1-C6
antgttattcctgccgccacgggccgaaaaatccngggccgaccaacgncgncggacaagccgttccnaagaacaannggntggccttggcaataaaatncaaaganttncagcaacttgctactccgtatgggaacaaatacatacaaggggcaaatctaagagatttggttgatcaggcatacacaaaatttgtgagcataatgtttgtgaccctcgagaaaattgcccaacaagatcctaaatatgcagatattctcctgttagaaaactatgctgcttttcagaatagcctgtatgacctggctaatgttgtgccgactttagccaagttttatcaccaggcaagtgaagcatatgaacaagcttgtacgcgccacattagcatgataatttactatcaattcgaaagacttttccagtttgctanaaagattgaaggntttcatgtntactaacaccctggangagataccattccagcttgggtttancgaaag

SEQ ID NO: 8361 - DNA, 470 bp, Arabidopsis thaliana
  unsure at all n locations
  Clone ID: LIB24-025-Q1-E1-D10
gcccacgcgtccgcccacgcgtccgccttcttcttcttccaccgtctccgccacgaaccagagaaagctcaacaatggcgtcaatcctctcaaagaagcagaagaagaacgaaaaatacaccttgaaagagctcaaatcattaggtcatgacttactcacttctcgatctcacatcaataaccttcctctccttctcaccttcgtctcaccagaatctccgccgcagttcgtcgttgaatcactcctctcactccaatcctttttcactcctctactctctcagcttcctccgactttcntcgtctccttcttcaaaccagaagcagagggaccctggaagttngtgtttaaaaggcttggctcaagattcanaaagntggancgnaagtcngtccaaggntttttacnccggaagnttccttggtccgccnnaaccaattccggaangattccccgtaanggggaaatt

SEQ ID NO: 8362 - DNA, 438 bp, Arabidopsis thaliana
  unsure at all n locations
  Clone ID: LIB24-025-Q1-E1-D11
gcnctttctcttcttctccatccttcttctctcggcgcgcgcttcatccccaccaccttcgaattcgtgccctttgagggaagctgctaggatgggtgtgaagcaggctctaaggagcattgatgcgtttccaagagcagaggatcatttgcttcagaagacacaatctggcgctgttgtatctattgttggacttcttataatggctactttgttcttacacgagctgagttattatcttaacacacttacagtgcaccagatgtcagtggacttaaagcgtggagaaactcttccaattcatgtaaatatgacgtttccatctttaccttgtgatgtactgagcgtagatgctatcgacatgtcaggggaagcatgaaagtggatcntgatacaacatttggaactccgtccaaaaagtcatggncaaatcaaaag

SEQ ID NO: 8363 - DNA, 479 bp, Arabidopsis thaliana
  unsure at all n locations
  Clone ID: LIB24-025-Q1-E1-D12
gctctgtttctttcttctccaacaaatcaccaaaaatggagagattcaatttctttaatctgatgatcatagctttatgtttatcatccttcgttcacagtctcgagatgggagaaacatgtagttcgaccagcgaatgcgacgccggattgagctgtcaaagttgtccggcgaatggaaataccggctctacttgtacccggatccaacctcttaacccgacttcaaaggtgaatggtttgccgtttaacaagtactcgtggctaacaacacacaattcgtacgcaatcacgggggcaaaattcggcaaactgggttcaatcccttggtctcctccaaaagaaatccaagaaagaactccaatcaancaaatcangcttaaagaaatnggtgttgaagaanggtaataatggctagnattacatnatggaattttcaaaaaacgaatnnnaangggtttgtggtcaaatnccaccggg

SEQ ID NO: 8364 - DNA, 437 bp, Arabidopsis thaliana
  unsure at all n locations
  Clone ID: LIB24-025-Q1-E1-D4
ctgaacctgaagaagcactttctggatttgctgaggttgttcagatggaacctgagaaagctgactggggtttcaaagctcttaagcagactgtgaagatctattatcgtctaggtaaatacaaagaaatgatggaagcctatacagagatgcttacatatatcaagtcagcagtcaccacggaattacagcgaaaaatgtataaacaatatcatgggatttcgtctctggatctgcnaggccngaacactggcctgctngcncgagttctatcacgaccactttganngcccttgaagagggtaagaatgaganactctggttcaanacacatcnntaagntctgcnaanatcctggtttgacattnggtnaanccangacgggatgactaagaagtcctgaaangaactccgaaagtcttggcanaagggaacat

SEQ ID NO: 8365 - DNA, 435 bp, Arabidopsis thaliana
  unsure at all n locations
  Clone ID: LIB24-025-Q1-E1-D6
gngacgggctaaacacagcagtaaagcagaatcctgcaaagcaaacatttattccgtcagtagctactcgtcagaaggaaaatgggcaggcctacaaaagcaagtagcatggagaagagaagtggtactaccgcctatcgttctccatctcatggactcaaaagcaatgaaaccgctgagaaacaacaaaaggagatttccaagtctggtgcaagacctttagagaagacacgcttgcagaagaacccaaaggcaggagtgattgatgccaaaacgcggagggactctcttaatccgaaagcaaaacctgtgcaaggttctcttccaatgcggaccgtatcgaaaagctctttagacaaaagtgttatgatagttatatccatccggtattaatctgatctctggcaaagattgccacnaatggttgtccatcat

SEQ ID NO: 8366 - DNA, 417 bp, Arabidopsis thaliana
  unsure at all n locations
  Clone ID: LIB24-025-Q1-E1-A12
gcacaaaagcttttctctagacctcgtaggattgttgaaaaataccctgctggtgaagatggtgaccttaagaagaagcatatggtgtgccttaactggcttctctctgacaagccactggacttacaaactcaactcgcacttgggtttttggatcatctaatgcttgggactcctgcctccccattgagaaaaatcttattggaaagcggtttaggagaagctcttgttaatagtgggatggaagatgaacttctccagccccaattcagtataggtttgaaaggtgtttccgatgataatgtccanaaaagttgaagagtttggtcatgaatactctgagaaagttggcacatgnanggggtttgncactggatgctgtttgaancatccatgaataccaattgagttttcncg

SEQ ID NO: 8367 - DNA, 437 bp, Arabidopsis thaliana
  unsure at all n locations
  Clone ID: LIB24-024-Q1-E1-F7
gagaagaaggaggaggtatagcaatgggggtcgattattacaaggttcttcaggtggatcggaatgcgaaagacgacgacttgaagaaagcttatcgcaaactcgccatgaagtggcatccagacaagaaccctaacaacaaaaaagacgccgaagccaaattcaagcagatctccgaagcttacgatgttttgagtgatcctcaaaagagagccatctatgatcaatatggagaagaaggtctaacaagccaggctccgcctcccggagcaggcggcgggttttcggatggaggggcttcgttccggttcaacggtagaagcgcagatgatatcttctcggagttctttgggcttcacaagaccatttggtgactcacgtggtgcaagtccctctaatgggttccggttcgcggaagacgttttcncgtcaaatgt

SEQ ID NO: 8368 - DNA, 431 bp, Arabidopsis thaliana
  unsure at all n locations
  Clone ID: LIB24-024-Q1-E1-F8
gcaaaacaaatcccaaagcttcaagagggaagaagaagaagagagtgagaaacaatggcgtcgacgactctctcaatcgcaacaacaatccgttcctcttctcctctcacttccgcttccactcatcacttcctttccaaacccaccgcaatcgaattcccatttcgtctcagctcttcttctagccaccgtgcaatcaacctccgtcctatctccgccgtcgaagctccggagaaaatcgagaaaatcggatccgaaatctcctccttaaccctcgaagaagctcgtatcctcgtcgactatctccaagacaaattcggtgtctccccactctccttaacncccgcaaacagaggggcgtnnnnnatcnngacganagtgtggcgcgcggntgtgttggggggngcacacacangttttccggtggggga

SEQ ID NO: 8369 - DNA, 468 bp, Arabidopsis thaliana
  unsure at all n locations
  Clone ID: LIB24-024-Q1-E1-G1
gcgccgcatcatctccggcgacctcccaacaggaattcccatcgcttggccgccattaatgccgcttctcgctctgtgagtgagctagtggaggaggatgtgttgcaaatgttcatgaaagacagagaagaaaatggagatttcatatctaaagtttctgatangctctggttaaaggagattctcgaatctattgatgttaattccaatggagcttcttcntcagctgttgaactagatgatactcgggaaaagcttgatagatggcgctgatgatgatgaaaagtgggttcctgganacntaaaccggacacaagaatgggattgggttgggaagagttgantctgcccccaattgaaataagaaaagctcctaaccttangggnactacnnanaatgacagccgnagaggaaagggaagaaanttttaacctttccngaaaantattgaaacctctggaagncgt

SEQ ID NO: 8370 - DNA, 451 bp, Arabidopsis thaliana
  unsure at all n locations
  Clone ID: LIB24-024-Q1-E1-G10
agtttgccggcccggtccgaaataaccgggtcganccacgnnnnnnnnnnnnnnnnnnnnnnnnnnnnnnnnnnnnnnnnnnnnnnnnnnnnnnnnnnnnnnnnnnnnnnnnnnnnncgatctcggtctccttagattccggaataatcccctcaaggcttggcttagtaatcgtcgttttctccgccatgagttccaatacggcgtcgtccagcgcgggggcagccggatcgggagattcttccgccgctaggaagaattcaaagcgacccaagtattcgaagttcacacagcaggagcttccagcttgcaagccaattctaacccctggttgggtcatttcgacatttttgatagtcaagtgttatctttattcccctttggagttatctccctttcgcttccangnatttngtggaaattgttgatcgggtaggatacngagtgcatt

SEQ ID NO: 8371 - DNA, 433 bp, Arabidopsis thaliana
  unsure at all n locations
  Clone ID: LIB24-024-Q1-E1-G11
atcagcagcgatcgagattttcgccgctgaaatctggagactgattattacaaacttgttcgtcgtgttcttcatcggagagacactagatcggaaaatttaacctcgatttgattgccgttgccgtaacatttgactgttgttttgtggtggggaattctagggttcttgtttgatgaagaagaactgaagtgaaaatgaccattaaaatctcccatgagatgattgtgtccgttcattcttcgaaatcggacaacggaatcgaatgatcgtcatattctgtaagagagaaggttagatcttcaccgaatctggaactcgagatccatcgttttgttcgattttcaatccttcgcacaaggattggtcctgagaagaacaagttcaagttanaaactgttgtgttctgtccggggaaacttatttgagccng

SEQ ID NO: 8372 - DNA, 470 bp, Arabidopsis thaliana
  unsure at all n locations
  Clone ID: LIB24-024-Q1-E1-G12
cggtccgaaatanccgggtcgacccacgcgtccgattattttggccgtgagcttctccatttccatttccatcgccatcggactctctcctcttacaaacttttcatttttgttagctctcatctctacgtcgaattgctttttctcttcttctccgattcgaaaatgaggacaatcgtttcgcgtttgattcgttatcaatcgtctctttcccagatacggtttgtttctgcctctggtggcgggaggtatctctcgacagactctaacaaaattgatgagcccttcaatgtggaagaagctgagactgtacatgtgcctccacctcctactgagaagctgctgtcctgggaggaaatggttttgtgggatcacatgtcgttaaagaagcttaagatngcggttaaccggtctcnagccttaacaaggcaaggtaggtcgcctttacaagagtcctgggcctccaaaat

SEQ ID NO: 8373 - DNA, 399 bp, Arabidopsis thaliana
  unsure at all n locations
  Clone ID: LIB24-024-Q1-E1-G2
atagcacatattcatatcctacaagacattcanaccatgaaatcatcccatgcatatctcgtctgcatactgttgctctctctattttctctacatcaatgtgtgaggttanaaagatcgaacaaaatcgatatgtctgtatgcgtccatgaaatttgcggtggtgttttcgacggaggctgttattgctgtcccaaaacgccagctctttgctgggcacacatacaattctgcaccacctattgtcaatctcaaacttaaaaccttaaataaactgatctggancnatagttgttccattttaaacctacacctattgtcatttatgtttgcatctgtttgtcaacgagaatactcctaaacgtcntgaggtttaacgagagtactcctaancctcct

SEQ ID NO: 8374 - DNA, 419 bp, Arabidopsis thaliana
  unsure at all n locations
  Clone ID: LIB24-024-Q1-E1-G5
gagaaattgttctgaagatctatcgttttgagcttcgttaaccgtgatacagacgacggtatggaactattgaacatgttctgcctcaaggtcagcgtcagtagttcgacaagactaccttgcaacattttaaaagattcttgagctctttgatgtcaccactcaacgtaccgccaataacattcctgcttaaatcaagacgctgaagatttgtcaaggagaacaattcatgaggaattgagccgttaaatctattacaacacatgtcaagagaaatcaagctggtcaagttcacaaacgcatatccaggaatctctccttgtatgttgttaaatgagacatcaagcccaacaagagagtttatacgcagaatcggtctcaaaatgcttgaactaactaaagccaagggggatgancaa

SEQ ID NO: 8375 - DNA, 434 bp, Arabidopsis thaliana
  unsure at all n locations
  Clone ID: LIB24-024-Q1-E1-G7
gggagggtattcctccggaccagcagaggttgatcttcgctggaaagcagttggaggatggcagaactcttgctgactacaacatccagaaggagtccacacttcatcttgttctcaggctccgtggtggtatgcagatctttgtcaagacgttgactggaaagactatcactttggaggtggagagctctgacactatcgacaatgtcaaagccaagatccaggacaaagagggtatcccaccggaccagcagagattgatcttcgccggaaaacaacttgaagatggtagaactttggctgactacaacattcagaangagtctacacttcacttggtgttgcgtctccgtggaggtatgcagattttcgtgaagactctcactggaaagacnattactcttgaagttgagagctccgacacattgacaacg

SEQ ID NO: 8376 - DNA, 485 bp, Arabidopsis thaliana
  unsure at all n locations
  Clone ID: LIB24-024-Q1-E1-H1
ttgncgcctgccggtaccgggtccganaattcccggggtcgacccacgcgtccggaagaagaaagatgccaggagcaattgtggaggaagagaaatctcagattgaatccatcaaagagcaattgaaactcgagaaggaagatgatgttgttgtggaggatgtgaaagacggagaggaagaagacgatgatgaagacgatgaggacgtcgaagttgaaggggaaggtggaaatgagaatgcaaagcaaagtagaagcgagaagaaaagtcgcaaagctgttctaaagcttggcatgaaacctgtctcagatgtcagcagagtgacaatcaaaagagccaagaatgtgttatttgtcatctcgaagccagatgtttacaagagtcccaatgcagagacttacgtcatttttggagaagccaaggtcgacgattttgagctctcagctacagactcaagctgctcaaaggtttaagatgcccgatgt

SEQ ID NO: 8377 - DNA, 533 bp, Arabidopsis thaliana
  unsure at all n locations
  Clone ID: LIB24-024-Q1-E1-H4
ntgtatcctgccgctacggtccaaaatccgggtcgacccacgcgtccggagaaaaccaactctggagaatggcgaatctaccttcttctctctccatgggcacacctttcggtggtcctagcacctccgcacaaaatcctaccggagctccggccaacaaagatcgcaatttggcctctgctgaacagttggtactcgatctcagcaatcctgaactcagagaaaatgctcttctcgagctttccaagaaaagagaattgtttcaggatctggcgcctttgttgtggaactcttttggtaccattgctgccttgttacaggagattgtatcaaatctactctgttcttgcaactccaaatcctggactccctggctcaagtccaacccgttgttttggcaaactccgcctccgctccttccttcaagttgcggtanncaatcctcaattcctggacaaccgaagaaatggtttaatttcctcaaangggctcaatatccccggtttggtaanccntttaaacccctttccctt

SEQ ID NO: 8378 - DNA, 437 bp, Arabidopsis thaliana
  unsure at all n locations
  Clone ID: LIB24-024-Q1-E1-H7
gcccacgcgtccggaaatctactatgctcgacgcattagctagccgcctcgctgctaacgcttttctctccggcaccgttcttcttaacggccgcaaaaccaaactctcctttggaacagctgcatatgtgacccaagacgataacttgattggtacgttaactgtgagagagacgatttggtattcagcgagagttcgtcttccggacaagatgttacggtcggagaagcgtgctctagtggaaaggacaataatagagatgggtcttcaggattgtgcagatactgtcataggaaattggnatttgcgtggaattagtggtggagagaagagaagagtcagtattgctcttgagattttaatgagaactcngtttgctgtttctcgatgagccaacangtggncttgaaaantgcctctgcnttccttgggaact

SEQ ID NO: 8379 - DNA, 471 bp, Arabidopsis thaliana
  unsure at all n locations
  Clone ID: LIB24-025-Q1-E1-A1
attagccgccggtacggnctaaaattcgcgggtcgacccacgcgtccgcccacgcgtccgaataacacaaagtgaactcctaatcagggttcattttataaatttattatttagttattgcggataaagaacaataataatatggggatgtctaaaagtatcaaggttatcttatctcttgctctcgtagtgttcttggcccttgctgcaaccaaggttgaggccacaagatacataacttatcctgctatcgatcgtggagatcatgctgtacattgtgacaaagcccaccctaacacctgcaagaagaaagaagcaaatccttaccagagaggatgcgagaagatcaatcgttgccgtggtggataggtggaaaacagtgaattaaccaacccacccaagagcataaaatatacatcaatacattatctatatacacacttttgacatcctcatatcaattttaatgan

SEQ ID NO: 8380 - DNA, 422 bp, Arabidopsis thaliana
  unsure at all n locations
  Clone ID: LIB24-025-Q1-E1-A10
gcttctccgctactgatcccaaacgcaacgctagagactcccacgttccggttttggcgccacttccgattgggtttgcggtgtttatggtacatttggccactattccgatcaccggaaccggtatcaacccggctaggagtttcggagccgccgtaatctttaacaagagcaagccatgggatgaccactggatattctgggtgggaccattcattggagctacgatagctgcattttatcaccaattcgttctaagggcctcaggctccaagtccctcggttcattcagaagtgcagccaacgtttaaacttagccacgaaagaaaaaaagtgtgcctacaattatgtagaaacatatcctcttttcactcgtaacctaacntcntcccaatttccaantccaactggtgggantccat

SEQ ID NO: 8381 - DNA, 433 bp, Arabidopsis thaliana
  Clone ID: LIB24-024-Q1-E1-F6
gaaagcttccaactttatccattaattggagaaaattctcagagagactgaagtcgacaaagtcagagggtttcgttttttggcttctgggttttttatttcaagtgttcaatttccgaattaggtaagaaagttaggttttgagatctgtgcgaattgtgagagatgtccacgccgttgaaggtgtggcaacgttggtctacaccgacgaaagcgacaaatccagattcgaatggctctagtcatggaaccggtttagacatggtgaccccagtttcgggtcgggttagtgagatccagttcgatgacccaagaatattgcctgagaaaatttcagagcttgaaaaagagcttttcgaatatcaacatagtatgggtcttcttctgattgagaaaaaggagtggagttcccagtatgaagcgcttcaacaag

SEQ ID NO: 8382 - DNA, 435 bp, Arabidopsis thaliana
  unsure at all n locations
  Clone ID: LIB24-023-Q1-E1-C8
naaaaaaaaagaaaacacaaaaacaaagattataatggcttcctcaaccatggctttgtcctcccctgccttcgccggaaaggctgtnaancctgcccgcatcagatgtcctcngaaacngccgtttnaacaatnaggaagactgtcnccaagccaaagggtccatcangcaacccaatggtacggatntgaaccgagtcaagtacttgggtccattctccgggcgaacccccgagctaccttaccgggtnaattccccggtgactacggatgggacaccgctggtctaaccgccgacccaganaccttcgccaggaaacgttagctanaanttatccnaancaaatgggccatgcncggaaccctaagctcgttttccctgaaccattggctagggaaacggnttaaattngggaaaaacggnttgggtcaagg

SEQ ID NO: 8383 - DNA, 421 bp, Arabidopsis thaliana
  unsure at all n locations
  Clone ID: LIB24-023-Q1-E1-C9
ggaacaatgaaaaatttaaccagtttcgtaattgttatcttactacaaagcttattgtttcatgtatatggtcgtcatcaaagttcttcgaagaacattttagtagattcatctccatttccttctgatttcctctttggtacagcttcttccgcttaccagtatgaaggtgcgttcttgactgatggaaaaagtttgaacaattgggatgtctttacgcataaaaatcctgggaaaatacttgacaagaacaatgcagatagagctgtggaccaatataatcgatttttggttattttcttatgataattatttctttctatttttgttcttgtcaacttcttttatcatattatattctcatattatttgatgttgttatttantttaaattatcttctaaggttaaggagganatcca

SEQ ID NO: 8384 - DNA, 419 bp, Arabidopsis thaliana
  unsure at all n locations
  Clone ID: LIB24-023-Q1-E1-D10
ggagagacacaacacaaccacatcannnnnnnnnnnnnnnnnnnnnnnnnnnnnnnnnnnnnnnnnnnnnnnnagccaccaccaaaatccttaaaacctagacttttctcttccatcgatggnggctaataacagatccgatcatgggtcagacgaaaacacaagactttacaatccttaccaaaactacgaagtcccaatcaacaaatctcagtacctttacaagcttcctacctcccctgagtttctcttcacggaggaggctttaaggcaacgtagatcttggggtgagaatctcactttctacaccggaacagcttacctcggtggctccgttgccggagcttctgttggagtcatcactgggagtcaaaaagcttcgaatctggngacactactaaagctcaaaatcaacanga

SEQ ID NO: 8385 - DNA, 410 bp, Arabidopsis thaliana
  unsure at all n locations
  Clone ID: LIB24-023-Q1-E1-D12
gaaacctcatcacacttcttcactcggtgaatctttcttcaggcctcttcataacagaaaaaaaaaatgatgtcttacgttgctaacttggtcatcaagagttttgaccgtgcttccgtggtgtatgttgaagatgtggtggatagctctcgagcgacatgtgttgagaatggtggtgatgacgatgacagtggctatgattatgctcctgctgcgtgattgtctcctattagtataatgtaatttagaagaaaaaaagagagagagagagatgataagataatttagatattagttagaccatttatgtactagattgtgtctcgagttttcttgtcaatgagcaaacatggtttcctaatgtcctaatccttaaccacaatcacttttttttgncccctaaatttgaa

SEQ ID NO: 8386 - DNA, 458 bp, Arabidopsis thaliana
  unsure at all n locations
  Clone ID: LIB24-023-Q1-E1-D4
ctttaccgnccagtgcccgtcaaagaattcacgggncgacccacgcgtccncgtaaatctgggtctccgttttggatgttgtttcatatgtgtcctgtttttgggaaagatgatggtaaagtcaccaattttgtggcggttcaggtcccgatttcgggacgagaacatcatcggaagaagttgagaaatgtcggagatttgtcgtcggatacttctccgacatttggttcttgtcgaagagaggtttgttttggtaatttcgtgtgtcaggatcgagctttaccagtggaatgtgatgatgatgaacaaggattagaggattgggaacagtgtgaancgagtgagtccgagaagctgaaanctacggaagctattaacaatgtgttatctancttagtgcattacancgagttgagtggtagattagtctgcggaaagcggtactgcttgcnaggagt

SEQ ID NO: 8387 - DNA, 447 bp, Arabidopsis thaliana
  unsure at all n locations
  Clone ID: LIB24-023-Q1-E1-D9
gctttttggaaaacgaaagcgggatttagcgtatagcagcttccaccgtttcgccgaatttcatcgagcttcaagtgaacatgagtaanccaatggaagaggataccaacggaaagactgaggaggaggagttcaacactggaccactctctgttttgatgatgagtgttaagaataacactcaggtgttgatcaattgccgtaacaanagggaaactcccttggccganttaagggctttttgacaggcactggcaacatgggttccttgaaaaatgtcagaagaactgttggaactgangttccgaaaanccgngaaaaaggatagatgaaaagctcntcctggttaacaagagatcgantcatcagcaagatgttccctgcgttggaagactcagtcattaaccgtcctcaaggaaacccgaatttnaaagaaggcccttccta

SEQ ID NO: 8388 - DNA, 469 bp, Arabidopsis thaliana
  unsure at all n locations
  Clone ID: LIB24-023-Q1-E1-E1
gtaggccgtcangaattcaagggtcgacgnacgcgtccgcggacgcgtgggtcgtaatccgccgctaaatcaaaccagcgagagagatagatccaacgtgaagaagaaatcgaaaacgatgacgtttagggagaaaatgccgacgagtcctaaatcgcctctgagaagacgacgttcgagctggaccggtacatggttaaaccatcagacgacgtcgtttaagcaagcagtctccgccgttattcaagctcaatcaccaagatccaggtttaaatccctatcttctgatttctccgacgtcgatcgaactctttcgttgtcagattctcttcttctcaaagatccttgagaagcttcctgaatctcanaacgaagatgtttcactcgtgtgtaaacggtggttgaantgtcaanggacgggtttacggagtatgaagggttttgattgggaatttttatggnccgggag

SEQ ID NO: 8389 - DNA, 424 bp, Arabidopsis thaliana
  unsure at all n locations
  Clone ID: LIB24-023-Q1-E1-E11
atttcgtggaggttcgcgtcttcgacctctcttctctccattcctcgaacaccaaaaagtgcnnnnnnnnnnnnnnnnnnnnnnnnnnnnnnnnnnnnnnnnnnnnnnnnnnnnnnnnnngtggaaaaccctaacaaggacgattcctcctcttcgcttgaattggtcctcaagtaccacaaccagacgaagcactccttgaacggttacgcgagaggtcctcgtggtctcgactgggccaatcagcctaatcccttccgccggtacctctctgctcctcttcttcctctcnaacannccaatcacganatcgacgacnactccgactntcntctctaatcntagtcnnaatcggatccgncttcctccgggccnaaanccatctctntttnctaanaatctncgcaaccnttttcctaacaat

SEQ ID NO: 8390 - DNA, 422 bp, Arabidopsis thaliana
  unsure at all n locations
  Clone ID: LIB24-023-Q1-E1-E12
gcggacgcgtgggccactctttcgtgtcgcantaanantangaaagaangaanaagaanaccagagatggcgatgacggacagcatctanggtatttgttctaccggccaatgtcacctcggtcgccggcgcttcgtcgtccaggagctccgtgtctttcttgccnatgagaaacgccggttctatgctcgtaatcagggcanccgaanatcctgctccggcttcctcttcntcaaaagattctccggcanctgccgctgctccggatggagctactgccaccanncccaagccatcaccgattggtcctaagagagggtctaaggtcaanattctaatngagagaatccnattggttcaatgaacgttggatcagttgttgccgttgatcaggacctaaagactcntaaccgggttgtggg

SEQ ID NO: 8391 - DNA, 428 bp, Arabidopsis thaliana
  unsure at all n locations
  Clone ID: LIB24-023-Q1-E1-E6
ggggagaagcattgagaacaatagcttttaaagttagaacagcttcttgcggtggaacagcttgtgttaattcctttggtgatgaacaactcgctgttgatatgcttgctgataagcttctctttgaggctttgcaatactcgcatgtgtgcaagtatgcttgctctgaagaagtacctgagcttcaagacatgggaggtccagtggaangtgggtttagtgttgcgtttgatccattggatggatcaagcattgtggatacaaatttcactgtgggaaccatattcggtgtttggcctggagacaagttaaccggaatcactggaggagatcaagtggcctgcagccatgggaatctacggtccacgaaccacntanggtnttggntgttaaggggcttccagggaacctcagggantctgccgtcc

SEQ ID NO: 8392 - DNA, 436 bp, Arabidopsis thaliana
  unsure at all n locations
  Clone ID: LIB24-023-Q1-E1-E7
gatcctccaatttctcaatattctaaacaaattatatatttncttacttacttgttctcttgtaatggatttctctccgatcaactgcctcattttcgatttggatgacacattataccctctaaaaactggaatagcgccagctgtcaagaanaatattgacgattttctagtggagaaatttggattctcagaaagtaaagcttcaagcttaagagttgaactcttcaagacttatggaagtantcncgctggtcttagggcgtnaggtcatgatgttcatcctgangaatntcncaggtttcgtgcacggaaggttaccagtatgggtcgatcgaancgagacaacnaagctacggtnaccttctcagacagaatcnaacncgagaggagttagatttngnangtcggacangaatcaaggcggttngagtcc

SEQ ID NO: 8393 - DNA, 422 bp, Arabidopsis thaliana
  unsure at all n locations
  Clone ID: LIB24-023-Q1-E1-E9
ggcaaacccnnnnnnnnnnnnnnnnnnnnnnnnnnnnnnnnnnnnnnntgtaactttcaatctcagctaatatcaagtaacgtggaaaggatttgttccgtcaaaggttggtgattatacagagactgagttcctgataagttggattgagcttgttttcatttgcggatctttgagaaaaaagtttgcaactttatggctctggaacaacaacatgtttgtgaaaagcggcttcaagccaagaccttttctacccaagagtttcagttgactctcaattgggatgatttaacttgtcccatttgtttggatttccctcacaatggtgtgcttctccagtgttcttcttacggaaacggttgccgtgcttttgtctgcaatactgatcancttcactctaactgtttgggattgtttcaata

SEQ ID NO: 8394 - DNA, 414 bp, Arabidopsis thaliana
  unsure at all n locations
  Clone ID: LIB24-023-Q1-E1-F12
gcggacgcgtgggaaattttgaatctttttgtttatttgtttgctctcttcattttttaattgatctggtcacctgaaatgagttaagttcgacttatatagaagctatgttctgcaaatccacattgatgattttaccattttgttaatttggatgaagttgatccatcaagaaacactttaagacttataattgttggacttgatctgactttctttttgggtactgaccatttatgctgacaattttgtattgattcaatatcatttatggtgtcagatggttgttgtttttctatctctgattgttgttatatgggtggcttctttcttcaaaattttcttccgagctacatctatctccagagccactattcttgatgatgggaagaaaaatgtgatgtttgtaacnca

SEQ ID NO: 8395 - DNA, 480 bp, Arabidopsis thaliana
  unsure at all n locations
  Clone ID: LIB24-023-Q1-E1-F2
ttttacgcctncaggtagcngtcaagaattcaagggtcgacccacgcgtccgcggacaaccactcgtttcccgaaacagcaactcacagactcacaccactccagtctccggcttaactaccaccagagacgattctctcttccgtcggttctatgacttcgattctcaacactgtctccaccatccactcttccagagttacctccgtcgatcgagtcggagtcctctctcttcggaattcggattccgttgagttcactcgccggcgttctggtttctcgacgttgatctacgaatcacccgggcggagatttgttgtgcgtgcggcggagactgatactgataaagttaaatctcagacacctgacaaggcaccagccggtggttcaagcattaaccagcttctcggtatcaaaggagcatctcaagaaactaataaatggaagattcgtctcagnttacaaaaccantcacttggg

SEQ ID NO: 8396 - DNA, 429 bp, Arabidopsis thaliana
  unsure at all n locations
  Clone ID: LIB24-023-Q1-E1-C5
gattcatggcaaaatggatcggattcaagaacaccgccggtccaatgggacaccaagctgtggctatcagagtgaacggagaccgtgccgtgatcttcaactgcaggttcgacggttaccaagacaccttgtacgtcaacaatggtcgtcagttctacagaaacattgtcgtgtcaggaacagtcgacttcatcttcggcaaatccgcaaccgtgatccaaaactcactcattgttgtccgtaaaggaaacaagggacaattcaacacggtcacagccgatggaaacgaaaagggtctagcgatgaaaatcggtatcgtcctccaaaactgtcgcatcgttcccgacaagaaactatcggcagagagattaatcgtggagtcatacttgggaaggccatggaagaaantctctaccaacgtnattaaca

SEQ ID NO: 8397 - DNA, 425 bp, Arabidopsis thaliana
  unsure at all n locations
  Clone ID: LIB24-022-Q1-E1-H9
gaaacaaacactaacaatggtggtcgaagaagattcacgtctcataaatctccaacacaagtacaacccgacaatgcccgaggtggtggaggagctgaagagaatttgggacataagttttccggtggccgccatgagcatattaaactacctaaagaacatgacatccgtcgtgtgtatgggacgactcggtagccttgagctcgcaggaggagccttagccatcggtttcaccaacatcaccggttactccgtcctctctggtttagccaccggtatggaaccattatgtggtcaagccatcggttctaaaaacccttcactcgcttccttaaccctcaagcgaaccatcttcctccttctcttaacttctcttcccatatcactccnttggctaaacctcgcgcctctaatgctgatgctcc

SEQ ID NO: 8398 - DNA, 452 bp, Arabidopsis thaliana
  unsure at all n locations
  Clone ID: LIB24-023-Q1-E1-A1
gagaaaaaaaaaactttcattttattcgtcgtcagtttcatcttgttgcttcggagcgagcgagaattatcgtcggagaatttatcgtctctctctctgaaaattctgatcggtgaagaatcgtcggatcgaaagttcgtttatcttctcgtttacgtttccgtgatttaaatcctttggggtttttttttcttggtaatgtctgtgtttctgaatgtgtggttgatttttgttcgtacactttactttgatcgattaagtttatgtantagttaattgaaattttttgggagaattcaanaagaagaacangaaagaaaacaaatcccgtaagccaanaccctttgaatttgaccctaaanaatnaggatacatnatgantnaactaatgnaaggcantcctttgantnggnaaagggttcccntaangggggggccctttgggnaaccca

SEQ ID NO: 8399 - DNA, 417 bp, Arabidopsis thaliana
  Clone ID: LIB24-023-Q1-E1-A10
gatttccttcttcactattccgcttagagcacaacaccacgatgacgaccaaggccatggagagaggatttaagctgattctgggttctcaatccatggcgagaaagaggattttggctgaaatgggatatgattacactatcgtgactgcagacattgatgagaaagctattaggacagagaagcctgaagatttggttgtggctcttgctgaagccaaggcaaatgagattatatcgaaattgggaggtgagagccagtttgcaaaagatcctcaaccaactcttttgattactgcagacactgttgttgtgtacaaaggtgttattagagaaaaaccaaccactaaagaagaagctcgtgaatttatcaaaggctattccggttcacacggaggagttgtgggatcgttcctgg

SEQ ID NO: 8400 - DNA, 479 bp, Arabidopsis thaliana
  unsure at all n locations
  Clone ID: LIB24-023-Q1-E1-A2
gcctccaggtagcngtcaagaattcaagggtcgacccacgcgtccgagaagttagatcaaaagaagaacacgaaactctgactgtgtctctctttctcttcgtgtgtttctatatttatatataaaaagacaagatctctggtctggaattagaagaatcttatttggggttttttcttaggattaagctctaatggcagatcaagtaaaagagcggactttagaggagacctctacgtgggcagttgctgttgtttgctttgtcttactctttatttcgattgtcctcgaacattctattcacaaaattggaacctggtttaaaaagaagcacaagcaggctctttttgaagctcttgaaaaggtcaaagcagagcttatgctgttgggattcatatcactactactcacaattgggcaaacaccaatctcaaatatctgcatctcccagaaagttgcgtcaagcaatgcacccntgc

SEQ ID NO: 8401 - DNA, 415 bp, Arabidopsis thaliana
  unsure at all n locations
  Clone ID: LIB24-023-Q1-E1-A6
ctttctcncgcaaacccaaattctctcagcgccggtcaaatactnnnnnnnnnnnnnnnnnnnnnnnnnnnnnnnnnnnnnnnnnnnnnaagctgtttgttctgtaanaaatatggaancaggtggcgcgtacaatccacgcactgttgaanaggtgtttagggattttaagggtcgtatanctggcatgattaangctttaaccactgangttcaggaatntttccgactttgtnatcccgacaaggagaacctttgcctttacggncatccaantgancactgngaagtgaatttgccagctgaaaaggttcctcctgagctcccagagcctgtcttgggtatcanttttgccacacacgggatggcggaaaaggattggttgtcccttgttgctgtccacagtgatgcntgg

SEQ ID NO: 8402 - DNA, 429 bp, Arabidopsis thaliana
  unsure at all n locations
  Clone ID: LIB24-023-Q1-E1-A7
gcgcgaagcgcgttgtcgtcgacgggcgacaccacatgcttggtcgtctagcttccaacactgcgaaggagttacttaacggacaggaagtggttgttgtccgatgtgaagagatttgtctctcgggaggtttggttcgacaaaagatgaagtacatgagattccttaggaaacgtatgaacactaagccttctcatggtcctattcactttcgtgctccttccaagatcttctggcgcactgttcgcgggatgattccacacaagaccaagcgtggtgctgctgcacttgctcgcttgaaggtttttgagggaatcccacctccttacgacaagattaagagaatggttattcctgatgctcttaaggttttgagacttcagagtggtcacaagtactgcttaatgggacgtttancctccgaaggtg

SEQ ID NO: 8403 - DNA, 389 bp, Arabidopsis thaliana
  unsure at all n locations
  Clone ID: LIB24-023-Q1-E1-A9
ggactagttctagatcgcgagcggncgctcgcgcggacgcgtgggctcagccctaagagagaagaaatangctctgctctgcgccttttctacaagaaattcaccaaaaaagcttgaatatttatcggaatcagagcttgggtttttaatcctggtaaagccatgtcacatatggtgtttcagagcgttgtcgctcccaaacccttatctcctctcaaaccctgtttacctatccctcgtccactcgttactctgccttgtaagctccgtcgtggcttcgttagagcttcttcgtcgtcgtttcttgtcgatgattcagtttcaggactcgagcgttgcttacagttaccttctggagttgagttaggcacatcttcctcnggctcttt

SEQ ID NO: 8404 - DNA, 472 bp, Arabidopsis thaliana
  unsure at all n locations
  Clone ID: LIB24-023-Q1-E1-B1
gcgcccgtcaagaattcaagggtcgacncacgcgtccncggacgcgtgggcggacgcgtgggttctcatctctcaatcccattcgcttattatttatccatatgggaaaagttcttgagaaggangcgtttggattggctgcnaaagacgaatcgggaattctttcgcctttcagtttctctagaagggcgacgggtgaaaaggatgtnaggttcaaagtcttgttctgtggaatttgccacactgatctgagtatggccaaaaacgaatgggggttaactacttatcctcntgtccctgggcatgagattgtgggcgtngtgactgaagttgggnccaaagngaaaaaattcaaccctgggagacaaagtcgganttggntatatgggccggctcgtgcaaggtcacgtgacagcctncaangatgggcgacgaggaactacngtccaaagaatgatcttaangtcccgga

SEQ ID NO: 8405 - DNA, 417 bp, Arabidopsis thaliana
  unsure at all n locations
  Clone ID: LIB24-023-Q1-E1-B10
gcccagatgctggagcacatagtaaagaggagatggaagctgaaacagaacaggatccaatgaacctagctgatccagacagttgtttctgtgagtttcaaggtgttcatatacaccacaaagtgttagatccacatacactctctgatgatgtttcaaacacaagccctcatgctcaagaaacaccaaaaaccaagtttccgatgattctattgcacggtttcggcgcttctgtgttctcctggaacagagttatgaagccattagctcgtctcgttagttcaaaagttcttgcctttgatagaccagcatttggtttgacttctcggatttttcacccgtttagtggtgctaccaatgatgcanaaccattgaatccctactccaaggtgtantcccgtgctcactacttgtatt

SEQ ID NO: 8406 - DNA, 418 bp, Arabidopsis thaliana
  unsure at all n locations
  Clone ID: LIB24-023-Q1-E1-B11
gcccacgcgtccgcggacgcgtgggcaaatttcgaccgagttttgttgaattccgattagatctttcttccacgaaacccccccaagtacccattccatcttctccggtgagtctcccatgttggnattacgctagggttcttcttctctgtggtttcgcataacccantaatccaattttctacttgggcatcaatgggtcgctctcgagggaacttccaaaatttcgaagaccctactcagagaacgaggaaaaagaaaaatgcggctaatgtgganaactttgagtctacttctttggtaccaggtgctgagggaggagggaagtataactgcgattattgccagaaagacantactgggaaaaattaggataaagtgtgctgtctgtccagattttgatttccgtaganaatgt

SEQ ID NO: 8407 - DNA, 396 bp, Arabidopsis thaliana
  unsure at all n locations
  Clone ID: LIB24-023-Q1-E1-B12
gcctgcttcttcttctatgtctcctcgtcgtatcagcgggaatcacggcagccccaccgcttccgtagcacaatcacctcgccgtccttctcggcaggtttcttctcngtggactcaantcgtccgcggcgaatcaganncgatcnccgccgccgccgctgtanccggtccttcctctcntcaatcnanggctccgatcgagccgattgcttctgtatcngttgctgctccaactgctgctgttttgacggtggaggcggcggctggtgatgagaaatcggnagcatctggtggtcangacaatgctggaaanaaaccagtttggaaaaggccgtctaatggggcttctgaggttggacctgtcatgggagcttcatcgtgggctgctccttctga

SEQ ID NO: 8408 - DNA, 431 bp, Arabidopsis thaliana
  unsure at all n locations
  Clone ID: LIB24-023-Q1-E1-C10
aaccccttttcgatttcattgataaaacgcaaatcgatctctcgtgtggaagaagaagaagaacacgatgggaacaatgggtaaagcattctacagcgtangattctggatccgtgaaactggtcaagcacttgatcggctcggttgtcgcctccaagggaaaaatcatttccgagaacagctatcaaggcaccgcacactcatgaatgtttttgacaaaacccctaatgtggataagggggcttttgtggctcctaacgcttctctctctggtgatgtccatgtgggaagaggttcttccatttggtatggatgtgtcttgagaggagatgctaacagcattagtgttggagctgggaccaatattcaggacaacgctcttgtccacgttgctaagaccaacttaagtgggaangtcctaactactgtca

SEQ ID NO: 8409 - DNA, 425 bp, Arabidopsis thaliana
  unsure at all n locations
  Clone ID: LIB24-023-Q1-E1-C11
gcaaaggattggttttcaagctcttgaaaagttgaatttagagttagctaccaagtcagtgctcttgggaaacggattgacgccatcggcagctgatgttgctgtgttttcagctctgcattcttcagtgcttggcctctcagattcagacaaggagaaagtaccacatgtcataagatgggtgaattacatccagaataaagaagagttgtcgacattatttgcaccaatacctgtgaagctaccagaatttagcttcgaggtaccaaaacctgccattaaggtggaaacaaattctaattcaaaaaaagctgcagaaggtgtaaagcctgttgacaagccagatgtgcagccgcagctgggcacaaagaaaactgagccagaaggaaccaaangaaaatgcagcanaagagaaggatcccaaa

SEQ ID NO: 8410 - DNA, 481 bp, Arabidopsis thaliana
  unsure at all n locations
  Clone ID: LIB24-023-Q1-E1-C4
aatgttaccctccaggtgccgtccagaattcaagggtcgacccacgcgtccgatatattcacttgatcatcatatctctacaagcataaatcccgtgtttgataactattttttgtcagtagaaaattaatgatttgtgtttttcggagtccggtgcatttctgacacgtagttatccgttaccaaatattcgtcgagaaaggtaaagaaagactgctctaaaatatttttatttttgtgaaaatatgtgacagccgttgatatttggactgagcttgatagggctgacacctctagctgagcgagttagctttttgacagagtaagttattatcgtcccacaaattttctataggataactacgagatatttcatagtattaccattttattcttttcgacataaatgtgttgggttaagtttgttttagtttagtaactagtanaaagtaattgacatttccaagtgttgactgaatga

SEQ ID NO: 8411 - DNA, 402 bp, Arabidopsis thaliana
  unsure at all n locations
  Clone ID: LIB24-022-Q1-E1-H8
ttcttcttcgtctccgtaagtttcagtttcgatctgtaaagtttcaaacttgtggtcgaatttttaaatgggaagtggaagagatagagacgaccctttatccttcaccagcaatccatctacggcgtcgtctccagtcactgtatctgactatctcgacaactttctcggcgaacccacttctcgctccggtagttttcaaagcgagagcttactcggtggaggcggtggagaaagcatcaacgacgctgattttggattcgctcgtcctgatttccgatcggaacaactagctgggaaccgttacagttttacgaaaggnatgtcttcctnggtgctacaaaaagccatctgttttgggccncaagggattcaagctgctgagttcgatcnattgcccaa

SEQ ID NO: 8412 - DNA, 441 bp, Arabidopsis thaliana
  unsure at all n locations
  Clone ID: LIB24-022-Q1-E1-F10
cacaggcctcaaanactcgnaggtcgacncanncntcnngcttcatgctcatcaaacttcacctctgctttcttcttctcgagtgaaacagacagccaaatcaagatttgacggtgagccaaattccatggcactgtttcaggagaagctttcatcactttcctcaagttattcgtcaattcattctcttccgaggattctcgtgtccaagcctcgtaatagaattgccgtgacaaagtcccgttcgatttgcagagcttcgtggcaagagctcgccggagtgttggttttctcggcgattccattcactgcggttaaagcaattgcaaatagctcaataggagtttctctacggcggagattacaagagaaaaagaatgaagccgtagagaantcttcaagattcaagtctaaagctcangaagctagaaaacgacagca

SEQ ID NO: 8413 - DNA, 422 bp, Arabidopsis thaliana
  Clone ID: LIB24-022-Q1-E1-F3
gctctgtgttcaaaacaagttcattcgatctatagagacgaaacaaaaagagagatcgtacgcaaaagtttccgatatggctcgctcgtttggagctaacagtaccgttgtgttggcgatcatcttcttcggatgtttatttgcgttgtcctctgcaatagaagaggctacgaagttaggatcagtgatagggatagatcttggtactacttactcttgtgttggtgtttacaagaatggtcatgtcgaaattattgccaatgaccaaggaaaccgtattacaccttcatgggttggttttactgactctgaaagactcattggtgaggctgctaagaatcaagcagctgttaatccagagaggactgtcttcgacgttaagagattgatcggggcgaaaatttgaggataaaggaggtcaa

SEQ ID NO: 8414 - DNA, 416 bp, Arabidopsis thaliana
  Clone ID: LIB24-022-Q1-E1-F7
gctccgatgacacaaaacgaggaagattatttgacattttaagtaagaacagctagctttgccatctccctaaaggcaataaatctcggatccactttcacgatattttgatattttttctatttataatctttctgggttttgagtcttttgaaggctgaattgctctgaaatctcaattgtataatcatctcctgggtcgtcgttatcgtgatcatctagaagaaagcatgactacactagatttgaccagagccgagcttgctcttattgttctctatttgaacaaagctgaggctagagataagatatgcaagagctatccaatatggttccaaatttttgagcggtggccaacctgggtactgctcaaactgtcgacaaaaacaccagcttggcgagaaaagtttcccgtc

SEQ ID NO: 8415 - DNA, 397 bp, Arabidopsis thaliana
  unsure at all n locations
  Clone ID: LIB24-022-Q1-E1-F8
gagaagaaacgaataatcggaatcgaaaaattcgaaaaaggaactgagaagaaacagatctgaagatggagtgtgtatttggtctagttgggaatggattcgctatcgtggcggcggatacatcagcagttcacagtattcttcttcacaagaacaaagagggacaagatcatgactcttgactctcacaagctcgtcgccgctagtggtgagcctggtgaccgggttcagtttacggagtatgttcagaaaaatgtgtcactgtatcagttccgtaatgggatccctttgagtacngcngctggctgctaacttcacncttgggnaaacttgcaacngctttganaaaagnatccatatccggtgaanatcctgatggccggggctatgacaaana

SEQ ID NO: 8416 - DNA, 467 bp, Arabidopsis thaliana
  unsure at all n locations
  Clone ID: LIB24-022-Q1-E1-F9
ttacgcggccaggtacnggtccaagaattcccnggtcgacccacgcgtccgcccacgcgtccgcccacgcgtccgcaaagtacacatcacctaaaagtaaaaatagacaaaagagaccttgtcctcacgcctctctctttttcccggcaacaactaacaacaacacttctttacctttctctctaaggcaaaacccttctcttatgtgaccactcctccatgcatccctcctccgccgccgtctccggcgaactcacaaaaccaccaacagctccactccaaccacttgttgacctaataacaaacgtcctctccctcctcctcctctcttccctcaccgtccgttccttcatcggacggtggcaaatcctccgatcaaactcttcacactaaactcatctctctcttccttatccgaatcanctcactggtcacaaaatcctctcctccaaaatctcctccctttn

SEQ ID NO: 8417 - DNA, 420 bp, Arabidopsis thaliana
  unsure at all n locations
  Clone ID: LIB24-022-Q1-E1-G10
ncgacggtttaccgggccgtatctctatgccgtgaccgctgcagctcactcgaagatacgctccggcgaagctacgccttagccgacgctcactcagcttatctcctttctctgaacaccgtcggtccagctctccatagattcttccaacatgccgtcgagtctccgccggatgttgaatccgaagctgacgaatcaccggagacgtattctccggaatcctgttcctcggctcactcggttaccagttctgattccgatttgcctcccaagttcgattcggattgtgaggaaggtgaaggtacgaattgcgatctcttaagcggttcaaaacctgaatctctaaatcttaatcatgactcgttctactcccggagatacgaatccggnaccataacgccgccttcttcaacgncgggt

SEQ ID NO: 8418 - DNA, 428 bp, Arabidopsis thaliana
  unsure at all n locations
  Clone ID: LIB24-022-Q1-E1-G12
gngtctccgacaacgcatcatttctctccttctcctctgttgaaattttcgtggatcgcttgtttctcagttatattcaatctggtgaaaaaaaaacaaaaagcttcaagctcagagacgaagatcctctgtttctgaggacttgcttatcagattcttgtttcctaaaccaaccgatttgaaccaaacggtctattccggttattgcctcttgaagtcaatcacagaatgtcatgttagctttaggttatgccaaggaaatcgctcaaagatttctcagaaatccaaaatggacctctagattcttcttgcttcactatcaatcctctaattactccagttatgtaaaagtcaagaccttttctacaagttcaatgtaaatcaacttcctttgatgtttcacaaagctcanagatgggatctaattg

SEQ ID NO: 8419 - DNA, 480 bp, Arabidopsis thaliana
  unsure at all n locations
  Clone ID: LIB24-022-Q1-E1-G4
ctgttaccctgccagtaccgntccagaattcccnggtcgacccacgcgtccgggttaagtgaggtgacagtattgttaagatccaaattcagaagttatatgcaagcgcttgtggagaaacttgcagaaaatacgaggatacaaagtcacatgaagctaaagaccatcatccacgacttaagggaaaccacagcggaaccggatgttagaaacagaatgacgtcattgaaggatttgctagacaaaaccatcgatcatctacacggtgttttcttaccagatgtgtttgtagcaatctgcagaggaatctgggaccgaatgggacaggatgtgcttcgtcttttggaagacaggaaagataatgtgacttggcataaaggcccaagaatcgcagtttctgttttggatgaaatctttgcgacacaaatgcaaagcttgcttgggaaacngttttgaagcccgancacttggagccaccaa

SEQ ID NO: 8420 - DNA, 410 bp, Arabidopsis thaliana
  Clone ID: LIB24-022-Q1-E1-G5
cagtgatttcacagatctgttccgacatcaatggcttttttagcgttgattggtcggctctactccgaaatcgtctgactttcacagcagcgatgttcggctcttacgtcccgttttaatcgggctctcgttcggcacctccagctttttcagtgaagatgaccgactcttttcccgacagcatacggctccatcagcggtgttggtcggattttagttttactttggccatagatgagttactctcaccttttggtctttgttttcccttcaataatttcagcaattatgtgttggtgataacgatttaggtgctatgttgcttaaactgttgattatccgactcatgttgtttgaagcttggttttacaggaattaatattaatatttgcaagtttaaaattgaagag

SEQ ID NO: 8421 - DNA, 454 bp, Arabidopsis thaliana
  unsure at all n locations
  Clone ID: LIB24-022-Q1-E1-G6
ncaaggaccacgggtcgacccacgcgtccggtttaggcatcatagccttatgcaagactatggagaattgcatatggaaaccgaagctatgagaaaaaggttacaggcagtgcgagaaagaaaggcaacactaatggctgaagtcagatttctgcgacggagatacagacatttgagacaagaccagccacaagagattaaaaaggtcagaagatcaaatggtgggaagaagatccgagtggaagtgtctcctagtaacaaaagtgaggcggaaactaagcatgtttccgcttcctgacttaaaccactcggaaaaggctcacgatgaaaccaanancagtcctangagaagagttcctttgtttgatctaanatcagatatctggagaangaaggagcaaagnaaacagaggcagtggacaanaatccaatagaaacacnatgagttgaagga

SEQ ID NO: 8422 - DNA, 421 bp, Arabidopsis thaliana
  unsure at all n locations
  Clone ID: LIB24-022-Q1-E1-G9
gattttttcttgttctttctctctccaccacataaaaaaaaaaacctagctttgtcccctcaactcactgattgaactgcttgattttcgattgatcatctgggtggttttgaatcgaagagtattgttgtattagtggctggtggctctccaaaagagtaaggccggagagagaaatcaatggcctctggcggcggagaggcggataaatcacttgaaatcgggtccgggaccgcggatcccaaaataggcggtactgggagcaggagcgccggagaagaacgatacttcagggcaagatacactggatttcagtaaatgggatttgcatatgggtcaaacctctactagcagcgtcctcaacaattccgcttccacgaacgctcccgcaaccggcgaagcaagaatggganattgacct

SEQ ID NO: 8423 - DNA, 434 bp, Arabidopsis thaliana
  unsure at all n locations
  Clone ID: LIB24-022-Q1-E1-H11
catcgttctatcattttctcctttccttcacctcaagatctcaaaaacacaaaaagagaaatcaatcaaaaccttagggttttctactaatttatctgtgtgatgttaagagaatcatcatcatcttcgtcgtcatgggaggagtaacttcatcaatcgctgcaaaattcgtttttttcccgccatcaccaccgtcttatggatttgtttccgacgttgaccgattatacataacagaagtacctcgccgtgatgatgtagatgtattgaagctaaagactcgtcgtggtaacgagattgtagctatttatattaaacatcctaaagctaatggtacgcttttgtattcacatggtaacgctgctgatttgggtcaaatgtttgagcnttttatcgaacttagtaatcgtctccgacttaaacccaagggggat

SEQ ID NO: 8424 - DNA, 425 bp, Arabidopsis thaliana
  unsure at all n locations
  Clone ID: LIB24-022-Q1-E1-H2
gtgatcgccgtaccgccaaagattcacttcagtttcttattcaatggcttcaccggtttccgagatacaaccaccgggaaatctacatcaccggcgagagttacgccggacattacgttcctcagctggccaaagagatcatgaattacaacaaacgatcaaagaatccgttaaatctcaaaggaatcatggttggaaacgcggtgacggacaatcactatganaacctangaacggtttcgtattggtggagccacncgatgatctctgatcggacgtatcatcagttgataagcacntgcgattttagtcgtcagaaggaatctgatgaatgngaaaccctttantcttacgctatgggnganngagtttggtaacattgatcagtncaacatctatgcgccgccgtgtaacaagtcaancga

SEQ ID NO: 8425 - DNA, 402 bp, Arabidopsis thaliana
  unsure at all n locations
  Clone ID: LIB24-022-Q1-E1-H7
ttcacttcttcttcgtctccgtagtttcagtttcgatctgtaaagtttcaaacttgtggtcgaatttttaaatgggaagtggaagagatagagacgaccctttatccttcaccagcaatccatctacggcgtcgtctccagtcactgtatctgactatctcgacaactttctcggcgaanccacttctcgctccggtagttttcaaagcgagagcttactcggtggaggcggtggagaaagcatcaacgacgctgattttggattcgctcgtcctgatttccgatcggaacaactagctggaaccgtacagttttacgagaggcatgtcttcttgtgctanaaaaagccatctgtttgggcccgcaaggatcgangctgctgagttcgatcgattgcctang

SEQ ID NO: 8426 - DNA, 425 bp, Arabidopsis thaliana
  unsure at all n locations
  Clone ID: LIB24-022-Q1-E1-F1
gcccacgcgtccgattgaagagaagctctaaagattctttgtctctttctctgtcgcattgatttgtaaaaaagtgtggcagagagaaaccatggctatggcggaaatggcaacgaagtcttcactatctgcaaaactcactcttccttcttcttctactaagaagacactgagtctgagacaagtctctgtttcacttccaacatcaacttcaatctctctgttatctctctttgcatctcctcctcatgaagctaaagctgctgtttccattcccaaggaccaaatcgtctcctctctcactgaagtggagaaaacaatcaaccaagttcaagaaactgggttctaagtgtatttgatgcaacgcagcgtgtgttccaagtagtangagatgctcctaaaaccaactttggacactgctttaa

SEQ ID NO: 8427 - DNA, 470 bp, Arabidopsis thaliana
  unsure at all n locations
  Clone ID: LIB24-021-Q1-E1-C5
aagttnaattagccgccggtaccgaancacaaattcccgggncgacccacgcgtccanggacgcgtgggtttcgctttctccgtacacttggccttccttctagcgatcaaaccctaggtcccgccattgttggtcccagacttcaatcgaagctccaatttcactaatttcaggtgttgtttattctctggaagttggcgatacaatggattctactgctgcaaccaaacgtgttgttgacccacttactgttgggagtgcgtttgtcaatcagtactactacattttctgtaacatgcctgagcatctgccccggttttatcaagagatcagtagagttggccgtgttggacaggacggagtcnnnnnnnnnnnnnnnnnnnnnnnnnnnnnnnnnnnnnnnnnnnnnnnnnnnnnnnnnnnnnnntgcaactcggctgagataaccagttatgatactcaagagtct

SEQ ID NO: 8428 - DNA, 467 bp, Arabidopsis thaliana
  unsure at all n locations
  Clone ID: LIB24-021-Q1-E1-C7
tatcnagccggntcggcacngaactncgnactcgcgggcccangaagaacactaacgantttctagtgnagaaatttggattctcagaaagtaaagcttcaagcttaagagttgaactcttcaagacttatggaagtactctcgctggtcttagggcgttaggtcatgatgttcatcctgatgaatatcacagtttcgtgcacggaaggttaccgtatgggtcgatcgaaccaaacaacaagctacgtaaccttctcaacaaaatcaaacagagaaaaattatatttacgaattcggacaagtttcttgaggaccttcaccgcatgattcttggtttagaagattgtttcgaagagatgatttgttttgagacaatgaacccaaatttattcgggtcaacaacccgacccgatgaatacccggttgttctcaagccttcgttgaccgcaatggatatttgcattcgt

SEQ ID NO: 8429 - DNA, 449 bp, Arabidopsis thaliana
  unsure at all n locations
  Clone ID: LIB24-021-Q1-E1-C8
ggtaccgntcacaaattcccgggncgacccacgcgtccncttctttctctatggctaaactctgaaacgttttcagagccgtaacaatggctttggttcattacatgaatgtttcacgtagcacttttcctttgagtagatcttcaaagattaatttgagctcatcttttgcttctttgccacttcagtttcataaaaacattaagagattagaatcctctgttccaccatcagcttcagcttcagcttcaccggcgtttcctattgatgttgagtatctccggcgagagttctccggccatggagccactttcgaagatattggtgagacatgtattgctagactaaaactggacaatgggagttcagcgaatgtgatgttgacacgtgggatgataacatcgtacaaagtccgagtgtggcacggtggcaaagtggagcttctccac

SEQ ID NO: 8430 - DNA, 412 bp, Arabidopsis thaliana
  Clone ID: LIB24-021-Q1-E1-D1
atttttcttcttcgccaaagtgttattcctcaactttatatattacacaaatgtctttagccgcggataatgtgttgttggtggaagaaggaaggccagccacagcggaacatccatcggccggaccggtttatcgatgtaaatacgctaaagatggcctcctcgatctccctaccgatattgattctccttggcagttctttagtgaggctgtgaagaaatatccgaatgagcaaatgttgggccaacgcgtaacgactgattctaaggtcggtccatacacgtggatcacatataaggaagcgcacgacgctgcaattcggattggatcagcaatcagaagccgaggcgttgatccgggacactgttgtggtatttacggagctaattgtccagaatggattaatgcaat

SEQ ID NO: 8431 - DNA, 425 bp, Arabidopsis thaliana
  unsure at all n locations
  Clone ID: LIB24-021-Q1-E1-D2
agcctctaaatngaagtcctattaaagcaaagaatcacccaaaccaatccaaatgatcaagacagtacacagagatcgaaacacaaaaccaaaccaatgtctctgcaaaagtttaagcttctcgcaactcattgcagcaccgtcgcagagagtccgacacgtagtccagtcatccacctccgccgtcgtaaaacgctgcgtttgttactcactcgatcatcagaccgatggagattaccggagatccaaaacaacgtagatgaatcgaagaaaacggataagagaggtaagatccgatctagccggaagcttggagatctttttgtttcgtcgccaccgtttgaggaaagtggcggtggcggcggcggagataaggggacgaagatggangtggagatggaganggatgtaccgggttaacggcg

SEQ ID NO: 8432 - DNA, 458 bp, Arabidopsis thaliana
  unsure at all n locations
  Clone ID: LIB24-021-Q1-E1-D4
tagntcggcccaggtccacngaacacgggncgacccacgcgtccanccacgcgtccgtgntcatgttgggtcaagtagaagactgcctgcatctgttggtggaaagtaatcgaatacctgaagccgctctgatggcgagatcgtaccttccaagcaaggtctccgaaatagtggcattgtggagaaacgatttgaccaagataagtccaaaggctgctgaatctctggctgatcccgaagagtatcccaatctctttgaggagtggcaagtcgccctgtcccttgaaaatagagctgcagagacgaggggcgtccatcctcctgctggggattattgtagtcatgcagacagagatcatacaactttagtggatgcttttagaattatgcaaatagaggaaganggtcgacttgagcaaggggatgttctcgacgaggttggggaanaaggggaagat

SEQ ID NO: 8433 - DNA, 469 bp, Arabidopsis thaliana
  unsure at all n locations
  Clone ID: LIB24-021-Q1-E1-D5
nattatctagccgntcggtaccgaacnnnaattcncgggncgacccacgcgtccgcgaatcttgataatgtaaattcacaacaaatctgtttaaaaacaaccaatcaaaacccaacattgcttctcaacaaaaaagcaaagcaaaagattttgcgagagaaaaaaaagaaaatggatttgttcaagatccttcttcttgtgttcttcgtgaacataagtttctgcttcgctgcagatccatattctttctataacttcgaagtctcttacattactgcttctcctcttggtgtccctcaacaggtcattgctataaatggaaagtttcctggtcctacaatcaatgttacaaccaatgaaaatctggttgttaatgtcagaaacaagttagacgagggacttcttcttcattggaatggaatccaacagagacgtgtgtcatggcaagatggagttttaagaaacaaat

SEQ ID NO: 8434 - DNA, 413 bp, Arabidopsis thaliana
  Clone ID: LIB24-021-Q1-E1-D7
aggcgatgctaggtttttacgtaacgttcattttctttcttgtatgcctatttacttatttcttcctccaaaagaaacctcaaggtcagcctattctcaagaactggccgttcctcaggatgcttccaggaatgctccaccaaatccctcgtatctacgactggaccgtcgaggtgcttgaggcgaccaatctaactttttatttcaaagggccatggcttagtggaacggacatgttgttcaccgccgatccaaggaatattcatcacatactaagctcaaactttgggaattaccctaaaggacctgagttcaagaagatctttgatgttttgggagaaggaatcttaaccgttgattttgagttgtgggaggagatgaggaagtcaaatcacgccctattccacaatcaa

SEQ ID NO: 8435 - DNA, 395 bp, Arabidopsis thaliana
  unsure at all n locations
  Clone ID: LIB24-021-Q1-E1-D8
accttctagatgagaccgttctggtaaacagcccgagagatgcagttttgaagctgataagaaaaataaacccgaatgtcttcattccagcgatcttaagcgggaattacaacgcgccattctttgtcacgaggttcagagaagcgttgtttcattactcggctgtgtttgatatgtgtgactcgaagctagctagggaagacgagatgaggctgatgtatgagaaagagttttatgggagagagattgtgaatgttgtggcttgtgaaggaacagagagagtggagagaccagagacatataagcagtggcaggcgagactgatncgagccggatttagacagcttccgcttgagaaaggaactgatgcagaatctgaanttgaaaatcgaaaa

SEQ ID NO: 8436 - DNA, 415 bp, Arabidopsis thaliana
  Clone ID: LIB24-021-Q1-E1-E1
gaaaaaaatctcaaatctggcaaaaaatggcgacgattccaatggatatcgtcaacgacatattcctccgattaccagcaaaaactctagttcgttgccgtgctctctctaagccatgttatcatctaatcaacgatccagatttcatcgaatctcatcttcatcgcgttcttcaaaccggtgatcatctcatgattcttctcagaggagctcttcgtctctactctgtagatctcgattcacttgattccgtctccgacgttgagcatccgatgaaacgtggtggtccgaccgaagtttttggttcttccaacggtttaatcgggttatcgaattctccaactgatttagcggtttttaatccttcgactcgacagattcatcgattacctccttcgtctatcgatctccccga

SEQ ID NO: 8437 - DNA, 422 bp, Arabidopsis thaliana
  Clone ID: LIB24-021-Q1-E1-E12
gatttgctacttcggcttcgccttgagggtctcctcctcagctttttggtccccggattgctcatggccgtccccgggttcttctcttccatggcgcttctccggcattgtcctgtatcgaacacagaggacggaggaggaagcttcttccatgtcgctcctcgccgaacttttcgtcctcacctcctcaacactagttctgggtgtggatttcttaagtgttatagtgactatattacaagaaaatacctgcggaggaataggactcaagctatagcagagtatttgggttcagcttcagatcctaagaagccaactgggaagtcaagttatcatccttcaagaagatatcagagcatatgtgccaaagaaagaatcctggagaatccaaggctttaactcctgaaactggtaaaaacaac

SEQ ID NO: 8438 - DNA, 408 bp, Arabidopsis thaliana
  Clone ID: LIB24-021-Q1-E1-E2
ctctctttttttcgagattcagctgtaaaaccctaactagcgccatagccaaggaagctttcctcagatcgtctctccgaaattttccggttaatcgtcagttaaggggaaaattaggctatggcgatgttaggtgcacagcaagttccagcagcagcttgtactccagatatggttgggaatgcttttgtgccccagtattatcacatattgcatcaatcacctgagcatgttcacagattttaccaagagattagcaagttaggtcgtcctgaagagaatggtttaatgagcatcacttctaccttgcaagctattgacaagaagataatggcgcttggttacggtgtaatcagtgcagagatagctactgtggacacacaagaatctcatggaggtggttatatt

SEQ ID NO: 8439 - DNA, 404 bp, Arabidopsis thaliana
  unsure at all n locations
  Clone ID: LIB24-021-Q1-E1-E3
cgnnnnnnnnnnnnnnnnnnnnnnnnnnnnnnnnnnnnnnnnnnnnnnnnnnnnnnnatggaattccccaaaccaaaccacccttcaccctaaaaatcgtttcatctttttttccttcttctaattttttttaggtttttaattaacttttgcttcaagttttcttctatagatttcttactcagaaaagtttcgaattcgaccctgtagcttagttgttgtttataatttcttgtgatcattcacagtacaaaaaaactaattcacccaccgannnnnnnnnnnnnnnnnnnnnnnnnnnnnnnnnnnnnnnnnnnnnnnnnnnnnnnnnnnnnnnnnnnnnntccgggaaatttgatctctttacctttcgtcattattaagtanggaatgatcttttagtt

SEQ ID NO: 8440 - DNA, 485 bp, Arabidopsis thaliana
  unsure at all n locations
  Clone ID: LIB24-021-Q1-E1-C10
antgttaaacttccagccgccnngtaanggtccanaattcccgggtcgacccacgcgtccgctcttctgcttcttcttcttcaaaatctctctcttcaccaaatcctcanaagatgagcaacganaaggatagcttcaacgtctccgatcttactgctgctcttaaggacgaggatcgagctggtcttgtcaatgctctaaagaacaagctgcagaatctggctggtcagcgttctgatgtgctcgagaatctgactcccaatgtgagaaagcncgttgatgccttgagggatatacagagccaacatgatgaactanaggcaaaattccgtgaggagagagctattcttgaagccaagtatcaaacgctgtntcaacctttgtatgtcaagcgttatgaaattgtgaatggcactactgaaagtttaactggctccaaaagntgataccaaaggngggncaaaggggatggggaaaactgtgnt

SEQ ID NO: 8441 - DNA, 406 bp, Arabidopsis thaliana
  Clone ID: LIB24-021-Q1-E1-E6
taatgaagagcaatgatgaagaaagagagggagacgaggagagtggttttgatccagagaagcaccttgacgcttacttgcctgttcgagtcaacgagcagagagttagcaacttgttgcagtcactgcttgtggcaggtgcagtgttggctatgccggccattaagctcataccgacttccattctatggggatactttgcttacatggccatcgacagcctcccgggaaatcaattcttcgaacgcttaacgcttctcttcgttccaacaagccggagattcaaggtcttggagggagcacacgcgtcgttcgtggagaaagttccttacaagtcaatggctgcgttcacactgttgcagatattctactttgggctgtgctatggggtgacgtggattccggt

SEQ ID NO: 8442 - DNA, 476 bp, Arabidopsis thaliana
  unsure at all n locations
  Clone ID: LIB24-020-Q1-E1-H12
ttacaantgccacccgggccgtaacggtcnnnnctcccgggccgacccantntantcangacancagggagaantaaccctttcaacaaaactctctctgttctttctccgtggagaagttaaagatgacgatgtcggagaactcaagaaacttggaagctggtttgctactgaggaagaaccaaaacgacatcaacgaatgtcgtatcactgctgttgtacttttcagtactttcgtttctgtttgtggctctttctgcttcggttgtgcggcaggttattcatcagttgctcaaacagggatcataaatgatttaggtctctctgttgcacantactccatgtttggttcaatcatgacttttggaggaatgattggtgccatcttcagcgggaaagttgcagatctcatggggtcgaaaagggactatgtggtttgctcaaattttccgcaacctcggttggggttgcaatac

SEQ ID NO: 8443 - DNA, 451 bp, Arabidopsis thaliana
  unsure at all n locations
  Clone ID: LIB24-020-Q1-E1-H4
caaggtcgacccacncgtccgnccacgcntccgttcctantgaaagatactggctttccttgtcaaaaccggtgttatgttttcaacggagactatgtggatcgcggtgcttggggacttgaaaccttccttgttctcttgtcctggaaggttttgatgccggacagagtctacctactccgtggtaatcatgagtcaaagtattgtacatctatgtatggtttcgagaaggaagtgcttacaaaatacggagacaagggaaaacatgtgtaccggaaatgtttgggttgctttgaangtcttcctttggcttccataatttctggacgtgtttatacagcacatggagggcttttccgcagcccagtcttgcctaagcgaacaacaagggggaaaaagaaccgtcgggtagttcttctggaacctganccgagctcattgaaactccgga

SEQ ID NO: 8444 - DNA, 419 bp, Arabidopsis thaliana
  unsure at all n locations
  Clone ID: LIB24-020-Q1-E1-H5
tcttactcttcattgttttcttctctctatccctcttcatttcctctctgatcgccagtgatttangcttctgcaacgaaganatggctttagtcggaggtgttggcgatgtccctgctaatcagaacagtggtgangttgagagcctcgctcgtttccctgtcgatgaacacaacaagaaaganaatgcacttcttgagtttgcgaaanttgtgaaggcgaaagaacaagttgtanccggaacactgcatcacctgactctggagattctcgangnaagacaaaagaagctttacgaagccaaagtgtgggtcaagccgtggttgaactttaaagaattacaggagttcaagcctgccaaatgatgcccctgctatcanttcctccgatnttggctgcaaacaangtgaacatgaatc

SEQ ID NO: 8445 - DNA, 425 bp, Arabidopsis thaliana
  unsure at all n locations
  Clone ID: LIB24-020-Q1-E1-H7
gcccacgcgtccgcttcttcttcctctcggagcatcgctcactgtaaatctctttctatctctctcatttctatttattcgcgatcggtggtgatgatgaaaatgatgatcgagttcgntgtaattacagagaggaagattttcttccgatcaaatccgaaatggatttctaagaaacttccgtggattcgccaccgtaacttcgtcggaaccggccttagccaatctggaagcgaaatatgccgtagcgttgccagaatgttcaacagtagaggacgagatcacgaagatccgtcatgaattcgagttagcgaaacagaggtttcttaatatccctgaagctattaatagtatgccgaagatgaatcctcaagggatatatgtgaataagaatctgagattgggataatatacaagtttatgga

SEQ ID NO: 8446 - DNA, 399 bp, Arabidopsis thaliana
  unsure at all n locations
  Clone ID: LIB24-020-Q1-E1-H9
gggaagaggtcgaaaacatcaaggaaaggaaaaaaagcatggagggctaacattagctccgaggacattgaagatttcttcgagaaaactaccagagatgctctctccggtggcaatctctccgctgctcccagcgaagacttgttccacgtcgataaatcccatgaccttccggtgaagcgaaagattgagaaacatagagagagagtgctccgtgttgacagtatcttaaagaagaatccatttgtccagttagtgccatcttcaaagccaaagttgaagaaaagtaagaagacaatcgttatagaagacaaagcacctaaacaagttcaaaaaagtgttggtgacgattctgtaatggccgacttgtggggtgatgatagtaaaggngaacatgtg

SEQ ID NO: 8447 - DNA, 468 bp, Arabidopsis thaliana
  unsure at all n locations
  Clone ID: LIB24-021-Q1-E1-A7
cttctacttggnncgcccggtcnaataccgggccggccaaccacgcatccaaaaggaccaaaacgcagcgttttcttccggagatcagtcggtcggaaagcggctacctttttgtctgcctagagaatttgttcgtttctttcttttactctcttcagacaaaacccacgagatacagaaaaagaggacaagagagaatcgtccatggaagaagacactggtatcgacgaagctaagacatacacggtggagaagagcgagaaagtggagccggagaaggacggactgagtcaattcagagacgaggaaaaatcacttggtgcggatatggaagatttacatgatgagactgtgcgagaaaccctangcaaggatcaggttcaaggtgttcgagaaaattcctctgtggaaccaaatgttgaagatgtattagaagtgaatgagactgatagcgtcaaaggaaactgt

SEQ ID NO: 8448 - DNA, 425 bp, Arabidopsis thaliana
  unsure at all n locations
  Clone ID: LIB24-021-Q1-E1-A8
gnccaggtaccgaaacaagaattcncgggncgacccacgcgtccgtgagtttactcatgccaatatcacgttagcgcaagcagagctcggttataaacctgcggttgatcttgagacgggtttgaaaaagtttgtgaaatggtatatgggtttttacactggctcgaagaagaagagttcttggtgagctctgtctctctgcttaagtcatggtctctgtttccccttgttgagcttggagttcgctctaggttaagcttttgaaaccgagcacttgcattgccaggaaaaatcacttacgtatctgcattgtttctgtgttgctagattttgtttcatttatttgttagtagattttgagcaatgtacagcttcatcacttagatgtttcaattgtcgaaactcaattgtcntttccaaaaaaa

SEQ ID NO: 8449 - DNA, 411 bp, Arabidopsis thaliana
  Clone ID: LIB24-021-Q1-E1-B1
gaaaatgtgtgagaaggttgtggattcaaacggagaatctgttcctttatctgaagaaaagattgcaagtatctctgatgtcatagagggatttgcttcagaggctcttaggactctctgcttagtttacacggatcttgatgaagctcccagaggggatcttcctaatggtggctacacattggtagcagttgttggaatcaaggacccggttcggcctggtgttagggaagccgttcagacttgtcaagctgctggaatcactgttcgtatggtcactggtgataacattagcactgccaaagcgattgcaaaggaatgtggtatacttacagcaggaggtgtagctatagaaggttcagacttccgtaatttgcctccacatgaaatgagggccattctaccgaaaat

SEQ ID NO: 8450 - DNA, 402 bp, Arabidopsis thaliana
  unsure at all n locations
  Clone ID: LIB24-021-Q1-E1-B10
cgtgggcaaaaaccaaacaaacaaacaacaaaccagaagttttatttttgttaaagagtaaccaaaaaaaaaaaaacagagtaccttcttcttcacacacataaaaagagacggtaccaaaaaataaaaacagagcaaaccacaaaaatggggaagcatttattccgatcatctcctccaccggagaaaccaacagctcatctctctctcgcggaatcagctgttcaagaatgtatgagcaacatcaacaccgtcatatcaaaatggacttctccggctgcttcttcctccgacgacttcctcttctccaccaacagtcgtcgtgaagcagaggagtttgttacagccgttagacatctacaaagcacgatgcatcgtttggtttccgttaacccttcctcn

SEQ ID NO: 8451 - DNA, 410 bp, Arabidopsis thaliana
  unsure at all n locations
  Clone ID: LIB24-021-Q1-E1-B12
cggcaccnaatananntacacctgaccaactgtantatcactcgatttttcaagaganaatgggttggaaggttcaggttgttgacgggggactttcanatatntacaanaacagtgttaatctagatgatcagcaagttaagttcttttggaccatagtacgggattcaatatcnattgcggctcgtggtgataatgaaaagtggctatcttgcaattggttttggtaccgaaatgacaaacagttatgcttatattggttggtttgatngaaatggaacagggcatgtaaatanttactggatcgatggagaatccgcttccactgtgcatcctacaactgaaaatatgacatacgtnagatncaaanccgaataaggaatcttcacaccggaaantaaacgttcctt

SEQ ID NO: 8452 - DNA, 454 bp, Arabidopsis thaliana
  unsure at all n locations
  Clone ID: LIB24-021-Q1-E1-B4
ggcaccggtcacaanatcccgggncgacccacgcgtccgggancgtcatggtttgtgatcttattcattctactgattgtgaagggtttgggcgttggaaggcgaagattcagcacgaatttccagcttctattcagaatcataaagggtcttgtgttcctcacatttgtggcaattctcataactttcctcgcacttcctctgataacaatcaaagacttattcatctgcatgcttgccttcatgccaactggatggggaatgcttctcattgcacaagcgtgtaagcctctgatccaacagctagggatatggtcatcagttaggacgctagctcgaggctacgagatcgtgatggggcttgcttctgttcacaccagttgcgtttttggcctggtttccttttgtgtctgagttccaagacaagaatgctctttaaccaagcctttagtaa

SEQ ID NO: 8453 - DNA, 402 bp, Arabidopsis thaliana
  unsure at all n locations
  Clone ID: LIB24-021-Q1-E1-B5
ncaggctctctaagagatgtttaagaaaatcagcagtgctgtgattgatgatgggctaataaacaaggaagaatttcagttagccttgttcaagacaaatataaaagagagcttgtttgcagaccgggtattcgatttgtttgacacaaagcataatggaatactggggtttgaggagtttgcgcgtgctctctctgtctttcatccaaatgctcccatagaagacaagattgacttttcgtttcagctatatgatcttaagcagcaaggtttcatagagaggcaagaggtgaagcanatggtggtggctactcttgctgagtccggcatgaacctgtcagacgaaatcataganagtataatcgacgngacntttgaangaaagctgatacaaatcatgan

SEQ ID NO: 8454 - DNA, 409 bp, Arabidopsis thaliana
  unsure at all n locations
  Clone ID: LIB24-021-Q1-E1-B6
ncttcaaaattccctctcgactttatcgaattcgatgttcaggtcaccagagatggctgcccaatcatattccacgacgacttcatctactccgaggaacagggagtggtgtacnagaanagggtcacggaggtttgcntgtcnganttcatgtcctacgggncacanagggatacaggcaagacaggaaagcctttgctgagaaagtcaaaggaagggaagatccataagtggagcgtcgnaaccgacgactctttctgtactcncnaagaggcttttganaaagtagagaatccagacctcggtttcaacatcgaactcaagcttgacgacaacgtcttctattcctccgatcacctctcccgtcttctcctcccaatcttgcangtcgtgtctgatatcggaaacn

SEQ ID NO: 8455 - DNA, 416 bp, Arabidopsis thaliana
  unsure at all n locations
  Clone ID: LIB24-021-Q1-E1-B9
ngatatgtggaagattgggcagagaggagttccctatttccagagactcattgctgcgccgttcacgaccttgcggtccttgccaacttctttggtcgagacagggcagaaccgtgtcattgatgcttcgttaactctcatccgtgaaagggcaaaactcaaaggagagttagtgcgactcataggaggagcaaaagctacaacagctcttcttggagtaccacttggtcacaactcttcttttcttgaaggcccagccttggctcctcctcatgtaagggaagctatttggtgtggtagtacaaactccaccactgaagaagggaaggagctaaaagatccacgtgttctaagtgatgttggtgatattccggtacaagagattanagaaatgggggttgatgatganagaccta

SEQ ID NO: 8456 - DNA, 456 bp, Arabidopsis thaliana
  unsure at all n locations
  Clone ID: LIB24-020-Q1-E1-H11
tccnaaaattccagggtcgacccacgcgtccgaaaactccaagttcttacctttttcccanttacaatcggtaaatttctccgatcacgagatacaaatttcactttctgatatcntggatcntccgatcacnnnnnnnnnnnnnnnnnnnnnnnnnnnnnnnnnnnnnnnnnnnnnnnnnnnnnnnnnnnnnnnnagagaagaaaccatgaatgctttagctgcaacaaacaagaaacttccgtcatgcatctcgaatcctgggtttggattcnaagatcgagagaagtcttatgatcccatttagagaaatcaaggttgagtgtacgattcctaaagacgatggcactctggtttcatacatcggatttaagggtcaacatgacaatgctcntgggaccaagaaaagggggaacaagtatcancccgagggtgatcaaaatgaaattacncccc

SEQ ID NO: 8457 - DNA, 429 bp, Arabidopsis thaliana
  Clone ID: LIB24-020-Q1-E1-F5
ggcagctccttgaatcttgagtgttaagtagataggtaaggtaaccgttcatggcctcgaagtatggttctggagttctcccagaaaataagaaggaaaagggcgataaggaaaccccggaaacatcttattccagtcaaagtgtctcagtaaacactttggcagatcaagtatcttcaactttgtcttttgctccaagcagcgacagtaaaactggaggtgaagttaaatttaatgaaaagtctgatcagagcgggaagagtaacacatgtagaccaagcacaagcagtgatatcagtgatgagagcacatgtagcagctttagtggtaacaacaagcctcacaaggcgaatgacgtgagatgggaagcaattcaagctgtccgaacgaaacatggcgtattggggttgaaccattttaggctcctga

SEQ ID NO: 8458 - DNA, 405 bp, Arabidopsis thaliana
  unsure at all n locations
  Clone ID: LIB24-020-Q1-E1-F6
cgganaaggagaagganagagatccaccaccaccacatcaagagattgaagagactactccgttgctcgaaaattctcaaccggaaagtgaattgagatcgacgaccgcggcggcgaaggttcctgaggtggagattcatctgtataagtgtggaaaaggtccgatcgatgtgttcaagtcaaatctcggcggttatgagcaggatcagctcgaggttcgatctattcttgagaaatatggcttgaaagcaatcttcgctttcaacgttgaaaaaagtcntgctgttccgatnagattcancctaagaatggtcggctgtgttgccttaaaagggatggtgcctcatttacatcgacggtgaacccaagatcctgtcaacccacacagaacattccgggttngat

SEQ ID NO: 8459 - DNA, 426 bp, Arabidopsis thaliana
  Clone ID: LIB24-020-Q1-E1-F8
gcggacgcgtgggcagtttcgtaaccaaagaaaaacgcaaatcccaaattttccggaaatggaggaatatttgaatcttatgttgaaagcgagagagattcttgttagtgaaagccatgaagaagtagcgatggtcatcgatcatctctttaagcgtcaagactccgaagagtataaaacatcgcgtgcgctgtacgacatctgcgtttcttgtaacccaggttgcttaaccctaaagcttcttaaagtctatcaatcttcttccagtggcattctcaagactccgatcaatctctcaactctctgagaccctcacctatctgaaaaatcaaatcgtattttccaaattctctctcgactctctctatgaaatcaaaccccttttgattttatgccttacaatgcaagaaaccaaagaatctgaca

SEQ ID NO: 8460 - DNA, 443 bp, Arabidopsis thaliana
  unsure at all n locations
  Clone ID: LIB24-020-Q1-E1-F9
cgccgncggtaccgcgtccaaaaattcccnaggtcgacccacgcgtccgnccacgcgtccgggcagaaccggaatggagaattattctgctgaggtacttcaatcctgtaggagcacatgagagtggcagtattggtgaggatccaaaaggcatccccaataacctcatgccttacatccaacaagtggccgttggacgtttaccggaactcaatgtctatggacatgactatcccaccgaggatggtagtgcggtaagagactacatccatgtgatggatttagcagatggccatatcgctgcgctcaggaanctatttgctgatccaaagattggttgtactgcttacaatctagggactggtcaaggaacgtctgtgttagaaatggttgcagcttttgaaaaagcttccggcaagaaaatcccgattaanctctgtccc

SEQ ID NO: 8461 - DNA, 461 bp, Arabidopsis thaliana
  unsure at all n locations
  Clone ID: LIB24-020-Q1-E1-G10
ngtacggctccaaaattccnaggtcgacccacgcgtccgnccacgcgtccgcttttactttgtgaacgatggaccaacaaccggagaggcgagaaggccggagttttccggagcgtaaaggacagaagcggaagctagaggaaggagccgccgccgtagaagatcgagagatctctgccgtcagcaccgacggaggccaagcgcttcttagcgaggttgctgctcaagtctcggtactaaactctgccttctcttggcaagagtccgatcgcgctgctgccaagcgagccactcaagttctggctgagctagccaaaaacgaggatttagtgaacgtgattgtcgacggaggtgctgttccagctcttatgacgcatctacangcgccaccatacaacgacggggacttggctgaaaaaccgtacgaacaccaattnagaaaggaaaccctttgccctggg

SEQ ID NO: 8462 - DNA, 461 bp, Arabidopsis thaliana
  unsure at all n locations
  Clone ID: LIB24-020-Q1-E1-G11
ggtagncgtccaaaaattccanggtcgacccacgcgtccgctccatgatcgatctcatgggcagcaatcatcaaaggagagcctgtaattgtctccgacccagctaatgcctccgcttacgagtccgtagctgctgaattatcctctatgcttatagagaatcgtcaattcgccatgattgttaccacttccattgctgttcttattggttgcatcgttatgctcgtttggaggagatccggttctgggaattcaaaacgtgtcgagcctcttaagcctttggttattaagcctcgtgaggaagagattgatgatgggcgtaagaaagttaccatctttttcggtacacaaactggtactgctgaaggttttgcaaaggctttaggagaagaagctaaagcaagatatgaaaagaccaagattcaaaatcgttgatttggatgaatacnccggtgatgatg

SEQ ID NO: 8463 - DNA, 458 bp, Arabidopsis thaliana
  unsure at all n locations
  Clone ID: LIB24-020-Q1-E1-G12
gccaccaaaattcctaaggtcgacncacgcgtccgcaagaagttaacacgaaaacgctcgtttctcggtggngaagcngnggttgtaatcgacatcgacnccggaactgtgccgangaccgcancgaactgtcaatctcaccgtgtaaatttcaaatctttcgatatgccgcctccagaaatttcgaaaagggttttagactcgaagcttgaancttgcaaattcgcattcttgaagctaagtgcggttaaaacgacgagaatgaagaactataagcaactgcgtactctgcttatgttgaaagaaatatctcgacgtggtgctgatcgagactttcttaaagattcggagaataatgtaactccaatactgngttcggttccaaagcaagtggtgagtaactcanancgttctttaaagtcccctcgggggggtttaaatttgggacaattgggtgn

SEQ ID NO: 8464 - DNA, 456 bp, Arabidopsis thaliana
  unsure at all n locations
  Clone ID: LIB24-020-Q1-E1-G3
gtagcgngtccaaaattccngggtcgacccacgcgtccgnnnnnnnnnnnnnnnnnnnnnnnnnnnnnnnnnnnnnnnnnnnnnnnnnnnnnnnnnnnnnnnnnnnnnnnnnctctgagaaaatccagcaatggcttcgaagcttgtagtgataattgtgtttatcctcgatctcatcgccgttgggttagccattgccgccgagcagagaagaagtgtcggcaaggttgaaacagacagagacaagcaatatgattactgtgtgtatggtactgacattgctacaagttatggagctggtgcatttgttcttctctttgtaagccaagtccttattatggctgctagtcgttgcttctgttgtggaaagtctcttaaccctggcggttcaagagcttgtgccattattctcctcctcaattgctgggtgttttcctgatcgctganatgtgtttg

SEQ ID NO: 8465 - DNA, 181 bp, Arabidopsis thaliana
  Clone ID: LIB24-020-Q1-E1-G5
gcggacgcgtgggtttttttttctttcctctttttcttaagtctttagattttctactgcaggttaaaaaaaaaaaaaaagcctaaacggctgtatcagaactttttgttttggattgtaataaaacatctgaataaagagattggctttaccgttttaaaaaaaaaaaaaaaaaagggcg

SEQ ID NO: 8466 - DNA, 415 bp, Arabidopsis thaliana
  unsure at all n locations
  Clone ID: LIB24-020-Q1-E1-G7
gcctatcttccgaatttcacattttgtgcgacgagattcgtttgagaaacactacaagggtgaggtttgcgatgtctaatcacggatttgcagcggttctgcctggagattcagttgcaggattggtggttgctaatggtttgatcaatttcctcaacatatataacaccatccttgtcgtccgtctagtactcacctggttcccgagtgctcctcctgccattgttaaccccctcagcactttatgtgatccatacttgaacattttccggggattcataccgcctcttggaggattagatttgtctcccattttgggcgttccttgttctcaacgccttcaccaagctcggctatggcacttccttgcgaactcccgtcagctgatggagccgtttctccagcttctantgag

SEQ ID NO: 8467 - DNA, 474 bp, Arabidopsis thaliana
  unsure at all n locations
  Clone ID: LIB24-020-Q1-E1-G8
ccggcccgtaggcntctaaaagtccaaggtncacgggtcgatccangcgtccggganagtcgccgaaacantttcgccggcgttacaccggagaattcatccttctttgtcttantactctactagccaatttcagtttaanctcactatcttcccaatttggtgattcangtgattcaaattcgaaacttcaagcaatgttatcgacattgcaaccgncgcgttctcnatcactcctctctcnacnccggttccaaatatctaaaancatcgtctccgcagcttcttcgangaccatcgacacttccgttatctctccaacacaatctcaaattctcaccactcgtcgttcantcctctccggcgaaaccacagctgtcgaaatcgcaaaatcttacctttctcggagccgtctcaatgagcctcagctcaanaggttccctcacgtatcggagaatgttctcaaagatgcnc

SEQ ID NO: 8468 - DNA, 419 bp, Arabidopsis thaliana
  unsure at all n locations
  Clone ID: LIB24-020-Q1-E1-G9
ctgcctcaagtgtttttgggggaaattgatttcgttgagaaaaaccctaaattccgaacttgaagcaatttttcaatttcgtttgcagaaaaatggcaaaggataatgaagcaatcgccattaacgatgcggttcacaagcttcagctctatatgctcgaaaataccactgatcagaaccagctcttcgcggcgaggaagttaatgtctcgatcagattacgaagatgtcgtcactgaacgagcaatcgctaagctctgtggttatactctttgccagagatttctcccttccgatgtttctagaagagggaagtatcggatttcgttgaaggaccataangtttacgatttacaaggagacgagcaaagttttgctccgctgggtgtttaaatgataacaaaacgttttcgggganat

SEQ ID NO: 8469 - DNA, 483 bp, Arabidopsis thaliana
  unsure at all n locations
  Clone ID: LIB24-020-Q1-E1-H1
ttacgcctnccgtagccgtccnaaattcnagggtcgacccacgcgtccggttcggaaggcagtgttcaagatctaagtcagaagattagtcaatcggatgaagcatcttcaaaccatcaggaaacgggtctggtgaagctctacagtgttggtgaaagttgcaacgagaacattccggaatgtagttcatttttccttccaaaagctgccattggatttatcacaaaccttgcatcaagcctttttggttatcagggttccacttcggttataagttcacattcacgttgcaatgattctgaagatcaaagtgactctgaggtccttgttcaagaaacagcagaatcatatgacaactctgaaacaaattcaggtgaagtggatatgaccaccacgatggtcaacatacctatagaaggaaaaggaattaacaaagacactggattcaactcntctagaagaacagcaggaaccaagttgaga

SEQ ID NO: 8470 - DNA, 480 bp, Arabidopsis thaliana
  unsure at all n locations
  Clone ID: LIB24-020-Q1-E1-H10
actttaacctnctcgtacgncctctaaaattccaaggtcnacccacncgtccgntcgatctgagtcaggatcaagtaatgcagatgaagtgttggttagcctaactggggatggggaggtagattctgttcaagatcttcaagcgcaggttctgtggttgaaggctgaactctgcaagttgcttgaggagaaacgatcagctctacttagagctgaagaattggagattgctctcatggagatagtaaaggaagacaatcggcgtcaattgagtgccaaggtcgaacagttagagcaagaaatggccgaagttcagagactcctctctgataagcaggaacaagaaggtgcaatgctacaggtcttgatgcgggtggagcaagaacagaangtaacagaagatgcacgaatatttgctgagcaggatgcaaaagcgcaagagatatgcctgctcaagtcttgcaagaaaaatacnaaggg

SEQ ID NO: 8471 - DNA, 490 bp, Arabidopsis thaliana
  unsure at all n locations
  Clone ID: LIB24-020-Q1-E1-F3
aantgtctacgcaggacggtagccgtccanaantctagggtcgacacacgcgtccgnttcancatcagcttctcaaagctttagcctcgagagcaaaattctctcaagctttagccatgtctgcctctgcttcntccctctctgctttcagatcctaaatcncttcctcnctgcgtctccagacccgcntccgtctccgtcgnacctcnttccctcgccttcaaacttcactccgannacctcgtctctatcttcgcntcctcagccctcaaatgcgcatcccncgcggagtacncgtcgcgtttcgttagaaacgttgctgtatcttcggattttgangtggangaagatgatgatgttcgctgacggtgacgattcagcgcctgtggagcgtaactccntctcncnatgaccttaagctctttgttggtaaactttcatttaacgttgatagcgctcaacttgctcaagctcttgaanagccctggaa

SEQ ID NO: 8472 - DNA, 407 bp, Arabidopsis thaliana
  unsure at all n locations
  Clone ID: LIB24-019-Q1-E1-D3
aganatcataatgtctgctagcgagaactttgagcagttgggtgcaaagctgaggatgtgggcagaatcatcatttgtgtatcttgataagctggtctcaagtctacgagaagaggagggaagtgttccttttcaatttcataacttgacagttcttttggaagacaaaaggttgtctgatgctgttttccagtcaactagtgttgaaatcattgttgatgggttcatagtggatagcttagaagtggatatagaagaagtgaatgttggtcatcaggaacctgaagaagaatcggaaaacagtggtgaaatcagtcttgaagctgtctacgaagaagatgataatgaagtcgagcaggagaatgaagaaggaaaggtaaacttanaaaattgttgatgaatgtgat

SEQ ID NO: 8473 - DNA, 396 bp, Arabidopsis thaliana
  unsure at all n locations
  Clone ID: LIB24-019-Q1-E1-D4
gtnttgggtgattggaggtgtttcagctcatctctttgctctcttccaaggtctcctaaaggttttagccggtgttgagacaaacttcacagttacatctaaagcagcagatgatggtgaattctctgagctttacatcttcaaatggacatcactcttgatccctccaaccacactactcatcataaacgtaatcggagtcattgtgggaatatctgatgcgatcagtaacggatatgactcgtggggtcctcttttcggaagattgttctttgccttttgggtcatcctccatctatatcctttccttanaggtctgcttgggaaacaagacagaatgcctacaatcantccttgtcnggtcgatccttctcgctctatccttaagcttctttg

SEQ ID NO: 8474 - DNA, 413 bp, Arabidopsis thaliana
  Clone ID: LIB24-019-Q1-E1-E1
gataaaactttggttcctccgaatttcgagttcttgttcttcccaaggcccctacttcggccctagcatcaaccattgtcgttttaaagctccaggttttcatggccaagaaagaagtaactatcgttgagatcttctgaaattaatcagtcttgaagtctctggagattgtcttataacatggactccatggatattgatcaaagtaacataggtgaatcgcctcaccttctgctgagaccagtaagtccattggaatctggtgaaggtttaccttatgctcctgagaattggcctaatcctgggagatacttggcattggaaggttggaccgagaattagcggtaaaggctacttcgtggatagatacttatatcctcctaagtatcttcccgggtttagatactggaaat

SEQ ID NO: 8475 - DNA, 444 bp, Arabidopsis thaliana
  unsure at all n locations
  Clone ID: LIB24-019-Q1-E1-E10
ggtccaganaaccgggtccanccacgcgtccggngaagcgaaggaagatcgattgcgaggaagccaaggtttttgtgtctccatggatttcgtacgagcggagagataatgaagatacagcttcatanatggcctaaatctgtaattgatagacncgatctcgtgtttctcgatgcaccttttccttgtcaaggcaaatctgatgtcganggcatctttgatcctccttattacgagtggtttcaattcaacaaggaattcaccgagtatacgaatttcgagaaatgtttggagtacctggaggatcgtatgatcaagcttggtcctttcgatggtctcattgggttttcccagggtgcaattttgtctgggggtttaccaggactgcaagctaagggaattgcatttcanaaagtnccaanagattaagtttgntaaaaccaa

SEQ ID NO: 8476 - DNA, 397 bp, Arabidopsis thaliana
  unsure at all n locations
  Clone ID: LIB24-019-Q1-E1-E12
ggaaaacaggatccaagtggggttgaattatggaggatgagacgagatcaacgtcatcactttccgatatagctattagtattatcgacgaaggtcctctttctccattacgacaacgtagtgaaagaagtgttgtatctcatatcaaacgcaacttacagtcatcggggaaaccactgattcttttggaatcagctggtaaggcgtcctgctgcatcttcagaatccctgatagcctcgcagaggtgaatcctaaagcctataagcccaaagttgtttccattggtccttatcattacggagaaaatcacctccaaatgattcaagcagcacaaagtttcggtttccggaacctttccgnanacagggcaacanagaaaggaatggacgaaaacnt

SEQ ID NO: 8477 - DNA, 393 bp, Arabidopsis thaliana
  Clone ID: LIB24-019-Q1-E1-E3
tcgattgcgaggaagccaaggtttttgtgtctccatgggatttcgtacgagcggagagataatgaagatacagcttcataaatggcctaaatctgtaattgatagactcgatctccgtgtttctcgatgcaccttttccttgtcaaggcaaatctgatgtcgaaggcatctttgatcctccttattacgagtggtttcaattcaacaaggaattcaccgagtatacgaatttcgagaaatgtttggagtacctggaggatcgtatgatcaagcttggtcctttcgatggtctcattgggttttcccagggtgcaattttgtctgggggtttaccaggactgcaagctaagggaattgcatttcagaaagtaccaaagattaagttgttataaa

SEQ ID NO: 8478 - DNA, 458 bp, Arabidopsis thaliana
  unsure at all n locations
  Clone ID: LIB24-019-Q1-E1-E5
cngtaagangtaccggtcctaaattcccggnncgacccacgcgtcnantctctctctggttcatctacagagttaataatcattaatgcgaagaagatccctagaaagattgatcagagaaagtctcagctgaagcacgtttttggaaaacccagatttgacgggtactaagaagctgtggaggatctatatttgaaagaagagaacaaggatgcgtaggtggatctgttgtggggataaaaaaggagattcagatttatcanatgaagaggtgcatttgaaaagtccatggcaaaattctgaggcaaatcannagaancaanaaccacaagctgttgtaaagcctgaggcgcagaatgangctcttcccancgaagttcctcccttgtctgtggatgaggttnaaganngnantgacagttttggatcnangtcnctgattggtggggggtcttacg

SEQ ID NO: 8479 - DNA, 398 bp, Arabidopsis thaliana
  unsure at all n locations
  Clone ID: LIB24-019-Q1-E1-F1
gngttaacaatggcgtctctttctctcagttctgctcatttctcttcaacttcttcttcatctcgctcctctatatccacttcatcgctttctccgtcgtcaacttctctccctctcttacaatcaccgatccgccgccgttaccgctccctccgccgccgtctctccttctccgtcattccccgtcggacttctcgctccttctccacttccaattctcagattaggtgttcgataaatgagccgttgaaggtgatgatttcgggtgcaccggcttcaggaaaaggcactcaatgtgagctcattgttcacaagtttggtttggtgcacatatcaacaggggatctattgagagcagaggtgtcatctgggacagatattggaaagagagcaaaaga

SEQ ID NO: 8480 - DNA, 392 bp, Arabidopsis thaliana
  unsure at all n locations
  Clone ID: LIB24-019-Q1-E1-F2
cgcggccccacacgcgtccggaanatcttgttaaanaacaantnggcttnaccngcggaggtnccgcncacngctgaatccaagttctctgctcttggtgccgattctctcgacaccgtggagatagtgatggcgttggaggaaaagtttaacataagtgtggaggaatctgatgctcaaaacattacgaccatccaagaggcggctgatttgatagaggaccttgttcaaaagaaacccgcggcggaaacttcctgaaccggctgtcttttctttcctgacctattcttgccttcagagcgttttattacggtatattagaccgtttgttatttttatttatttcggaagctaagattgggtgttgacaatgagacaactttggtacntta

SEQ ID NO: 8481 - DNA, 387 bp, Arabidopsis thaliana
  unsure at all n locations
  Clone ID: LIB24-019-Q1-E1-F3
aaatcgagtcttatgcaccaagcttgagttatgctccagtgggagcaagaatcccagatagtgaaatcattgtggaaccaaagaaacaagagttgatttccaagttgaaaacaggaaaaacctttcttaggaaccaagaaccagagaaagcttatacagagttcaagatagctttggaacttgcccagagtctcaaagaccccaccgaagaaaagaaggctgcaagaggcctaggcgcctcgctgcagcgccaagggaagtatagggaagccatacagtatcactccatggttctagccatctcaaaganggaaagttgaagattctggaatcactgaagcatatggagctaattgcanactgttataccganctgggaaatttcca

SEQ ID NO: 8482 - DNA, 339 bp, Arabidopsis thaliana
  unsure at all n locations
  Clone ID: LIB24-019-Q1-E1-F6
tcttcttcttcttcttcaatggcgttgatacatggttcggttcctggtacgtctgcggttcgattggttttttcaacctcagcgtcaccgtcgagattttgtctcaatgttccggtggtgaagcagggttggaagaattcgtgccggagaagggttttaagagcaatggtgcaggaaacagttcaaggatctcctttggtttacgccagagaaatggagcgcctttctgctaaggaatcgctacttctcgctttgaaggatgctggaggctttgaggctttagttacagggaaaacaactaatatgcaaaggatcgatgttaatgagaggattacnagt

SEQ ID NO: 8483 - DNA, 429 bp, Arabidopsis thaliana
  unsure at all n locations
  Clone ID: LIB24-019-Q1-E1-F9
ggntttgatcttctaaattgtttcatctttaccctcatattcctcatctcaactctctttctctttgttttattctataagaaaccaaacgatggatttgatgtacctccaagccctccttctcttcccatcattggtcatcttcatcttctcctctttgcttcaatccacaagtgttttcaaaaaatctcatccaaatacggaccttttctccatcttcgcattttccatgtccccattgttcttgtatcctctgcctcaacggcttacgatatcttcaagacaaacgacattaatgtctcttatcgtggtgatgttgcaatcgatgaatgcattgtgtttggttcttttggatatttccgagctccatgtgaagattactggaaantcatgagaaagctcatcaagggcaagggaatccggncccaa

SEQ ID NO: 8484 - DNA, 449 bp, Arabidopsis thaliana
  unsure at all n locations
  Clone ID: LIB24-019-Q1-E1-G1
cttcagnaaatcncggtcacccntccngggtcgncgcacgcgtccaaaaancacctccancgccatccaaacagtcagctaaagaaccgcagcttccacctaaggatagggaaagacgggttcctatgacaagacttcgcaaacgggtggcaactaggttgaaagactctcagaacacttttgcgttgctgacaactttcaatgaanttgatatgactaatctgatgaagctccgatctcagtacaaggatgcttttcttgaaaagcacggagtgaagttggggcttatgtctggtttcattaaggctgctgttagtgccctccagcaccaacctgtagtaaatgcagttatcgatggagatgatatcatttacagagactacgtggatatcagtatcgctgttggtacctctaagggtccttgtagttccaagtcataaagagatgct

SEQ ID NO: 8485 - DNA, 453 bp, Arabidopsis thaliana
  unsure at all n locations
  Clone ID: LIB24-019-Q1-E1-G10
cccgggnccacccacgcgtccggattaaaagagcagtgccaaaggagctctcctcgactactcctaaccgaagcccacttattgggtatggtaacaactatggagtagtccctaataggtcttctgctaatagctacttcaatagttttcctcctggttataataataataatctaggctctgctggccggtttagtcctattggtagcggtagaaatgctttctctagcttcgggctcggattgaatcaagaactgaatttgaattcaaactttgatggaaacactcttgggtatagccggatccctggcaaccaatacttcaacagtgcttcaccaaaccgttacaactctccaattgggtacaacagangagactctgcttanaaacccgagcaacaganacttgtggggaaacagaagcgattcctctggtcaaggttggaanttggga

SEQ ID NO: 8486 - DNA, 478 bp, Arabidopsis thaliana
  unsure at all n locations
  Clone ID: LIB24-019-Q1-E1-D12
ggngtacttctttagtaggccagnncaatgaaacgngggnccacccacgcgtcngtactnantncnccaacgtcctccgccgccgtggtggacttatatctctgcgtttcacgacctgccgccaccgccggcgataggtttcaatgatgaattaaggcgttggccagagagagaagagagattgagatctgtcgatatgctagcgaagaatcggctgccgggaagcggccacactactccgtctcctccggcatctcctcgccgttctcctcgttatcgtcacggtcggtctaaagccgccgccggtagtagatttcctacggttcaaccaagtcggaccctcgctcatcgcctctcgtggatcctcttatcggttcttctccgtcgtcaggggattttcttattcgctcctctaatctatatctcntgtatgctgcttaacatgggaaacgtctccnttgaagttgttccnaacaat

SEQ ID NO: 8487 - DNA, 411 bp, Arabidopsis thaliana
  unsure at all n locations
  Clone ID: LIB24-019-Q1-E1-G3
gtcgtantatcactttgcatctgagaagtcttggtgggagtctctatcgtcgtcgtatccaaagctcttcaatggagaccgatctcaagtcaacctttctcaacgtntattctgttctcaagtctgaccttcttcatgacccttccttcgaattcaccaatgaatctcgtctctgggttgatcggatgctggactacaatgtacgtggagggaaactcaatcggggtctctctgttgttgacagtttcaaacttttgaagcaaggcaatgatttgactgagcaagaaggtttcccccccttgtgctcctcgggttggtgcattgaaatggctccaagcctaaattnccttgggccttgaatgataataanggganaannccggttaanccgccgttgggnaaaccttggcg

SEQ ID NO: 8488 - DNA, 446 bp, Arabidopsis thaliana
  unsure at all n locations
  Clone ID: LIB24-019-Q1-E1-A3
tcgngaggtctgggtcgccncacgcgtccgangactagttctagatcgcgagcggccgcccttttttttttttttttttgcaggtcaatatatttttatttcatagaagttcgtatcagtcgatacatatcttaaagtaagacaaccaaaanaaaaaagacaacacactgattattgatccgacgtggactcatcatatcaccatgccaagatcatagatgtgttaaaattattctgcgtacttaacttagtgttaagtaaactagttaaaaacatgataagtcaaacccacaatgcaccagcccgcttaagcatgggaatcaaggatccgttaagatgtagactcatgacctcgttggctccaccgaccaactctccaccaatgaaaacgcccggaactgcggggctacacccgagccgcaacaacgcctgctcgatttccctcc

SEQ ID NO: 8489 - DNA, 456 bp, Arabidopsis thaliana
  unsure at all n locations
  Clone ID: LIB24-019-Q1-E1-A5
accccccggtccacaccatcttcgnggcgccgacccacgcgtnaanatgcctgtctttgatcttttggagaggatgatggttaacaaatttggttttaagcatggagttgttctgaggtttttcactcgaactatttatgtcgcatttacattgttcattggagtgagtttccccttctttggagaccttctaggcttctttggaggatttggttttgcacctacttctttcttcctcccaagtataatgtggcttatcatcaagaaaccaaggagattcagcgtcacctggttcgtcaattggatctccattatcgtaggagtgttcataatgttagcgtcaacaattggagggttgaggaacatcattgcagattcttctacttatagtttctacgcttaatattgaatagatcttgtacactaaagcatgaatcattggatcatctaaattaa

SEQ ID NO: 8490 - DNA, 454 bp, Arabidopsis thaliana
  unsure at all n locations
  Clone ID: LIB24-019-Q1-E1-A6
cagccgacggcacaggtaagcanctcgcgggtcgacccacgcgtccngtttttcantttgaaaagaaggacccatttttatctctctctttgttttgttttctcgaatctgaaggagtaaagttaaaagctttgaaggagagaatcaatggcgggttacagagcagatgatgaatacgattacctattcaaggttgttctgataggtgattcaggtgtgggcaaatccantttgctttcacgattcacgaagaacgagtttagtctcgagtcaaaatccacgatcggggtcgaagttcgcgactcggagtttgaatgttgatgataaagtcatcaaagctcagatttgggatactgctggtcaagaanngtaccgaagccatcactagtgctnntancgangaactgttngaacgcntccntgtcnacgaagttacccgngactcaacatttga

SEQ ID NO: 8491 - DNA, 439 bp, Arabidopsis thaliana
  unsure at all n locations
  Clone ID: LIB24-019-Q1-E1-B10
anactctataagtgagtcgtantattgtcttccttttggttgtaataatcctaagcttctcactactagcttcttcttctgaaatgaaagtggggttggaggattacaattttccagtggatccaactccgacgacaaaagcttcgataaaaccaggtcctattgagcatggaannnnnnnnnnnnnnnnnnnnnnnnnnnnnnnnnnnnnnnnnnnnnnnnnnnnnnnacagcaatcccaagacggtggataacaccaaatcttttctctgatttatttgccccgtgaatgtgatctacgcactgtttgtagttataattcccacgttttttttcttctttctttatctctcttttgtactaacattgtcttgtcgtcgctacgttaattaatttcctttanctgccagctcgtgtgttagtaangtccaatttgagg

SEQ ID NO: 8492 - DNA, 467 bp, Arabidopsis thaliana
  unsure at all n locations
  Clone ID: LIB24-019-Q1-E1-B11
cctanaacttgagtccctttaaagangaagaagagctgttgttggttttttgagggtaaaaagaaaganaacccaatttccgatttgggagggatanaagaccaaagaaagaaagacaagctcccgatgggctgatcctgaaactaagaaagctattaagacaagaggagaatgcaagagctcatggctcgacaaggcatgcagggtaagcagggcaatcagcagaatccagagcaagagaaacagcaggaagatgctaaaagggaagctgatgaacgtaggcaaatgatgcttagtcaagtattgtcttctcaagcccgagagagaattgctcgaattgctctggtgaaacctgagaaagctagangtgtggaggatgttattttgagggctgctcagatgggacagatagttgagaaagtttctgaagaacggcttataacactgtttgaacaaattaacngccc

SEQ ID NO: 8493 - DNA, 482 bp, Arabidopsis thaliana
  unsure at all n locations
  Clone ID: LIB24-019-Q1-E1-B12
actgtcctcagnaagcacaggncnancnaacgcgggnccacncangcctccacaagnnactcgngtcaaagcttcacctaattagtgtattcccccaaatttctcaattctcactaatggctttggtcagcttacttgaaatctccattgctttcttttgtttccttatctttcgaattttcctgatcagcaagaaaccacaccgttcatttctcacaaactggccgctcctgggcatgcttccgggtttacttaccgtgctccctcgagtttacgactttataaccgaggttcttgaggacggcaacttaaactatcttttcataggcccttttttagggggcatcgacatgttgttcancgttgatcctgctaatatccatcacatcatgagctcaaactttgcgaattacccgaaaggaaccgaattcaagaagttatttgacgttttgggaaatnggatttcaacgcngattcaaatt

SEQ ID NO: 8494 - DNA, 406 bp, Arabidopsis thaliana
  unsure at all n locations
  Clone ID: LIB24-019-Q1-E1-B3
agccntcttatttttcctcttttcctcgaaattcattcttctttgactgtttccaatacgtttaagaactttttttaaatttattatgtgtcttgataatagagccatagaaaaaaaattgtttgtttaatgtcattttctttttgagtaaagaaactttcttctttgcaacttgaaaattttcgatttcnnnnnnnnnnnnnnnnnnnnnnnnnnnnnnnnnnnnnnnnnnnnnnnnnnnnnnnnnntttattttagggttttgttgattttctttgttcattttgccgtcgtctctttctctttctcttgtgaagaaaaagaagaaaaatgaaacttctgggtttggtcttcttgctgtttaatctgtttatgttttcgttttctcggaaacttttaaccgaga

SEQ ID NO: 8495 - DNA, 404 bp, Arabidopsis thaliana
  unsure at all n locations
  Clone ID: LIB24-019-Q1-E1-B6
agtcgnattaccaggaagatggaagtcccgtactgcattgtcaagggcaaatctcgtcttggagcggttgttcaccagaagactgcttcttgcttgtgtttgaccactgtcangaacgaggacaagctagagttcagcaaaatcctggaagctatcaaggccaacttcaatgacaagtacgaggagtacaggaagaaatggggaggaggcataatgggatctaagtctcaggcaaagaccaaggcaaaggaaagagttattgcaaaggaggctgcccaaaggatgaattaagangctagcttcttttgtttgtggtttgcnccggantcgtaaaacttaataaagcttttggttaaccgggtcctgaanntactcctttttaatngaaacccttaataagggaa

SEQ ID NO: 8496 - DNA, 389 bp, Arabidopsis thaliana
  unsure at all n locations
  Clone ID: LIB24-019-Q1-E1-B8
ttcatntatatgttagggttagctctggttctaactctggtcggagctccgaccaaagcccaaggacctgtttgcggtgcaggcctgcctgacaaatttagcagattaaacttccctgaaggcttcatttggggaaccgcaacagcagcatttcaggttgaaggagctgttaatgaaggttgcagaggtccaagcatgtgggatactttcactaagaagttcccacatagatgtgaaaatcataacgctgatgttgctgtggatttctatcatcgttacaaggaagatatccagttgatgaaagaccttaacactgatgcttttagactttctattgcgtggcccaagaatattcccccatggaaggatgtctaagggaataagcaaan

SEQ ID NO: 8497 - DNA, 448 bp, Arabidopsis thaliana
  unsure at all n locations
  Clone ID: LIB24-019-Q1-E1-C1
accggtccaganatcccgggtcgncccacgcgtccgcggacgcgtccgcccacgcgtccgctcagcttttgtggtgaatattgaagaaagtttctctgatatttgttagatggaagaagattgcgagtttcgacattgggatgagttgattccagatgctcttggtttaatctttagccacttacctcttcaagaagtactaacagtggtgcctagagtttgcaaagcatggaacagagctgttactggaccttattgttggcaagagattgacattgagctgtggagtaaccgttttcaccagtctgatcatcttgaccggatgcttgagatgttgatccctagaagcgctggctctttgcgaaaactctccgttactggccttcgaaatgactctatcttctccttcattgcacaacatgctggttcacttaagaccttgaaggtg

SEQ ID NO: 8498 - DNA, 422 bp, Arabidopsis thaliana
  unsure at all n locations
  Clone ID: LIB24-019-Q1-E1-C12
acacagaagcaagacctaagaagaggaagctgcagcagcagcagancttgttcaccagtcgctatcttcttctcaaaacgagaacaatgtcttcaatgaaatccgtctcggctttggacaatgtagtggtgaagtcaccaaacgatcggaggttatacagagtgattgaattggagaatggattgtgtgctctgctcattcacgatccagatatttaccccgaaggntctgttccggatcaaatnnnnnnnnnnnnnnnnnnnnnnnnnnnnnnnnnnnnnnnnnnnnnnnnnnnnnnnnnnnnnnnnnnnnnnnnnnnnnnnnnnnnnnnnnnnnnnnnnnnnnnnnnnnnnnnnnnnnnnnnnnacgatgaaattaaaaggaaaagggatttcagaccaaaaagggtgctgccnctatgt

SEQ ID NO: 8499 - DNA, 446 bp, Arabidopsis thaliana
  unsure at all n locations
  Clone ID: LIB24-019-Q1-E1-C2
gtaggtcagacntccggggccnccacgcgttcgnatcctctctagccatggccgtctgtaactgcttcctccaagctccaccactctctcgcatactcctaccggttttatctcgccgagctactactctctctgccggttatggtcggctcaaatccacggtcacgttctgctctactgtgaaccggaccagtcctctgacatcttcggtccgcgcagaagtaaagcgcgtctcgcgtaaagacgataaagtagcttcagctactgatgttcaatttgagacgcctttgaagattgttgagtatccggatcctatactacggggctaagaacaagaggattgatatttttgacgaagaatttaaagaacttggttgatgctaagtttgatgttatgtacaaaacggatggcattggggctctcaacaacacaaagttaggtctca

SEQ ID NO: 8500 - DNA, 395 bp, Arabidopsis thaliana
  unsure at all n locations
  Clone ID: LIB24-019-Q1-E1-C5
acaaccaccgccacaactcccgtactccgccgtgagacgcctcttcttcattattgttctctcacaacaaaatcgccggtttaccaaatcaacagagttagattcggatcttgcgtgcaaacagtcagcaagaaattcttgaaaatctcggcgagctctcagagcgcttcagcggcggtcaatgtcacggcggatgcttcgattccgaaagagatgaaggcgtgggtgtatagtgactacggcggagttgatgttctgaagctggagagtaacattgttgtgccggagattaaagaagatcaggttttgattaaagttgttgcggcggctcttaatcccgtcgatgctaagagacggcaagggaaatttaaagccactgattngcctctccgact

SEQ ID NO: 8501 - DNA, 459 bp, Arabidopsis thaliana
  unsure at all n locations
  Clone ID: LIB24-019-Q1-E1-D11
cgtaccgtgtccngcaatcccgggnccacccacgcgtccgcaagaagatgaaactgaggagaccaaagaagcaactgtaaaccaaagagaggctgataagacaaagcttttccttcataaaatcccacacgatgttccatctcaagagttacatggagttcttaacggggatttcacactcgatgttaagccaccaaaaagaaaaggaggttactacaatgcagtcgttgattttaatagtccagaagaagcaaatgaagcatttgaaaatgtggaaggagacgtagttaaggataagacgggtttgccacaaaaaatggttgtattcaagctgagttctggatcaggagttagtttatatgttcgtaaaatggttcatgatgattctccggggtgaaatctctacaaccaagagagctcgaacagaggagagcaatatgagttctaagagacngaaga

SEQ ID NO: 8502 - DNA, 476 bp, Arabidopsis thaliana
  unsure at all n locations
  Clone ID: LIB24-019-Q1-E1-A10
cntgcacgcacaggtccgacnantcncgggtccacccacgcgtccggnataatccataatccgcgaggttggggagttgtgggaatcgggtgtgaaagaagttacgcttttagggcaaaatgtgaacagctataacgatgattcagctgatcgtgagtcaggtgctaactgggaatacagtgagggattctcgagccggtgtaaagttaaaaacatgggtttgcgatttgctgatctcttggaccgactctctgtagagtttccagagatgcggtttaggtttacatcgcctcatcctaaagattaccctgacgagttgctgtatttgatgagagatagacataatatctgcaatctcatccatcttcctgcacaatctggtaatagcagaatactagaacaaatgcgtanaggttacaccagagaacctaattggatcntgttaaaaagattccgagtaatataccaaatgtggc

SEQ ID NO: 8503 - DNA, 428 bp, Arabidopsis thaliana
  unsure at all n locations
  Clone ID: LIB24-018-Q1-E1-B6
aactacagtctctgcaacgttgtttttcgcttcaatggttggcatccaagtttttgtgacgggcgggataggtggtgtccatagacatgccaaccattcgatggacatatcatctgatcttactgcacttgggaggactccaatagcagtgatatcagcaggcgttaaatcaatacttgatattccaaagactcttgaatatttggaaactcaagaagtgtatgttgctgcatacaagagcgatgagtttccagcatttttcacagaaaaaagtggctgtaaggcaccttcccgtgtaaatagccctgaagactgtgctagagtaatagatgcaaacatgaagctaaaccgtcaggcggggattccatttgccattccaattccganacancaatcanccgctgggaaatctaatcgaatcaacnaac

SEQ ID NO: 8504 - DNA, 420 bp, Arabidopsis thaliana
  unsure at all n locations
  Clone ID: LIB24-018-Q1-E1-B7
cggcaatggcttcttctatagttacctctagcttgaagcctttagccatggccgattcttcctcttctaccattttctcccatccttccatctcctctaccatctcttcctccagaattcgcagctccagtgtttccctccttaccggacgcattaacctgcccctctctttctctcgcgtctctctatctcttaaaaccaaaacccaccttaaaaaatccccctttgtctccttcgttgcccagacttcggattgggctgaagaaggtggagaaggaagcgtcgctgttgaggagaccgagaacagtttagagtcacaagatgtgagcgangganatgagagcgaangagatgcgagcganggagatgtgagcgaatganatganangcnaaggagattnagccaaaggactgtgagcg

SEQ ID NO: 8505 - DNA, 434 bp, Arabidopsis thaliana
  unsure at all n locations
  Clone ID: LIB24-018-Q1-E1-C2
gcaccgttctgattactgattcttcattgacggtaggagtcaccacttttggcggcgattccttgttctctattttttttgcacaagcaacatttagcttctgcaaactccagttcatctctcaaccctcatatcgccgtgttttctcgctctagtaccgcgagctcggacgaaccaggaagcaatccgttaatctagaagcggtgttgagaagatgacgattacatcaaatatctctgtacagaacgataacctcgttgttcaagggaagactatccttaccanaatccctgacaacattatcctaactccggttaccgggtaatggattccgtttccgggttcatttatanggngcgacgtttgaacaaagcaagagtcttcaagtgttccccatcggtgtattgggngggtcttcggttcaagtntgtttc

SEQ ID NO: 8506 - DNA, 485 bp, Arabidopsis thaliana
  unsure at all n locations
  Clone ID: LIB24-018-Q1-E1-C3
ttttgcctggggcntaccggtccanaattcccggggcccgagcttcancagcnaacgaanaacgaactctatccccgtcgtctcacgccgtgctaagatcctcatgcagctccacgcgttaccctgagctctgtatctctgccgtggtaactgccggcggcgtcgagctaacgtcgcaaaaagatgtcatcgaggcatcggtgaacctaacaataaccgccgtggagcacaattacttcaccgtgaagaagctgatcaagaagaggaaaggactgacgccgcgcgagaagacggcgcttcatgactgtttggagactattgatgagacgctggacgagctccatgaaacggtggaagatctccatttgtatccaaccaaaaaaactctccgggaacacgccggagatctcaaaacactaantaagctccgccattacaaaccaggagacttgtctccacngcttctctcatgacgangcccataa

SEQ ID NO: 8507 - DNA, 444 bp, Arabidopsis thaliana
  unsure at all n locations
  Clone ID: LIB24-018-Q1-E1-C4
gaaaaccaatttcttcttcttcttctctcaggtttgagtctgaggcatcacaacagataaagtcttgaactttgatcaagaattctaaacggagtttttgctcttctcgtcggtgaaagaaaaatcgagatgggttcaactccgttttgctactcnatcaatccatctccatcaaagcttgatttcacgangacccatgtgtttagtcctgtttctaaacagttttacttagatttatcatcgntttccggaaaacccggaagagtanctgggtttaggagccgtcgagctttgctcggagtaaaggcggcgacggcgttantttnagaangggnganaagagannacgccggtgacggagaaccagcnganaatcnaagggnttaagttgccggacgtggnaatctggnnggaatggggtttggcttaagcnggccaaaaacg

SEQ ID NO: 8508 - DNA, 432 bp, Arabidopsis thaliana
  unsure at all n locations
  Clone ID: LIB24-018-Q1-E1-D12
tcatnccagagctgaaattgatgtggttcggccggtggaggcagattcggcggcggaaattagtccggaacaagaccacgaaggaagatcggagccttcgtcgttgaaccaaggggagattttaaaaacacttgctacggtggagaaggattcgcaggcaatcncggagagcttttcgtctctctttgtttccctccgatcaactctttctgaggctactggtagctcggttgatcacatggcttgctttgganaggcagcgggacggcttcaggaaaatgctctagatgcagccaccaaagggaaccggtacatcaactcttgcctcagattnancgangaaattaaangccgttcagaatttngccgctccgttaangcnccttaggaanaaacgtngatgttccctgaaacccggtgttaaacnagctt

SEQ ID NO: 8509 - DNA, 493 bp, Arabidopsis thaliana
  unsure at all n locations
  Clone ID: LIB24-018-Q1-E1-F12
cctttagccggccggnaccgatccanaaantcncgggtcgacccacgcgtccgtggatncnnganctnaaattgatgtggttcggccggtggaggcagattcggcggcggaaattagtccggaacaagaccacgaaggaagatcggagccttcgtcgttgaaccaaggggagattttaaaaacacttgctacggtggagaaggattcgcaggcaatcgcggagagcttttcgtctctctttgtttccctccgatcaactctttctgaggctactggtagctcggttgatcacatggcttgctttgganaggcancgggacngcttcaggaaaatgctctagatgcagccaccaaagggaaccggtacatcaactcttgcctcagattaaacgaggaaattaaaggcgttganaatttggcggctccgttaaagcacctgaagaaaaacttgaanttccttgacaccngctnttaaacaaacctcncccggcct

SEQ ID NO: 8510 - DNA, 469 bp, Arabidopsis thaliana
  unsure at all n locations
  Clone ID: LIB24-018-Q1-E1-F2
agtgtcnaaaactcgcgggtcgacncangcntcnnaattcntncacnttaatcattttcgttgatacagcttctcccggtaataatgtcggcggatttctccgtcgcactctaaattctttaggattttgtttctcttgctcatctgtaactcaggcaagctctcgttggattgttttaggcatgaatgagtcagtccctgattctgtggaagacaacggtaattcagtccctgcaaatggattattaagtattgcctgataatgatcatgaggaaggaggtgttggatcacctcaacgatcgaacagcgttgaatctcctggtggatcagtacattctacgaggaaaggttttggtttgaagaaatggagaaggatnaaaaagagatggtcctgtnagaanatgaggctgctcctgttgatgatggtagtaagttacngaaaaccttcgaatggctggttttggtnaa

SEQ ID NO: 8511 - DNA, 432 bp, Arabidopsis thaliana
  unsure at all n locations
  Clone ID: LIB24-018-Q1-E1-F3
gggaggaggaggaatcccatctttctctgagttctctttcgctgaccttaaagcagctacaaacaactttagctcagacaacatcgtatcagaaagtggtgagaaagccccaaatcttgtctacaaaggccgacttcagaaccgtcgttggatcgctgtcaagaagtttactaagatggcttggcctgagcctaaacaatttgcggaagaagcatggggtgtggggaaattgaggcataatcgattagcgaatttgattggatattgttgtgatggagatgagaggcttcttgttgctgagttcatgcctaatgatactcttgctaagcatttgttccattgggaaaatcagacaattgagtgggctatgaggttgcgagtaggatattacatagctgaggctttggattantgtagtactgaaggtcctcc

SEQ ID NO: 8512 - DNA, 430 bp, Arabidopsis thaliana
  unsure at all n locations
  Clone ID: LIB24-018-Q1-E1-G3
naatttttcctgttcnttctctctccaccacataaaaaaaaaaacctagctttgtcccctcaactcactgattgaactgcttgattttcgattgatcatctgggtggttttgaatcgaagagtattgttgtattagtggctggtggctctccaaaagagtaaggccggagagagaaatcaatggcctctggcggcggagaggcggataaatcacttgaaatcgggtccgggaccgcggatcccaaaataggcggtactgggagcaggagcgccggagaacaacgatacttcanggcagatacactgnatttcagtaaatgggatttgcatatgggtcaaacctctactagcagcgtcctcaccaattccgcttccacgagcgctccggcaccgggcgatgcaggaatgggagattgacctctccaaactc

SEQ ID NO: 8513 - DNA, 398 bp, Arabidopsis thaliana
  unsure at all n locations
  Clone ID: LIB24-018-Q1-E1-G4
gnggcgaacggaaaagatgggtacttcggtgcaagtgactcctctctgcggagtttacaacgagaatcctctctcctacttagtctccattgatggtttcaacttcctcatcgactgtggttggaacgatctcttcgacacatcgctcctcgaacctctctccagggttgcttctactatagatgcagttttgctttctcatccagatacacttcacattggtgctcttccttatgctatgaagcagcttggactctccgctcctgtttatgctactgagcctgttcatagattaggtctccttacaatgtatgatcagtttttgtccaggaagcaagtatcccgactttgatctgtttacactgggatgacatagattctgctttccangaatgtga

SEQ ID NO: 8514 - DNA, 493 bp, Arabidopsis thaliana
  unsure at all n locations
  Clone ID: LIB24-018-Q1-E1-H10
ctttagccggnccggtaccganccanaaattcgcgggtcgacccacgcgtccgnccacgcgtccgaaaacattggaaaaaccctaattcctagtgttgcgaatcacttttcattgcagctttgaacttcagtctgtgaatttccaacagcaatgacaactccagcaaaaaagagactgatgtgggatttcaagagactgcagaaagatcctcctgtgggaataagtggagctccacaagataacaatatcatgcattggaatgctctcatctttggacctgaggacactccatgggatggaggtactttcaagttgactcttcacttcaccgaggattatccgaacaaacccccgattgttcggtttgtttcacggatgtttcatccaaacatttatgctgatggaagcatttgcttggatatcttgcaaaaccagtggagccccatctacgacgttgctgcaagttctcaaatcaattcaatccttggcccg

SEQ ID NO: 8515 - DNA, 426 bp, Arabidopsis thaliana
  unsure at all n locations
  Clone ID: LIB24-018-Q1-E1-H7
gggaaaagctcctaaaggtactaaaaccaattggatcatgcatgagtatcgtctcattgaaccttctcgtagaaacggaagcactaagttggatgattgggttctatgtcgaatatacaagaagcaatcaagtgcacaaaaacaagtttacgataatggaatcgcgaatgctagagaattcagcaacaacggtacttcgtccacgacgtcgtcttcttctcactttgaagacgttcttgattcgtttcatcaagagatcgacaacagaaatttccagttttcnaacccaaaccgcatctcgtcgctcanaccggacttaaccgaacagaagaccgggttccaangtcttgcgggatactctaacttcgattggggctaatttttgcccggtaatgtngngcngaanaccccggtancgggactccg

SEQ ID NO: 8516 - DNA, 402 bp, Arabidopsis thaliana
  unsure at all n locations
  Clone ID: LIB24-019-Q1-E1-A1
aatccagaactcatcattccattttatgaggcttttaatgggaagaagtgggagaagttcaacagtgagaaagtagcttcattggcatatgctcggatacaaggaaaatctgcccttatagcccattttcagaactcaagcttgatgaatgaagatatgcgttgtcgtccaattatcttcgacactcccaacaatccagagtctgttgaacaggttgttgatgaggaatctaagaatatggacctcctcgactctcagctcagtgatgatgatggcagagagagaagctgacacaggagttgagagacgactcaatgttgtgataatggctgtttnttttctttctaagtactaattttttnccgtacatnttgggtgaaanggcagaagttaacggatgna

SEQ ID NO: 8517 - DNA, 480 bp, Arabidopsis thaliana
  unsure at all n locations
  Clone ID: LIB24-018-Q1-E1-B2
ccgccccgtaccgggtccaaaaattcccggggtcgacncacgcgtccgnntgcgcccccgagcggcccttgaaaatccggaggaccgagtgccgctcacgcccggtcgtactcataaccgcatcaggtctccaaggtgaacagcctctggtcgatggaacaatgtangcaanggaagtcggcaaaatggatccgtaacttcgggaaaaggattggctctgagggctgggctcgggggtcccagttccgaacccgtcggctgtcancggactgctcnagctgcntccgcggcgagagcgggtcgccgcggtgccggccgggggacggactgngaacngctctctccggaagcnttccncnggcgtcgaacattcagctcagaaattggttactgataaggggnantcggactgtttaattaaancanancantgcnatggtccctgcggatgnaacgcaatgtgatttctgcccagtgccc

SEQ ID NO: 8518 - DNA, 357 bp, Arabidopsis thaliana
  unsure at all n locations
  Clone ID: LIB24-016-Q1-E1-H6
ggagattgggaagcaagccagaagaaaatgcaacggaagaagaatcaagctgaaggaaataatactatgattttaagacacacatagactttttaatactagtgaagagagttttattgagagaagctctacttcatgttttgctgcttagacataagcaggctacttacatatacaagcggctaagaatacgagaccttttgctagtaatgtgaaaagaggttgaagattaaaaataacattacgccaagaatgatatcttgagcgttttatttcaatggnnnnnnnnnnnnnnnnnnnnnnnnnnnnnnnnnnnnnnnnnnnnnnnnnnnnnnnnnnnnnnnnnnnnnnngggcg

SEQ ID NO: 8519 - DNA, 432 bp, Arabidopsis thaliana
  unsure at all n locations
  Clone ID: LIB24-016-Q1-E1-H7
gacattttctagctgtgttccttttctcagcaactctctcatcttgcctcgtagtctcggcttcgctcgtggaagggaaagtctcttgtttcgactgtcccaatgattatgattattcaggaatcacggtcggagttagctgtagccacacaaacacgcggttcactgtaacaactgacaagaagggtgacttcatatcggaacttccctcaaagatcgaatcaaactgtgaagcagaactccaaggcagcgtcaagcaactttatgcttccaagaataacgttaagtcgaagattgttaagcttgggcggtgacaaatatggtctctcttccaagttgttcttcttgaaatcatgtccaangaagcttcggatctttagttcgtccaagaccgttgatttacaagttcctcccganttgggggctgggctc

SEQ ID NO: 8520 - DNA, 360 bp, Arabidopsis thaliana
  unsure at all n locations
  Clone ID: LIB24-016-Q1-E1-H8
gcttcgataattccgaggagctnnnnnnnnnnnnnnnnnnnnnnnnnnnnnnnnnnnnnnnnnnnnnnnnnnattgcgattaacgaaattcgaaaaatgtctcgtcttctccaaacacccttcttaccttcagtttccctccccacaaaaacacgatcttccgttacgggtttccgggtaaagcccagaatcatcccaattcaagcaaagatccgagaaatcttcatgcctgcactaagttccacgatgaccgaaggcaaaatcgtctcttgggttaaatcaggaaggcgataaactcaacaaaggagagagtgttgttgttgttgaatctgataaagctgatatgggatgttgagactt

SEQ ID NO: 8521 - DNA, 426 bp, Arabidopsis thaliana
  unsure at all n locations
  Clone ID: LIB24-017-Q1-E1-A10
antgttattcgccgcccggtccaaaanaccgggtcgacccacgcgtccgatcaaaaccatgacgagtcaccacgcgatcgaagtgacgaagacggtgctggaagtagccgacgtagcatggaccgcggtggaaacttnnnnnnnnnnnnnnnnnnnnnnnnnnnnnnnnnnnnngtcaacgaatccaatttctgatccacgagatcntgaattagaagctcttcgtcaagagaatcgtcgtctcaggactttgcttgaatcgaatcttaaactctttgagactctcgctgaatctgctgcgttctctcatgattgccctancgacctctatgctaggcttgtancgatggttacctcaagatgatttcttggctagattagagaatctaagacaangctttatccaatggaactcaataatcaant

SEQ ID NO: 8522 - DNA, 472 bp, Arabidopsis thaliana
  unsure at all n locations
  Clone ID: LIB24-017-Q1-E1-A11
cccggtcgaantaaccgggtccacccacgcgtccgangatttctccatttccctctcttatcctcaatgaaaaaaataatctgagaaaacgcaaaagaagaacggagcaaaatcctcagaatcgtcgccggagaatctttacgtttcgacataatcggaattttggaattgataattccgatggaaggggttatcacatgtttccatacgaaatgcgtctctcttccaattcgttctttcccactttctagggtttcttcacttcctcggtggaggaacaataaattgatctcttcatcgcgatcggttcatctaagaagcttgtgcgtttcgagctcagatactttagtcgcgagcggttcaccaaaggaagacgagaggcagagcaaagtatcgagcaagaaggaaggagatgactccgaaggattgaagttttgggatgggataaaaatggggtgccaaccttgcnaag

SEQ ID NO: 8523 - DNA, 411 bp, Arabidopsis thaliana
  unsure at all n locations
  Clone ID: LIB24-017-Q1-E1-A2
gcttcntcaatcgctttagggtttgattatatatatatagtgtggttagcaggagcctcccgggctaatctgataactaaggtacttgaagaagtaagccccaaagctcctgctagattatttttagcgtttgtgttgcagatttgccgtattccttaggcttttctgtgtcaaaaaagcgtctatatctctcttttctatgtatgttttgctttgagctgtgtttgttgatggaatcgagttggtatcaacgtttgtttatgtggcaatgattataaacntacccgcgcttctgagattattcaatgaantanatacgcctgaaacgccagttctgcctcanataaatccttgntcgaaaaanctggtntcctaaccnaacccttcaatggcaatttggcnttcctccgg

SEQ ID NO: 8524 - DNA, 494 bp, Arabidopsis thaliana
  unsure at all n locations
  Clone ID: LIB24-017-Q1-E1-A3
attagcctgccggtatcgaaccaacacnggtcganccacgcgtccgnccaagcgtccgtgagaacgaacctacgtcaagaagtggaggcaaagccaaggcagtgcaacaaatacgaaagggtcgtctctacaagactatggccatgattggagatggtgctactgatctcgaagcacgtaaacctggtggcgcagatttgttcatatgctacgctggagttcagcttcgtgaagccgttgcagcaaatgcagactggcttatctttaagtttgaatctctcataaactcattggactaaaagcctctatagtgattattctcgtttagctaaactcattattcatatctccaaatttgtacccttttatgaatttgtatcaaataccaatntgaatcaacaaatgtttttgccaaaaaaaaanaanaagggggggccgcncctaanaggatcaagccttacgtncgccgtgcancgacgtcataanctcttcca

SEQ ID NO: 8525 - DNA, 413 bp, Arabidopsis thaliana
  unsure at all n locations
  Clone ID: LIB24-017-Q1-E1-A4
cgtggggtttcttaaatcttatttgtattacaataaccaaaacccaagtttacaaaacaagaagaagaaatgttttgagttgtcatggatgtaatagctactacaactactatagtatccgacttggattcacgacaacccgaaatcgaagctccgatccggatccagcccgcgaagcctatttctttctcaaacggcaaacgctgccaccaccatcatcttgcatctgaagcggttgcggttgcgacttataaagaatgtctaaagaatcacgcagcaggtatcggcggtcacgctttagacggatgcggcgagtttatgccgtcaccgtcgtttaactccaatgaccccgcttcactaacgtgcgctgcttgtggttgccaccgtaacttccaccgccgtgaaggangatc

SEQ ID NO: 8526 - DNA, 424 bp, Arabidopsis thaliana
  unsure at all n locations
  Clone ID: LIB24-017-Q1-E1-A6
gcttctttttacactcaagaatataaattccctgttctccagatcttttctcaagaaaatttaaagctttaacttaagaaagcttgaacctttctcttccaaccacatcttccttctttttatcctctagctcaacttagaaagaatagaataaagtggcaaaaccgaaagtgaaccaacttgtagtaaattaatagttatgggttcgaaacctaatgccatgaagaatgtggtggctatggcggcagtttctgctctgttccttctaagggttcttgtttgctctgttnctggntctgtctctnacgatagcagagccantacatcaatggcaaaagaggaatcctaaccccnggatcatcacaaccccagaangtacccctgaaatgtgggcaagatnnaattcgggaaaagcaangggaag

SEQ ID NO: 8527 - DNA, 442 bp, Arabidopsis thaliana
  unsure at all n locations
  Clone ID: LIB24-017-Q1-E1-A9
gctttgaataatttgattggtaggcttttggttgatacaagagaaagagattgttttgatatggaaggtggtcgtggtggtggagatggcaatttcttaccaaactctaactttggtgtattctctgactccgctatggatatggatttcatggatgaactcttgtttgatggatgttggcttgagacaactgatggtaagagcttgaagcagaccatgggacaacaagtatccgattctactaccatgaatgacaacaacaacaactcgtacctttacggttatcaatatgctgagaacctttcacaagatcatatctccaacgaagaaacagggagaaagtttcctccaataccaccgggctttctcaaagatcgangatcctccaatcaagtaccttttgaccantctgcagttaatgagttctgcacaagcacaaaaa

SEQ ID NO: 8528 - DNA, 489 bp, Arabidopsis thaliana
  unsure at all n locations
  Clone ID: LIB24-017-Q1-E1-B11
ctgttactttgccggcccggtccanactaaccgggtcganncacgcgtccgctcgaatcgctggaacatttggttacatggctccggagtacgccatgagaggccatttgacagataaagctgacgtttacagctttggtatagtagctctagagattgttcatggaagaagcaataaaatagaacgatccaaaaacaataccttctatcttattgactgggtggaggttttgagagagaagaataatctgttggaactggtggatccaagactaggatcagaatataacagagaagaagcaatgaccatgatccaaattgcgataatgtgtacaagctcagaaccttgtgagagaccgtcaatgtcagaagtggtgaagatgttagaaggtaagaagatggtggaggtggagaaacttgaagaagcttcagtccataagagaaacnaagagacttnaaaacatgaacacgattgaaaattctacgaaa

SEQ ID NO: 8529 - DNA, 436 bp, Arabidopsis thaliana
  unsure at all n locations
  Clone ID: LIB24-017-Q1-E1-B12
gcgccgctcctcccctgcagacgacaccaaatccacgagatcagacgctcttcagctcttcaacgcctctccttccgacggctctaagaaacagaaacaacatcaacaaccaccaaagtacacttcctcacacacttcctctgagtttctctacttaggtactttagtaaactctcgaagcaatggtttagagcagttacaagaggaggttgttgaccttaaaggtgagctctttatgcttcgtctccagaaatcggcaaggaatgagttcaaatctagcgactttcgtcgtatgaagaaacaagttgctcggatgttgacggttaaaagagagagggagatnaaagaagggataaagaaaaggttgtcnaagaaacttgacaagacaatggggaagaaaagcatagtacaangaacaactccgtctctgaaanaa

SEQ ID NO: 8530 - DNA, 403 bp, Arabidopsis thaliana
  unsure at all n locations
  Clone ID: LIB24-017-Q1-E1-B2
tagtcgggaggagaaaaccatgggtatctagtgtttccaagactgataagttacctcctcttggagaggcaagggagatactgacgtttgccaaggcacagacactcaagcgtgcccccaatatgaaacaccctttaatgtgccttgacgctattgaagtaggtattgtttctggtccaagggctggtttagaaaaggaagctgaagtcgcctcacaagtggtaaaactggataccaccaaaggcttgatccacgtcttcttttctcagcgaggaactgctaaggttcctggagttactgatcgtgggttggtgccaaggaagattaagaaggtagccataattggaggcnggttgatgggatntggaataactactgcttgatcctaaataactatccaang

SEQ ID NO: 8531 - DNA, 492 bp, Arabidopsis thaliana
  unsure at all n locations
  Clone ID: LIB24-017-Q1-E1-B3
gattcaaactaactctgcaaaaaaaaaaaaaactcnnnnnnnnnnnnnnnnnnnnnnnnnnnnnnnnnnnnnnnnnnnnnnnnnnntcttaacaaaaaaatgtctatatccatggcgttattctctccgccgatctcttcctcacttcagaaccctaatctcatccccaagatntcaacctctcttctctcaaccaagcgtttctctctaatctccgtccctagagcttcctccgacaatggtacgacttcccccgtcgtggagattccgaagcctgcttccggtggctggtagaaggannttccagtttaaatctccagcccgaaagctccttccgccttctgaaaaaacggggcccgtttggaagggtgaaagcccaaccngaattccgaaggttactggaagaaccggttaatccaaaaattatccanggaattgcccaaaacttgggggtttaaatgggggnacctttggggggaattntggaaaaac

SEQ ID NO: 8532 - DNA, 442 bp, Arabidopsis thaliana
  unsure at all n locations
  Clone ID: LIB24-016-Q1-E1-H4
gaacaaagtgaggaacaaggtctggtttacaaaagtctcatagatgtcgagtggaacagtgagaagggtttcacgtcaagatatacaactggttcaaaaccttatagaacgatgccttcaactttacatgaatcagaaagaagttgtggatactttactagagcaggctaaaatcgagcctgggttcacagaactagtttggcagaagcttgaagaagagaatcgggagtttttcaaagcttactatcttaggctaatggttaaacaccaagataatggaattcaacaagttgcttgagcagcaggttcaccacatgcgtcagatgcatccaactggtgttgcttctgtccaaaacacaaatggttctcatcttcaatcaatgaatcnagaaaccaatttatgccaatccctctgaagcacactggaccaaatccttttgaa

SEQ ID NO: 8533 - DNA, 424 bp, Arabidopsis thaliana
  Clone ID: LIB24-016-Q1-E1-F4
atcgttggttgtgtgaggtgctgcagcgtgatgtttcagacattgatctcaccattgatttgggatatggttattatctgcctgaagagttgttcgtgagtgagacactagtcaatctgaaattaaaaagtgcatttaatattgattggtggcctggagctgaaggcacttccttaccaatgcttaaaagtctttgtgtttacggtgtgagggtttttttgtgatgatgagcttcaggagcttcttccttgtttccctgtgcttgaagaattacaaatgtctaatatgcagtggcttgattctgatgaaaccgtgtcaagtgcaaccctcacaacgctccatattactggcatccgctctgaaaatcctaagagcatttcctttgatactccaaaatctgctttcctttgtccacactgaattt

SEQ ID NO: 8534 - DNA, 428 bp, Arabidopsis thaliana
  unsure at all n locations
  Clone ID: LIB24-016-Q1-E1-F6
gcattgctccgttttgactcgctcgactcggctaagtgaccacagttcctttcgagccaataaaatggctacgggacagctattttcacgcaacacacaagcgttgttctacaattataagcagcttcccattcagcgtatgcttgattttgatttcctctgtgggcgagaaactccttctgttgctggtatcataaacccaggttccgagggattccaaaagctattttttggtcaggaggagatcgccatccctgtccacgcagccattgaggcagcatgcgctgcgcatcccacagcagatgtattcatcaacttcgcatcgtttagaagtgctgctgcttcatccatggctgctttgaagcagccaactattaaagtagtggccattatagcanaangtgtttccggagtcagacactaagcaa

SEQ ID NO: 8535 - DNA, 429 bp, Arabidopsis thaliana
  Clone ID: LIB24-016-Q1-E1-F8
gcaaatacctatgtcaccgccgtcggcaaccgccggtgacatcaaccaccgtgaagtagacccgacgatctggcgcgcttgtgctggagcctccgtccagatccctgtccttcactctagggtttactactttccacaaggtcacgttgagcactgttgccctctcctctctactcttccttcctccacctcgccggttccatgtatcatcacttcaattcagttgctcgccgatccggtcaccgacgaggtctttgctcaccttattcttcaaccgatgacgcagcagcagtttactccgactaattattcacgattcggcagattcgatggcgatgttgatgataacaacaaggtgactaccttcgccaaaattctcaagccttctgatgctaacaatgggaagtggcttctccgttcctccgtttc

SEQ ID NO: 8536 - DNA, 448 bp, Arabidopsis thaliana
  unsure at all n locations
  Clone ID: LIB24-016-Q1-E1-G10
catgtcgcttaaatttttagcgatcttcgaatcccattttccttcgggaatctgacattttttctcgggaaatttttttatccaaatcggagtaaagtatcgaatctagagaatccgctatggatgagacctattttgatctattgaatttctttaagaatccctcttttacagagacatttgtcgacatcttactatgcgcagttccgatttggctcgccgttatgatcgggttattaatcggatggtcttggcgtccaagatggaccggtttgatctatttagggtttcgttctaagcttcggtttttatggaccgcaccgcctgggtttggtgctccgtcggctttggcttgctttcaancgctctctcctgcttcccccgtttggccgaaacaacctggtcaaaggaatgacaacaagagctaataaaaccggcgaaccggttc

SEQ ID NO: 8537 - DNA, 419 bp, Arabidopsis thaliana
  unsure at all n locations
  Clone ID: LIB24-016-Q1-E1-G11
ggaacgctagctatatgcttaacacatgcaagtcgaacgttgttctcggggagctaggcagaaggaaaagaggctcctagctcaaggtagcttgtctcgcccaggaggcgggaagagttgagaacaaagtggcgaacgggtgcgtaaggcgtgggaatctgccgaacagttcgggccaaatcctgaagaaagctaaaaagcgctgtttgatgagcctgcgtagtattaggtagttggttaggtaaaggctgaccaagccaatgatgcttagctgggtcttttcggatgatcagccacactgggactgagacacggcccggactcccacggggggcagcagtggggaatcttgggcaatgggcgaaagcccgattcaacaatatcgncgtgagtgaagaaaggcaatgccncttggaaag

SEQ ID NO: 8538 - DNA, 425 bp, Arabidopsis thaliana
  unsure at all n locations
  Clone ID: LIB24-016-Q1-E1-G2
attatgaacaaaggcggtggatccggtggcggatccggtggaggaagcggtccaacggccgccgccgccgccgcggctttacagaagcaaaaggcgttgttacagagagtggagactgacatcacatctgtcgtcgataacttcacgcagatcgtcaatgtttcaagggtgagtgatccgccggtgaagaactcgcaggagacatacatgatggagatgcgagcttctagaatggttcaagcagctgattctcttttgaaactcgtatcagaacttaagcaaacagcgatattttcaggatttgcatcactaaacgatcatgtagaacaaagaatagaagagtttgatcaagangccgagaagacaaatcgattgttggctaaaattgctgatgatgcatctgccaatcttaaagagctcgaagt

SEQ ID NO: 8539 - DNA, 431 bp, Arabidopsis thaliana
  Clone ID: LIB24-016-Q1-E1-G3
ttttcaagagcttttctgtgtaaattaaagagttcttttttgaaggaaataggcaatctcatcctgagaatcaaacaaccggaaaattcaataaatgaaacgcctttaattgttttttcttacaaaacttctaagcagattactttggcggagacccatctgattggtatttttgcagatattccgttcttggagtaccaactggcctggagctacattccttagcctggagtaaataataggctgaccctttgaaatcaacatggtttcctcaagaacttaataacttttcgctggtttctgtcctggagcgttgttgtgtgtttgggtcagaggtattaataaagtccaatgcaaggtccacgaaagcactggtgaattcaaccgactgggataaattatgcagatgggagaaaccaatctgtagcaac

SEQ ID NO: 8540 - DNA, 432 bp, Arabidopsis thaliana
  Clone ID: LIB24-016-Q1-E1-G4
gaagagagcccttcggaagagagcttcatatattaaggctaattcagagacaattacaatggcttcacttcgtcgacttctagaggaagatcttaaattagagaaggagtctcttgatctatttaagaagttcattaacaaagaattggatgaagtactacaacttcctgatgctcctaaatgttcgactgagtctattgtgaaaaatgtgaagaaaaaggtcaagagcacaccatctaagatggtaagcagtgaatacaattctgattcagatactgaggggaatgtggacaacgaggaggtagctgtaaagaagacaatggcccgaaaagttaaattatcaaaaccagagatgatgggaaaacggaaaagtgaaaatggtaaacaagtatctggaagaaagaaagcaaaacatacagaaatagttcagag

SEQ ID NO: 8541 - DNA, 427 bp, Arabidopsis thaliana
  unsure at all n locations
  Clone ID: LIB24-016-Q1-E1-G5
gcccacgcgtccggcaaaagctgaatcttcttccttagatgttgatgactctcttcaagtcaaatctgtttctttctcggaatgtagcagtgactaccaagattacactccttgcactgatccaaggaaatggaagaagtatggtactcacaggcttactttcatggagcgacattgtcctcctgtgtttgatagaaagcagtgtctggttcctcctcctgatggctataagccaccgataagatggccaaagagcaaagacgaatgttggtacaggaatgtgccatatgattggattaacaagcagaaatctaaccagaattggctaaggaaaganggtgaaaagttcatttttcctggtgggggtacaatgtttccacatggaatcagtgccaagtcattttgatgcaagattgattcctgaaat

SEQ ID NO: 8542 - DNA, 439 bp, Arabidopsis thaliana
  unsure at all n locations
  Clone ID: LIB24-016-Q1-E1-H1
aaaaccaagtcgaagcttttaaaaccctaaatccccaaatcgggaactgagattccgattcgaagatgtcgtcgtcttctccgagtggaagcggtagtgatttgactgagagaagagggatccctgccgccaaattcatccaagatgtggagacttatctctctcagtctggtctcgatcctaactctgctctcgcctttcaccaagaaaggcttcagcaatataaagttgttgagatgaagcttcttgctcaacaaagggatcttcaggctaaaatcccagatattgaaaagtgtttagaaggttgttgctactttggaaagcaaaagaagggtactggtgaggcgctcttagctgattttgangtgtcctgaaaggaatatattccaccgggcctgcnattgaagacacagactcagtgtgtttggtgggttgggaa

SEQ ID NO: 8543 - DNA, 419 bp, Arabidopsis thaliana
  Clone ID: LIB24-016-Q1-E1-H10
cattgcagctgcatttgctgatcctttagtcgacactgttaacaacttctccgcagccacagggattccgtctttcttcatttccttcatcgctttgcctttggccaccaattcaagtgaagccgtgtctgccatcatcttcgcatcccgcaaaaagatcagaaccgcctctttaactttctccgagctatgtggtggagtgacaatgaacaacattctgtgtctctcggtgttcttagcaatcgtctacgttcgaggactgacatggaacttctcatcagaagtgttggtgattctcatcgtttgtctggtgatgggcggtttcgcgaagtttccgcacaacttatcctctttggacatgtttcatagcttacttgctttaaccattctccttgggtctggtccaaaatcctgaatac

SEQ ID NO: 8544 - DNA, 427 bp, Arabidopsis thaliana
  unsure at all n locations
  Clone ID: LIB24-016-Q1-E1-H11
atcctcctctcaagctccaatggcgagagttctagtctcgtctccatcttcattcttcggttcaccgttgattaaaccgtcgtcatctctccgtcacagtggagtaggaggaggaggaaccgctcaatttcttccataccggagtaataataacaaactcttcactacttcaaccaccgtacgattcagcttaaacgagattcctcctttccatggcttggattcatctgtagacatcggagcgattttcaccagagctgaatctcttctctatacaatagctgacgccgccgttgttggtgctgattccgtcgtaactactgattcatccgccgtgcagaagagtggtggttggtttggttttatctcccgatgctatggaattgggtcttaagattttgaagggatgggattatcancgggtcat

SEQ ID NO: 8545 - DNA, 437 bp, Arabidopsis thaliana
  Clone ID: LIB24-016-Q1-E1-H12
gctcaattgttctgtccctgggacttttttttgtttcgtttttcttgttaagatcgaaaactctgttttggtagatttttgtgttcttgattttgattcaagatggggaggctgtttgtggtgaatcttgaagggaagatctatagctgcaaacactgtaagactcatcttgctacttatgaagacatcatctccaagtcttttcactgcaagcatgggaaagcttatctcttcaataaggttgccaatgtttccattggagagactgaagaaagactgatgatgactggtaaacatactgtggctgatattttctgtgtctcgtgtggatcaatcgttggctgggaaatacgagactgctcatgagaagaaccagaagtacaaagaaggaaaatcagtgctgaaaagatttaaagatatcgggtcctgatgggaag

SEQ ID NO: 8546 - DNA, 428 bp, Arabidopsis thaliana
  unsure at all n locations
  Clone ID: LIB24-016-Q1-E1-H3
gagtgtgttttaaatatcaaagccatgttttgggtaaggaattaaagagcaaaaacctcgattccgatttcaaatattcgaaggtgaaatttcttcattttctgcgaatttggtagctatcacgttctcaatctggtgaattagggcttttgttgagctgtggaagctaatgatgggtgtacccaccgctgaggaaggtggggtttctctttgttgctatgtcttgaaaccttagtttgcttttgtcaatgggtaaaaccgaggatgatgtgagtctccgtgtcgccggcggcgaagctaccggcgattcgacggtgaggaatgctcggtgtgggtgttgcaaatggatctcaagcttcgttgggttcaaatgtttattcgtgctgctttaacaatcgcttgttccttcnggctttggtttggtgcct

SEQ ID NO: 8547 - DNA, 433 bp, Arabidopsis thaliana
  unsure at all n locations
  Clone ID: LIB24-016-Q1-E1-F2
gggacccaccgccgtcgcgccgccaaacaacatccatctctatcaagcagctcctccgcagcagccacaaacatctccagttcctcctcatccatctatttcccaccctccttactctgacatgatttgcacggcgattgcagcgttaaacgaaccagatgggtcaagcaagcaagctatttcgaggtacatagagagaatttacactgggattcctactgctcatggagctttgttgacacaccatctcaagactttgaagaccagtgggattcttgtcatggttaagaaatcttacaagnnnnnnnnnnnnnnnnnnnnnnnnnnnnnnnnnnnnnnnnnnnnnnnnnnnnnnnnnnnncagatctgatttcatagtcaacgagaaccaacctttacctgattcggttttggcttcttctactcctcaaga

SEQ ID NO: 8548 - DNA, 222 bp, Arabidopsis thaliana
  unsure at all n locations
  Clone ID: LIB24-016-Q1-E1-D12
gattaagaannnnnnnnnnnnnnnnnnnnnnnnnnnnnnnnnnnnnnnnnnnnnnnaaaacaagttgttattaagaatatgcgatgagacttgatgaaatatcagaaccatcaacaaactttggaatgttgtagcattctcttnnnnnnnnnnnnnnnnnnnnnnnnnnnnnnnnnnnnnnnnnnnnnnnnnnnnnnnnnnnnnnnnnnnnnnnnnngggcg

SEQ ID NO: 8549 - DNA, 430 bp, Arabidopsis thaliana
  unsure at all n locations
  Clone ID: LIB24-016-Q1-E1-D2
gcccacgcgtccgaaaaaaataattaaacttttactctcttccgatctcctttccttgtacatctagatccaagcggtatcgatggctcgacgtggattattgatttcgttcttcgctatcttctccgtcctgcttcaatcttccacttctctgatcagttcttctagcgtcttcgtcaatccttccaaagtcaagcaggtttcatcgaaacccagggcgtttgtgtatgaagggtttctcacggaattggaatgtgatcatatggtctcccttgcaaaagcgagcctgaagagatctgctgttgctgataatgatagtggagagagcaaattcagcgaggttcgaaccagctctggcacctttatctccaaaggaaaggattccaatgttctggganagaagataagatctcacttggacaatttcntc

SEQ ID NO: 8550 - DNA, 429 bp, Arabidopsis thaliana
  unsure at all n locations
  Clone ID: LIB24-016-Q1-E1-D6
gcccacgcgtccgaaaaaatgcaacgagtttacgccttacgctaacaagggtatgataacgttggtgaccgatctcgaaggtagcagtccggccactacagagttcaagactttctttacacagttcaagtcttacatgtctttcatcgagacaacatcggcctcaacaaaaaatgttgatgccgagatgacagctaaatgtgacggtcttttcaaggccatgtctgcattgagtgctagtaaaggcgtcaaatcagcggatgctgggagtatgaagatgaccatgttgtcgatgggaaagactttggttgagcagaagaagaatacaaagataatgacattgaaggaaaagaaagagttggtcatagatatggtgaaatggactaaaatggtcgctacattttgtgaaatcggctccgagcanaaaag

SEQ ID NO: 8551 - DNA, 422 bp, Arabidopsis thaliana
  unsure at all n locations
  Clone ID: LIB24-016-Q1-E1-D7
gggaaacatttccaaggacattgctggggatattttttctattggctgtgtcctggcagaactttatttgatgaagccgctattcaactcagtgtctttggctacttatttagaaggtggtgacttacctgaactgatcaaagaacttcctcctcctactcaggtaattgtcgaagcatgtattgaacaagattggagaaggaggccctcagcaaagagtcttttggactctccgtatttctcagctacagtgaggtcagctcacttgtttgctgctccacttcaacttttggccaaaggtcaaacacgcttgtgttatgcagcaagttttgccaaacagggagtcttgaaagtaatgggaacatttgtggcagagatgtgtgctgtgtactgtttgccactggtcancacacctttatctg

SEQ ID NO: 8552 - DNA, 427 bp, Arabidopsis thaliana
  Clone ID: LIB24-016-Q1-E1-D9
gcccacgcgtccgcccacgcgtccggcgccgctttgtctctgtcgcaatctcaaccatatggagaaagacatggcaatgatgggagacaaactgatactgagaggcttgaaattttatggtttccatggagctattcctgaagagaagacgcttggccagatgtttatgcttgacatcgatgcttggatgtgtctcaaaaaggctggtctatcagacaacttagctgattctgtcagctatgtcgacatttacaacgtggcaaaggaagttgtagaagggtcatcaaggaaaccttctggagagagttgcaggacttatagcttccaaaactctggaaatatcccctcggataacagctgttcgagtgaagctatggaaaccaaatgttgcgcctaatcaaagcactatccaataattaagtgtcca

SEQ ID NO: 8553 - DNA, 440 bp, Arabidopsis thaliana
  unsure at all n locations
  Clone ID: LIB24-016-Q1-E1-E1
gcccacgcgtccgcccacgcgtccgcggacgcgtgggttctactccgatcgatcaattgaagattgaaatggaagctaattcnnnnnnnnnnnnnnnnnnnnnnnnnnnnnnnnnnnnnnnnnnnnnnnnnnnnnnnnnnnnnnnnnnnnntctgagagaaggaagagtagtgattctgaagatgacgttgaagaagaggatgagagggataaacgcagagtgaatgagaaggagagagggcatcgagaacatgagagagatagaggcaannnnnnnnnnnnnnnnnnnnnnnnnnnnnnnnnnnnnnnnnnnnnnnnnnnnnnnnnnnnnnntagagagaggagagaacggggaacgggaagagccgggagaaaggngagagtttaaagaaagagaaaagcgggaaacgggaagatggagagaaggataagganaaaac

SEQ ID NO: 8554 - DNA, 423 bp, Arabidopsis thaliana
  unsure at all n locations
  Clone ID: LIB24-016-Q1-E1-E10
ttaatgacagctgtcatagctccgttacttctgggttagctccgataacggcgtcaaactacggcgttaatatcctgaacgttaatacacaggggtttgtgccgttttggcctatgggtatgggtactgcgtttgttactggtgggccggatcaaatgggccaaatgtgggctattcctaccgttgctacagctccgtttctgaatgttggtgctagaccggtgtctagttatgtctcaaacgcttcagacgctgaggcggagatggaaacgagcggtggcggaacgacgcaaccgctgagggatttttcgttggagatttatgataagagagagcttcagtttttggggtggctcaaggaactcatctccgtcctcatgtcatgaagacntaagggaatttaaccctaattccaanttcctt

SEQ ID NO: 8555 - DNA, 421 bp, Arabidopsis thaliana
  unsure at all n locations
  Clone ID: LIB24-016-Q1-E1-E11
ttcactacacacacacaaaaaataaattgagtgcctcccccaaaaacaaaattggtagataacgagcaattgttttttttcagatttgatcctgaatttttacatttttttttttgcaatctccccctaatctgttgtttctcgcttcttcttctgttaatcatctgtctttcaaaaagaaagaaaaaagaaaaattcgatttctgggtttgtttttgtcatacagaaaaaaatcaagcttatgaatttgtgtttaattttttgttttaatttgaaaggcaggttttttcagaacgagatcgttttttcaaatttcttctgattttacctctttttttcttcntagattttagtgaatcganggtgaaatttttgattccctcctttcggatntacacagaggnttgcctaattcaaacct

SEQ ID NO: 8556 - DNA, 432 bp, Arabidopsis thaliana
  Clone ID: LIB24-016-Q1-E1-E3
ggcaattgtagcacttccggacaaccttaagatgcctgaagtactgggctaagaagcgtggggtgtattcaaatgtgactggatttcttggcggtgtaaactgggcacttttggttgctcgtgtctgccagctttatccaaatgcaattcctagtatgctggtttctcgtttttttagagtatatactcaatggcggtggccgaacccagtcatgctttgtgcaatagaagaggatgagcttggatttcctgtctgggaccgtcgtaagaatcatcgcgaccgctatcaccttatgccaataataactccagcttacccatgcatgaattctagttacaatgtctctcaaagcactcctcgcgttatgacagagcaattccaagtttggtaacaatatcctgcaggagaattgatttaaataaacagcactg

SEQ ID NO: 8557 - DNA, 430 bp, Arabidopsis thaliana
  unsure at all n locations
  Clone ID: LIB24-016-Q1-E1-E4
ggaagctgtgtataaattggatcctcagatccggtgattacctaaatcgcgtcaattctcaacccagttttcagatttggtttttggaagctaacttattgttggaggtggagagatatggctgactttggtttgttctgtttcccttgtttaatggaagttgttnnnnnnnnnnnnnnnnnnnnnnnnnnnnnnnnnnnnnnnnnnnnnnnnnnnnnnnnnnnnnnnnnnnnttgaagatgaatatatggctgatgagtatgacatggatgatctcgaggatgatatgaatgccgcgtttgatggaagagatatcgatgcttctgattccgaagtcgaagatttcgatcaattgaacaaggctgcagatacttctgctgctcaagcacggnatgggaaaggatattcagggtataccgtgggaaaagnc

SEQ ID NO: 8558 - DNA, 427 bp, Arabidopsis thaliana
  Clone ID: LIB24-016-Q1-E1-E5
gcggacgcgtgggaagaaactttctacataatataaaaagtcacacattctctctattaattaaacatgttgcttgttgcgtttgtgactcttttggtagcagtagctttgcagccactaccgtcagtgttgtctttggacgttcaccttcttcggcagctagccgcaaagcacaatgtgacatcgatacttgtgtttggagattctagtgtcgatccagggaacaataatttcattaaaaccgaaatgaaagggaattttccaccttatggtgaaaatttcatcaaccataaacccaccggtagattatgcgatggattactcgctcccgattatattgcggaggccatgggttaccctcccataccggcttttccttgattcatccctaacccaagctgatttaactcgcggtgcaagtttgcct

SEQ ID NO: 8559 - DNA, 425 bp, Arabidopsis thaliana
  Clone ID: LIB24-016-Q1-E1-E6
gagattccagaatatcacgtacttacttggtggtatcagaaatctacgatttttctggtgagggttttgaggtgtggagctagggcttttgctgctagatagttgatttttcaattttccgcagcagaaatgggaaatgcgtcggagaatttcgatattgaagatctcatgtcttatggagacgatttgatcaacttattgaatgttaagaatggttttgatattatatctcaaagttctgagcagttcaaagctctcaattttgcttgccatgaggatttcaatcagatacaaggctctattgaagattgtaagacgaaactctatgcttgtaagaagaaaactgaggaagcatattcagatattgcggctgaagatgaaattgaacgtcttcagaaagagcttgacgaagagatggaacggga

SEQ ID NO: 8560 - DNA, 421 bp, Arabidopsis thaliana
  unsure at all n locations
  Clone ID: LIB24-016-Q1-E1-E8
cttgtgagatcatctaaaaaatggcttcgactgtttcgctttctttactcagcggcggcagtggagctcttcaggcgcgttgcgcaagaaccgcgcatgttagcccacgagcggcgcattctaacaaacccgcgctttcttcgttctcgctgaccggcgcctctcgcaggaatctgttattttcgttgacggcagcgacggtagtgacgggacttcagcctgcatcaatggcggagaatattccgttatttggtataagaaagaaactgaagaaagcagaagaagaagcggtggagatcgtgaaagaaggctttgagacggcggagaaaggcgttgatgcggcggagaaaggattagaagcggcggagagaggtgtagagacggcanagaangaaatctgacggcggttagctttaatgga

SEQ ID NO: 8561 - DNA, 427 bp, Arabidopsis thaliana
  Clone ID: LIB24-016-Q1-E1-E9
gaccatatccacaatcctcaagctatctcctttgtgtccataatcgaaacgctttttgcgatttatcctaatcttttttctatcttctgctacaaatttggttcttttttggttgaatttggataaaatcataatctcctcttcaattttcttgtgaaatggaagtttcagtgattggaaatcctcaagcgaggatctgcagagcagaattagcttacagagagcttggatttagatttggctctgatgtaatctccggtgaatcgagaaatagggttagtttctgcaaccaaagctctaaatggaaagagatcgcgatacgttgctcttcgagatctgtcaaatgtgaaagccatcgtctccgatgacgcttcctccgtttctcaaatccactccaaaatctaaaatcgctcgagaatgtaaatta

SEQ ID NO: 8562 - DNA, 438 bp, Arabidopsis thaliana
  unsure at all n locations
  Clone ID: LIB24-016-Q1-E1-D1
ggacaacttgtagaagagaagaaaaaagacatgaaggagattgaggagctttgttcagttaagtcagaggaacttaatcagttgatggaagagaaggagnnnnnnnnnnnnnnnnnnnnnnnnnnnnnnnnnnnnnnnnnnnnnnnnnnnnnnnnnnnnnnnnnnnnnnnnnnnnnnnnnnnnnnnnnnnnnnnnnnnnnnnnnnnntcagagaggaagaaactcgaaatcaaatgtaatgagttggcaaagcgcgaagtgcacaatggaaccgagagaatgaaattgtctgaagatcttgaacagaatgcatctaagaatagctctcttgaactagctgccatgggaacancaaaaaggcagacgaggaagttaaaaaacttgctgaagancaaagggaggcaaaaaggagggancttcatgngaaaatcataagga

SEQ ID NO: 8563 - DNA, 434 bp, Arabidopsis thaliana
  unsure at all n locations
  Clone ID: LIB24-016-Q1-E1-F1
gctgatctcctccgttccaccgccgtgttgcatgcggcggcgataggtcctatggtcgacctagggacgtgggtcatgagctctaaacttatggacgcttcggtgacgcgtggcatggttttagggcttgtgaaaagtacgttttatgaccatttttgcgccggtgaagatgccgacgcagccgctgagcgcgtgagaagcgtttatgaagctactggtcttaaagggatgcttgtctatggcgtcgaacacgccgatgacgctgtatcttgtgatgataacatgcaacaattcattcgaaccattgaagctgccaaatctttaccaacatctcactttagctcatggttgtgaaagataactgcanttgtccaattagtccttctgaaaacgaantgaacgatntgctgccggtggggaatacaaaaanccga

SEQ ID NO: 8564 - DNA, 435 bp, Arabidopsis thaliana
  unsure at all n locations
  Clone ID: LIB24-015-Q1-E1-A7
gctctcacccctaggttcttaagtcatacccattttcaaggacaccttagaaagtttcgagttttctattaggtgtattgatcttgaagccttaaagtttgtgtctttttgttaatttgaataaagtttgatgggaggagggaattccaaagaagagtcgtcatcaccatcttcatcatcatgggcttctcatcaaagttatcctcaatatggacctgatagctacaactannnnnnnnnnnnnnnnnnnnnnnnnnnnnnnnnnnnnnnnnnnnnnnnnnnnnnnnnnnnnnnnnnnnnnnnggcttccagttatggccctcagtatagtcaagagggttatgcatcacagcctaataatcctccaccacccacttatgctcccgctccatctccggcttccagttatggccatcagtatagtcaagagggcta

SEQ ID NO: 8565 - DNA, 435 bp, Arabidopsis thaliana
  unsure at all n locations
  Clone ID: LIB24-015-Q1-E1-A8
gcggacgcgtgggctttggcccaccttacgagtggcaagtgtacaatacgctcaatagctgttatggaattcctgctgtacatcataagggtcgtcaaggagatttttacattctggtcatggacatgcttgggcctagcctttgggatgtttggaattctttggctcaatcgatgtctccaaacatggtagcatgcattgcagtggaggcgatatctattcttgaaaaactgcatatgaaggggtttgtgcatggagatgtgaaaccagaaaactttttgcttggtcagcctggaacagcagacgagaagaaactataccttatcgatcttggtctagcatcaagatggaaagattcacactctggccagcatgttgaatatgatnaaangccanatgtatttaagaggaacaataaggtatgcaagttgccat

SEQ ID NO: 8566 - DNA, 438 bp, Arabidopsis thaliana
  unsure at all n locations
  Clone ID: LIB24-015-Q1-E1-B1
gaaaaatccaatttttctttgtttcagtcctctcttctgctcattgatcttttaattaactttgattctctccgtttatggattaaccatttgatcgagataactctccaagaaatcgactgagttcgtaacttgttgttgtcngatcttttaaagattcaaccttttttggtccgatcatggctgttgctgagaatgctggtgtcaaagtggactcttctggtcagaatttagacancaacaacactgctgcttcagctaccgagacgacaaagccgccatgtcctgatgatgatcaaagccctaaatctgactcatccactcctcttaccatcgattcgactcctgaaactgacgatcggatcaatganactgctcaaaaggtcagacttnaaatgggttagtggaaaatngtgaagaagagatcnccatggaaga

SEQ ID NO: 8567 - DNA, 457 bp, Arabidopsis thaliana
  unsure at all n locations
  Clone ID: LIB24-015-Q1-E1-B12
ttcangggtcgacccacgcgtccgaaaaaaacagtgccctttcgctcacgctttgagtcgtatctgctctcttcttaatccgccgtctctcactttttcgccggcgtggttaagatcgtacaaagctcaagagaagaaatgttggggaatcttgaaggcaaaagagccatccgatgggaacttcgactccttaaggaaggaacgccgaattcgcattgggtttcngcaaaggaagctatgcacctgggtgcaaaagagatgacaagtcagagatgcnctaaattcggcaattgatnaggaaatgtcngccgatcctaaagtatttgtcaagggtgaaaaggttggccaaatntaagggngcctacaagnttactaaaggccttttggganaaatatggcctgaaananttacgatacccctattactgagggctgggtttaccgggaattgganttg

SEQ ID NO: 8568 - DNA, 399 bp, Arabidopsis thaliana
  unsure at all n locations
  Clone ID: LIB24-015-Q1-E1-B2
cggtttttatattagagtaatgtggtttattcaatctgtgttgcagatgtgtcataagcatggagtaatgcacagagatttaaaacctgagaacttcttgtttgcaaacaagaaggaaactgcatctttgaaggctattgattttggtctctctgttttctttaaaccaggcgagagatttaacgaaattgttgggagtccttactacatggctcctgaggtattaaggaggagttatggacaagaaattgacatttggagcgcaggagtgattctttacatattgctctgtggtgttccacctttttgggcagaaaccgaacatggagtcgcaaaagcaattcntaaatctgtaattgactttaaanagagaccctgggccnaaagttctgataatgc

SEQ ID NO: 8569 - DNA, 434 bp, Arabidopsis thaliana
  unsure at all n locations
  Clone ID: LIB24-015-Q1-E1-B3
gcttgggtttgacccaagtttgcttctttctatgattcatcaatctagatcttgctatctgggtccagaaacgattcacgcgcttcattcatgatataaagttactaccttttttttattttaccttctgggtcatggttttgtctgcttttcgtcttttgcttttgtctggatgattcataatctctcgagatctattatgttcacaagagttgttcttatgcgtggtgagatgatcttaggagtgtttcactatctttcttcaattcgggtttttagtttctgagatctgtttttgaagaatctgatctgagtttgaggaagtttgactaaatagatcgaagaagatgtttaagcagatacttgggaagcttcctaagaaaacttctgctaagttttgggataatggtgaatcccaaactcnagataacaac

SEQ ID NO: 8570 - DNA, 416 bp, Arabidopsis thaliana
  unsure at all n locations
  Clone ID: LIB24-015-Q1-E1-B5
gattcatttgaaaagagataaagatgtgataagttacataagtaatagtcggttttgatacaatggagatgatcaaggtccaaggacatggagctgagcattccatctcgtattggttttggaaattgaagaaatcgaagatggtgaaagtaaagtcgaggatggaaacaagggcgatgaggatgaaggagaagacacaagttattgaaaacaagatcattcatttttttttcagagaactcttttaagaaaactttaacaaaaagtaaaacacaaagctctcttgttaattttttggaaatttaatcataaaaaaatggagagagtccttggagaggctctctccactggaggtgctctgatactcttantatatttaacattcgttttattcaaaaaaagtcncaaaaaaaang

SEQ ID NO: 8571 - DNA, 409 bp, Arabidopsis thaliana
  unsure at all n locations
  Clone ID: LIB24-015-Q1-E1-C10
ggaaacagatactcctactcctgcaaagaaagtagagaaagtgtcaaagaagaacgaggaaggtgtgattgttaacaggtacagaccaaaagagccttacactggaaaatgccttctcaacaccaaaatcacagctgatgatgctcctggagagacctggcacatggttttcagccatcaaggagaaatcccgtacagagaaggacaatctgttggtgtgattgcagatggaattgacaagaatggaaagcctcacaaggtcagactttactccattgcaagcagcgctcttggagatctcggcaattctgaaaccgtttctttgtgtgttaaaaagacttgttatacnaangaccaaggagagactgtttaanggagtttgctcaaatttcctgtgtgaattggcncc

SEQ ID NO: 8572 - DNA, 451 bp, Arabidopsis thaliana
  unsure at all n locations
  Clone ID: LIB24-015-Q1-E1-C12
gcccacgcgtccgaacgcctctctatctcttcgccgtgaatgtcgagatagtcgtaagctctctgcttttcaaatttctctcaaattgaggtaganagagagggcacagagatagagagagaggggcataggaaacggtgattttcccagttcccggaggaacaatcggctgatttctctgtaatcgaanaatctaaacctcacccactcgaaatcagctcgtgggttttggggggtctctattaatttccaaattctggagaaaaatcttgtanttcttcangangtttggggtgtgattgtttttactggagcagaaggaatcnccganttggattccggaatcgtcngagccaaaagcccttccattttcngggnccnncntccaaanttgggccgcaagggtaaaagggttttggccacaagggnngaatttaccccaatgganaaa

SEQ ID NO: 8573 - DNA, 415 bp, Arabidopsis thaliana
  unsure at all n locations
  Clone ID: LIB24-015-Q1-E1-C2
tggcaaatgactctattggtgaggaagtccagaagttggttgcaggactacctgaaggtggtgttttgctcttggagaatgtgaggttctacgccgaggaagagaagaatgatcctgaatttgcaaagaagcttgctgctcttgccgatgtttacgttaatgatgccttcggaactgctcacagagctcatgcttccactgagggagttgccaaattcttgaagccttcagttgctggtttcctcatgcagaaggaacttgattaccttgtcggagctgtggcaaaccccaagaagccttttgctgccattgttggaggctcaaaggtttcaacaaagattggtgtcattgagtctctcttgaacacagttgacatcctcctgctccgtggaggtatgaattttacttccacaan

SEQ ID NO: 8574 - DNA, 439 bp, Arabidopsis thaliana
  unsure at all n locations
  Clone ID: LIB24-015-Q1-E1-C3
gaaagaaaggtatcaagtaacagatatgaggaagctggccaacagaatggcgtttggtacacctgaagagagctccctcggtgatggactaggagaaggttatggaatgcttggccaggcaggaagcaacaggctgcgagtatccagtgttccgagcaagctcttcgccttcctaaggtcgccaaaaagcttaaagaaaggcagtatgcgggtggtgcgactacctctggtttgacatcgagcctggctttcactcctgtgcagggaatagagttgtgcaatcctcagcaggctttaggattaggaagtgggactcaaagcacttacttctcagagtcaggaaccttctcgaagctgaagaagatctaaaatatggaagacagagatacaagtcntgaaaagccgagcactaaaaagtgttaaaatgaaacaaaggtgg

SEQ ID NO: 8575 - DNA, 433 bp, Arabidopsis thaliana
  unsure at all n locations
  Clone ID: LIB24-015-Q1-E1-C7
gaacaacactagaaatttcactgagagaaacttaccatgtctgaaatatcatcttccatgcctttaacagagagagtttataatcatctttgtctgtccgatgtttctctggccttgttgggactgtttgttttctgttgtgtgcgtgagaaggttactaaaaagctggggccaacgatatggcctgtgttcggaattactccagagttcttctttcacaggaatgatgtttatggttgggctacaagatgtttgaaaaaatgtcgaggtacctttctctataacggaatctggcttggtgggtcgtatggagctgtgacttgtgtccctgcgaacgttgaatacatgctcaagactaacttcaagaacttcccaaaaggtgcgtttttcaaagaacggttcaatgatctgctcgangatggtatcctcaatg

SEQ ID NO: 8576 - DNA, 426 bp, Arabidopsis thaliana
  unsure at all n locations
  Clone ID: LIB24-015-Q1-E1-D10
cggtggagcattagtcaggaaacgagtactctcccccttaaatactcttttccctgtcaaattcagaggtgacctgcatgatatcagctgtggtaaccaccaacaaattacttattctggtcagtctaatggattctgcaactctgtcgcacaagatcacataaaggctaatacccctagtaggttacatctctccactactcctacaaccacaagttgctgggagtggaagaatgtctcaaacagtggtagactctcgtctatggtcttcactgatggtccattgcttgactctgtanatctccgccaacccgtcaaaggangtgaggtttgcttanattccccactatatgaaacgtctagcacacccaataagcccttaactttgtgataangaaatatctgtctctccggccgctttgtcng

SEQ ID NO: 8577 - DNA, 435 bp, Arabidopsis thaliana
  unsure at all n locations
  Clone ID: LIB24-015-Q1-E1-D3
ggaagaaacagagagcattatcaattattaacaattacacannnnnnnnnnnnnnnnnnnnnnnnnnnnnnnnnnnnnnnnnnnnnnnnnnnnngctttggccacgacggcaccgttagctccggtcaccagtcagcgaaaagtacggaacgatttggaggaaacattaccaaaaccatacatggcaagagcattagcagctccagatacagagcatccgaatggaacagaaggtcacgatagcaaaggaatgagtgttatgcaacaacatgttgctttcttcgaccaaaacgacgatggaatcgtctatccttgggagacttataagggatttcgtgaccttggtttcaacccaatttcctctatcttttggaccttactcataaacttagcgttcagctacgttacacttccgagttgggtgccatcancatt

SEQ ID NO: 8578 - DNA, 436 bp, Arabidopsis thaliana
  unsure at all n locations
  Clone ID: LIB24-015-Q1-E1-A5
gatcactctaaaatatctcccaccacataccacttaacccgacccgacccgaccggaaaacccgacccgatccatcccaatgtcaggagctaccaccgcttcctccggagaccacaacaacctccgtctcccaactccgacgcttgacgccgaatcgcaaactctgctgcaatcgatttctgctgaagggggttacgcttatgctcgcatggcggtgttagcggtggccggtgaccaaagcgcggcggaggcggcgcgtgatatggcttgggagcaacttcactctggtccgtggcactcggttctccccgtttggcgcgacgcttactcaatggcttgtctccacgtagctaaaatccatttcgccgccggcgagtttggtgangcgcttggtgcgcttgatatgggtcctatcaagggaagtatgcctctccnc

SEQ ID NO: 8579 - DNA, 482 bp, Arabidopsis thaliana
  unsure at all n locations
  Clone ID: LIB24-014-Q1-E1-F6
tccgcgccgtaccggtcaaanaatcccgggtcgncccacgcgtccgggatgtcgcttctgctcggagcatctcttcacatccttcatattatggaaaaccgatttgttcatcacaatcatcgttgattcggatttcgagggataaagtttgttgctttggtcgcatttctaatggcatgacgagctttactacttcccttcatgctgtcccgagtgaaaaatttatgggcgaaacaagacgtactggcattcaatggtctaaccgctctttaagacatgatccttacagatttcttgataagaaatcacctanatcaagtcaattggcaagagatatcactgtgagagcagatctttcaggagctgcaacccctgactcntcttttcctgaaccanagattaagttgagctcaanactcagagggataatcctttgtgttgttgcnggcanttcggcacntttcccattggcntgatgataa

SEQ ID NO: 8580 - DNA, 460 bp, Arabidopsis thaliana
  unsure at all n locations
  Clone ID: LIB24-014-Q1-E1-F8
gcggacgcgtggggtgaatttagaggtcataaaggcaatagttactgcagaagaagtgttgttgttggatcctctccgtcctgaagttcttccattcgttgaacgactaaagcaacagtttcctcagaggaatgggaatgaaaatgcactgcaagcttctgcgaatgtacaatctcctcttgatccagaagctgcagagggtttgcagagtgagcttccttttgagtttcaggtcctggagattgcacttgaggtcgtctgctcatttgttgataaaagtgtggctgctcttgagacagaagcttggcctgtccttgatgaactcactaagaatgtcagcactgagaatcttgaatatgtacgaagtttgaaaagtaatctcaaccgcntgctaactccgtgtacaaanaggtganagatgaacncgagcattttgttanatgaccacgaaagacattng

SEQ ID NO: 8581 - DNA, 488 bp, Arabidopsis thaliana
  unsure at all n locations
  Clone ID: LIB24-014-Q1-E1-G1
tttctggcnccaccggtccgaaaatcccgggtcgncccacgcgtccggaaaatatgagcgaagaactaagtcaaaagccatcatcagctcagtctctgtcactgagagagggcagaaataggtttccttttctgtccctgtcacagagagagggcagattttttccttctctatctctttcagagagagatggaagaaagttttcttttctcagtatgttctcttttctcatgccactgttggaggttattaagattattattgcttctgtggcctccgtaatcttcgtcggtttcgcctgtgtaaccctcgctggttctgccgcagcattagtcgtaagcaccccggttttcatcatatttagtcctgttctcgtaccagctacgatagccacggttgtcttgggcgacaggattcacggccggtggctcttttggacgacacacttggcccatcatgtggctngttaaacgtaggatgggaantaa

SEQ ID NO: 8582 - DNA, 469 bp, Arabidopsis thaliana
  unsure at all n locations
  Clone ID: LIB24-014-Q1-E1-G11
ctgtttacattgnccggcgccggtccnnanactaacgggtccacgcacgcctcnncagncactngngangtccagcaaaatccgcttcctcctccgtcaatttcgtagatgaagatggcggtgacgtcactgcttcgtggcttttagctaaagaaggaatcgaaatcactaatttgttctccgatcttgattatccgaagattgaggtaacgtcggaggagaatagctccggtaacgacggagttgttcctgtgcagaataagttgtttcttaacgaagattacttcaatttcgatctctctgcttccaaaatttctcaacaaggattcaatttcatcaaccaaactgtttcgacgaagaacgatagatgtaccgttggtgcctgaaagtggaagagtgacggccgagatgacgaanaccgagacgccagctgtgcagttatcaccggcggagaaggaagcaanggttt

SEQ ID NO: 8583 - DNA, 494 bp, Arabidopsis thaliana
  unsure at all n locations
  Clone ID: LIB24-014-Q1-E1-G2
ttttctggcgncacnggtccgaaaatcccggggtcgncccacgcgtcngtcnacgtttgctccgcttaagcaccatgaangtcaccgtcgtctcccgcagcggcagagaagtcctcaaagctccccttgacctccccgattcggcgactgttgctgatctgcaagaagcgtttcataagagagctaagaagttttacccgtcgaggcaaagactgactcttcccgtgactcctggatcgaaggacaaacctgttgtcctcaatagcaagaaatcactgaaggagtactgtgatggaaacaacaactccttaactgtagtcttcaaagacctgggggcacaagtttcctancgcacactcttcttcttcgagtatcttggccctcncnttaactaccctgtcttttactacttcccctgtttacaaagtttccttgggttaatggngaaggactgtgtgattccaatccgggtccaggacgtnacgcctaatgtt

SEQ ID NO: 8584 - DNA, 414 bp, Arabidopsis thaliana
  unsure at all n locations
  Clone ID: LIB24-014-Q1-E1-G3
cgtantaacaaatgctggtaagatggttctcttggataaattgcttcctaagttgaaagaacgtgattcaagggtgctgatattttctcagatgacaagacttttggatattcttgaggactatttaatgtatcgtggttacttgtattgccgtattgatggaaacactggtggtgacgaacgagatgcctccatagaagcctacaacaagccaggaagtgagaaatttgttttcttgttatctactaagagctggagggcttggtatcaatcttgctactgcagatgttgtgatcctttacgatagtgattggaacccacaagtcgacttgcaagctcaggatcntgcccataggattggtcaaantaaagaagttcaagtgttccgattctgcactgagcctgntattgatg

SEQ ID NO: 8585 - DNA, 453 bp, Arabidopsis thaliana
  unsure at all n locations
  Clone ID: LIB24-014-Q1-E1-G6
ggnataaatttgtcttgagtacttcccttgtagatttttcttatttgcctagcgcttgtttgtttgatgatgcgcacaatatcttttttccaaatttttggttttttctttaacagctttacacaagtttgaaccttcagaaaccatttttgctcaatctcatagacagagagagacaatttacttagctaggttctaatagctcactgtagagttgggttttgactagcagaggaaatttttggtgaagtgtgtggtctcgaaggaaaagctctttatacagatccgaacaagtttgcatttttgtcatctaatcagataatctcgcttatctggaatttgcattattggtgatctgggttttatctgtttantgttgaagcctgttgtccgagtatttagggtcaaattatagtacagtgttgagtgatgtgtggttttaagttggtgctg

SEQ ID NO: 8586 - DNA, 438 bp, Arabidopsis thaliana
  unsure at all n locations
  Clone ID: LIB24-014-Q1-E1-G7
ctgttgaagagagcggaaacgtcgagacctttactgatcttatgaaagaccaagaaaagcacgaggtagctcgggccttctctgcgcttctccagttggtgaacaatggagacgttgatctggaaaaacctgggaactccacaaacgaaccaatgtgttatacagcggttaaaccgttcagtgttcggttgctcaaagttcataacaggaagaatgagaaaagagggatacatttaccccaaaaacgagctaagtccccaataaccaaaggcaaatctcacgagtcaccaccacctaagaagcgaaacacatgttctgtctcaagccagactcggaaagtctcgctaaagatctcaaagatcaacggtgttggtgtaagatgcacaccaaacagtaagaagagacggaaangtcgatntgacgatgtaactgangtaa

SEQ ID NO: 8587 - DNA, 471 bp, Arabidopsis thaliana
  unsure at all n locations
  Clone ID: LIB24-014-Q1-E1-H1
aactgttttcctggccccaccggtccgnaaatcccgggtcgacccacgcgtccgagacaagaacatgcaagtcaccattgcctttaatcactttggagaaggtcttgttcagagaatgccaagatgtagacatggatattttcatgtggtgaataatgattatacacattggcaaatgtatgcaattggtggaagtgcagctccaacgattaacagtcaaggcaataggtttcttgctccaaacgaccatgtctttaaagaggtgactaaatacgaagatgcaccacgaagcaaatggaagaaatggaattggagatcggaaggtgatttgttcctaaacggtgcgttttttacgccttcgggtggaggagcctcttcaagctatgctaaggcttcgagtttgtcggctaaaccgtcctcantggtgggcttcagtcacgtccaatgctggtgcactcctttgtanaaaaa

SEQ ID NO: 8588 - DNA, 411 bp, Arabidopsis thaliana
  unsure at all n locations
  Clone ID: LIB24-014-Q1-E1-H11
gcntcaccggtttctttgtttatcagaatccttttaaatccatcgctgatcaaaatgttctttctttccaacctcaaatcgatcctgagtgtgatttgttcaagggacattgggttccagacaaaagaggatctttatacacaaactcgagctgtgctacgattcccgactcgaagaactgcataaaacaagggagacccgacaaagatttcttgttctggagatggaaacccgatggttgcgatcttccgaggtttaatccaaaggcgtttctcagtatggttcgagggaagaagatgaattttattggtgattctgtggctaggaaccatatggaatctcttctttgcttgttgtcaatggaagaaactcctaaggacatctacaaggatggagaagatagaaacagga

SEQ ID NO: 8589 - DNA, 188 bp, Arabidopsis thaliana
  unsure at all n locations
  Clone ID: LIB24-014-Q1-E1-H3
gcanatactaagagtgaaaccattgttctacctcacatgacagtcatgtttacattttctactttgttcaatatgaacgactaaaatcgaatcgtagttgcctccatttcgtctttaaatttggcttgaacttgtgattaatgattatggatgattcggttttaaaaaaaaaaaaaaaaaaaagggcg

SEQ ID NO: 8590 - DNA, 440 bp, Arabidopsis thaliana
  unsure at all n locations
  Clone ID: LIB24-015-Q1-E1-A10
tgttacgcttgccggtnccggtccganaattcangggtcgacncacgcgtccgtctcattcttgggaactggtaccgctcaatctattgttaagatttgggatgtaaaaagtcaggcaaatgtggcaaagtttggtggacacaatggagaaatcacctctatatcattctctgaaaacggttatttccttgcgactgctgcactggatggtgttaggttgtgggacttgcgcaagttaaagaacttccgaacctttgactttccagatgcaaactcggtggagtttgaccatagcggatcttatcttggcattgctgcttcagatataagagtattccaagcanctagtgtaaaagcagaatngaaaccaatcaagactcttcccgatctgtccggtncagggtaaaagccncaagtgttaaagtttgggactcgaacnc

SEQ ID NO: 8591 - DNA, 441 bp, Arabidopsis thaliana
  unsure at all n locations
  Clone ID: LIB24-015-Q1-E1-A11
gtcgacncacgcgtccgggaaaggtnaaagaatagcnttgtgtgtaactaaagggtttaaagatttgttgcagataggtaatcaagctagacctgatatttttgatcttactgttgcgaaaccgtcgannnnnnnnnnnnnnnnnnnnnnnnnnnnnnnnnnnnnnnnnnnnnnnnnnnnnnnnnnnnnnnnnnnnnnnnggtcgttgattaaaggagtgtctggggagtttcttagagttgtgaagccgtttgatggagaaggtttgaaacctttgttgaagggtttgcttgataaagggataagttgtttggctgttgttttgatgcattcgtatacttatccgaagcatgagatggatgtggagaagttggctttagaaatgggttttagacatgtttcnttgtcctccgccttgacacccaaggttcgggctgttcc

SEQ ID NO: 8592 - DNA, 437 bp, Arabidopsis thaliana
  unsure at all n locations
  Clone ID: LIB24-015-Q1-E1-A3
atcgggaattaacctctcctgcttcaaatcaacatcgttcttctcaccggacctcaattctctccaatcaaagctctctctcctatctctcaaaccctctccaacacagccacggaaatcaacagtcatccgtatgggcggtggtccgagaactttccccggcggtgtatcaaaatggcaatggaaaaggatgcaagcgaagaaacagaaacagcttctcaaagcaaggttatgcagagaacgtcagatctacgagatgcgaaaacgcgccgagctaaaagcggcggtggctgagctagaacgaccatgggaaccgattcataaaccaccgaatctattctcagtttgtgctgatgaagcaagttaaagtactcgcggatnggtttcaagaaacctggtggatttgatttatggactgatagagatggtcctcaant

SEQ ID NO: 8593 - DNA, 463 bp, Arabidopsis thaliana
  unsure at all n locations
  Clone ID: LIB24-014-Q1-E1-F4
gcttcgtcagattcatatagctcaagttccgactcagattcagattcggaatcagaagcatattcatcttcctcctatgagtctagttcttccagtgatgggaagcataggaagaggaagtcaacaacaagacacaaaggccgacgcggggaaagaaagagtaaaggacgaagcgggaaaaagaaagctcggccagatanaanaccaagcacgaatagttcaagtgacacggagagtagcagcagttctgatgatgagaaagtgggccacaaagccataaagtcagtgaaagttgataacgctgatcaacacgccaacttggatgactcagtgaaatcaangatcaggagcccaattcgtaggagaaancataacagcaaggagcaaaagtcctannanggagccctgtnaagaattccttggnaatgggaacagaagtcctagtagggagccctgtganaaa

SEQ ID NO: 8594 - DNA, 262 bp, Arabidopsis thaliana
  unsure at all n locations
  Clone ID: LIB24-014-Q1-E1-C11
gtgcccggtccanaactaacgggtccacgcacgcgtccgcaagacanttgggtgtcaacggttttagctatgctatgaagccttaatctcgaatcgcaacattactaataaagcaagaatcctcgtgatgtgttggtcttgtttgtctttgtttagtttttgtgacttctttaaacatatagtaatatcaaaacgtttgaatttctaatgtagccgttnnnnnnnnnnnnnnnnnnnnnnnnnnnnnnnnnnnnnnngggcg

SEQ ID NO: 8595 - DNA, 495 bp, Arabidopsis thaliana
  unsure at all n locations
  Clone ID: LIB24-014-Q1-E1-C4
caggtccganatcgcgggtngccccacgcgtccggcatcganntcaaaagccctaattcgaaaattcccatttctcaaggtttttaaaagagtattgcaaagatgtcttctgattcgtcccgggaagagaatgtgtacttggccaagttagccgagcaagctgagcgttacgaggaaatggttgagttcatggagaaagttgcaaagaccgtggagaccgaggaacttactgttgaagagaggaatctcttgtctgttgcttacaagaacgtgattggtgctaggagagcttcttggaggattatctcttccattgagcagaaggaagatagcaggggcaacagtgatcatgtttcgattatcaaggattacagangcaagattgaaactgagctcagcangatttgtgatggcattttgaaccttcttgaggctcatctcattcctgctgcntccttggctgaagtccaaagttttttacctgaagatgaaggg

SEQ ID NO: 8596 - DNA, 488 bp, Arabidopsis thaliana
  unsure at all n locations
  Clone ID: LIB24-014-Q1-E1-C8
actttccgcncgtaccggtcaaaaatcccgggtcgncccacgcgtccggttttatgcaggaaacaatctgtactagggttttgattcctataccgggaggactagtggagctctttgcgaccagacatgtcgctgaagatcagaacgtggtggattttgtaatgggacattgcaacatgttgatggacgattctgtaacgataaacatgatggtagcagacgaggtcgaatcgaagccgtacgggatgttatccggtgacatccagcaaaagggttccaaagaagaagatatgatgaatctcccttcgtcttacgatatctctgctgatcagatccgactcaatttcttgcctcagatgagtgattacgagacacaacacttgaagatgaagagtgattatcatcatcaagccttggggtatctcccagagaatggtaacaaggaaatgatgggtatgaacccatttaacacggtggaagaagatngg

SEQ ID NO: 8597 - DNA, 448 bp, Arabidopsis thaliana
  unsure at all n locations
  Clone ID: LIB24-014-Q1-E1-C9
ccanaactcacgggtccacgcacgcctcnnaacnactgnttatcncgaaaacaaagaagatgggcagaagatatggcgtggcacccatctgggaacactcttttctctgtgtacactgcagacgatggggattctcagatatcgatcctaaatctgaacaagacacgcgaggttactttcctggaaaataaacctcacgtaaaagggattatcaacaacataaagttcatgccttgggaaaatacatgctttgtcacagggggaagtgatcacgctgttgtactatggaacgagagtgatgatgaagaaaacaaatggaagtcgaaacctttacacagaaatctacattcagctgctgtaatgggagtggatgggatgaaaaacaagaatgttattttatcagtaggagcanacaaagagaatatacngattttgatgttcaagttgg

SEQ ID NO: 8598 - DNA, 511 bp, Arabidopsis thaliana
  unsure at all n locations
  Clone ID: LIB24-014-Q1-E1-D1
gngaatgtccttctggtcccacaggtccgataatcgcgggtggccncangcntctncanngattncntttnacagatcaacatcacccgcgccggagcagaaactcacactcttcgctctccgccttgcaatcatcgagaaaatcgccactaatctcggaaccctaggtttcatttgggccacggtggttcttctcggtggattcgctatcacgctcgaaaaatccgatttttggttcatcaccatcattctcctcatcgaaggcactcgaatcttcagcagaagccacgagctcgagtggcagcaccaggccacgtggactgtatccggcgtcggaatcagtagcttccgcgtgctccaatcaagctcaatttcacttctcagaaatttaaaacgaatcagcgatgggatctttaagccgatcctcgacaatggattgagagaagcgacgacgagaatcggacgacaagagatntttgattgtcgaacaactctgacatggaagaactca

SEQ ID NO: 8599 - DNA, 448 bp, Arabidopsis thaliana
  unsure at all n locations
  Clone ID: LIB24-014-Q1-E1-D11
ccggtccacaactnncgggtccacgcacgcntccntacanagcactggcagcgagaggtgctatgcttcgatacctgagagtcaacgtcaatccaacaattcaaaaccctagagaatgtgtacttcctttctccattctccttcgtcgtttctccgaggaagttagaggctctttccttgacaaatctgaggtcacagatngagttctctctgtcgtcaaaaacttccaaaaagttgatccttcnaaggnaacaccaaaagccaatttccaaaatgatctaaggttggacagtttggacagtgtggaanttgtgaaggcaatggangaggaaattgggtttgagatccngaaaaatgaaaccaacaagattcagtccaacgatntanccgttgacttantgcctctcancctcaagngaagttaaaagagaaacaaatcctccgtgtt

SEQ ID NO: 8600 - DNA, 418 bp, Arabidopsis thaliana
  unsure at all n locations
  Clone ID: LIB24-014-Q1-E1-D12
ncacgcatccgaaagaatcngaagactcttggaaatgcacgcaaacagcagagaagatgttaaagtggctttgacaggtgacattatcgctcttgcgggtctcaaagatacaatcactggtgaaaccttgagtgatccagaaaaccccgttgttcttgaacgaatggacttccctgatcccgtcatcaaggtagcgattgagccaaaaacaaaagcagacatcgacaaaatggcgacagggttgatcaagctcgctcaagaagacccgtctttccatttttctcgtgatgaagagatgaaccaaaccgtcattgaaggaatgggagaacttcatctcgagattatcgttgacagacttaanagagagttcaaggtggaggctaacgttggtgcaccgcaagtcaactaccgtgagagt

SEQ ID NO: 8601 - DNA, 507 bp, Arabidopsis thaliana
  unsure at all n locations
  Clone ID: LIB24-014-Q1-E1-D4
tgtccnctgcagcccaggtccatgnacncgggtggccccacgcgtcngtaanncangatatacttggaatctcactgataatcacggttcttcaaattgtccgcgtaccaaatcttaaggtcgggtttgttcttctcagctgtgccttcatgtatgacatcnnctgggtttttgtttcaaaatggtggttccgtgaaagcgtgatnattgtggtagcccgtggtgacagaancggagaggacggaattccaatgctactaaagatcccacgaatgtttgatccttggggtggctacagcataattggatttggtgacattatcttaccaggactgcttgtaacnttcgcactgaggtacgactggctggcgaacaanaggctaaagtcagggtacttccttgggacaatgtctgcttatggtccangtcttctcatnacatacntagctctaaactgangggacggacatgggcaancgggctctnctttacaccgtcccattncaa

SEQ ID NO: 8602 - DNA, 495 bp, Arabidopsis thaliana
  unsure at all n locations
  Clone ID: LIB24-014-Q1-E1-D5
ttccgnggccgtaccggtcanntattcncgggncccncacgcgtccncatttgttgtgaacttgcgatacatatatatatagatgcgagtacaccggactgtgaaattttggaacgaattgatttgatttgaatatggcaatcgcgaagaaattggaaaatgagatctcacgctcttctccttcgtcatcancatcatcgctgaacgaagctctgttaatctctactatgtgtatcatcggcttacaagtccatgtgcatatcaacgatggctctgtgttttctgggatattctacactgtctctcttgagaatgaattcagtattgtgttgaagaatgcaaaacttactaagaagggaagaagtaaatcgaatgtagaaagtgggaagattgtggagacacttgtgattttgtcttccaatatgtncaattgttgcagagggaatctcgctttcgtccaaggttcaggggagattgangggtgaaaatgtcctg

SEQ ID NO: 8603 - DNA, 457 bp, Arabidopsis thaliana
  unsure at all n locations
  Clone ID: LIB24-014-Q1-E1-D6
atantgagtcgtactagcatttggatttggaagtgctttttgtanatatatccaacaaaggaatcagatcggagatgtcggatgtttccggtgacggagatttatcggcgacggttactgaacatgaagtaactccacaaccgccggtttcttcggcgacgtatccgtcattaacggtgtcggcgtcttacaaagagagcagcggangtaaaagctcgtcgaagaggagaccaataaggccgagtttcgacgctgcggctgataatgagtttattactttgcttcatggctcggatccagtgaaagtggagcttaatcgactagagaatgaagttagatataangatcgggagttaggagaagcaaacgctgagatnaaagcgcttangttgtcngagagacaaggnagagaaagctgttgaagagctactgaggagcttactaantttgggtgaga

SEQ ID NO: 8604 - DNA, 484 bp, Arabidopsis thaliana
  unsure at all n locations
  Clone ID: LIB24-014-Q1-E1-D7
cgttcgtancggtcaaccattcccggggccncccacgcgtccgtaagtccccggtgcttccttttgggttccacctcctagatnccagtctcatgggatcgctaagctcgttgagaagctggccaatccgatctctgatgaagaatctatttcaatctcatcggttcgaggatggccttgctctgattacttcatcaaaggtgtaaagcctcaatcagttgagacggagatgacttcaaatactgcatatcactccgaggacgaagaataaaccccaaaactcgtcaaggctcttgctcttcaagatttgtagatttatgaacacgaatcaacgaagattcgaatcaccaagagcagctgcaaagacatggtttaaacttttaagataaggtataagtaaagcaaaccntttacagactgatnagattcnanccaatccctantgaaatttaatnnagggaaangtgccgttgccttaancccc

SEQ ID NO: 8605 - DNA, 422 bp, Arabidopsis thaliana
  unsure at all n locations
  Clone ID: LIB24-014-Q1-E1-E10
gcnctcatttcgccatagctgagagcttcttctactttcccttagcttcttttttccttcatttttgttctacccttgcgaatctctgaaatgaaccctcaagctaatgaccggaaggagtttcagggagattgttcggcgacgggagatctcacggcaaagcacgattcagctggaggaaacggaggtggaggtgctaggtataagctgatgtcaccggccaagcttccgatctcgaggtcgactgatatcacgattcctcctgggttgagtccgacttcgtttttggaatctccngttttcatctccaacatcaaagcnagaacccttcccctactaccgggntcctttggttcaagcctncgacaaantgcaacaatttcngctagctcaaagttcttaatacaggcaagggggggttc

SEQ ID NO: 8606 - DNA, 484 bp, Arabidopsis thaliana
  unsure at all n locations
  Clone ID: LIB24-014-Q1-E1-E5
ttccgtgnccgtaccggtcaganaatcccgggtcgncccacgcgtccgctctcctctctcttgaaaaatctataaccgatttctgcaatggcgacttcagattcgaggtcttctccttcatcatccgacaccgaattcgccgatccaaatcctagctccgatccagagacgaattcggagcgtgttcaaagtcaattagagtcaatgaatttatctcaacctagcgaagtctctgatggtagccacaccgaatttagcggtggcggcgatgataatgatgatgaggttgcatcggctaacgggaacgaaggcggagttagcaatggaggtttattgcgtgaaggtgtggcgggaactagcggaggagaggttttgttangggcggaaaatccggtgganatggaagcaggtgaagaaaccaccgagtccgactangtagcggttacgatgganagaagaggaattagcgggcggagctacttcn

SEQ ID NO: 8607 - DNA, 475 bp, Arabidopsis thaliana
  unsure at all n locations
  Clone ID: LIB24-014-Q1-E1-F11
ctgtttaccttgcccgtaccgggtccgaaaattnacgggtcnacccacgcgtccgaaaaactgaggttgcagtagttagtgaaggaacatccccaaatccatttctggctctcctgaatggtcttggaatttttagtgctggcgttcttggtgcactttatgcactggctcggcaagatacaaaagctgctgaggaaaccatcgaatctctaaagaaccagttgaaagacagagaaagagcattggttttgaaggagaaagatttcgaggcaaaactgcagcatgagcaggaagagcggaaaaaggaagtagaaaaggcaaaaagaggaacagttgtcattgatcaaccagttgaattctgcaaaggacttggtgacagaattaggcccgggagctaanttaccgaagaagaaattatgtgagaagcttaaaagatcaaatcgaaagtctggaaaatagtctgtcaaaggctggc

SEQ ID NO: 8608 - DNA, 444 bp, Arabidopsis thaliana
  unsure at all n locations
  Clone ID: LIB24-014-Q1-E1-B8
cggagtagtcactgctgttttctcgtgtacacgagcttcttgtgttcgttccacctcttgaagatgaagaagttcaactacgaaatcgttcttctctcgatctcggatttttctgatcgatggcggttcccacactctgtatcgccgatggaatctaccccactgcttttttctaccggaattcagtccgacgactgacctccgtcgcgcatgatcggtttacgaacccgaaattcggaatcgatggacgtctacggaacggaccgaangtgacggcaacggtgaatccatatacgtacacngaggcggcgcagcccgaagagcggangagtttgacggattttttggtggaagctagagatttcgttagatctgacggccganatggtggtccacctcggtggttctctcccntgggaatgtnggcgcacncgctccagaaac

SEQ ID NO: 8609 - DNA, 435 bp, Arabidopsis thaliana
  unsure at all n locations
  Clone ID: LIB24-012-Q1-E1-G12
gcggacgcgtgggagagaagacatttttatacaaaagagtttatcattatataagtttcaaactttgaagatatggcatcggcttttagatcatccacgaggttgattcttgtattaggtatactgattttgtgttcggtttcttctgtccgaagctggagcaaagaaggtcatattcttacttgtagaattgctcagaatcttttagaagccggaccagcacatgtagtagagaatctgttaccggattacgtgaaaggagatttatcagcattgtgtgtgtggcctgaccagatccgacattggtacaagtatcgttggaccagccatctccattacatcgacactcccgaccaagcctgctcttacgaatactctanggattgtcatgatcaacatggattgaangatatgtgtgtggatggagcaatccaa

SEQ ID NO: 8610 - DNA, 450 bp, Arabidopsis thaliana
  Clone ID: LIB24-012-Q1-E1-G3
gcttctcttgaaaccctagtcttgtatctctgtaaattgtctcatcgattcgagggctttccaaagattcagtcttttgtctgtgtcgtggttatttctgtttaattgtatgtttgttttgatgcctgtgatggtattaaatatactttgagagctttgtctctaggaaaacaaaacaaatctgaggcatttagaatcttctttttttctttggttatgaaatccagtttgaagtttggatgtgaataggtttattttttctaagtttttattacaagtttagtgtgtgtgcaagtgatgataaaaagacagggacatcagattctcctttgggagaagtataatgatgattaagtctagatgggaatctctctgatgcaccttttaaattgttaatgatgtttgttttgtgccggtgatgtatatctattgatgtgttttcatcagatt

SEQ ID NO: 8611 - DNA, 448 bp, Arabidopsis thaliana
  Clone ID: LIB24-012-Q1-E1-G5
gggtttattgtttactgaactagaccggccaaatggtcagccttgttttgatacaaaagagttcgatctagtaaggaacatgatgcaagctgttgatgaagaacggtatgatgaagccgctgagtggagagacaagcttggcaagtttcaggcaaaacgcaaattaaggaaatacacatgacagctcgcagacgggagtgtttttaatacataatttatgtaaataataaagaagccattgccatttgccagaagttgtgatcatgaagaaaaatatctctctcgtatgagatatacttttctctatcgacacttgtgcacgtagttgattctcaaggaacggacaaaataaaaatgttattttataattgtagcgtgatggtgatgtgatgtgtacatatacattaatcttctgtaataatatatggtaagcctacgctttctcaaa

SEQ ID NO: 8612 - DNA, 447 bp, Arabidopsis thaliana
  Clone ID: LIB24-012-Q1-E1-G6
gcggggagaaaagaagggagaagaacctgaacacccggtgaatcgaaattcatgactcggatcttagcccccacgtctccgcggactgtgagctccactcggtcgttcaaggaagcatctctgacgagatcggcggcgtgggcttgcataagattgactctgtcgacggagatggtggcctcaacgttcttcgtactgtgcgcatcctggtagaatccaggcaccgtcgccctccccagtggcatgcctttgtacatgaccgtgaagctggactcaccgtacctgattccgaccttgtttgggttgacggcggtgaagagcatccggatggtgagggagagggaggcggtggttggattcagaacagcgcttgggttggagattcccatgtacaccactgccacttgctgcagatcgaactgcggcttcttcggcttcaccgccagt

SEQ ID NO: 8613 - DNA, 438 bp, Arabidopsis thaliana
  unsure at all n locations
  Clone ID: LIB24-012-Q1-E1-G7
cagcttctctttggccatctcttcttgaagctgctttcttcctcaaattcttttttttccaagattcttctcctttcttcttccttcttccttatttcgatttcgaattttgaattttctcaatggctcaatcgtgtcttaaaattgttcgaatcaacaatctaaggaacagagtgaatcgtcggattttgattctccgacgattcacacggttgttatggagtagaatcgttgcttgtactcctggcaaatctcggagatannnnnnnnnnnnnnnnnnnnnnnnnnnnnnnnnnnnnnnnnnnnnnnnnnnnnnnnnnnnnnnngccnnnnnnnnnnnnnnnnnnnnnnnnnnnnnnnnnnnnnnnnnnnnnnnnnnnnnnnnnnnnnnttacgataatgataacagtcatcggagatcggattctgatttggttt

SEQ ID NO: 8614 - DNA, 448 bp, Arabidopsis thaliana
  Clone ID: LIB24-012-Q1-E1-G8
gcccacgcgtccgcctccttcttcgtcttgttaataagtccaatttgctcggatttcgcttaactttatcgcatttcctaaattgccctcgtcaccactttcacactctctctctccctatggccaccgtcgcgcttcttaggtctctccgccgccgtgaactccacgcagctcacatctctgcatataaattcagttctgctagcgccggcgggaggacgacggagctccgactacacggagtcaaagatatcatcgccgttgcgtctggtaaaggcggagttggaaagtcttcaacagctgtaaacttagctgttgcattggccaacaaatgtgagctgaagattggattgcttgatgcggatgtatatggaccatctgttcctatcatgatgaatatcaatcaaaagcctcaagttaaccaagatatgaagatgattccagttga

SEQ ID NO: 8615 - DNA, 431 bp, Arabidopsis thaliana
  unsure at all n locations
  Clone ID: LIB24-012-Q1-E1-G9
gctctaagcacttttaaatggagaagaaaggccagcatggtacatatgaatcaatgatgactcatcatccgatcctctgtatcattgctttatctgtacttttcatagcaatcgacccctttcacatgagtccaatcgggggtcgtgagttcaaacccgtgaagcatgaggttgctccatataaggaagtcatgggaagctggcctagagacaaccttagtcgactgggtaatcatgggaaactggagttcgtggaccaagtctttggtccagagtcattagagtttgatagtttaggtcgtggtccatacacagggttggctgatggaagagtggttagatggatgggtgaagcaatcggatgggagacattttcggtggtaacatcaaaatggtcaaaggaancttgtgtgagaagtgtgggttcaaca

SEQ ID NO: 8616 - DNA, 438 bp, Arabidopsis thaliana
  unsure at all n locations
  Clone ID: LIB24-012-Q1-E1-H2
ttatcaaaaactgttggttagtaacagaaattgttgcaaatgtaacatattatataagctttctttcactttggtgcattctctctaaataatggcctctattgatgcagtatctgattcttagttttgaaatggtttttgcataaattattgttctaatgcatttttgttttatctccagcatttccaagatcattgatcgttatgaaatacaacatgctgatgaacttagagccttagtaagtaattagctaagaacgtcattctaatattcttctggatgcggtttttggtgttatgaaggatagaagcgctgttcaaagccggagaaacctcaatgttttgaactcgtaacaccgaacttaantctctagaagttacagttantgtgtctactgggaaatacnagaacntcacatccttcctganaatcccttt

SEQ ID NO: 8617 - DNA, 450 bp, Arabidopsis thaliana
  unsure at all n locations
  Clone ID: LIB24-012-Q1-E1-H3
tattatcttggaacttagaaatgagctgatggaaaagtccaataaactgagtgaaatggagtccaagctaaatggtgctatggaagaggtntccaantnnctnntcaaattggaaaccactcncaancttcncnatnnntcgcacacgaattnnncccatttggngaactgcttacatgaagcaaganaagaagcccagacccatctttgtgctgctgatcgtagagcttctcagtatactgcacttcgtgcatcagctgtgaagatgcnaggtctctttgaaagattccggagctctgtctgtgctggtagtgggattgctgattttgctgactccttgcgaactttggctcaagctttagccaactccgttaatgaaaatgaagatgatggtactactgagttccggaaatgcatccgantcctggcagacaaagttaagcttcctcc

SEQ ID NO: 8618 - DNA, 454 bp, Arabidopsis thaliana
  unsure at all n locations
  Clone ID: LIB24-012-Q1-E1-H4
gcggacgcgtccgcccacgcgtccgttattttctctctgcagttttcaaaaactttctcactgttatctgcgtctcttttttggatcaatggcaaacgctgaacgtatgataacgcgcgtccacagccaacgtgagcgtttgaacgaaacgcttgtttctgagagaaacgaagtccttgccttgctttccagggttgaagccaaaggtaaaggtattttacaacaaaaccagatcattgctgaattcgaagctttgcctgaacaaacccggaagaaacttgaaggtggtcctttctttgaccttctcaaatccactcaggaagcaattgtgttgccaccatgggttgctctagctgtgaagccaaggcctggtgtttgggaatactacgagtcaatctccatgctcttgtcgttgaagaactccaacctgctgagtttcctcaattcaanggaa

SEQ ID NO: 8619 - DNA, 447 bp, Arabidopsis thaliana
  unsure at all n locations
  Clone ID: LIB24-012-Q1-E1-H5
gctgaatgagctgaatttcatggctcttaatggaagggctataagagttatgtattctgttcgtgatccaagtctccgtaagagcggagttggtaatatatttattaagaatcttgacaaatcaattgatcacaaagcacttcacgagacattttcagcctttggtcccattctatcttgcaaagtggccgttgatccctctggtcagtcgaaaggctatgggtttgtgcagtacgacactgatgaagcagctcagggagccattgataaactgaatggaatgcttcttaacgataagcaagtttatgttggacccttttgttcacaagctgcagagagatccttcgggtgagaaagttaagttcactaatgtttaagtcaaaaatctctccgagtccttgagtgatgaagagcttaacaaagtttttggagantcggagtgactac

SEQ ID NO: 8620 - DNA, 258 bp, Arabidopsis thaliana
  unsure at all n locations
  Clone ID: LIB24-012-Q1-E1-H8
tcatcttgagatggtgatgaaactcttaagatcctcctcttctgcttctctttttatttgccgtgtcataatgaaaattgcatattcagatgggcctgtgtgttgagtaagtggacctgtgtccagagagttgattgagatgggcttcattttaggcccacatgtttatcgatcaggttcattctcttcattatatgaaagtgtcctatatcgcaacattctcttcnnnnnnnnnnnnnnnnnnnnnnnnnnngggcg

SEQ ID NO: 8621 - DNA, 447 bp, Arabidopsis thaliana
  unsure at all n locations
  Clone ID: LIB24-013-Q1-E1-A1
gcggcgatctagtttccggctatcaattcagttttttcagctaaaggtttgatttttcgaaattcgaatttctggggaaagtagaactcgcactcgcacttgctcctggacaacgtgagagatagaatcgaatcgaaaaggacgaaaaaatgtcatatgaaagcaaaggtttttgggttatgaagaataatgagcatacaagtgaggaagattcagtgtatgatcattcaacaagagatgattcaaagcgtcctcatccttggtttgttgattcttctcgttcagagatgttcccaaacaagaaacaagctgtgcaagatcctgttgtangattaggaaaatcaaatgttggtcttcctttgtgggaaagctcatccggtttttcaatccggtttctaaccagtttatgggatcggcttccaaggagctgaaatgcctccaaganct

SEQ ID NO: 8622 - DNA, 453 bp, Arabidopsis thaliana
  Clone ID: LIB24-012-Q1-E1-G1
gctcatcttctctggcagaacagaaaacgatgactaacttctcccgatccaaatccaccggaactatcgggttcccggagtttaaacccactcgacccggtccagacaaatacgagaacatccacaacgatgacgacgagtacgaagaaggacatagcactacgagtacagactactacgacgcttcaacgccgttgagctcacacgcgtcaagatccgggaacgggtccggctcgggtcagttaacggtcgtagaccttcttgcggcggttctgaggaagtcgttggtgatgtcgtgtgcgatggagagaggggaagatgacgtggtggcgtctatggatataggttggccgacggaggttaagcacgtgagtcacgtgacttttgatcggttcaatggttttcttggtcctccttctgagctcgaaccggaggttcctcctcgagctccta

SEQ ID NO: 8623 - DNA, 455 bp, Arabidopsis thaliana
  Clone ID: LIB24-012-Q1-E1-D4
gcttcaggtaggttcgttgctcactcacgtcacgccggagaagacacatcggagatcgacaaatcgattcagagagagagagagatagcaattttcttctgtagtgttactttctgagagagtctggagagatcggtgttgagatttgggtaaatggaaacgagggagagagatctagaacgattgatcccgatgcataaatccggagcttctcctcgcgacgtcgttttgtctgttccgccgtctcctctcgcttctccgatccacgtcgccggcaaagaggcgatttacaaagtcattagaagctgggcctccaaaaagttcatgaccggatgtgtcattctgctaccaatcgctgtcacattctacttcacgtggtggtttatacatttcggttgatggattcttctccccgatctatactcatctcggaatcaatatgttccggtcctggg

SEQ ID NO: 8624 - DNA, 451 bp, Arabidopsis thaliana
  Clone ID: LIB24-012-Q1-E1-D5
gcccacgcgtccgaaagttctaccaagtactccttctgattggcaaaacgaggatgcaaattccatgggaaggagttctatgaatgatgagaattcaacgcagcaagatggcacaaccatgagagaaacccagagcatgctattggaaagaatagctagtgaaatgaatcggctcaagttctatatggctcatgcacagaacctgcctttcattgagaacatggagaagaggattcagagcgctagtgtgttattggatgctagcctaggtcattgcttcattgatgggctaaacaacagcgatacaagtgtcctttacaactgcttacgtgcatatgctgccattgataacaccaacgctgcagaagaaattttccgtacaacgattgtagctccatttattcagaaaattattacacatgaaacaacaacgaatgctgctgggaacatc

SEQ ID NO: 8625 - DNA, 443 bp, Arabidopsis thaliana
  unsure at all n locations
  Clone ID: LIB24-012-Q1-E1-D6
nnnnnnnnnnnnnnnnnnnnnnnnnnnnnnnnnnnnnnnnnnnnnnnnnnnnnnnnnnnnnnnnnnnnnnnnnnnnnnnnnnnnnnnnnnnnnnnnagaaaaaaacaaattgcacaccggtggtctcagtagacagagttttcctaaaggattcgtgtttggaaccgccacgtcagcttatcaagtcgaaggcgagactcatcaagacggtcgtggcccaagcatttgggatgccttcgtcaagattcctgggaagatcgccaagaatgccacggctgagataacagtgggaccagtatcaccgttacaangaagatgtggatttgatgaagaaactgaacttcgatgcttacagattttccatttcatggtccaagatattccctgatggaagtggtaaaagtcaactggaaaggagttgcttattacaatagattgattga

SEQ ID NO: 8626 - DNA, 450 bp, Arabidopsis thaliana
  Clone ID: LIB24-012-Q1-E1-D8
gcccacgcgtccggaagattaataagatgattaggaaacaaatcaaagacacaactggttcaaactggtttgatatgcctgcaccaacaatgactccggagttgaaaagagatcttcagttgcttaagttgagaactgtaatggatcctgctgtacactacaagaaatctgtgtcacggtcaaagctagctgaaaaatatttccagattggtacagtaattgaaccagctgaagagttctatggaagattgactaagaagaatagaaaagcaactcttgctgatgagttggtttcagatcccaaagtttctcagtacaggaagcgtaaagttaaggagattgaggagaagagtagagctgttacaaataagaagtggaagaaaaagggaaaccaaaccacgaacaaaaagcaaagaaggaactgatttacttttgttaagaatatgatta

SEQ ID NO: 8627 - DNA, 417 bp, Arabidopsis thaliana
  unsure at all n locations
  Clone ID: LIB24-012-Q1-E1-D9
gaagaagagacttcaggttcctaccttgttatggctgctcgaatgtcagggatctcaagcaaattttcttaatcgggatatcccagatgcaggtgtagagacggaaaaaaacggtgaccctgtggtttctgtgaggttctggaagctttgtgttgatcctcatttactacacgaagctttcttgttagaaaattttgacatatttgaatggtcaaaatctaaaccattggaagattggagcgatatgtacagagaagtaatcaggaagaatgagctctatgtgccatgcaatcaagatggtcgaagtagtaatgaggtggcttcacttgcaaaccacgcttcaaattcttcaccaaaagctgcggtaactgccaatgaaaactctgcgttccaaaaccccaaagaaatccntaagag

SEQ ID NO: 8628 - DNA, 460 bp, Arabidopsis thaliana
  unsure at all n locations
  Clone ID: LIB24-012-Q1-E1-E1
ggaatcatatgcnnnnnnnnnnnnnnnnnnnnnnnnnnnnnnnnnnnnnnnnnnnnnnnnnnnnnnnnnnnnnnnnnnnnnnnnnnnnnnnnnnnnnnnnaattnnnnnnnnnnnnnnnnnnnnnnnnnnnnnnnnnnnnnnnnnnnnnnnnnnnnnnnnnnnnnnnnnnnnnnnnnngtgaggccgtgccctagaagaagaagaagaagaagcccctttctccgggacttcaatccctaacttccgtcgccggatttctcgtccttgattatcggaggactctttaacaactttattccgatttcagattcccaagatttgtaaagctgctttctcctttctgggtaattcctccttttgtatttgcttaagtaatttcgatgatttaacctacttggtgaagggttttggatgcctggggttatggtttaatggctgtttaaattaaagggactggat

SEQ ID NO: 8629 - DNA, 429 bp, Arabidopsis thaliana
  Clone ID: LIB24-012-Q1-E1-E12
tgggtcaggtagagaaacggccgatttctaccatcgtcttcatcgttgctatgcaaaaggaagctcagcctctgatcaacagattacgcctcgttgaagaagttaatactccgtttccaaaagaggtgacttggattatgtttaagggaatgtataaagacttgaacatcaatatagtgtgtcctggaaaagattcaactcttggggttgagagtgttggcacagttcctgcatcactcgtgacttatgcttccattctagcaattcaaccagacttaatcattaatgcgggaaccgctggtggctttaaggccaaaggagcatgtattagcgatgtttatgttgtctctactgttgctttccatgacagaagaatacctgttcctgtccttgatatatatggtgttggtatgcgggaacaccctcccc

SEQ ID NO: 8630 - DNA, 69 bp, Arabidopsis thaliana
  Clone ID: LIB24-012-Q1-E1-E2
gaatttttaattttgtattattattcttaaatattatattttgaaatccaaaaaaaaaaaaaaagggcg

SEQ ID NO: 8631 - DNA, 456 bp, Arabidopsis thaliana
  unsure at all n locations
  Clone ID: LIB24-012-Q1-E1-E3
gcttctaacggcgcctcatcggtcgtcaagccttaccttctcatcccagctttgatggcatggcttgtggtttctgtttctctgattgttatatggttggcttctttctgcaaaatattcttccgagcaacatctatctccggagctgctattcttgatgatggtaaaacccctcagaagaaaaatgtactgtttgttatcgcacatcctgatgatgaatcgatgttcttttctccaacaataaactacttagcttccaatgcttgcaatcttcacatgttatgcttgtccactggtaacgctgatggtatgggaagcattaggaacaatgagctgcatcgggcatgtgcggtgctcaagggtccgcttcaacaattaaaagatcctgaaacaacctaatttgcangatggntttgggcaaataatgggagccacgaatttgctaaacagagatna

SEQ ID NO: 8632 - DNA, 442 bp, Arabidopsis thaliana
  Clone ID: LIB24-012-Q1-E1-E5
gagagaatcggagaagaagatgggaacggcggtgggacagtggctagaggaagcgcttgttgacctctgccgcaaaccagagaccggtttgaatttcgatcgtgatgtcatctccggtttagtctcctattgcgatcttgctcagcctgtcgatgccaaggaatatctcgacaatattattggaaaagaaggcaaaagcatcattgcagaatatctacagcgaagaggatacaaagatccatctagccatgtagcagccagttcaggtccagaactgcaaatgtatgttaagccaaaagtggataatggtgcttctagtggaaccaagaaaccgtttaaaacaccaaaagagggaacatcttctaatcagcaagctggaactggggaaattaacaactcccgcccaacaagttaatcctaagaagaaaaaaggtggaaaggt

SEQ ID NO: 8633 - DNA, 443 bp, Arabidopsis thaliana
  unsure at all n locations
  Clone ID: LIB24-012-Q1-E1-E6
gcccacgcgtccggcagcggatttggtgttgggtggagatgaaggagatgagtgtactttcccaaagggttacatgaaaaggcaagcaattttctcatgcattacatgtacaccagaggggaatgctggaatttgcactgcttgttgcttatcttgtcatgatggccatgagcttttggagctgtggactaagagaaattttcgatgtgattgcgggaactcaaagtttggaactttggcttgtaagcttctcccgagcaaagatatanaaaactctgaaaattcttacaaccataatttcaaaggcttgtactgcacttgcgaccgaccttaccctgacccaaatgtggaagaacaagtanagatgattcagtgttgtccctgtgaagattggtttcatgangagcatctcggtctcacaccttcagacantgttggtaacc

SEQ ID NO: 8634 - DNA, 430 bp, Arabidopsis thaliana
  Clone ID: LIB24-012-Q1-E1-F11
gaagaagatgtcttacaaaccctaatttctctcacgccttcagaaccagccctgttcttattgtattcaatgtggtgattcgattcaaggcattggagctgctaaaatggctgctgttgatttgatctaacgtcttgagcttacaaattttctttctttgggattcaatttcaggctgcgaaagtgtttcatgaagctaacccaccaaatctgagcttagtataagctaaagattcaaactttgatgaagcttttcaattggggaagtataagggacgatgaggtttgatggataggagagtttcttggttacatttgaaatgagtcggtctccatcgttttctgtgaagcctgagctaagtataaagcctgatcctgagtcattgaaacgatggattcatgcattttgcattatgaagtttgatcttga

SEQ ID NO: 8635 - DNA, 506 bp, Arabidopsis thaliana
  Clone ID: LIB24-012-Q1-E1-F2
ctggttccctggccgtaccggcccggaaattcccggagtcgacccacgcgtccggtacaaatcaacggtgttcccaatttgctgtctgttgtttgccttgttcgatcgcggtaatgctctctatggatcttcgtcgcctgtgcttcaactcactccttctaatttcaagtctaaggttcttaattcaaatggagtcgttttggtagagttctttgcgccatggtgcggtcattgtcaatctctaacaccaacttgggagaaagttgccagtactttgaaaggtattgctactgtggcagccattgatgctgacgctcacaagtctgtctctcaggattatggtgtgaggggtttcccaaccattaaagtattcgttcccgggaagcctccaattgattaccaaggaacaagggatgccaaatccatttctcaatttgctatcaagcagataaaggcactgttaaaggatcgtttggatgggtaaaacaagtggcacaaaaaatgga

SEQ ID NO: 8636 - DNA, 490 bp, Arabidopsis thaliana
  unsure at all n locations
  Clone ID: LIB24-012-Q1-E1-F6
ctggaggnacaggtccggaantcncgggtcgacncacgcgtcngcggacgcntgggaannnnnnnnnnnnnnnnnnnnnnnnnnnnnnnnnnnnnnnnnnnnnnnnnnnnnnnnnnnnnnnnnnnnnnnnnnnnnnnnnnnnnncttctctatctcaatctccataaccaacaaattatcgaagctcgaaatccatctcaatttacgaccaacccatcccctgacgtctctataccggaaatcaaacgtcacctccaacagtacggttacctcccacaaaacaaagaatccgacgacgtttcgttcgaacaagctctcgttcgttaccagaaaaatctcggtctaccaataaccggtaaaccggattccgacacgttgtcacagattctattaccaagatgtgggttccctgatgacgtggaacccaaaacggcaccgtttcacacaggaaaaaaatacgtgtacttcccggacggccaagtggacaaga

SEQ ID NO: 8637 - DNA, 456 bp, Arabidopsis thaliana
  unsure at all n locations
  Clone ID: LIB24-012-Q1-E1-D2
gggggaaacaggtcctattcactggacagatgatgagagatctgcctttatacagggtttttcgctttttggcaagaattttgcttcaatatcaaggtacgtcgggacaagatctccagatcagtgtaaggttttcttcagcaaagttcggaaatgtcttgggttggaatctataaagtttggatctggaaatgtaagcacatccgtaagtgttgataatggcaatgagggtggtgggagcgacttggaagatccttgtcctatggagagtaactctggcatagtgaataatggagtttgtgccaagatgggtatgaattctcctacctcaccttttaatatgaatcaagatggtgttaatcaatcaagctctgcaaatgtgaaagccgaccttaatagattaagaagaaagagaatgggcanaaatatttgtgtccgaaaagatgataataatcn

SEQ ID NO: 8638 - DNA, 432 bp, Arabidopsis thaliana
  unsure at all n locations
  Clone ID: LIB24-012-Q1-E1-F9
ggattctggaaacaaagttaacggcgaagctgtgaaaaaagggtacgtgggaatacacagttctggattcagagacttccttttgaaaccggagcttctcagagctattgttgactcaggatttgaacatccatctgaagtgcaacacgaatgtatccctcaagctatcttgggtatggatgttatctgccaagcaaagtctggtatggggaagactgctgtgtttgtcctgtctactctacaacagattgaaccatctcctggccaggtttctgcacttgtcttgtgccatacaagagagctagcttaccagatctgcaatgagtttgtgcgattcagtacctatctgcctgatacaaaagtttcggtgttctatggtgggagtcaacattaaaattcacaaagacttgctgaaaaatgaatgtccncaca

SEQ ID NO: 8639 - DNA, 277 bp, Arabidopsis thaliana
  unsure at all n locations
  Clone ID: LIB24-012-Q1-E1-B1
ctggtaacctgtncgtaccggccgggaattcccgnatcgacccacgcgtccgaaagctacgagtcaattaattaactatcttttatgaggagaacgagatcgaaggttaacgagtttctattgtatacaacggaagataaatctatctaataaaaaagttggtgtgttcatttgtaatttttttcccccatcagtttaaaagttatgttgtatgnnnnnnnnnnnnnnnnnnnnnnnnnnnnnnnnnnnnnnnnnnnnnnnnnnnnnnnnnngggcg

SEQ ID NO: 8640 - DNA, 493 bp, Arabidopsis thaliana
  unsure at all n locations
  Clone ID: LIB24-012-Q1-E1-B11
gnaactgtttacgcctgcctttaccggnccaaaaattcccggaatcgacccacgcgtccgaaaatgttttacaaggttcagaaactgaaaaatcaggtagagaaaagttacacagtggttctactggtccagttgtaatcataagggggttgacatctgtgaaaggccttgagggtgttgaattacttgacacgcttgttacatatctatggcgtgttcatggtctggactattacggaaaggttgaaacaaatgaagctaagggtttgcggcatgtgagagctgaaggaaaagtttctgatgcaanaggagatgagaatgaaagtaaattcgactctcattggcaagagaggttgaaaggtcaagatcccttggaagtgatggctgccaaagagaagatagatgctgccgctactgaagctttagatccacatgtccgaaagattagagatgagaagtatggttggaaatatggttttttgagccccaggct

SEQ ID NO: 8641 - DNA, 452 bp, Arabidopsis thaliana
  unsure at all n locations
  Clone ID: LIB24-012-Q1-E1-B2
gaatggaaacgaagaatcctttgatctctcctctcaatcgtctctctctctgtcgccatctccgccgtcgtcaatggaaacgagaagtcgaagcccaccgtgtcgtactctgaaaaatctgagaagtctcttttcgtctttgatcaaaagttgatcgtctctcatctctttgtctggtacatggattctttgattggggtttcttcctcatgttagagttcctcctaggtcgagatcaaaaccttcctaggtgctcttcgctttcactgcccccaatctcttccttctccgcttgtgttctgaaatcatcatcgattggggctgacatagaggatgtgggagaagtaattcaaccaatcacgaatcatcattcatcccgcgatnaggcaatcttcgtttttggagcanaagccagatctacangacttgcctgatacaacacacgttgatat

SEQ ID NO: 8642 - DNA, 439 bp, Arabidopsis thaliana
  unsure at all n locations
  Clone ID: LIB24-012-Q1-E1-B4
gagctgagagaaacgcgtctctcagatttcaatccttcactttcccttttctttttttctcgttatcggatcagaacaaaattttgggaaattcgaggtttccctggattgttggattcgattattgttgaaattcgatatgggtgtttgttgtttgtgttaatcgttgtcaaagttttgatttttttcctcganaaaatttganattttttcgntcgtcnaatcgagagaanacgcanccattttactacgatcaanttcaaacccctgaatactgaagcgaaattgaggttaatggttagggagcttagggtttatgaatgatcaggtggtatttggtatttgacatgaattagggaacacgagtganatctctatcttctccaagattgtttaaagcttgggggttnagtttccataagatgaagatttgcgntgg

SEQ ID NO: 8643 - DNA, 444 bp, Arabidopsis thaliana
  unsure at all n locations
  Clone ID: LIB24-012-Q1-E1-B7
gcagtgaagtacaatgatgggcttgatcgtttcaggctttcgcctgctgagttacgtaaagagttggagaagcgtaatgcggatgcggtgtttgctttccagctgaggaatcctgttcataatggtcatgctcttcttatgactgatactcgtaggagacttcttgagatgggttacaaaaaccctattcttttgcttcatccgttaggtgggtttacaaaggctgatgatgttcctttagattggaggatgaagcaacacgagaaggttctagaggatggtgttctcgatccggagactacagtggtttcgatattcccgtcacctatgcattacgctggtccaaccgaagtgcagtggcacgcaaaggctagaatcaatgctggtgctaacttttacattgtgggtcgtgatcctgctgggatgggtcatccagtaganaaa

SEQ ID NO: 8644 - DNA, 465 bp, Arabidopsis thaliana
  unsure at all n locations
  Clone ID: LIB24-012-Q1-E1-B9
tttaccggnccaaaaattcccggntcgacccacgcgtccgctctgttgaaaaagtgaagaaggcccgatatagagagagagtgtgtgtcgttgacgaaggaggatgaaggaagaggatgtgagctcgcagaacgtaaaccctagaagtaatcggaacagtgtagcctcagcttctgcttccgcctctgctactcccgttgataggttccgacgacgtgctagatcgccttctcctcctcaaactgctgctgctagctctgcaggggcatcatctccagctgttctggtaaacgctggcagtgttgactggacaggtcatggactggcattatcagtgcgttcgtgtagaacatgggatagaggagatttacttcgacgtcttgccactttcaagccttcaaattggcttgggaagcccaaaacagctagttctttggcttgtgcncaaaaangctgggttaatgt

SEQ ID NO: 8645 - DNA, 443 bp, Arabidopsis thaliana
  unsure at all n locations
  Clone ID: LIB24-012-Q1-E1-C1
tcctcaatctaagtctccaatgtgttgaagcttaaacgcggtcatatattggagcttcttggttactgtaacgagtttggtcaaaggttacttgtgtatgagtactgtcctaatggatcacttcaagatgcactacatttggatcgcaagttgcacaagaagctcacttggaatgtacgtataaatattgcattaggagcttcaaaggcattgcagtttcttcatgaggtatgtcaaccgccggttgttcaccagaatttcaagtcttccaaggttcttcttgatggaaagctctcagtacgtgttgcagacagcggtttggcttatatgttaccaccacgcccaacgagtcagatggcgggttatgccgctcctgangttgagtatggaagctacacttgtcaacgacgtattaaccttggggttgtaatgttagaactgct

SEQ ID NO: 8646 - DNA, 477 bp, Arabidopsis thaliana
  unsure at all n locations
  Clone ID: LIB24-012-Q1-E1-C10
cgttacccgcctgtaccggcccanaattcccgggcnttattattggaggagactgtgtctgtgctgacgtggatgcttcccattggtttagaaggtcaatccaaactcaccacgacgtcgtcgtttaatcgtttagtggaactgttgagaaatggtgatcaaaacgctgcgtttttgataaaagagcttcttgagcttaacgtaactcacgttcacgcgttaacaaagatcaatggcgtccaagaagcgttcatgaaatcgattaatcgcgattctacatgcgtcaactcgttaatatcaatccaccatatgatcttgacaaatcaagaaaccgtatcaaggtttcttgaattggatcttgtgaatataacagtggagatgctagtggattcagaaaacagcgtttgcgagaaagcgttaacggtattaaacgtgatttgtgaaactaaagaaggaagagagaaagtgagaagaaac

SEQ ID NO: 8647 - DNA, 458 bp, Arabidopsis thaliana
  unsure at all n locations
  Clone ID: LIB24-012-Q1-E1-C6
tttcgagttcttgntcttcccaaggcccctacttcggccctagcatcaaccattgtcgttttaaagctccaggttttcatggccaagaaagaagtaactatcgttgagatcttctgaaattaatcagtcttgaagtctctggagattgtcttataacatggactccatggatattgatcaaagtaacataggtgaatcgcctcaccttctgctgagaccagtaagtccattggaatctggtgaaggtttaccttatgctcctgagaattggcctaatcctggagatacttggcattggaaggttggaccgagaattagcggtaaaggctacttcgtggatagatacttatatcctcctaagtatcttcccggtttagatactgaaatattgcggaaaaataaggtgtttangagcangctctcgctccaacgatatattccgtgtacacttccctgaa

SEQ ID NO: 8648 - DNA, 445 bp, Arabidopsis thaliana
  unsure at all n locations
  Clone ID: LIB24-012-Q1-E1-C7
gagattctcgtagcgaatcgaggtgaaattgcagttcgtgttatcagaactgctcatgaaatggggattccttgtgttgctgtgtattctactatagataaagatgctcttcatgttaaattagctgatgaagctgtttgtattggtgaagctcctagtaaccagtcgtatttggtgattccgaatgttctgtctgcggctattagccgtggatgtacaatgcttcatcctggatatggttttctttcggagaacgctctctttgttgaaatgtgtagagaccatgggatcaattttattggacctaatcctgatagcatccgtgttatgggagacaaagcgactgcaagagagacaatgaaaaatgcaagggttcccactgtaccaaggagtgatgggctattgcanagtacagaagaaactgtcaaggtccccaatganaatg

SEQ ID NO: 8649 - DNA, 449 bp, Arabidopsis thaliana
  unsure at all n locations
  Clone ID: LIB24-012-Q1-E1-C8
gcccactgcttcctccgagagccgtcgtctcctcctctcttgcgcctctgagaattccgatgatctcatcaatcatctcgtgtcgcatcttgattcctcctattcgatcgatgagcagaagcaagctgctatggagatcaggctcttatccaagaacaaacctgagaatcggatcaaaatcgccaaggccggtgcgattaagccgttgatttctctgatctcttcttcggatcttcagcttcaggagtatggtgtcactgcaatcttgaatctatctctctgcgacgagaacaaagagtcgattgcttcttccggtgcgattaagccgcttgtcagggctttgaaaatgggaacaccgactgctaaagagaacgctgcttgtgctctgctccgtctatcgcagatngaaggagaacaaagtcgccatccggagattcggagcgaatcct

SEQ ID NO: 8650 - DNA, 462 bp, Arabidopsis thaliana
  unsure at all n locations
  Clone ID: LIB24-012-Q1-E1-C9
tacgccgnctttaccgggccaaaattcccggntcgacccacgcgtccgctcaccttcttctttatctaaggaaacaaaaacagagttttcttaagagaaatatcacaaacttttgtgaaaaagagagagacaagatggggaattacaagttcagaatttcagagatgctcccaaatgcatggttccacaagctcaaagacgtgactaaacactctaaacccaaaaacaaagcttcttcttcttcctcaaacacttgtagcaagaagaaaccttcctcagattctcttcctcaacactcttatttctccaacagcttagtagctaacaatcctcctcaccataactcaccaagaaactctcttcacacaaaaaagatgagtanaagaaagacactttacaagccatcccttaaacctttgactcctcctcctcttcttgnatctgcaagtttcaacangagca

SEQ ID NO: 8651 - DNA, 437 bp, Arabidopsis thaliana
  Clone ID: LIB24-012-Q1-E1-D1
ttaagaccaagctcaggctatcatctctccgttaattagggttttcttctctatctcgatttcaataccattgttgatccgctgagctagggttgttcgatcccgataattgtgtcgcttagctctgatctctgttcatcgaatttggttaatttgttttgattggttaagatacattggaaagcgatgccaccgaaggttgtgaagaggggaggcgccgcgagaagaggtgggaggcttacgagatcggcgctcaaggcgcagaatcctcacgtggaatcttcccatgacgaatctgttaatatcggtgagctctcaagctccgatgcactggaagccaaggaggtgactccggaggttgataaaactgttgaggaagagaatccattagatgtgccgaagtcatcggattcaattgatgattctgaagctgcaac

SEQ ID NO: 8652 - DNA, 399 bp, Arabidopsis thaliana
  unsure at all n locations
  Clone ID: LIB24-012-Q1-E1-D10
gcggacgcgtccgcccacgcgtccggaacaaaagaaagagagatgcctcattcctcccacctgaggagcctatgaacaacaatagcaacgcaaacaaatcagaggatggaaagaatgatataaccgagttaacaaattccttgaagagcaagacgaaggagttgaaaaagcagaaaaagacacacgagagagtgaatgcggaggagtatattgctggtccatnnnnnnnnnnnnnnnnnnnnnnnnnnnnnnnnnnnnnnnnnnnnnnnnnnnnnnnnnnnnnnnnnnnnnnnnnnnnnnnnnnnnnnagaaaagattgaaacttatctatgctcaaaactgtaaaaacaagttaaatctttatttcagccgtcaagttaanaaaaaaaaaaaagggcg

SEQ ID NO: 8653 - DNA, 456 bp, Arabidopsis thaliana
  unsure at all n locations
  Clone ID: LIB24-012-Q1-E1-A8
gggnttcccttggaaacgagatataaataccctatttgctctcatctttacactcatagcaaaaaacatcttgttttctctgccaatctcaatttctctcccaaccagaaaattctctcactctctctcgatttcgcggaaatggatttccacagccttttgagaagggatcttcaatttctctgcaagaggaacaaaatcccagctaatatgaccaatatcgccatggctgatgctctcaaatctcttgagattgttgatggtcttgatgaatacatgaatcaatctgaatccagtgctccgcattctccaaccagtgtagcaaagctgccaccaagcactgcaactagaacaactcgacgggaagagcacaacaaaagctgagcctcangccatcatctcanttgggtgtcccgttcctgtccgttccgacgaagcaagtctcttngctggaga

SEQ ID NO: 8654 - DNA, 379 bp, Arabidopsis thaliana
  Clone ID: LIB24-010-Q1-E1-G12
gatgaagactctcccagccttgctaccactgagctcttgtcaatgctctttcaggcttgcggtgctaaatactccatcaaggatgatctgcttgatgagactgatgtcgatgatgttgtcgtttcccttgttaatcttgctagagccggggaactcgaagattatcagagttccagaaagaaggaactcaagaacttcaaagaaaatcttgtttccttctggaataatctcattatcgagtgccaaaacggaccattgtttgatagagtcttgttcgacaagtgcatggactacattatcgcactgtcatgtactccacccagagtttaccgtcaaactgccacgctaatgggcctccaactagtcacagctttcaatt

SEQ ID NO: 8655 - DNA, 467 bp, Arabidopsis thaliana
  unsure at all n locations
  Clone ID: LIB24-010-Q1-E1-G2
ggnccaaaaacaaacggggtcgacncacgcgtccnnncacacgtccggcagaagagatgaatcctgaaggttcacgataccagcttcttctctcatgtccttctggcctctctccgtctcaggtctcagtggatttctcgaaatcgcatgatcggattcctcgtcaagatcctggtctagaagattctatttcacaggtttgggagcagagatcacagggaaattcatcattgttcaatggccaaaaatttaggtatggaggatattgtttagatgatgatgatggtagtaccaatgaagtgccacacgtttgtcttcgtcttggcctgacagattacaggacttttgtangaacgaatttgagttctctgtgggagaagttccttgttacatcagangatgactctgttaaatgtcgacacacctcaagtcattggggaaatgggtgcagttatccgaaaacttct

SEQ ID NO: 8656 - DNA, 457 bp, Arabidopsis thaliana
  unsure at all n locations
  Clone ID: LIB24-010-Q1-E1-G3
gagnctcgtgggtcgtcgcaannctctanagtgagtcgtattagtcagataaatgtcaatcgaagtcggtacaaagaaacggtgcaaaagacaggtctgcgttgtttgacataaccaacgactcaccgatcgtaggtctggcgatgcagacaccgtcctcaggagttgttgggaagaggaacatgagcagaatcaataacactcctggatctggtgaggctctcttgagaggccaagtcaagactctcttgcagaaggttgaggaagaagcagatctcaccaagatttcgttggaatctcgtcctttcatccatctcgttacttctcccatgggtcttctcgccccaactccggccaacaccccccaagttcttgggtttctcagacgaagtgcaggttgtgatnacttctccggtagttgcaggacattcagagcaccgtctcaggtggtggaaaa

SEQ ID NO: 8657 - DNA, 443 bp, Arabidopsis thaliana
  unsure at all n locations
  Clone ID: LIB24-010-Q1-E1-G4
caannctctaaagtgacgtcgtattagtaaaaaaaaaaaaaatcagaagaaacctgagaagctcacagtaaacacatcttcaaccacaggttcatacttactgaaaaaaacagaggaaaaaaaggagctcccttttctatctctaagggaaaatgggtagcaagatgttgtttagtttgacaagtcctcgacttnnnnnnnnnnnnnnnnnnnnnnnnnnnnnnnnnnnnnnnnnnnnnnnnnnnnnnnnnnnnnngaggactcaatggactcagctcagccctggaaaatcgatttctttgagaagaagagtcttcttgttgcctgctaaagccacaacagagcaatcaggtccagtaggaggagacaacgtcgatancaatgttttgccctantgtagcatcaacaaggctgagaagaaaccanttggtgaaatggaacaa

SEQ ID NO: 8658 - DNA, 430 bp, Arabidopsis thaliana
  unsure at all n locations
  Clone ID: LIB24-010-Q1-E1-H1
gctccgacaaggacgaggttccaagagaacttagcttcttgttctacgtacgacaccaaaaattaattcaaaaaagaaaaagaagagagttcaatgagaaaacattctcttgatcgatggcttttaacagctgttcttgtcgttctcctctcgtcttcttcctccttcgcggccnnnnnnnnnnnnnnnnnnnnnnnnnnnnnnnnnnnnnnnnnnnnnnnnnnnnnnacctctttgatcatcgatggcaaaagagagcttctttattctggctctattcattacccganaagcactccggaaatgtggccaagtatcatcaagagagccaagcaaggcggtttgaacacgattcagacatacgttttctggaatgtacatgagcctcaacaaggaaagttcaacttttcgggacgagctgatttggtga

SEQ ID NO: 8659 - DNA, 424 bp, Arabidopsis thaliana
  unsure at all n locations
  Clone ID: LIB24-010-Q1-E1-H10
cgcacgcgtccnccaacgcgtccggtattttgctaaagcagcagccagtcgggacagtgaaatggcgactgaagatgtgcaagatcccaagaatcgctaagattgcctcttccattagagtcatncccgacttccctaaaccaggaatcatgtttcaggacataacgacgcttcttctcgacactgaggcctttaaggatactattgctttgtttgttgatagatacanacatnaaggcatatctgttgttgcaggtgttgaagctacaggtttcatttttggcnctcctattgccgttggctantgggtgccaaatttgttcccatgangaagcccaagaagctactgggaaggttaattccgangagttattcggttcgncgtaaggaacanccncccnttgangatgcccctaagttcaac

SEQ ID NO: 8660 - DNA, 449 bp, Arabidopsis thaliana
  unsure at all n locations
  Clone ID: LIB24-010-Q1-E1-H2
cggtccaaaattaacgggtcgacccacgcgtccggtaaaatcctaaaccgtcagagaatatctatcctcctcttaaatatcactcttatctttatcctcctaaaatcttcttaattgtatctaatctctttctcaaaaaccaancactatctctcgattatatcacaaggagatatggggaacagtgaaatgtcagcgagtgaggttgcggcggccaagcagaagaacgtcgacgattggttaccgatcacatcttccagaaacgctaagtggtggtactctgcttttcacaatgtcaccgccatggttggtgctggtgttcttagcttgccctacgctatgtccaatctcggatggggacctggagtgacgattatggtgatgtcatggatataacgttgtacacactgtggcaaatggtggagatgcatgagattgttccanggaag

SEQ ID NO: 8661 - DNA, 465 bp, Arabidopsis thaliana
  unsure at all n locations
  Clone ID: LIB24-010-Q1-E1-H4
cccngccggtccaagtcaacgggccgcngtctgggactgggaaancgagcaggtcacgggtaaagatgatgccaataggaacaccgagagtaccctacagaaaccgagaagaagggacttggcaatgggttgatatatggaatgccctttatcgagagcgtgtaatcttcattggacaaaacattgatgaagagtttagcaaccagatattatcaaccatgttgtaccttgatactcttgatgactcgaggaggatttatatgtacctaaatggtccgggtggtgatcttactccaagtctagccatctatgatacaatgaagagcttgaaaagtccggttgggacacattgcgttgggcntgcatacaaccttgcagtttcttcttgcggctggagaaaaggtcaccgatttgcgatgccantatcaagatcgccctccagtcacaaccgggtgcagcccgtgg

SEQ ID NO: 8662 - DNA, 428 bp, Arabidopsis thaliana
  unsure at all n locations
  Clone ID: LIB24-011-Q1-E1-A1
gcnctctctctctctctgtcgtcaacaatggatagtccgacgagcatacgtagtaaaccactaccggagactctttctccatgcggtagtcaacgacggagaagcagctgcgactctaacccacctgagttcgagttctggcgtttaactaactcttcatttcctcaagctgattcagatctcctctccgccgacgagctttttcacgacggtgttcttctccctcttgacctcctctccgttaaatcagagcttcagtccgacccgaatatcgcagaatgcgacccggatccatctccttcgactggtagtttgattacagagcaaaaaagtgatcttgaacccggtttaggattcgagttgacccgagaaacaacggtttcgaagcggtggagagatatttcaggaagaagcgaaaccaaaccgcc

SEQ ID NO: 8663 - DNA, 415 bp, Arabidopsis thaliana
  Clone ID: LIB24-011-Q1-E1-A5
tgcctgctcctgatatgggcactaacgctcaaaccatggcttggattcttgatgagtactccaagtttcatggtcattcccctgctgttgtcactggaaagcccattgatcttggtggttcattaggtagggaagctgccacaggtcgtggtgtagtatttgccaccgaagctcttcttgctgagtacgggaaatcgattcagggtttgacatttgttattcaaggttttgggaatgttggaacatgggctgcgaagctgatccacgagaaaggcggtaaagtggttgcagtaagcgacattactggtgcaatcaggaaccctgaaggtatcgacatcaacgctctcataaaacacaaggacgcaactggaagtctcaatgatttcaatggtggagacgctatgaattcagatga

SEQ ID NO: 8664 - DNA, 432 bp, Arabidopsis thaliana
  unsure at all n locations
  Clone ID: LIB24-011-Q1-E1-A7
ggaaactcaatcttactttctctgtaattcgtagcttccgaaatcttttctcaagaatctcataaccatggcgaatcctgctccgaatctagaatgtcgtatgtacgaatcgagataccctgatgtagacatggcggtgatgattcaggtgaagaccatcgctgacatgggagcttacgtatctctccttgaatacaacaacatcgaaggaatgatcctgttctccgagctctctcgccgtcggattcgtagtatcagtagcttaatcaaggtcggtcgtaccgagcctgttatggtccttcgtgtcgatagagagagaggttacattgatctcagtaaacgtanggttagtgatgaaggacaaagaaggcttgtgaaggagaaggtataataaagagcaagccttgttcactcctaacaatgcgtcaagtt

SEQ ID NO: 8665 - DNA, 403 bp, Arabidopsis thaliana
  unsure at all n locations
  Clone ID: LIB24-011-Q1-E1-A9
gcccacgcgtccgcgagcagcctctgaactacgctagaagctacttagcggatctgctggagccttgtgttaaccgtgtcatatacttggattcggatcttgtcgtcgtcgatgacatcgctaagctttggaaaactagcctaggctcgaggataatcggagctccggagtattgtcacgcgaatttcacgaaatacttcaccggaggattctggtcggaggagagattctccggtacctttagagggaggaagccatgttacttcaacacaggtgtgatggtgatagatcttaagaaatggagaagaggtggttacacgaaacgtatcgagaaatggatggagattcagagaagagagaggatttacgaactangctcgcttccaacgtttcctctantttt

SEQ ID NO: 8666 - DNA, 472 bp, Arabidopsis thaliana
  unsure at all n locations
  Clone ID: LIB24-011-Q1-E1-B1
ccgtagccgtccgaaaattcaagggtcnacccacgcgtccgcccacgcgtccgctaatcttctcgttgctatggcgtcgcaattaatgggttctgctaattacggtttgaaacgttttagtgatagtttaggttacttgaatagagctaataggattcttgtgaagttagaggcggatggtgattgtgttgtggaagacgttaggcctgttttacacgctgtgcagcttgagcttgctaatgttaagaatgctatgggaaggagagaggaagctattgagaatttgaagaagagtttggagataatcatggagatagcgcgaaagacgaaatgaaagaagcgaaaagacttcttgaggatttgcgattgaaggctcgangangtgtatcaacgaataaagcttctgaataangctttanctttgcccaagccaagccattcatccttaatgaagctttgtgaaagtctcaac

SEQ ID NO: 8667 - DNA, 426 bp, Arabidopsis thaliana
  Clone ID: LIB24-010-Q1-E1-F7
gcggacgcgtgggcggacgcgtgggccaaattgcacttccttcaaacttattcgacagtagactagctcaagtacctttggatggcgtcgaggcccggagctcttacggagtggccatggagtccccttggtagcttcaagtacctcttggtggccccgttggtgatggcgagcatgcactcgtacgtgacggctgtggatgaggagaaagacctcagcagacttatgatagtcgtgttgatgctgtggagaatagttcacagccagatatggatcagcgtgtctcgccagaggacggctaagggaacgaacaagatcgtggacaagcccattgagtttgagcaagtggaccgagagcgcacttgggacgaccaagtcatcttcaacactctcctcatgtatctcgcaaacatcaagctccaaggc

SEQ ID NO: 8668 - DNA, 419 bp, Arabidopsis thaliana
  unsure at all n locations
  Clone ID: LIB24-010-Q1-E1-B1
atngttgtgatgaacaaaacgaatctcttgttgcttattctctctctttttctcgccatcaacctctcctccgctcaactccgcggcgacttctacgccggaacttgtccgaacgtcgagcaaatcgtcagaaacgccgtacagaaaaaaatccaacaaactttcaccaccattcccgccactctacgcctctatttccatgattgtttcgtcaatggatgtgatgcatcagtgatgatagcgtcgacaaatactaataaggcggagaaggatcatgaggataatttatcgttggccgggagatggattcgacaccgtcattaaagctaaagaagctgttgacgccgtcccaaattgtccgtaacaaagtttcttgcgctgatattctcacgatggccactcgtgaagtcgtttaatct

SEQ ID NO: 8669 - DNA, 482 bp, Arabidopsis thaliana
  unsure at all n locations
  Clone ID: LIB24-010-Q1-E1-B2
ctgttacgtttgcccggncccggtccaaaaannnnnnnnnnnnnnnnnnnnnnnnnnnnnnnnnnnnnnnnnnnnnnnnnnnnnnnnnnnnnnnnnnnnnnnnnnnnnnnnnnnnnnnnnnnnnnnnnnnnnnnnnnnnnnnnnnnnnnnnnnnnnnnnnnnnnnnnnnnagtaatcaccggangaatgttatgcatgtggaanttgttattgagcaagttncgggagacgatcgaagaagtggaattgcgaatgatgcggtgttggttaatgctgagaatgatttgagtgatgganttgcgtanatggataattatnacatgttttttgatgatgtacaagtcnatgacgatgttgtgaatgttgaatgggaagatgggantgggtttgagtttaggtcaanagtttgagagtaagcnngaagttcaaganttanttgagaaagctgagncttccgaactattttgaggccgcnaataatc

SEQ ID NO: 8670 - DNA, 475 bp, Arabidopsis thaliana
  unsure at all n locations
  Clone ID: LIB24-010-Q1-E1-C1
ntttgccgggcctggtctannactaacgggtcgacgcacgcgtcnncncacacgttctggancttcccagctctacactttcgctgatcttgatatcggtctgccgaaaacagtagaaaacatggagaagaaggttgaagcactgattgagccaccaccaccaccagaagctatggatatatctgctattcacaacctgcttccgccgaatatcgcagttccttcaggatggaaaccaggaatgccagtcgaattgcctagagatttaccattgccacctcctggatggaaaccaggcgacccagttgtgttaccgccactggagtcaattgctgcacctagagcagaggatcatcaacatatgagaccttctcagggactccacagaccgcctgatgtcatacaggtccgagctgttcaacttgacattttggaggatgatgatagcagtgattacagcagcgatgatgcaagc

SEQ ID NO: 8671 - DNA, 460 bp, Arabidopsis thaliana
  unsure at all n locations
  Clone ID: LIB24-010-Q1-E1-C4
aattaacgggtcgacccacgcgtccgancaacctgacccgtctgggctcgccgcctcctatatctcttctctctcgattaatatctccaagagcaagcttcgttttcgtgtggtgtcgtttctaattgtgattttttaatattgcatcaaaatgtcgaagaagaggaaggctcgtagcggctacttgaagaagtcatcacaaggaggagacgaagctgtggtacagcgaagaaaactagttccaaaacctggtaaaattgggaaagagattgatgatatctttgctgggagatctcagaggacgccagagtccaanaatcccgagtcgaagagacacgccagaaagcccaagtatccgagtcgagagacactagagctgagatgaatgagctcaatgtttgggggtcaataacaacactgaaagccgacctaaggacnagaattctcagtaacgacacgg

SEQ ID NO: 8672 - DNA, 484 bp, Arabidopsis thaliana
  unsure at all n locations
  Clone ID: LIB24-010-Q1-E1-D2
cttttaccttgcccggnccnggtccaaaaactancgggtcgacccacgcctccngctcgacncgtcgtcggcggcggtgtaaaaatagtcggagctatggcgatgcaggccggagttggcttatccaggatctttctcttagccggagcaggttacactggtacgatcatgatgaagaatggaaaattgtcggatttgttgggtgaattgcagagtttggtgaagggaatggagaaatctggagaagggtctgagggagattctgatgtttctgatgctatagctgcacaggttcgccggttggctatggagattccacagctagcttcgcagcaacacataacggtcatgaatggagtttctggtgactctccttgttttttcagcaaacctacaagcccttgctgttcctgctgcggcattgggaactctcngatatggttaaatgtggtggaagggaaccctcattcactggacccttatg

SEQ ID NO: 8673 - DNA, 420 bp, Arabidopsis thaliana
  unsure at all n locations
  Clone ID: LIB24-010-Q1-E1-D3
ctcncaagagctacttggagttgtcgtaaacacagagatcacaatcttaccaaattttcacacaccgacatgtctagatccttagctctcgtttacttngccttactttgtcttcaaacccatctctcaatctccgtcacagttccgattccgtcggtaaacggcgaaatcgacgcaatgctgaaccggaacggcgtaatcggagaggaagaaggagaggagatgatgccatcggagataagtcggagagtaatgatgatgcggaaacagtacataagctacgaaactttaaggagagatatggttccttgtcagaaaccaggtgcttcttattacgcttgtcgctctggtcaggctaatgcttacaacagaggatgtaagtgtcattactangtgtgctagagacactancgacatcaa

SEQ ID NO: 8674 - DNA, 425 bp, Arabidopsis thaliana
  Clone ID: LIB24-010-Q1-E1-D7
gaaatcataaccggtggaaatggaccagctcttctcataaatggtgtcaaaaggccaatgccacttgttcggattttggaagttgaattgtatcctactttgctttcaaaagcccggagttttggtctgagtgatgaatggatccaagtcctagtcaagaaggatcctgttagacgtcaagttctgcgtgttaaaggttgcctggcaggatcaaaagctgaaaaccttcttgaacaaggcgatatggttctggcagtcaataagatgccagttacatgcttcaatgacatagaagctgcttgccaaacattggataagggtagttacagcgatgaaaatctcaatctaacaatccttagacagggccaagaactggagctcgtattggaactgataagagagatgggaatggaacgacaagagtg

SEQ ID NO: 8675 - DNA, 491 bp, Arabidopsis thaliana
  unsure at all n locations
  Clone ID: LIB24-010-Q1-E1-D8
tactttnccccagcccaggcacaaagtcaanagacncccgggtcgacncangnntcnatagcaactncagttncgtacaacaatggctctccaagctgcctattctcttcntccttctaccatttcaatccaaaaagagggcaaattcaatgcttctctaaaggagacgacttttactggttcttcattttcaaaccatcttagagctgaaaagatatccaccctgttgaccatcaaggaacanagaagacagaaaccgcgattttccaccggtattcgtgcacagacagttacagccacgccgccggcaaacganngcatcgccgggagcatangangactgatagaaaangcactgcagtgatcactggagcttcgtctggtttaggtttagctacggccaaagctttaggcagacacannggaaatggcatgtgatcatggcntgcagggaacttttcncaagnccgagaacggcagcnatatctgtt

SEQ ID NO: 8676 - DNA, 394 bp, Arabidopsis thaliana
  unsure at all n locations
  Clone ID: LIB24-010-Q1-E1-E10
ggctctccgcaccatgtgaaaggttggtgtagtggcaagaactctttcgaatctgaacgccttaagctctgagagacgagcattttccagaaaattcccattacctaatccccaggattcgatgaacccagaaatgatggttttcgaaaggctctagctttctcaaatccagattttgctgaggagctcgttgaaagaatgcaaaatagaccatctctctcttgtcctttgtctttcagatcgtttctctttcaacgtgatattagagtacaatacnagataccgtgaggtcctttgtattattggaccttgagttgtcttgtctaantgggaataacctttccaagtgaanattttcctgggcagttcatcnagtgaacttttttgggcccgt

SEQ ID NO: 8677 - DNA, 468 bp, Arabidopsis thaliana
  unsure at all n locations
  Clone ID: LIB24-010-Q1-E1-E2
gngccaggtccaaagactagcgggtcgacgcaagcctcnanactgacgtnntggcatatgacagatcgagcgccccaaaggattgccgtgtatcaggatggctaggtgacatagatatggagactgagacaatgccccttcttacagaattcagttacgacttagacaggtccaatgcacagacattcgacattgcagactctgctcactcaggacttgtcaacactgtcaggctagacttcaattccaaccatggaagctcttcacacacttgcatctaccgcttcagggttcatggccgtgaactagactcagtctcngttgctcatgcntgatctgaaagtccacgtcaaacttttcttnctccttgtaaacattcccctctaatagaatatcncgccntctttttttgtgttagtttaaggtggngggaaaanccttcnccttaggtcctggtaancatcaatc

SEQ ID NO: 8678 - DNA, 454 bp, Arabidopsis thaliana
  unsure at all n locations
  Clone ID: LIB24-010-Q1-E1-E3
tcncgtggtcgacgcacgcctcnaaacttngncantacatgggtgccattttgcaggaaacacaatatagagccaaggaaccctgaggcctactttggacagaagcgtaactttctcaagaacaaagtcaggctggattttgtgagggaaaggaggagagtgaagagagaatatgatgagtttaaggtcagaatcaactcattgcctgaagcgataaggagaaggtctgatgcttataacgtgcacgaagagctaagggctaagaagaaacagatggaaatgatgatgggaaacaatccacaagaaactgttatagttccaaaggccacttggatgtcagatggttctcactggccagggacttggtcctctggagaaaccgataactctcgaggagatcatgctggaatcattcaggcaatgttggctcctccaaatgcagaaccagtttatg

SEQ ID NO: 8679 - DNA, 426 bp, Arabidopsis thaliana
  Clone ID: LIB24-010-Q1-E1-E6
gcgtttgtagaagcggtgaccggaaaagctgtgacgtacggtgatgtagtgagggacacaaagaggctagccaaagcgttgacatctctcggactaaggaaaggtcaagtgatggttgtggtcctaccaaacgtcgccgagtatgggattattgcccttggtattatgtctgccggtggagtcttctccggtgcaaatccgacggctcttgtttccgagatcaagaagcaagttgaagcttccggtgctagaggaatcatcactgatgctactaactatgaaaaggtgaaatcactaggtttaccggtgatagtgttaggtgaagagaagatagaaggagcagtaaactggaaagatcttctagaagcaggagacaaatgcggagataccgacaatgaaagagattcctcagacagatcttgtgca

SEQ ID NO: 8680 - DNA, 470 bp, Arabidopsis thaliana
  unsure at all n locations
  Clone ID: LIB24-010-Q1-E1-E9
tccaanaactcgcgggtcgncgcangcctctngntnnattcatagtctctcgattcccgccgcttcttggttttccggcggaaccattcctccgacgaaggtgagagtttctccgccgcatcatctccggcgacctcccaacaggaattcccatcgcttggccgccattaatgccgcttctcgctctgtgagtgagctangtggaggaggatgtgttgcaaatgttcatgaaagacagagaagaaaatggagatttcatatctaaagtttctgataggctctggttaaaggagattctcgaatctattgatgttaattccaatggagcttcttcttcagctgttgaactagatgatactcgggaaaagcttgatanatggccgctgatgatggatgaanagttgggtttcntganaccttannnccgacncanggatgggantggttgggganagtgattctggccccca

SEQ ID NO: 8681 - DNA, 483 bp, Arabidopsis thaliana
  unsure at all n locations
  Clone ID: LIB24-010-Q1-E1-F1
ttacgcttgccggnggccggtccaaaaattaacgggtcgacccacgcgtccgngcagaaccgtcgttgattgaagaacattccgatcatcagccatcatctgaggggatgaagaacgaagaatgttttctgattgatcacctccaattaggattgactgctcttcagaacttgcttacaaagtatccagatctggcttcagtgttttcgtctaaggagagattgttacctctctttgaatgtttttctgtggccattgcatcaaaaacagatattccaaaactctgcctcaatgtcctctctcggttaacagcttatgctccttgcttggagacgatggtatctgatggatctagtcttcttctcctcttacaaatgcttcattctgcaccttcttttcgcgaagggtgctctccatgttctttatgctttgggcaagcacaccaagaacttgcttggggctgctgcaaaacatggtggagta

SEQ ID NO: 8682 - DNA, 486 bp, Arabidopsis thaliana
  unsure at all n locations
  Clone ID: LIB24-010-Q1-E1-A4
ttttacgtttgcccnggcccggtccaaanattaacgggtcganccncgcgtccgaagaacnctcacaactagagctctcangtctctcaggaagcttgcaacaaactgtgggagctcgatttaaaccgccttgttcctggaagggattatcaaatcgactgcggagatgggaaaagggtccatgagagagctgatatggctgaaggactactgttctcttgggtgagcgaggaagtctctagaaaaccgactttcgccagattctgttcattgcttgacaactacaaccccaacgaacgttacaaagaagtggtcacanaagaagagaggcaagagcaagcggctttcattgaatgaaattancanaacctctgtgatcaagtaccttcacaggtaccttgtgctcaaggacgtcgctcctgggaagctacttanagttcaagagaatgttgacaagtctctggttcgatctgtatggccgcggag

SEQ ID NO: 8683 - DNA, 397 bp, Arabidopsis thaliana
  unsure at all n locations
  Clone ID: LIB24-009-Q1-E1-F1
gcggacgcgtgggctcatcgtctctgactcgctgcacttagtttcagatcatataaacgaatttggtgattgatcggtgcatgacgagcgcatcggaactcttctctacacgangatcacgtccgggtcgatccgacccggctttagaatccgacannnnnnnnnnnnnnnnnnnnnnnnnnnnnnnnnnnnnnnnnnnnnnnnnnnnnnnnnntaatcagcgtcatgattccgacggctgtgatcctctccggcgaacncactccccgtctccgacgcttcnttaacaatccgattcaggaacngtngtagacctaatccctgaagtttcaaagggcaactagtcagntantnnaaataangggataggtactgggatactggnaaactcaagagt

SEQ ID NO: 8684 - DNA, 432 bp, Arabidopsis thaliana
  unsure at all n locations
  Clone ID: LIB24-009-Q1-E1-F11
gcggacgcgtgggattttctttgctagtatagattgatgaaagtgaggaaatgggagaagaaatgaagaacacaggatgtgtcttcttcttctaagtcactaacaaaatcaacaaagaggagaagccattattatataatagagagattgagagaagagatttatccaaaaaaatattgcaattcttcttggagtgaataatgccagtccctcttgcaccatatccaacacctccggcaccggcactggctccgtcgtacaacactcctccgggcaanatggaagtacaagtgggcagagcccagttagtgtgttcaggttgcanaaaccttctgatgtatcccgtcggaacaacctcccgtctgttgcgccgtcggtaacgncggtcacggccgntcctccgcccgggangtttaatggcccntttgggaa

SEQ ID NO: 8685 - DNA, 435 bp, Arabidopsis thaliana
  unsure at all n locations
  Clone ID: LIB24-009-Q1-E1-F7
gcggacgcgtgggtcctggtatatcgaaagaggagaaaaggaggctgttacattgtgttgtggttggtggtggaccaactggtgttgagtttagtggtgaactgagtgactttattatgaaagatgttcgtcaacgatatgcccatgttaaggacgacattcatgttactttgatagaggccagggatattctttcatccttcgatgatcgtctcagacgttatgctatcaagcagttaaacaagtctggagtacggtttgtgcgagggattgtgaaagatgtgcagtctcagaagttaatacttgacgatggcacaagangttccctacggactcttagtgtgggtccaactggtgttggtccttctcctttcgttaagtctcttggtcctccaaaaagatcctactnggaaggattggcatttgacnaatgga

SEQ ID NO: 8686 - DNA, 414 bp, Arabidopsis thaliana
  unsure at all n locations
  Clone ID: LIB24-009-Q1-E1-G1
gatgccattttccgcatcaatctcatcgccttcttcttctgtcgcgcttcttcgatcgcctctctctttcttcatcttcactcccaaaaccctaatcttcaccagaaccaggatctctggtttcccttatcttgcttcccggcgatcccgcgatttcatcaacgggagggatgatttcgctgacgatacgaggagctggaaccggaagatcaaaccggagtatgggttcnnnnnnnnnnnnnnnnnnnnnnnnnnnnnnnnnnnnnnnnnnnnnnnnnnnnnnnnnntggatctgttacttagatttgtagaaaatgttttcagaaagatttctaagagagcaaggaaagctgtccgatcaattttgcctggtttcgatntctacnaagctcgttggggtttcagtgaatggag

SEQ ID NO: 8687 - DNA, 435 bp, Arabidopsis thaliana
  unsure at all n locations
  Clone ID: LIB24-009-Q1-E1-G11
gcaaattgagagagagcgcgcgacaaaatcgaacctaaccctaattttgcgatttccccctaatttcgacgatctgatggtgagtgacaagcatgtagaatcaaaccaccgcaaacaccgacggtcgttttcgccgtccgacgaggtctttaaatctccgaagcggcacaagtcccgtcatcaccatcgcaggcatggccaccgtcatcatcgtgatgaggaagttcaatataacgatgatgagaatgttaacggtggtgatcttgatatggaagaaggtgagatattaggaaaagaanggattggggagncattgaagaagaaattagnatccgtcgacgagttttggggatataaaatctggtcaatttccgggagaatantctgggggagaaatcagcggagggaaaganantgtgngaaaagaaaaggaga

SEQ ID NO: 8688 - DNA, 434 bp, Arabidopsis thaliana
  unsure at all n locations
  Clone ID: LIB24-009-Q1-E1-G3
cgtggggtttcgttttcctgtacctcttttaagaataaaaaaaaaaaaaagaaatgggaaaaatttcattagcgatatgtctaacgttgcttgtcacattaagcactgtttatgaaacacaagggacgttctcattacccctttacttgaaaaatttccccaaactgggcaaagactatgaggctttcgcaaacaaaggtatatcggactttttgggtgacctagagggtatgtgtcctaaaaccgcagagttcaaggatttctttgaaaacttgaangattacatggccttcttcanttcatcancacccgggtcacaannacaccaagttcgagaagttcgtaanatctgaaanancctgttcnangcttgtctgctttcaacaggtnntaangggnggaacatncgaggattccttgaaacctggttggat

SEQ ID NO: 8689 - DNA, 431 bp, Arabidopsis thaliana
  unsure at all n locations
  Clone ID: LIB24-009-Q1-E1-G6
ggcctgagaagactaaggaaagtgatggtagtccatgggagttcgttggtctgttgccactctttgaccccccaagacatgacagtgcggaaactattagacgagcccttgagcttggtgtcaatgttaagatgattaccggtgaccaacttgccatcggtattgagactggtcgtaggcttggcatgggaaccaacatgtacccatccacttcactccttggcaattcaaaggatgaatcattagttggcatccctatcgatgagctcattganaaagctgatggatttgctggagtcttcccctgagcacaantatgagatcgtaangaagctacaaagagaggaagcacattttgtggggatgactggagatggtgtaaacgatgctccagctttgaanaaagcggatattggaattgcattgcaaga

SEQ ID NO: 8690 - DNA, 385 bp, Arabidopsis thaliana
  unsure at all n locations
  Clone ID: LIB24-009-Q1-E1-G9
naaatcagnccanaaaacggaaagcaatcgacgccggacatggctcgcagccgacggcgtatcgaggctcagatggtgtagatctttctctccttgaagcacttgagangtcntcgcataatggagtanaagcgcttgatcttaaaaccctaaaaaagcttgtcctctccttcgagcggcgtcttagagacaacatagctgctcgtctcaagtatgtggagaatccagaanagttcgctgactcagaggttgacctacacgacgatcttcagaagctcaaggtgctcgctggagctccggaactttacccggaccttgttgcttccaanacggttccttcgantgtcaatcncctctctcatgaaaacgccgatatcgccaanga

SEQ ID NO: 8691 - DNA, 499 bp, Arabidopsis thaliana
  unsure at all n locations
  Clone ID: LIB24-009-Q1-E1-H1
ctgtttattccngccgnctaccggtccaagaaatcccggggtcgacccacgcgtccgggaaaaaatcaaattcagaggcaaggaatatcttatcccgcaccgctccatcagtattctccctgactgcaaaaccgttgtttataacaccggggagatcatctctcatcatacttcaagaaacttcatgaaatcgaaaaaagcgaataagaactttgatttcaaagtgttcaccgagtcagtgccaagtaagatcaagggtgactcttttatacccgttgaactctacggcttgaccaaagatgagtctgattacggatggtacacaacaagctttaaaatagatgacaatgacctctctaagaagaaagggaggtaagcctaatctgaggattgctaatcctgggccaacgccttgccatgtagggctcaatgggagaaataccttggaaacggacatggtagccatgaaggagaagagttcctccttcaanaagcccag

SEQ ID NO: 8692 - DNA, 428 bp, Arabidopsis thaliana
  unsure at all n locations
  Clone ID: LIB24-009-Q1-E1-H3
gaaagagatcgattgtgaaagaatcaaaatttgttgagataagacatggtgttccgtggcgacacggtggtgtccgtagctcatatatcggctgagatttttcagcgattacggtggattccgccgtcggatcgaatcagcagcggagagatgttacaactcgtttgttgttttccgcttcagcaactgggtcgattcgttttatggttctggaactatatctgtgttccacctccggagattttgtattttgatggtcgtcgtgatgatgacgatgatggttatggntcatcttcgtcgtcctcgaatgttactcatcatcataattactaacatcctcatttggagtgaccaaagttccgggtttctgatttgttgttgtaaangtttttaatttcccgtttttgtgcacagaaagatcagttttg

SEQ ID NO: 8693 - DNA, 497 bp, Arabidopsis thaliana
  unsure at all n locations
  Clone ID: LIB24-009-Q1-E1-H5
tntctagccggccggtaccgggacntaaattcncgcggncgacccacgcgtccgaccacgcgtccgctaattcaaattttctccattctctcgttccaattattatttacttttttcacccaataaaaaaaaaaccatgcattcacttccggtgaatctcgtcntcaccgtacttacggtgttcctaacatcaccggcgcaagttatcggataccgtccatatccaccaaaaaccaacggctccgatcaaatcttcgacgcttcaaaaaaattcgaaggctcatcgaatctcgtccgcctccgttaccacatgggtccagtcttaaccaacaacatcaccgttcacccaatctggtacggcacgtggcaaaaatcccangaagaaaatcatccgtgagttcattaactcaatcctcagccgttggattcnaaacacccttcaagtctccgggttgggtggaaaaccgttacaagcctttacactggaccaaaaatgg

SEQ ID NO: 8694 - DNA, 423 bp, Arabidopsis thaliana
  unsure at all n locations
  Clone ID: LIB24-009-Q1-E1-H8
cgtccgacttttctcaccatctcaatctccagaccaaaagaaacaaaaaatggattctttttcatattcttcgatgaaatccatgttgattcaagctcgtggctcgttgaactcgcgtttgtcggagtttgagccactggttctgctattggttccgcttgtctctcngtttctcgctcagattatcggatctgtgtttggcgttgttcacgagaaaggcctcaaagcttgtcttattgggtttatcatgggactcctcaaaatgattcctggagttcaagaattacattgatgctganaaacannaggttgttgaccaattacaatctggtagcagctctaagananagaataagactgaagtantgccagtaaaangtctaagagttgaagttttanagaaaatggaggaatgacaagaag

SEQ ID NO: 8695 - DNA, 425 bp, Arabidopsis thaliana
  unsure at all n locations
  Clone ID: LIB24-010-Q1-E1-A1
acacagcatagaaataatcgaaagatttctttttaaaatctgggatttgttttttttgttcattgatcattttcgattgttagagaagaatcaaatggcgatggctatggatcggatcgtcttctccccttcatcttacgtctatcgtccttgtcaagctaggggatccagatcttccagagtttccatggcttctacgattcgctctgcgactacagaggttacgaatggaaggaaactgtatatccctcccagagaggtgcatgtccaagtcaaacattcaatgccgccacaaaagttagagatctttaagtctttagaaggatgggctgatgaaaccctgttgacttatttaaaacctgttgaagaaatcgtggcagcctaccgantttcttcccgaacctgantcggaaaggattccatga

SEQ ID NO: 8696 - DNA, 417 bp, Arabidopsis thaliana
  unsure at all n locations
  Clone ID: LIB24-010-Q1-E1-A10
gatcaaatccatcatccatggatttacctgaagaatgttgggaattaatctgcaaagctatcgatgaagacgattatcgattcctggaatctgtttcactcgtatcaaccttgttcctctcaatcaccaatcgcgttcgctctactttcgtcgtcaccgatcgagctgttcctttactcaatcgtcatctccttcgattccgcaacttgaagcgaatcaggttctctgatttcactcaggatctcaattcgattcttctccaggtttctcgttccggtttggatttcgaatcggtagatgtctcgcanacgcgctatttcccagattttgagatgaagaatgtcaaggaatttgaaatgttatngagttggaggttttagtgatancgatntgggttccatcgggagtgaanttccg

SEQ ID NO: 8697 - DNA, 479 bp, Arabidopsis thaliana
  unsure at all n locations
  Clone ID: LIB24-009-Q1-E1-E8
tttagccgncggtaccgaacanaaattcncgggtcgacccacgcgtccgcnnnnnnnnnnnnnnnnnnnnnnnnnnnnnnnnnnnnnnncaaatctcgatttcccaaaaaaaaaaacctaatctcgccgtactctcctcggttccatctttctctgcggccagtacgtgtgcagatatggctaccgagggagttgttccttcagcgcaggatattgctgctgaatttgtgagacagtactatcatgttttaggacagcttcctcatgaagctcgtaggttatatgttgatgctagtgttgtcagcaagacctgatgttactgggtactaatgatgtcttttacttccgttgaggctatcaacaagcatatcctgtcctgtgactttganaatactaaatttgaggttctgagtgttgaccccagaattctttgggaagatgggatttttatnaatggtgatnggttcatgactgggaaa

SEQ ID NO: 8698 - DNA, 429 bp, Arabidopsis thaliana
  unsure at all n locations
  Clone ID: LIB24-008-Q1-E1-A12
attctagtattcgtttcacagtacctgcctcatgtgatcaaatcagggaaaaatgtgtttgaccgatttgctgtgatattcgcggtggtgattgtgtggatctatgctcatcttcttacagttggtggggcctacaatggtgctgcaccaactactcaaacaagttgccggacagatcgtgctggaatcataggtgctgccccatggataagagttccatggcctttccagtggggtgccccatcgtttgatgctgggagaagcttttgcaatgatgatggcttcttttgttgctctagttgagtcaaccggtgcttttgtcgcggtgtcaagatacgcaagtgcaacgatgttgccaccttctaatctcaacccccgtaattgctggcaagganttccaatcctgataacaaggattgntttggaacc

SEQ ID NO: 8699 - DNA, 446 bp, Arabidopsis thaliana
  unsure at all n locations
  Clone ID: LIB24-008-Q1-E1-A2
ggaacgatttagatttaatcgggaaaaagttcagtcagtgacactaatgttcgaatcgaacatggttcttcaaacactatcttcttcttctcctccaattcaccgtctctatcttcaccattctcagattctcccttcttctgggtcacccagcaagatttctcttcagatacatggaaggactttggccattcgatcttttcatgaaatttctgctagaggtttaccggctttgaacaaagcttccttgaagaagctaccaatcaaaggatctacctttctgctggggcagagcttgttgatggtttctgctcacccacagttggcagcagcagcangaaatcataaagcctgaaccgatttacgaagttggagagttatttgaacttangtaatcagctttcttaacttgctgttacnactgggggttgcttggagttggtact

SEQ ID NO: 8700 - DNA, 468 bp, Arabidopsis thaliana
  unsure at all n locations
  Clone ID: LIB24-008-Q1-E1-A9
aaccgaaaattcccgggncnacccacgcgtccgcccacgcgtccgnnnnnnnnnnnnnnnnnnnnnnnnnnnnnnnnnnnnnnnnnnnnnnnnnnnnnnnnctatggatcttctctttctctttttctctcttctcctctcttacctctttttcaagatctggaaactcatagactcaaagcaagacaaagattgctacattttagactaccaatgtcataaaccaaccgacgatcgaatggtgagcactcaattcagtggagagatcatttatcgaaaccaaaaccttggtttaaccgaatacaagttccttctcaaagccatagtaagctcagggattggagaacaaacctacgctccaagacttgtctttgaaggtcgagaagagcgtccttcgttacaagatgggatctccgagatggaagagttctacgtggacagcatcggaaaactcctggagagaaatca

SEQ ID NO: 8701 - DNA, 485 bp, Arabidopsis thaliana
  unsure at all n locations
  Clone ID: LIB24-008-Q1-E1-B1
tgtttggccggcccggtccgaaataancgggtcgacncacgcgtccgcccacgcgtccggggttttgtcacaggctcgattcctgcaccaagccaaaccagcgttgtttcagacattgatgggtcaacatcggcttcacccaatcctgagtactacacctggttcaagacagatcgagttgtcaaatcctggctccttggttctttcttagaagatattctcagtgttgtggtcaactgcaacacttctcatgaggtatggatctctgtagcaaaccactttaatagggtttcctcctctaggttatttgagctgcaaagacgcctccaaaatgttagcaaacgtgataaatctatggatgaatatcttaaggaccttaagactatttgtgaccaactagcctctgtaggaagtcctgtaacagaaaagatgaagatttttgctggctttgaaatggggttagggcgagagtatgagcctatcaa

SEQ ID NO: 8702 - DNA, 434 bp, Arabidopsis thaliana
  Clone ID: LIB24-008-Q1-E1-B11
gcaggggaccttctgcagcattttttgactgtcatatttgataggctgggcaagggagagtcatcaaatgatgattttgagttgaacataatcattcaggaatcaattagaaattcagctgataccatgttgttaagcagtcctgatgcattggtggtatctatttccagtgaagggtgtttggacagagacaaagatgacaagggcgacgtaaaatccctttcttcacctcgtgaaagcagcgttaacaattatgcgatagattgccttgaatctctcaaattcacatacaaggtgccgtggccgcttgagcttattgcgaacagcgaggccattaagaagtataaccaggtgatggggaattttgttaaagtcaagcgagcaaaatatgtgccttgataaggcacaaaggttaagttgaaagggtaaaggct

SEQ ID NO: 8703 - DNA, 500 bp, Arabidopsis thaliana
  unsure at all n locations
  Clone ID: LIB24-008-Q1-E1-C4
tttcttctggnccgcccagtgtccganacaaacgggtcgnnncncgcgtccgaatttatgctcgtangctctgttgaaagagattactgttctctcataagaaccgtcctggatatgatggtagagagaaatttgggaaaagacggtctgttgaacaaggagtccttagatatgctggctgatattcagctactgaatcgcgctatcaaaaggagaaacacaaaaatggctgaaactctgatccattattccgttaatccctctactagaaacttcatcttcttgcctagtatcgctggacctggcgatatcacacctttgcatttggctgcttccacatctagttctgatgatatgattgatgccctgactaatgatccacanngagattggattatcttgctggaataccctagtccgatgcancccgggcanactnccnttancctacgcctgncaatgagagancanccacagttacaacacctttgggtggctcg

SEQ ID NO: 8704 - DNA, 448 bp, Arabidopsis thaliana
  unsure at all n locations
  Clone ID: LIB24-008-Q1-E1-C5
gcnattgtgagatcaattattaatattcatctggagaattatcgtctcttttctccattgctatggctctctcaactactccttctcagatgtccgttgcacttccaactanaattgatgggtcgagccgatctatgattaaggttcaaagtataagcttcactgataagtcatggggtcctcctctgctgagactagattcgaaatctagaagcttaggtgtgaaaaaacatgtccacaatatgcatgtcacttcagcaatcaagcaaatccaaagtcttggttactcctctagaacttgaagatcccanagagactcccttaaacttgtttaggcctaaggagccntatactgcanctattgtttccggttgagagaantgttggtccacaagccanctggnagagacttgcccaatgttattgattcatgatggtaaggtcccta

SEQ ID NO: 8705 - DNA, 445 bp, Arabidopsis thaliana
  unsure at all n locations
  Clone ID: LIB24-008-Q1-E1-C9
acccacgcgtccgcatctctgttgctctacctgttcttttctctctgttcattctcttttctttagcttaattcagcaaaaaatttatctttgtttctctcttttgtttctttcctctgcaaagtaaagttatgagagcttaataatgtttgtctcatcttcaagcttcagatctgattccttgtttctacaagtaattgtctctttctttttcgattaaccaccatttctgtgaagaaaacctttttgcttgcttcaagattcgagtgaggaaaattttagctgaaaatgctgaaattggaagtcccaatgctctgtttttccgtacgaatactacntgtaataatcttctccgtgagcttcaaaaaatatgggttgaaattggtgagactgagactgagaaagatagaatgctaaggaattangagagagaatgtcctcaaaa

SEQ ID NO: 8706 - DNA, 503 bp, Arabidopsis thaliana
  unsure at all n locations
  Clone ID: LIB24-008-Q1-E1-D1
gtgttctttggccggcccggtccgaaattaacgggtcgacccacgcgtcnnnnnnnnnnnnnnnnnnnnnnnnnnnnnnncttgatgcctcgtgactgcaaccaaagcaatttaaaaccgccgcannnnnnnnnnnnnnnnnnnnnnnnnnnnnnnnnnnnnnnnnnnnnnnnnnnnnnnnnnnnnnnnnnnnnnnnnnnncgccatgcgctcgccgcatgctttccgtaacggcgaatctccgactttacgggaccatactcacttccactcaaccgtcacagctcagaaactccgtcgannnnnnnnnnnnnnnnnnnnnnnnnnnnnnnnnnnnnnnnnnnnnnnnnnnnnnnnnnnnnnnnnnnnnnnnnnnnnnnnncgcggctccgcttctcctcaatgggtacgatttcgacgctttcagatccgtggttggtgggaaaacgcgatcgtgggcgttaatactccgtgtttggaaatggggaacttgcgtttgggaa

SEQ ID NO: 8707 - DNA, 479 bp, Arabidopsis thaliana
  unsure at all n locations
  Clone ID: LIB24-008-Q1-E1-D11
cgtaccgtgtccgaaaattcccgcggtcnacccacgcgtccggaagattcttgtctctttgataaattctcggagtaggaggaatctctgactccttcgggcgagttgagctatgtggagttcggttgccaattnnnnnnnnnnnnnnnnnnnnnnnnnnnnnnnnnnnnnnnnnnnnnnnnnnnnnnnnnnnnnnnnnctcaccatttatgggtccaccaatggcggcactgatcggaggaattctaatggctttaggtattcgaggtctccaatggccaatggtttcgaatcgcctgttaatcctgagattgagagatataaagcagagatcaacaagcttcaaaaatcagaatcagaaaatcaaagctctttcagtaaattatgccggctctactaaaagagaaagaggatcagatttccagattgaaccaggagaatggctcccttgaaacagaatttgacntcaactaatgccg

SEQ ID NO: 8708 - DNA, 432 bp, Arabidopsis thaliana
  unsure at all n locations
  Clone ID: LIB24-008-Q1-E1-D12
gcnccctcttctgccccttctgtaaattcccaatccaacccttctctccttcctcctccgtctttgccccttcccccaatttcttcttcccgattctctcctttccctttttctttttacccgccaaaatcacatccaccttcactaacggctccttccccaatttccatttcccatttcattcatactcgaaaccctagatttctaattcctggatcggtgcttggatcttcttcagttttctcgtgttttggttgatacccagaatttgattcaactccaaattctccgttttttctcaaagagtaagttgctgtttttcgctgaggaattcactgtccagtgaaattgacgatgcacaagattaagctagacgaccgtactgataatgtgagagagaataagttcnttgtacaagttggttgttttgaa

SEQ ID NO: 8709 - DNA, 497 bp, Arabidopsis thaliana
  unsure at all n locations
  Clone ID: LIB24-008-Q1-E1-D4
ntgtttctttgccgcccggtccgaaataaacgggtcgacccacgcgtccgctaaaaggagaggagactttgaagaagaaagaaaacattcaaagctaaaaaacgcagcgttttaggaaaaaagaggtagagagtgattctggctttcccaacaatggaagctttcagtctccttaactactggaaaaacagtggtggtgctgttactttccttcctcactcctccgaatcttcttcttcttctctttgccgttactccgccggtgaatccatcggaaccaccaccattgtcacctctgttaccgaaactgaggacgaagaagctgatgaaaacgacgacgaaggaccgttcttcgaccttgagttcgctcttccagccgaagaagaagacacagacggaggagtcngaagagagggagactcccgantgtacggacggtggttgtgagtttaaattcactcctctcctccttgtttccggaagaagaagattcaant

SEQ ID NO: 8710 - DNA, 428 bp, Arabidopsis thaliana
  unsure at all n locations
  Clone ID: LIB24-008-Q1-E1-D6
ntatgacaagaatcttccttggtgggttcgtcatcacgtgtaacttcttcgcgaatagagtcgcagaacagtacaacggaaaattgaggagcggaactaaaagttggggacgtgaagcaggttttaggggtgcaaaatttgtctatgtcgacatgtacaacactcttatggatgttattaaaaattatanaagatacggattttctaatgagaaaaatgggtgttgttgtatgattacggctataataccatgccccaacccagataaatacgtcttctacgacttcgttcatccatccgagaaagcttacagaacaatttctaaaaagcttgtccaggatatcaagaatggccttgcctgatttattatatatacnatgctttanttttaaattttaataacagccatccgttaatantaagaaatg

SEQ ID NO: 8711 - DNA, 460 bp, Arabidopsis thaliana
  unsure at all n locations
  Clone ID: LIB24-007-Q1-E1-H9
ccttggntcgtacggtccgatnattnacgggtcgacccacgcgtccgcaaacgcntgggcggacgcgtccgcggacgcgtgggtcttttcttanggttcttgtttcgctatctcttaaacacaaacagctctgtcctaataatctctcttcaagtacctcttttttctgattctgtatatcnccatgaattactgatttccctctctataaacccatnaaagtaaancaatttctcctgtgacttgtacctaactcgatcttaccagactggtgatggcgtctttgaaccctttcgatcttctaggagatgatgctgaggattnaagccaactcgctgtggctttgtctcagaaagtcgagaaagctgctgctgctgttcaacctcctaagggcgctaaattcncaaccaaaccngntnctccttttnaaagcanttganggaatcnaaggaattgctcc

SEQ ID NO: 8712 - DNA, 484 bp, Arabidopsis thaliana
  unsure at all n locations
  Clone ID: LIB24-007-Q1-E1-F10
aacgttcgttgccggccggtccgaaatacgggtcgacccacgcgtccgcggacgcgtgggacttttttctccttctattctcttgtatcttctcattatagtctcgatgaagatgctgagacttagaaagaagcaacatttggtgtttctactatgcgtgtggtgtttggtggtggattggagcaaagcagaaacagaggaaagtgatggaagtcccatggagaaaacagagcaagctgctctatactctaccattcaaggctttgttggtgaatcttggaatggctcttatctttatcctgacccttgtggctggactcctatccagggtgtgacttgtgatatctatgatgagctttggtatgtaactgctctaagctttgggactatgaaagacaactctcttgcttgttctgaaagtccaatgatnagaccacaactccttgagctcaaacanctcaagtctcctctcccctttcaactg

SEQ ID NO: 8713 - DNA, 488 bp, Arabidopsis thaliana
  unsure at all n locations
  Clone ID: LIB24-007-Q1-E1-F12
ctgttcgttggccggccggtccgaaattaacgggctttgggctatcattgtcnctgatttgcctttgttattgctgctgtgcccgtcaatcttatggttattcccgggttgcttatgctctatcccttatcctcctcatctcgttcacaatcgcagcaatgatgtgtttttctttacactggtcaagggaaatttcatgctagcacaaccgatactttggactatgtcgtgagtcaagcgaatctcacgtcagaaaacctcaggaatgtgtcagattatcttaatgcagctaagaaggttgatgtgcaatccagcattttgccacaagatgttctctcgagtatcgacaacatacagggaaagataaactcgtccgccacaactctttctgtgaaaacaatggagaaccaangacaagatacaaaatgtcttgggcatcatgaagacttgctcccgtcatcatcgctgctgtgatgcctttccctgcg

SEQ ID NO: 8714 - DNA, 433 bp, Arabidopsis thaliana
  unsure at all n locations
  Clone ID: LIB24-007-Q1-E1-F4
gcaattttgtttctattttagcagaagtttctcgagcttcaaatactgtttcagatcaatcaatcagtcaatcatggctagctctggaaacaagaacatcaacgccaaattggtattactaggagatgttggagctggaaaatcaagtcttgtgctacggtttgtgaaagatcagtttgttgaatttcaggaatcaaccattggtgcagcttttttctctcaaacattggctgtgaatgatgcgactgtgaagtttgagatatgggatacagctggtcaggaacgataccacagtttggctccaatgtactacangggtgcaactgctgctantantgtcttgacattactaatcaagcctcattttgagaaggcgaagaaatgggttcaggaactgcangcacaanggtaaccctaatatggtgatggcccn

SEQ ID NO: 8715 - DNA, 433 bp, Arabidopsis thaliana
  unsure at all n locations
  Clone ID: LIB24-007-Q1-E1-F7
gcnctgccccattcaatacatgaagaagaacacagctgatgaagctacttccactaccctttgattccaattcgaattctcccccattgtaatcatcggatgcagcagaaaaatacctacaaatttcgattcttttcgtaatccattggactctttctgtttctgaaagagagtgtgtgtttttgcggtgatgggtcagcaattgcgtcgagctgttgggaaaatcaaagaagttgagagatcatcaccatcaagagtctccattgatcggagatcgcttcctacggaggagctcagtgccgtgaaatcgtctccgtctactgccgccgttgatggagtttctgataaaggtcgaagaaccagtgaggataatgttttagaggaacgagacccaagtatgatacaatgttgaaccaaatgggttgggaaaata

SEQ ID NO: 8716 - DNA, 433 bp, Arabidopsis thaliana
  Clone ID: LIB24-007-Q1-E1-F8
gcccacgcgtccggatagattcatctttcaatctttttttatcttaaaacaaaactttgtgtgaagagaaagatggagatagaatcaaagttcaagagaatatgtgtgttttgtggaagtagtgctggtaataaagtcagttacaaagatgctgctatcgaactcggaaccgaactggtatcgagaaatatcgatcttgtctatggtggagggagcattggtttaatgggtttgatttctcaagctgttttcaatggaggtcgccatgtcattggggttatccccaagacactaatgccaagagagataacaggagagacagtgggagaagtgaaggcagtagcagacatgcaccaaaggaaagctgaaatggctaaagcactctgatgcctttaatcgctttacctggtggggtatgggacacttgaagaac

SEQ ID NO: 8717 - DNA, 487 bp, Arabidopsis thaliana
  unsure at all n locations
  Clone ID: LIB24-007-Q1-E1-G10
ggaactgttctttgcccggcccggtccgaaattaacgggtcgacgcacgcgtccgcccacgcatccgcggcagagcatacttctctgcaacctcagcacatacatgcacaggggatggaaatgcaatggttgcacgggccggtcttccactgcaggacttggagtttgttcaattccatccaactggtatatatggggccggatgtctcatcaccgaaggatctcgaggtgaaggtggtatccttagaaacagtgaaggtgaacgttttatggaacgatatgctcctacagccaaggatcttgcatcaagagatgttgtctccagatncatgactatggaaatcagggaaggtcgtggtgtaggaccgcataaggatcatatctatctccatctgaatcatcttcctccaaaaagttctaaaagaaaggctcctggaaatctcctgagaccgctgccatctttgccgggtgttgatgttaccaaaag

SEQ ID NO: 8718 - DNA, 481 bp, Arabidopsis thaliana
  unsure at all n locations
  Clone ID: LIB24-007-Q1-E1-G2
ctgttctcctgccgcacggtccgaaaacccgggtcnacccacgcgtccggttagaactttaggtacaaatgcttcagttacgggatttggcaatgagtatgatgctctagcctctattcaaccccctggatccgggattggttcttctgctgctgaggcattaggaaaaaagagcactggtaaacatcagtcatctcagtggtggatggaagaggatggtttgtttaatctagacgatgaagggagatcagagaaacaaatgtgtgctattgctgcatcgaacgttatccgcaacttctccttcatgcctgataatgaagttgtaatggctcagcatcgccattgcttagaaactgttttccagtgcatacacgatcatatgaccgaaggatgaagagctggtcacaaactcgctagagacaattgtaaacctancgcatttgatggatcttcgaattttcagctcgcttaagcagtcata

SEQ ID NO: 8719 - DNA, 444 bp, Arabidopsis thaliana
  unsure at all n locations
  Clone ID: LIB24-007-Q1-E1-G6
gcccacgcgtccggtactgtaatttcatgcatgtgaancttgtttcgagggaactaagganaaaactctttgggagatatcggcgatcataccgcagaggaagtagaagcaggagcanaagcaggagtattanccccaggaanaagagagataatgaccgacgtgatccttctcacagggaattcagtcatcgggacagagatcgcnagttttaccgtcatggaagtggaaaaatgagcagtganangtcggagaggcaagagagggacggttcaaggggtaggagacaagcaagccctaaacgaggagggagcccgggtggcgggangggaangaattgaaggagagganggcaaaggattgagcantggcacaagagaaccgggaangagaaaggaagnanggaaggagcataaaaaacagttngtttactccaaatcacaa

SEQ ID NO: 8720 - DNA, 431 bp, Arabidopsis thaliana
  unsure at all n locations
  Clone ID: LIB24-007-Q1-E1-G8
gcccacgcgtccggtcgtgtttcggagtttctgaaatttgtaaaaatcgaaagattggcttcgcaatcgagacaaggaacaactctagaacatggatgaaagagatcgagaaattcgtgcttctcatggtgattctaatgctggtaatgtcgttagtcaaagcatagagaatactagagaagaagattctggttcatgtgaaggctttgttgaagagagcaaaagactggaaccggaacaacaaaagcatggtaaatattttttctatgacacaccgctttctgaggaaaccggggtttggatacctgtttcagtcccacccatgttagaacctgatcatgaggaatggtcaagaaggtcttaagttcaatggtnggtactccctgaaggagatatggggatngggaccaagatatttgatgaagataagg

SEQ ID NO: 8721 - DNA, 488 bp, Arabidopsis thaliana
  unsure at all n locations
  Clone ID: LIB24-007-Q1-E1-H10
angttcgttgccggccggtccgaaatnacgggtcnacccacgcgtccgttgttgacacaaattttgctctgagtaaaacttgggaatagagagagactctgagtgagagagagattctgagtgagagacggagatggaggcaagacgaaagcggcatctctctgccgtcgggacccgacggacgtaagcggcgagtcagttacttctacgagccgacgatcggagactactactacggtcaaggccacccgatgaagcctcaccggatccgtatggctcatagcctaatcattcactatcacctccaccgtcgcttagaaatcagtcgccctagcctcgctgacgcctccgatatcggccgattccattcgccggagtatgttgacttcctcgcttccgtttcgccggaatctaagggcgattcttccgctgcacgaaacctaangggattcaatgtccgtgaagattgtcctgtcctcgacggactt

SEQ ID NO: 8722 - DNA, 460 bp, Arabidopsis thaliana
  unsure at all n locations
  Clone ID: LIB24-007-Q1-E1-H4
ttcccgggnccacccacgcgtccgcanctctccagatttcgtgtgtgaagaatcatttcaagccatgtctccggctaaagttgatactaccaagaaggctgatcctaaggccaaggccttgaaggcggcaaaggctgtgaagtctggtcaagccttcaagaagaaggacaaaaagattaggaccaaggtcaccttccacaggccaaagactcttaccaagcctagaactggtaagtaccaaaaatcagcgctactccaaggaacaagttggatnactaacaaatccttaaagtaccactcaccactgaaatctgcgatgaagaaagantgaagacaacaacaatcctggtttcaattggtgacaatcntgctgacaagaaagaagantaanggtgctgtttaagaaagatgtttgacatccaagancaaagaaagttgnacacactcatcaanggcctga

SEQ ID NO: 8723 - DNA, 477 bp, Arabidopsis thaliana
  unsure at all n locations
  Clone ID: LIB24-007-Q1-E1-H5
taccggtacanaatcccgggnccncccacgcgtcngcaaaactgattttgcctgtttggttttggatccgagatggttccttcgagcgagacagcgaccgtacgagtcctttgccaaaagctgcttctctcaccgaaccatcctggaactctccaatggctcattggttccccatttttcccgcctttcaccgtcgtctccactttccgatgtatccatcactctcctgatttccagcaagaatctgatgatctccggaagttgttaccaaaaggttttgaagtcattggaggtctgataattggagattctgatgctgaagaaaagcgcatttgaggcggttcgagctgctcgtagattgcgaaagcaattatctgaaaggtgggagaattangatgatgaaaagaatagtttgggggctaagttgccaatgttaggcactggtaaccattcacntttcatctctaaaaagtgaaa

SEQ ID NO: 8724 - DNA, 445 bp, Arabidopsis thaliana
  unsure at all n locations
  Clone ID: LIB24-007-Q1-E1-H7
cacgcgtccgtntaacagtgccatttgtatctctgaactccaaccatggctcctctggttctctaccttctcactctcctcatggctggccataccagtgcctcatggtgtgtgtgcaaaacagggctgagtgactcagtgctacaaaagacattagactatgcttgtggaaatggagctgactgtaacccaactcacccaaaaggctcttgcttcaatcctgacaatgttagggctcattgcaactatgcagtcaatagcttcttccaaaagaaaggtcaagcttctgagtcttgtaacttcactggtactgccactcttaccaccaccgatnccagctatacaggatgtgcattcccttctaagtgctagtggttctaatggaagcggtagcancaacgtgacgccaaggcaaaaaacagtccaaaaaggaagcaacancatc

SEQ ID NO: 8725 - DNA, 435 bp, Arabidopsis thaliana
  Clone ID: LIB24-007-Q1-E1-E8
gaagaaaaataagataccactcaccaaaaacttcctcaaaactaacaaatggatactaataaagcaaaaaagcttaaagttatgaaccaactcgttgaaggccatgacttaacaactcagcttcagcaactcctctctcaacccgggtccggtctagaggatctagtggctaaaatcttagtgtgtttcaataacaccatctccgttcttgataccttcgaacccatctcctcctcctcatccctcgccgccgttgagggatctcaaaatgcttcatgtgataacgacggcaagtttgaagattccggcgatagtcggaaaagattgggacccgttaaggggtaaaagaggatgctacaaaagaaaaaagagatcggagacgtgtactatagagtcgactatacttgaggacgcattttcctgggaggaaatatg

SEQ ID NO: 8726 - DNA, 428 bp, Arabidopsis thaliana
  Clone ID: LIB24-007-Q1-E1-C2
atcatcatttcccgtaatcgtaatcggagttcaggcttcagcattctctcttcttctctctcgcagccgtagtttttgatcttctcttcaattctctctcctgatggccacgtccgccgtcctctccggtgccagatcgatgcttcgagctgcttcctcacgcagcgccgctgcttctactggccgcttcgcctctcaagcgaaatccgctccaccattgtttagagccactgccagaagaagcccactgctttctcctctccgaaatcctgtggaactgagcttctgtgtggagtcattgttaccatatcactcggctacagcttcagcgctaatgacttcaaagctttctatctctggccaaacctatggctggctctctgacgcttgcaaagaggacttttgatgatgtctacgcgtacccaatg

SEQ ID NO: 8727 - DNA, 462 bp, Arabidopsis thaliana
  unsure at all n locations
  Clone ID: LIB24-007-Q1-E1-C3
gaaatcctagggcacaggtgaaatcgccgagtgacgtctagccaccgcaccgcctccttctccggttatctcgctactaatcagactattccacagctatgtcacaggtagacaacagaaattcatcagcagccaagcgtgctagaactgacggggggcgtagagaagatgattggatctgcccaagttgtggcaatgtcaacttttcattcaggacaacttgcaatatgcgtaattgcactcagcctaagacctgcagatcataatggaaagtctgctcccaaacctatgcaacatcaacaaggtttctcatcaccccggggcatacttaaggattctggggggtcccccctccaagttatatatggggcggggtcaaccatatgggattctccctcctcctttaaatgggattcgtccaatgcctccttaanaacgtcccaattttcctggggggttcgc

SEQ ID NO: 8728 - DNA, 405 bp, Arabidopsis thaliana
  unsure at all n locations
  Clone ID: LIB24-007-Q1-E1-C5
ggaaagattgaagaaagaagagagtgctttgagggtgcagataatgcaggaactggatgacattagactgcagagagaatcatttgaagccaatatggaacatgaacgatcagcgttacaggaaaaagtcaaacttgagcaatctaaggtgattgacgatcttgaaatgatgagaaggaatcttgaaattgaacttcaggaaagaaaagaacaagacgagaaagatctactagacagaatggctcagttcgaggacaaaagaatggcagagcttagtgatatcaatcaccagaagcaggctttgaacagggagatggaagaaatgatgtccaaaaggagtgctctccaaaaggganagtgaagaaattgcanagcacanggacanactaaaagagcagcangtta

SEQ ID NO: 8729 - DNA, 457 bp, Arabidopsis thaliana
  unsure at all n locations
  Clone ID: LIB24-007-Q1-E1-C7
ttcncgggtccacccacgcgtccgcattaatcctcacaactctctatctctctctcgccccattctctatcataatgacaggtgccacaccggaaaaccgaacggccccgtcgccaccaccggtgaaacatgtgccggagtcagttctgccggctaaaccaccaaagaggaacaattatgcattcgcgtgtgctatcttagcttccatgacttctatcctccttggttatgatataggagtgatgagtggagcaatgatttatataaagagagatttgaagattaatgatttacaaatcgggattctcgctggaagcctcaacatctattcacttataggatcttgcgccgccggaagaacctctgactggattggtcggcgttacactatcgtgttggctggagccatattcttcgccggagctatccttatgggattgtcccctaactacgcttt

SEQ ID NO: 8730 - DNA, 431 bp, Arabidopsis thaliana
  unsure at all n locations
  Clone ID: LIB24-007-Q1-E1-C8
gaatcaacgcaacgccgagaagctttttcaggggtttggtgcgttgaatttgtggatcaagaaacaatgcaaattcaatgcaaaaccctaacttttacagtttcttcgattccttgtaacccaaagctaccattcccatcttccctcactttacggtcatggaatccttcattcccgagtttcaggagctccgctgtttccggaccaaagtcatcactgaagctgaacaggtttttaagaaactgtgcaagtacgaatcaggagcttgttgttgatggagaaaccggaaatgggtcgatttcggagctccaaggagatgcagcaaatggttcgatttcgccggtggaagtggaagcanaagtagaagaagtgaaggtagatgatttggcgactcagagcatttggggacagatgaaagagatcgtcatgtt

SEQ ID NO: 8731 - DNA, 460 bp, Arabidopsis thaliana
  unsure at all n locations
  Clone ID: LIB24-007-Q1-E1-C9
gggtcgacncacgcgtccggcaagatctaatcgggtctgatctcgagcttccttcactaaccagagatcagaatcgtggtggtggttacgatctcgtcgatcgaatgccgtttctatacattcgtgtagctaaagcgaagcgagcgaagaacgatggaagcaatccggtttacgcgaagctcgtgatcggaacaaatggcgtgaaaaccagaagccaaaccggtaaagattgggatcaagtgtttgcttttgagaaagagagcttaaactcgacctcgcttgaagtttccgtttggagtgaagagaagattgagaaggaagataaaacaacgacgactactgagagttgtttangaacggtgtcgtttgatcttcaaagaggttcctaagagagtgcctcccggatagtcctttggctcctcaatggtacacattgggaatctgagaaatcaccggggaa

SEQ ID NO: 8732 - DNA, 491 bp, Arabidopsis thaliana
  unsure at all n locations
  Clone ID: LIB24-007-Q1-E1-D10
gaactgtttcttagccggccggtccgaaaatacgggtccacccacgcgtccgcaagatctctctcagacacagtttcttccatccatggcgtctctttcttctacctctctctctctccccaagaattctcaccaactccatccttcatctggtttttctctgaatccaaatgctcgttgtgtcagtgtttcatttggactgaatcactccaacaaacttcatatttctgctcctagaaccaaaaggatcctaaccattcaatctgcatacagagatgatgatggttcaggcagcacaggcctattcgtcggagggtttattttgggcggacttatagtcggtgccctcggatgtgtatatgcaccacagatnancaaggctatagctggagcanaccgaaaggatntcatgaggaagttgcctaaattcatatatgacgaagaaaaaacttttggagaaaacacgtnaagggtactaactgagaaaaatt

SEQ ID NO: 8733 - DNA, 430 bp, Arabidopsis thaliana
  Clone ID: LIB24-007-Q1-E1-D5
caacaaacagatacaaatgggaagcatcgatgctgcagtgttgggttcagagaagaaatcaaacccgggaaaagccacaattcttgctctgggaaaagcctttcctcaccagctagtaatgcaagagtacttagtcgatggctacttcaaaaccaccaagtgtgatgaccctgaactcaaacagaaacttactcgtctctgcaagacaacaacggtgaagacaaggtatgttgtgatgtcagaggagattctcaagaagtacccagaacttgccattgaaggaggatccacagtgacgcagcgtctagacatctgcaacgatgcagtgaccgagatggcagtagaagcctccagagcctgcatcaagaactggggacgttctatttccgacataactcacgttgtctatgtctcctcaagcgaagctcgt

SEQ ID NO: 8734 - DNA, 436 bp, Arabidopsis thaliana
  unsure at all n locations
  Clone ID: LIB24-007-Q1-E1-E1
gcggacgcgtgggttggctctgtgtatgaagccatttcagaagatggggacttctttgctgtcaaggaagtttcacttcttgatcagggaagtcaggcacaagaatgcatacaacaacttgagggggaaattgcactacttagtcagcttgagcatcagaatattctgcgatatcgtggcacagacaaggacgggtcaaatttgtatatttttcttgagcttgtaacacaaggatcccttctagaactctaccgaagataccagattcgggactcgctaatctccttgtacacaaaacaaatccttgacggtttgaaatatcttcaccataaaggtttcattcacagggacattaaatgtgcaactatattggtggacgccaaatggcaccgtcaaacttgcagatttgggattggcaaaagggtcaanttaaacg

SEQ ID NO: 8735 - DNA, 483 bp, Arabidopsis thaliana
  unsure at all n locations
  Clone ID: LIB24-007-Q1-E1-E10
acgttccttgccggccggtccgaaatacgggtcgacccacgcgtccgcccacgcgtccgtagagcggcgcagatcgagattgtgaaatcgaagctaagagaaacgggaagaagctggatgccgtataaggagtttgttagcgtttgtggtgaagcttcttcagatccagatctcggatctaaaatcgcgaagatgcttgatgattcagcaaacgtcatcgttttgggagattccgtttgtattagacctgatcaggtactttcttcgttcttcttctctagccttttagcattttgaaatcgtgctttgtctctgagatctctctgagtattgcagctgattgattgggagagataagagagagatttaaaaactctctgaaaaaaacggattaagttctcaaaaagtttttgttcgattttgattttggaagctataccggaaactggataccaattttaatccgttgggtccctttccntt

SEQ ID NO: 8736 - DNA, 490 bp, Arabidopsis thaliana
  unsure at all n locations
  Clone ID: LIB24-007-Q1-E1-E11
ttcgttnggccggccggtccgaaattaacgggtcgacncacgcgtccgaattcacacaaccaaaaaaaccaaccttttttttccacctaaatctttgaatatcacaatatttactatttacaatggcgccacaagaacaagcagtttctcaggtgatggagaaacagagcaacaacaacaacagtgacgtcattttccgatcaaagttaccggatatttacatcccgaaccacctatctctccacgactacatcttccaaaacatctccgaattcgccactaagccttgcctaatcaacggaccaaccggccacgtgtacacttactccgacgtccacgtcatctcccgccaaatcgccgccaattttcacaaactcggcgttaaccaaaacgacgtcgtcatgctcctcctcccaaactgtcccgaattcgtcctctctttcctcgccgcctcctttcggcggcgcaaccggcaacggccgcaaaaccc

SEQ ID NO: 8737 - DNA, 442 bp, Arabidopsis thaliana
  unsure at all n locations
  Clone ID: LIB24-007-Q1-E1-E3
aanaacgtctggcgtctcttcaacaaactctattctctcttcaatccaaactcccaccatcctccttccaaatcgccagatctctcccactccgaaaaaccttcccaatccgaatcaacaacggtggaaacgccgccggagcaagaatgtcagccaccgcagcatcaagctacgcgatggcattagcaagacgtcgcgaaaagaaacgacacaatggaattaacagtcacagacatcgagaagctcgaacnagtcttctcacntncacaagtacnaaacttcttcgcgaatccaaggaatcaccgtcgangaaganacgtcaagtcctcgacnacatagtngaaatcgtcgtctcttcaaagctcacacatcnaangtcctnaacgtcgtcgtcgangcgaantcgggatnantanccttgacggagatcgttaangagttt

SEQ ID NO: 8738 - DNA, 485 bp, Arabidopsis thaliana
  Clone ID: LIB24-007-Q1-E1-E4
ctgttctcctgccgcacggtccgaaaatcccgggtccacccacgcgtccgattccaaaacactgcgccgggaagacatggacaccgagatggagacagaacaaatataccaggtcgatgtcggaaatctcttggctttcaatcccaatcaccgcttcccatctgctccttcttcaaggggggagcttgtgaaggagatcctaacggagggaacaaaacttgttcaggaaatagccaataaacttttcaactttccttctactgaaacaaatgatggtcctattgtccaattgcctccgcctacaaccaaacttcctagagagaaacatattccaaggcctaagcctcctacgaagtgggaagagtttgcgcttaagaaaggtatacaagaagcgcaagaaggaaaaagttgtatgggatgaacaaactaatcagtttaagcgtcgccatggttatgaccgtgttaacgatgataatgatgttccc

SEQ ID NO: 8739 - DNA, 427 bp, Arabidopsis thaliana
  unsure at all n locations
  Clone ID: LIB24-007-Q1-E1-E7
tttactgtcaggtagaagaatccatgtcgatttacgtcgcgtcgcgacggctctccggcggaacaactgtgacggcgctgcgttatgccacctctctgagatcttattcgacctcgtttagggaggagagggacaccttcgggccgattcaagttccttccgataaattgtggggagcccagacgcagagatcgctgcagaacttcgaaatcggtggtgagcgcgagcgaatgcctgaaccaattgtccgcgcttttggcgtcttgaagaaatgcgctgccaaggttaacatggaatacggtcttgatccgacgattgggaaagcaattatgcaagctgctcangaagtagctgagggaaagctcaatgatcatttccccttgttgtctggcaaactggtantgggactcagagtaatatgaatgcc

SEQ ID NO: 8740 - DNA, 493 bp, Arabidopsis thaliana
  unsure at all n locations
  Clone ID: LIB24-007-Q1-E1-C12
aactgttcgttggccggccgggtccgnaaattaacgggtcgacncacgcgtccgcancaagacacataaatcgtaatccattttctctcaactttaggaatctcaaatctccgatttggaaatccggcgacaatggtgagagatattgaagatgagattagagacgagaagaatcctcgtcctcttgatgaagatgatatcgctctcctcaagacttatgggttagggccttactctgcacctatcaagaaagtggagaaagaaattaaggatctcgccaagaagatcaacgatctatgtggtatcaaggagtctgatactggtttagctcctcccagtcaatgggatcttgtatctgataagcaaatgatgcaagaagagcaacctctgcaagttgcgagatgcacaaagattataagtccaaacactgaaagacgccaaatacgtcataaatgtcaaaacaaattgcnaagtttgttgttgggccntggcg

SEQ ID NO: 8741 - DNA, 413 bp, Arabidopsis thaliana
  unsure at all n locations
  Clone ID: LIB24-005-Q1-E1-H1
gatttttcactcatactaataattaaaagggactaggaaaaataaaggcacattttctccgttggaataatcaacggttacgtatggagaagattgtgtcacgtggaagctaatccaccacgatccagtttcatctctattaacaaagatcactccttccctcgcttcaattttagtttctattgttgttcatctctcaatcgtctctttcgatattttctcaggaaaatctttacaacatccgtggagaagcaacaccagaatccgaattcagcgatggatccagcgcggggaaatgcgaaaggcaaaaggagcttgcgaatttgaaatcgaacaagcgaattgctgataaaatcaatgcctcaacctctcaaacttgtnacggtccaatgnaaaagccaaagaattttaca

SEQ ID NO: 8742 - DNA, 478 bp, Arabidopsis thaliana
  unsure at all n locations
  Clone ID: LIB24-005-Q1-E1-H10
ttantttccccgccggtaaagtctaacgggtcgancacgcgtccgntctgcacgttttttaacaatttgtgctcttcttcttccgtttcttcttcgccgtcagattcgactgtaactgattcatgagttaaaagagtatgttcgatacttgtggcccaaaaggagtcaaatctcaagtcatcagtggccaacgcgagaactttgtgagatagtatggactcaaggtactcgcaaagttccgaaacgggtctaaacaaatgcacattgaatatacaaggaggacctaaacgttttgctcaaggaagcaaagcatcatctggatcttttaagaaagggtttagaaaaggatcagaggggctttggtctataggtcgatcgattggactcggtgtttcgcgcgctgtgtttccagaagatcttgaagtatcagagaagaagatatttgattcacaagacaagtttcttttactctgcaaca

SEQ ID NO: 8743 - DNA, 429 bp, Arabidopsis thaliana
  unsure at all n locations
  Clone ID: LIB24-005-Q1-E1-H11
aaactcttctgtttantattantantatagttagctttttaatataaaacggatattagaattttgtaacanagaaatcggcgggagtcgtgtgctttagcccaaaaacattggcctcgttgtccaacgtgtgtatttggaggaaaacatcattagagggccacatatacatctctctaattacactttacgaatattaaacacatttaattgtacttaatcctcggcataacacttgtccattaagtcaccatgtacttgctataaatatggtcaagtccagtccataatatatgcatctctgatctttcttggtgagagtaatanacatgggagctcttgattctctttccgagtatatctccgactacttccgcgtcaccagaaaaaggaggaaacggnaagtcatgcagacngtgaatataaagg

SEQ ID NO: 8744 - DNA, 427 bp, Arabidopsis thaliana
  unsure at all n locations
  Clone ID: LIB24-005-Q1-E1-H12
ccnggacgcgtccggaaggtntacgtcgccggaggacatgatgatcagaagaacgctctccgatcggcggaagtgtacgatgtagagaaagacgagtggtcgatgcttcctccgatgacggaaggaagagacgagtgtcacggattctcgatggcgacggatcctggattttgtgttttgagcggttatggaacggagacgcaaggccaattccgatctgacggcgagatttacgatccgattacgaattcatggtcgacaatcgagaatgtctggccgtttcccgatttgagtccgagaggtcgcaccgccgcggctgctgctgaattccccggagattttagaggttgtcggttatggtgttttattgatagcgagagacagagtcagcctcattgggaagttgaagacgattcnatgaaatgga

SEQ ID NO: 8745 - DNA, 478 bp, Arabidopsis thaliana
  unsure at all n locations
  Clone ID: LIB24-005-Q1-E1-H2
naaactgtctttgccggctccnctaccgngtccanaaattcccggggtccaaccaagccgtncgnataacttncnaacccgttanggaccnaattggggtngttncggttngtggnagggcccgtcagggaaagacttaattttgnatcaagcttccttggacgcaagtaatgggtttcaaagtagcatcaacacacaagccgtgtaccaaggggctttggttgtggagttctcctataaaaagaacagctcttgacggaactgaatacaatcttttgttattagatagtgaaggaattgatgcttacgaccaaactggtacctacagcactcaaatattctcattagctgttcttttgtcaagcatgttcgtgtataatcagatgggaggcattgacgaagcttcactggatcgcctttctcttgtcactcaaatgacaaagcatatccgcgtaaaagcttctggagggacgaactc

SEQ ID NO: 8746 - DNA, 404 bp, Arabidopsis thaliana
  unsure at all n locations
  Clone ID: LIB24-005-Q1-E1-H5
cgaaaaaaggctcagaatcgtatccgatcaaaaccatcgtcgttttggttcaagagaatcgttctttcgaccacacacttggctggttcaaagagctaaaccgggaaattgacggagtcatgaaatcggaccagaaattcaacccgggtttttcctctgacctaaattcccacaacgtcgtctttggcgaccagtctcagtacgttgaccgaatccaggtcactccattcgggatatttacgaacaagtgttcggtaaacatgggattcgggtcaccccggaaccnaacccgggtccanctacantgtccgggattttgnccaaaaacgccnagcgaaaannatgnaaagggatgtccttcngnncgggtnannaacnggnttaaaaccgggcncctttcccgg

SEQ ID NO: 8747 - DNA, 417 bp, Arabidopsis thaliana
  unsure at all n locations
  Clone ID: LIB24-005-Q1-E1-H6
cagttgagcatccgagttactcgttagactattctttcaagccatactcagaggactggtttgtatccgatgttggaatgaagatgaaaaaggtgatggaatcaactaacatggtagctgttgattgtgagatggttctttgtgaagatgggactgagggtttagttagagttggtgttgtagaccgtgatttaaaggtgattcttgacgagtttgtgaaaccgaacaaacctgttgttgactataggacagacattacagggattactgctgaagatatcgaaaatgcctaagtcctctcctgtggtagaatatacaggaaactttgcaanccctttctttctacngggtacgaattttgggttggtcacaagtttaaacangagatttgggaagtgttaaagatagatcatccta

SEQ ID NO: 8748 - DNA, 433 bp, Arabidopsis thaliana
  unsure at all n locations
  Clone ID: LIB24-005-Q1-E1-H9
gagttcaactcccaaagtagagagctacatgcagattgttttcctagtttccggtgctgcactattgcttccaatattaatgactttgttcatagcaccttccaaggtgaaaggtggaggaatctctttctcgggttgctttcagctccttgggttctgtatattcgaggcgtgtgtaggactgttttggccatccataatgaagatgagatcccaatacatcccagaagaagccagaagcacaataatgaactttttccgcattcctctgaatatctttgtctgcgttgtattgtacaatgtaaatgcattccctatcacggtcatgtttggaatgtgctcgatctcctctttgttgcaagtctcctacaaangnggctcatgatgattgttgacaaaccaaaaacaaatgactgggcacccctnaagaaaa

SEQ ID NO: 8749 - DNA, 436 bp, Arabidopsis thaliana
  unsure at all n locations
  Clone ID: LIB24-006-Q1-E1-A11
gggcatactcaatacgacattgttcatcaactatctctctgcttatattgttgagatagaccatgaaaatatactcggtcctgttagcttccttgccgatcttggtggtttgtattgcatcagtattggcatatttttctacctactagtgcagtgtgagtacaggatcaagaagctgcgaaatgaagatactgttttcaggaagataaggaatcgtcgtaaagctctagatcactgggataaactgagaagatatgttgcatacacatgggattgcagcatattggtcgatgatgccatcaaaacgacaaaggtatcaggaatgtgtggtttaacgagacctccaacatcttctaatagctcggaacacggggaatcgatcatggcgaacaagaagcctaacttangtattgagaagaatgtgatttcacaacct

SEQ ID NO: 8750 - DNA, 409 bp, Arabidopsis thaliana
  Clone ID: LIB24-006-Q1-E1-A4
agctttagattcgtcagattctgattactcgaatcaaagcagggtttttgacactaaaaatccgatctcgtgaagtgtgttttgcatcgaatcggaaaatatgaaagaagggaaatcatcgaagtcgtcgagtcaacaagagcagcatgaacagatttatcatcaaaacagtcacttgggttctttcaacttcgccaaattgtttgattctgaagcttcctgggacaaggatcaactgggagatgtgttgcattggatcaggcaagtagttggtttactctgcggattgttgtggggtgcgatacctttggtaggaggcatatggcttcttctatttcttgcaatctcctctggcatagtatatggttactatgcattggttctaaagatcgatgaataagactcggtg

SEQ ID NO: 8751 - DNA, 418 bp, Arabidopsis thaliana
  unsure at all n locations
  Clone ID: LIB24-006-Q1-E1-A7
gntcacattctaatccaagggaatctcctaaaagatgcatacattgtagtgaaggacaatgcgaagatgatctcacagcctactttaaagaaatttggcagagcttttatgatctcgggtaatattaatttagtgaatgatgttctgaaagtattgcatggttctggccacaaaatcgatcaggtaaatagccaaccggtaacaatttgatgctattttgccaacgttttacttggaaataattttcattacagttgagaaataaggaaaatttcgttctttaatcatactgaatctcatttcttgccttcactgtgtacttttgttttcaggttcagtttgagattgcgatttctcgatacatttcgcagcccgataaaaaggaattgcttcttcaacttctacaatggatgcctgg

SEQ ID NO: 8752 - DNA, 427 bp, Arabidopsis thaliana
  unsure at all n locations
  Clone ID: LIB24-006-Q1-E1-A9
gatctgaagatgatgaagatacatggtcaggaggagatcctactgtgttgagaggtactgatttgtctgccacagattcttatcctttaaagaaacagaagctggggagcgaagttgctggacgaaaaaagactttgtttaggagtcaaagtgctcaaagtcgttcatttagagtccctcagagtgaaaaagaggatgagtcacttgagggagttaatataaaccgattaaagaagagcgttgcttcatttcaagaagataagtatccacctggaaagaagttttgctcagatgcatctcctcgtggaactagcatgagaaagttttccccaccttttgtaccaaatgcctggagacgactatctatgcctgtggagctaaagaaagctcggttggatttctctgaggaaaaagatgatgaanaaac

SEQ ID NO: 8753 - DNA, 437 bp, Arabidopsis thaliana
  unsure at all n locations
  Clone ID: LIB24-006-Q1-E1-B11
gccanactgtcagaactgtgccttcttcacanagccgtgaggaaaaactctaagcctatggttgaaatgctcttgagatatattcccaagcaacanagaaacagcttgtttanacccgatgctgctggtccagccggcttaacacctcttcatattgcagctggtaaagacggttcagaanatgtgttggatgcgctaacagaagatcctgcaatggtggggattgaagcgtggaanacatgtcgagacagcacangcttcacaccagaagactacgcacgcttacgcggtcanttctcatacatccacttgattcaacgcaagatcaatagaaagtcaacaactgaagatcatgttgtggtcaacatcncagtttctttctcagacaganagcagtnagaaccaatatcaagtccgatggcttcagccttggagat

SEQ ID NO: 8754 - DNA, 426 bp, Arabidopsis thaliana
  unsure at all n locations
  Clone ID: LIB24-006-Q1-E1-B12
cannnnnnnnnnnnnnnnnnnnnnnnnnnnnnnnnnnnnnnnnnnnnnnnnnnnnnnnnnnnngttaccttcgaattctccatctcctaccattcaaagcttctctcagatgtctatagtctctaagcttcgttctccggttaaaccaatagatgagtcacgagctatcctctgttcgaccgggaacagatttaaggttacgaaaacagaaatgacgaagaagccacaactgaatccacgagtgacgaaatctccggcgacgaagaagcccgattccaatttctcagtttcgactgatgattcctcttcttcttcttcatcctcggaacgttcgtcagtgaacacgacaaactctgggaaagtaaccactccgtcgaaacggaacggagttgagaaagctcaataatgtcgttgcctccgtcgccg

SEQ ID NO: 8755 - DNA, 406 bp, Arabidopsis thaliana
  Clone ID: LIB24-005-Q1-E1-G6
ttcttagcgtcgctctctgtcaccttcaagttcactatctccgacttatcttctgtcaagtactgaacaagaatcatggaggagatcaccaaaccggtccttgttggaatagttaagaaagaagctccacagctagcatccgtgttgagagaaatgaagaatgttctagatgtggttaggagcaaagtggaagctctgactgcattggtaaaagcaaacagttttccgacagcgggtgggataagttatcttgaggccaagcatctgttacttctaagttattgccaggatcttgtatattatattctaaggaaagcaaaaggactctctattgatggtcatcctcttgtaaggagccttgtagagatacgtatgtttctggaaaagattcgtcccatagacaaaa

SEQ ID NO: 8756 - DNA, 404 bp, Arabidopsis thaliana
  unsure at all n locations
  Clone ID: LIB24-005-Q1-E1-E6
tctctagtaatgctatggtctccgaatgtttatgtgttgctcttaggaaggttgttagatggatttggggttggtcttgtggtcacacttgttcctatttatatatctgagactgcaccacctgagattaggggactgttgaatacgctaccgcagttcactggctctggagggatgttcttatcttactgtatggttttcggaatgtcgttgatgccatcacctagctggagattgatgcttggtgtccttttcatcccttcccttgtctttttcttcctcacgggtcttcttcttgcccgagtccccaangtggctcgtgagcaaaaggtcgaatgcttgaancaaagcggggttcctcaagagactgcgtggtcccgaaagatgtgtccgggtgaagatgg

SEQ ID NO: 8757 - DNA, 482 bp, Arabidopsis thaliana
  unsure at all n locations
  Clone ID: LIB24-005-Q1-E1-E9
cgtttacgcttgcccngtgccggtccaaaattaacgggtcgacncacgcgtccgaccaaggttgtcgcgttgagatatgtcatttgaagaagacaatcttgtctgtagaagatatcattgatctgatcggagacaagtgtgatggagtcatcggtcagttgacggaagattggggagagactctgttctcagctttgagcaaagctggagggaaagctttcagtaacatggccgttggttataacaacgttgatgttgaagctgccaataagtatggaattgctgtcggtaacactccgggagtgttgactgagacgacggctgaactagctgcttctctttccttggctgctgcaagaagaattgttgaagccgacgaattcatgagaggtggcttgtacgaaggatggcttcctcanctgtttgtggggaacttacttaaaggacanactgttggagttaatggagccggacntattggg

SEQ ID NO: 8758 - DNA, 406 bp, Arabidopsis thaliana
  unsure at all n locations
  Clone ID: LIB24-005-Q1-E1-F1
aagagcatgacgatgacgacgacgacgatctctctctttcatcggattccgatatcgctgaagctcttgattggctcgacggaaaagacgatgacgagctaataggtggtggcttttccctccatgctcgtcgtcctaatgctcacggtggacatggttcacgtcctaactctagttctcttcaacctatatcaaataaagcccagaagcttactagtcatgttcgtgcttctcctttagagggatgggaaggaagagttaaagttgggatgtcgaattctgtgacaactgcgattcgtggaagtcttaagagatacagaaattgggagaagtaggaatactgataaagctgaccgggcaacagttgaacaagctcttgatcaanggactcgtatgggtttgttta

SEQ ID NO: 8759 - DNA, 486 bp, Arabidopsis thaliana
  unsure at all n locations
  Clone ID: LIB24-005-Q1-E1-F10
aactgtttaccttgccggtnccggtccaaaattcacgggtcgacccacgcgtccgngctcactttgttttagctttctcctctacttcgataatgccgtttgctccttccttgttgtcatcgtcttcctcagtctctcaatttcttcccagattccccaacgcgactagattcaatgtaactccacggagcagagccgccaccgtcgtcgcggcatccgtcaccgacctagccggggtcgacagtacaacaatcgccgtactcggtggaggatccgtagcagcactcgcggcgatggtttccttaacggatccggagaggaggcggaaattgcaggcggaggaagttggcggaggcgataaggaggttgtgagggagtatttcaatagcacggggttcgagaggtggaggaagatctacggtgagactgatgaagtgaatcnagtacagaaggatattcgactcggtcaagctaaaaccgtggnga

SEQ ID NO: 8760 - DNA, 465 bp, Arabidopsis thaliana
  unsure at all n locations
  Clone ID: LIB24-005-Q1-E1-F12
ggtccanagattaacgggtcgacccacgcgtccgaggacgcgtgggctgaattctgatcgtatcttcttctctttaagattatcatttgaatatcttcttcatcttcttctccaagcccctctctctctgtatcgatcaatcatcaataggaggagctagcgaggggattcaataaagagannnnnnnnnnnnnnnnnnnnnnnnnnnnnnnnnnnnnnnnnnnnnnnnnnnnnnnnnnnnnnnaatggtgatggaggacaacgagagttgcgctantagagttattttcgacgccttacctacctcccaggccactatggaccgccgtgagcgcatcaaaatggaggtcttcgatgaggttctccgccgtctccgtcaatcggacattgaagacgcccatctccctggtttcnaagacnacctctggaatcacttcaatcgcctccctgccaagtatgcnttgg

SEQ ID NO: 8761 - DNA, 406 bp, Arabidopsis thaliana
  Clone ID: LIB24-005-Q1-E1-F2
tgcttcatctgatgaaaccgataaagatgaagaagctgagaaaactgagatgatgaccaatgaaaataacgatggtgataagaagaaatcggattggcttagatctgttcaattgtggaaccaatcaccagatccacaacctaataataagaaaccgatggtaattgaagtcaaacgcagcgctggtgcgtttcaaccgtttcaaaaggagaaacctaaggctgcagattctcaaccacttattaaagcaattactccgacgtcgacgacgacaactagttccacggcggaaaccgtcgggggtggaaaagagtttgaggagcagaaacaatctcattcgaataggaagcaaagacgttgctggtcaccggagttacaccgcagattcttgcacgcgcttcaacaa

SEQ ID NO: 8762 - DNA, 411 bp, Arabidopsis thaliana
  unsure at all n locations
  Clone ID: LIB24-005-Q1-E1-F3
gaatctcttcaatggaacgattccggcggcgatgtttaaacaatccgggaaaatcgctgccaatttcatcgccgggtaagaggtacgtttatatcaaaaacgatgggatgaagaaagagtgtcatggagctggtaatttacttgagtttcaaggaatcagatccgaacaattaaaccggctttcaacgaggaacccttgtaatatcactagcagagtctatggaggtcacacttcgccgacgtttgataacaatggttcgatgatgtttccggacatgtcctacaacatgttgtctggatacataccgaaggagattggttcgatgccttanctgtttaatcccaatttgggtcataacgatatctccggttcgattcctgatgaggtaagtgatctaagaagtttaaaca

SEQ ID NO: 8763 - DNA, 412 bp, Arabidopsis thaliana
  unsure at all n locations
  Clone ID: LIB24-005-Q1-E1-G1
cgtccggcttcttcataaatctctctctcttctcctctcttctcaaagatcgaacctttcgatttcagtctcttcagagttctttcgttttcatcgaaanaatggcgaagaacgttgggattttggctatggatatctatttccctcccacctgtgttcaacaggaagctttggaagcacatgatggagcaagtaaagggaaatacactattggacttggccaagattgtttanctttttgcactgagcttgaagatgttatctctatgagtttcaatgcggtgacatcactttttgagaaagtataaagattgaccctaaccaaaatcngggcgtccttgaagttnggaagtgagaactgtaattgacaanaagcaagtcaatcaaagaccttccttgatgcaanctcttt

SEQ ID NO: 8764 - DNA, 482 bp, Arabidopsis thaliana
  unsure at all n locations
  Clone ID: LIB24-005-Q1-E1-G10
ttagtttccgtgccggtccanaattcacgggtcgacccacgcgtccggtgctcgtcgaagaaacttctccaacctaaaattttccgaagaagtaagagttgagcaagttatcaatggaaatcgatgaagaagagccaatggtgttcttggaccgtacaacaagagcaacacggggtaaacggatgaccaagttgctnnnnnnnnnnnnnnnnnnnnnnnnnnnnnnnnnnnnnnnnnnnnnnnnnnnnnnnnnnnnnnnnnnnnnnnnatatgaagcagaacgtgaggttgctgatgagtttgacagtgacttcaatgacgatgagcctgagcctgatgcagtcgctgtaaatgaaaaagaattgagggatctgccaaagaagcggctgatttaccctgggaaaactgcttcaaagaaaaagaaaaagaagacgaaggtagtttcacaactaagaatatattcctggagatgagaaaccaag

SEQ ID NO: 8765 - DNA, 485 bp, Arabidopsis thaliana
  unsure at all n locations
  Clone ID: LIB24-005-Q1-E1-G11
cgtttacctgccngtaccggtccaaaaattcacgggtcgacccacgcgtccgntctcgcgctcccaatttctccgccggcgggaaaaccatgtcgcacttcggaaggtcaggtccaccggatatcagcgacacctactcacttctcgtccttaacatcaccttccgtacgactgctgatgatctctatcctctattcgcaaagtatggaaaggtcgttgatgtgtttattcccagagatcgaaggactggtgattcgcgtggttttgcgtttgttcggtataagtataaagacgaagctcacaaagcagtggaaaggcttgatggaagagttgttgatggcagagaaataactgttcagtttgcgaaatatgggccaaatgctgaaaaaatttccaaaggaagagttgtggaaccaccgccgaagtcacgaagatntagaaccgtaatcctaagcggagtcntagtcctaagagggagccnttcc

SEQ ID NO: 8766 - DNA, 472 bp, Arabidopsis thaliana
  unsure at all n locations
  Clone ID: LIB24-005-Q1-E1-G12
ggngccggtccaagattaacgggtcgacncacgcgtccgnagctttttacttcaaagaagctctcaataatctccttcacaacgtctcccaaaccctaaacccttattccctcatcttcaagatcgctgcttacaaatccttctcagagatctctcccgttcttcagttcgccaactttacctccaaccaagccctcttagagtccttccatggcttccaccgtctccacatcatcgacttcgatatcggctacggtggccaatgggcttccctcatgcaagagcttgttctccgcgacaacgccgctcctctctccctcaagatcaccgttttcgcttctccggcgaaccacgaccagctcgaacttggcttcactcaagacaacctcaagcacttcgcctctgagatnaacatctcccttgacatccaagttttgagcttagacctcctcggctccatctcgtgggctaa

SEQ ID NO: 8767 - DNA, 407 bp, Arabidopsis thaliana
  Clone ID: LIB24-005-Q1-E1-G3
ggaagaacgaggtcattcttaaggctggagataccattaatgagtttggttgggacaataagcatgctgggattaatgtcttaatctccaaggaagtgttaatgggaaaagcagagtattttgagtctttcaagcagaacgcagatgggtttatctgttctatattgcctggaatttctcacccccaagtccaatactctcgaggagggctactagtgaagactggagggagtaacatgcaacatgtaacatcactatctttcctcctattggcttactctaattatctgagccatgccaaaaaggttgtgccttgtggcgaattaactgcttccccatctctcctccgtcaaatcgccaagcgtcaggtggattacattctcggagacaacccgatgggactgtct

SEQ ID NO: 8768 - DNA, 404 bp, Arabidopsis thaliana
  Clone ID: LIB24-005-Q1-E1-G4
cgtccgctctctaataattctccagaacattttgcacattccgtttcactccgtgttgttggatcccccaaagaaaatgagttgctttgggtgttgtggggaggatgatgatatgcataaaactgctgattatggaggtcgtcataaccaagccaaacactttcctccaggaaatgatgcaaggcaccaccaagcctctgaaactgcacagaagggtcctccagttgtgaagttgcagcctattgaagtacctattatcccttttagtgaactcaaagaagcaactgatgattttggatcgaattctctcatcggtgaaggctcttatggaagagtatactacggggtattaaacaatgatctgccttcagcgattaaaaagttggattctaacaaacagcctg

SEQ ID NO: 8769 - DNA, 408 bp, Arabidopsis thaliana
  Clone ID: LIB24-005-Q1-E1-G5
gcttcttctcatctagaaaccccttatcttggagtaatcagagagtttgaaaacaccagaaatcatggcgacaggaccagttgttcatcctcaaccagttagaggtgatcccatcgacctcaaaaacgcagcagcaaagaatcgtcgtgctcttggcgacattggaaacgtcgattctcttattggagtcgaaggaggaaagcttaaccgccccattactcgtaactttcgtgctcagttgctagaaaacgcacaagttgcagccgccgctaacaaaaaggctccgattcttgatggagttactaagaaacaagaagttgtaagagcggttcaaaagaaagcaagaggtgataagcgtgagccgtcaaaaccaatcgaagtgattggtgataagtctgatacaaacga

SEQ ID NO: 8770 - DNA, 465 bp, Arabidopsis thaliana
  unsure at all n locations
  Clone ID: LIB24-005-Q1-E1-E12
nccggtccaaaattaacgggtcgacccacgcgtccgtccaaacttgagctttgtattccgacaaaaaaatggcgactgcgtctctagttccgacatctaaaatcttctctgtctctccgaaatcctcagcttcgattaaagcaaggagcagagtagttgttgcatcgtcgcaacaacaacaacaaccaagaaggagagagcttctgctgaaatcggcggtggcgattccggcgattctgcaattgaaggaagctccgatatcagcggcgcgtgaggtggaagttggatcgtacttacctctgtctccgtctgatccttctttcgtcctgtttaaagccaaaccttcagatactcctgctctccgcgcaggaaatgttcaaccctatcagtttgttctaccgccgaattggaaacagttgcgaataaccaatattttgtcaagtaatactgtcaaacgaaatgtgn

SEQ ID NO: 8771 - DNA, 405 bp, Arabidopsis thaliana
  Clone ID: LIB24-005-Q1-E1-B7
aacgagtcaatctcacgaaccgcggcgaagaacccgtacgacgttcttccccagtctgctctcgtagaagtcgaagtgaagcatctcgttgctcacgtcccaatgcacgaactctcctctgtaccgagtcattagactcttgattcgccggttaaccgccgaccggagatcttcgccggttagattacgaacccagtcgggattgtatttgggatcctcccagaatatgttgtggccgcgagcgatgattctgttagctctgacgagattcatcatcttatcagccaatgtgtagttgagtttgccttgatcggactccgtcgcgtaccatttcagctcgttctcgaataccgtggcgtcgaatctcttgacgaaccattcctaccaaaacagaatccgtttaaa

SEQ ID NO: 8772 - DNA, 410 bp, Arabidopsis thaliana
  unsure at all n locations
  Clone ID: LIB24-005-Q1-E1-B8
ggaaaagcaaaatcaaagacaataattttttccccgagagagaaaatnnnnnnnnnnnnnnnnnnnnnnnnnnnnnnnnnnnnnnnnnnnnnnnnnnnnnnnnnnnnnnnnnnntctctctaccatcctggtctccttgccccgccacagatagaaccaatcccaagtggaaatctcccccctggttttgatccaagtacttgccgcagtgtgtacgttggaaacatccatattcaggtgacggaacctctgcttcaagaggtttttgctggcactggtcctgtagaaagctgtaaactaatttaggaaagaaaaagtcttcttatgggtttgtgcactactttgatcgaagattcgggtgggccttgcaanccttcccccaaatggaaggcatttgnttgggcaaacct

SEQ ID NO: 8773 - DNA, 480 bp, Arabidopsis thaliana
  unsure at all n locations
  Clone ID: LIB24-005-Q1-E1-B9
gcccggtccanaaattcaangggtcgacncacgcgtccgnggnacgngtggggctggagtaatgtcagaggatagagacttacaattggaggcgacggctagcttcaggagattgctttcaattgagcgaaatcctccaatcaatgaagttgttcaatctggtgttgttcctcacattgtgcaatttctttccagggatgacttcactcaacttcagtttgaggcagcttgggcgcttaccaatatcgcttcagggacatctgagaacactagggtcattattgatagtggtgctgtccctttattcgtcaaacttcttagttctgcaagtgaggaagttcgagaataggctgtatgggcattgggaaacgttgctggtgactcnccaaaatgtcgtgatcatgtcctaagttgtgangctatgntgtctcctccggntcaantccatnagcnttcnaaagntctccatgctgagggatg

SEQ ID NO: 8774 - DNA, 465 bp, Arabidopsis thaliana
  unsure at all n locations
  Clone ID: LIB24-005-Q1-E1-C1
ctgttttgccgcncctaccggtccaaanattcccgggtgcgccccacgcgtccgcnntcgccgaagatgatccagactgtgtatacacattctacctcagaaccggatcgatctggaaagccggaaccgattcgatcatcagcgcaagaatctacgataaggacggtgactacatcggaatcaaaaaccttcaagcttgggctggattaatgggacctgattacaattacttcgagaggggtaatctcgacattttcagtggaagagcaccgtgtttacctagtccgatctgtgccttaaacctaacctccgatggctccggcgatcaccatggttggtacgttaattacgttgagatcacgacggctggtgttcacgcacagtgctcgacgcaggattttgagattgagcaatggctcgctactgatacttctccttatgagctcaccgcgtacggaacaattg

SEQ ID NO: 8775 - DNA, 435 bp, Arabidopsis thaliana
  unsure at all n locations
  Clone ID: LIB24-005-Q1-E1-C11
gngaccaaacattttcgttcgctgcaaactcatggctgtaagtttttaatcttccttcgctaatccacgatttcgattccgttatttctttttggaacccagttttagaatttacttctagggcttgcaaaagctctgaagttcgagctcttctcttgttaatttgtccaattagaactaattaatggagtgttcacgaatcagaactgatgggtttggttttaggtttcgaaaaaatttgcttttttcattattatatgtannnnnnnnnnnnnnnnnnnnnnnnnnnnnnnnnnnnnnnnnnnnnnnnnnnnnnnnnnnnnnnnnnnnnnnnnnnnnnnnnnnnnnnnnnnnnnnnnnnnnnnnttattcagtggaaacaagagcaatgattcatttttgtttaatgttttgaagaccataccaatnaacccg

SEQ ID NO: 8776 - DNA, 397 bp, Arabidopsis thaliana
  unsure at all n locations
  Clone ID: LIB24-005-Q1-E1-C4
cgtgggcggacgcgtgggctctgaactccaaccatggctcctctggttctctaccttctcactctcctcatggctggccataccagtgcctcatggtgtgtgtgcaaaacagggctgagtgactcagtgctacaaaagacattagactatgcttgtggaaatggagctgactgtaacccaactcacccaaaaggctcttgcttcaatcctgacaatgttagggctcattgcaactatgcaatcaatancttcttccaaaagaaangnnaagcttctgagtcttgtaacttcactggtactgccantcttaacaacaacgattccagctatacaagatgtncattcccttccantgctaatggttctantgggaacngtancaacaacgtgacccaag

SEQ ID NO: 8777 - DNA, 404 bp, Arabidopsis thaliana
  unsure at all n locations
  Clone ID: LIB24-005-Q1-E1-C5
gtgagacaaaaggcctatatcgaggctttgaatcaagatacaatgtttactccacagtttgttgttcaaggtcgtgttcaattacttgggaatgaagaagagtccttgcttaagtctattgttgaagctcctaggtttccgtctcctgcgtttcgggccacatttcaaagaccaacatcagaaacccttcaagtatctctcaccggagctttgaggatgaaagtggactcgagcgggatcgatataatggtggcgctatatgaaaacggtttggtgaatgattgcgctcgaggagagaactcaggaagagtcttgtccaatgactacgttgtaagaaagctagaaaagttatgcaccgttaaagatttaacgggaaaaaagacggtgtcagggacagtcanttc

SEQ ID NO: 8778 - DNA, 367 bp, Arabidopsis thaliana
  unsure at all n locations
  Clone ID: LIB24-005-Q1-E1-C6
cgcgggagactctctctctctctccactctctctctcttttttctttgttttttcgtcacttgctcntaaaatcccaaatcgagtaatggaagaaaaatcaaatacgatgatttagcttcccttcttattcttcccctatattcactgcgataactttgcctctcatctcataaattaaaaaaagaacactcttctcacaaattctttataattccccttttgatgtgtacggacacacnatcgaagcagaagcagnagaagaanaacacttctatctccgccgccgccgtcgtcgtcatcatcatcgcngccgttaaatgggtgagcctaaagacagtctcgctctcttcctctgccancgaatcg

SEQ ID NO: 8779 - DNA, 389 bp, Arabidopsis thaliana
  unsure at all n locations
  Clone ID: LIB24-005-Q1-E1-C8
gacagagaaacaaatagaggcagagagcagaagaaagacgaaacagaggattttcatagagaannnnnnnnnnnnnnnnnnnnnnnnnnnnnnnnnnnnnnnnnnnnnnnnnnnnnnnnngaagatacatgaaacaacatctcattgttatgaatgttgatgcattcttttatgtaaacttaactttttacaggtgacctctctgaaagattgtaaggttccttacaaaaatttgatttcgtttggtgaatgaaatagttagaaattctcaaaacaaaatagggtggcngtgttnctccnaaaggaaactcaattacaagctnaacagangaannagaaccccggaantttngnnaatgttcggtcaaaataancggttcaaggcccga

SEQ ID NO: 8780 - DNA, 461 bp, Arabidopsis thaliana
  unsure at all n locations
  Clone ID: LIB24-005-Q1-E1-C9
ggtccnnaaattcacgggtcgacccacgcgtccgactnnnnnnnnnnnnnnnnnnnnnnnnnnnnnnnnnnnnnnnnnnnnnaaacaaaatattgaaatttcactagacccacatgaagctcctcctttatagtagtaattcttgaatccaactcaaaaatgtttgctatatacaaatcaaccnnnnnnnnnnnnnnnnnnnnnnnnnnnnnnnnnnnnnnnnnnnnnnnnnnnnnnnnnnnnnaacctatccaacctcctatttctcctcaagtcgctttgattgaagataaagcaagattaggttcaacaccaccaagctgccacaacagatgcaacaactgccatccttgcatggctattcaagtaccaactctcccgactcgctcccgcttcanacgagttaacccgttttccggtggattcgtacgaactccttcttctctaancaacgttcctga

SEQ ID NO: 8781 - DNA, 460 bp, Arabidopsis thaliana
  unsure at all n locations
  Clone ID: LIB24-005-Q1-E1-D1
gttttgccgcncctaccggtccanaattcccggggccacccacgcgtccgcagacgcgtggggtttccctgccttgataaagttatcaagtccgcaactgaagctagtgatggattcaattatctgggcatttagacatactgagagaaatattgctgaaaccgggcttaatcttttgcttgagatgctgaaaaactttcagcaatctgaattttgtaatcaattctaccggtcatactttatgcaaatcgagcaagaaatatttgccgttttgaccgataccttccataagcctggcttcaagctacatgtgttggtgctgcagcaactgttttgcctgcctganagcggtgctttgacagaacccttgtgggatgctacaaccgttccttacccgtatccggacaacgttgcatttgttcgcgaatacaccattaagctactgagctcttcattccca

SEQ ID NO: 8782 - DNA, 398 bp, Arabidopsis thaliana
  unsure at all n locations
  Clone ID: LIB24-005-Q1-E1-D8
cctgaactagactcaatacacaagaaactgaaggagttggagaagaagatgaaactagctggatacaaaccggaactagagtttgctttacacaatgtagaggaagagcaaaaagagaagctattgttatggcacagcgagaagttagctgttgcatttggttgcataaaactccctcaaggttcacagatacaagtgttcaagaacttgagaatctgtggtgattgtcataaagcaatcaaatttatctcggagatagagaaacgagagatcattgtaagagacaccacaaggtttcaccatttcaaagatgggtcttgctcttgtggcgattactgggtgaaaagagaagagctttgactctctcattggtcaaanctgactgtattanatgcgtt

SEQ ID NO: 8783 - DNA, 490 bp, Arabidopsis thaliana
  unsure at all n locations
  Clone ID: LIB24-005-Q1-E1-D9
tntacgctngccggtgccggtccnnaaattcacgggtcgacncacgcgtccgncaaactccgaaattataagaagtaaagacaaccatggcgagtgctaccttctccttctgtcccctctctcaatcccatccccattcttctctaatcaaaccgacaccgtttctcagatatggcaagaaactacaccatcttcaccaccacatcttcatcaccatctcttacccatctcaccattctcgctacttggccgtttcaagagacgatgccgcgacgcctctttcttcttccgaccaaacccangagacagagaccaaagaagtggaagacactatagagaaacgaagaatggaggagaagtttgctgttctaaacactggaatctatgagtgtagatnatgtggttacaagtacgatgaatcagcgggtgacccatcgtanccgantccacggggtttcagttttgataattgcccgaaaaatgggggatg

SEQ ID NO: 8784 - DNA, 412 bp, Arabidopsis thaliana
  unsure at all n locations
  Clone ID: LIB24-005-Q1-E1-E1
gagcattgataaatccgacaagaagtccgattttgttccatagcttgcttgtgtttttagtggattgagtcactgaaagagaaatcataaggctttgttgatgatggatcatttggtggagacgaattcagttccgagcagattggtggaagaaaggcttgatgagattcgtagagtaatgggtaaagctgatgacgacccgttaaggatcgttggtgtaggagctggtgcttggggaagcgttttcattgcaatgttgcaggaaaattacggtaagtttaggggcaaagttagtgtgagaatctggagaagaggaggcagagcaatcgataaagccacagctgaacatttgttcgaagtgattaattcgagggaagaattgttgaggangttgataagaangtgtgcttaa

SEQ ID NO: 8785 - DNA, 402 bp, Arabidopsis thaliana
  unsure at all n locations
  Clone ID: LIB24-005-Q1-E1-B6
caaaagcggcgcatctgaatcccaaacgagtgacgatgacgatcgattcgcagcaaaaaacgagcaaattcagatggggggaaatggacgaagacgaagatctggatttcttgctccctcccaagcaggtgattggtccagatgagaatggtttgaagacgacgatcgagtacaaattcaacgatgaagaaaataaggttaagataacgactaggacacgtgtccgcaagctagcttctgctcgactcaacanacgagccatggagaggaggaactgggcctaagttcggagacgcagccaatganggaagctggtagccatctcactatggtttctancgaaagaagatccttctcgaacgaaccccgagctcctggttaccaaagncggattgaatcaaa

SEQ ID NO: 8786 - DNA, 473 bp, Arabidopsis thaliana
  unsure at all n locations
  Clone ID: LIB24-003-Q1-E1-F3
ctgttacgttgccgtaccggtccaaaattnacgggtcgacccacgcgtccgaaaaaccctaatcttcatcttcatcttctcccgccgtcggccgtaagaggtttcgaagaagcaaagtgagcaacaatggcgggaggcaagatcaggaaggagaagcccaaggcttcgaatagagcaccatcgaaccattaccaaggaggaatatcgttccacaaatcgaaagggcaacatatccttaagaaccctctgcttgtggattcgatcgttcagaaagctggtatcaagagtaccgatgtgattctcgagatcggtcccggtactggaaacttgaccaagaagcttctagaagctggcaaagaagttatcgccgtcgaacttgactctcgtatggttctcgagcttcagcgccgttttcaaggaactcccttctctaaccgcttgaaggtaattcaagggggatgtgctcaagacgg

SEQ ID NO: 8787 - DNA, 416 bp, Arabidopsis thaliana
  unsure at all n locations
  Clone ID: LIB24-003-Q1-E1-F6
gggctgaaatcacaaaggagtcaagcactggaagtggggcttggtctacccaattggtggaatcccagaacgagaagaaagcacaagtgtcctcaattaaatggaaagtctgcaatgtgacagctggaccagactacatcccttgccttgacaattggcaagctatcagaaagcttcattcgacaaagcattatgaacatcgtgagaggcattgtcccgaggagtctccacgctgccttgtttctcttcccgaagggtataagcgatccatcaagtggcctaagagcagagaaaagatctggtacaccaatattccacacaccaagcttgcagaagtcaagggacatcanaactgggtgaagatganntggtgaatacttaacattccctggntggaggtactcanttcaagaatg

SEQ ID NO: 8788 - DNA, 416 bp, Arabidopsis thaliana
  Clone ID: LIB24-003-Q1-E1-F7
gcccacgcgtccggtgaagaatgggcactcgaggctttggtttctgggtcagtatgtgcttgagcttgctcttacggagtttttcttgcagaggtatccgagggaatctccgggacctatgagggagagagtgtttgctttgattgggaagaggtatctcccgaaatggattaaagcagcgagcttgcaaaatctcatctttccttatgatgatatggataagttgattaggaaagagcgtgagccaccggttaaatctgtgttctgggctttgtttggtgccatctatctatgttttgggatgccggaagtgtatcgtgtactttttgaggtgtttgggatggatccagatgctgatgagtgtcagcctcgaagcaagagacagctcgaggatgtagattatgttctgttgaaat

SEQ ID NO: 8789 - DNA, 413 bp, Arabidopsis thaliana
  Clone ID: LIB24-003-Q1-E1-F8
gaattctgactgtgagcaattttacgggagagttctcgacaattctggagttctttcttctgttgatgggaactgcaaattgaaaactgaagatttgtggaaaagattgtaccctgatgaaccttatgagcttgacttggataacatagacttagaggacatctctgagaaatcttcagctcttgagaaatgcaccaaatatgatcttgtttcagctgttaagaggcagagcccattttactaccaggtttcgaggtcccatgtaaacagtgacatttttctacaagaagctgttgctagatataaggggtttctctatctgataaagatgaacagagaaaggtctttaaaaaggttttgtgttccgacttacgatgttgaccttatctgggcacacacatcagctgcaccca

SEQ ID NO: 8790 - DNA, 476 bp, Arabidopsis thaliana
  unsure at all n locations
  Clone ID: LIB24-003-Q1-E1-F9
cttctacgccntacggtaccggtcagnaattcacgggtccgacccacgcgtccgnnnnnnnnnnnnnnnnnnnnnnnnnnnnnnnnnnnnnnnnnnnnnnnnnnnnattgtcttgctctgttctatttaacttttcttatatataaaaaaaatggcgaaaaatttactagcaatatgtctggtgtttatggttgcatcaagtgtggtttatgaagtgcaagggactttcttgttaaagctttacttgaggaggaagtttcccagacgttgtatcgactttgccccttatgctggcaaaggtatgttgatgctcgtgagcaaccttgaaggtggatgtcccgcaactagagagttcaaacaattcttttcaacgttcaagtcttacatgagctttatcagctcagcatccgatatccgcatcgaaaaacatngatgtggagatgaatgggaaaagtnaatgccttccaanggcaagt

SEQ ID NO: 8791 - DNA, 480 bp, Arabidopsis thaliana
  unsure at all n locations
  Clone ID: LIB24-003-Q1-E1-G1
gggggggactgttacgtttgcngggnccggtccgnaattaacgggtcgacncacgcgtccgactacatccaatgacagcctaagacgtaccttatcactcattgggtctgaaagtttcagctttacgcaaggtcttaaggacacggatccacaacatttgcatctcgaagaaggcactgtctcaggaagacctccatcgctgagcgcgtgggtggttgacaagaacaaagagaaaggacgactcggtttaagtaaaccaaacggattgggccctattgatgaaacaggtcctgtctcagcctttgatagtctctccatcaatagcagcaccgagcatcctgcgtcttcctattcgcctcctactccgtctgctccactactgcctgaagacgcttcttgggnttcataatgacgctagtactaacanagcanagagcttctatgatcagacacgatatatggaactccccggtancatga

SEQ ID NO: 8792 - DNA, 485 bp, Arabidopsis thaliana
  unsure at all n locations
  Clone ID: LIB24-003-Q1-E1-G12
tttaccctgccggtagcggtccaanaattcacgggtcgacccacgcgtccgcccacgcgtccgcaaccctctctctctctctctcagtacaacttatcatccatcaccatatatagagaatatgagcaaaacggaagcaatcagcttgaccaaaaggggaatgttgccgccaagtagttgcaatagcctaatggaccgctctgagtcccttaagagggacagtgtgatgggcaatggtgcagccaaagtgagaggaagcttggagcgcaagaaatcaaagagttttaaggaaggagatagttattcttcgtggctcataacggaggctcctgggagtatagccgccgtgaggagagagcaagtggcggcacaacaagcactaaggaaactaaagattgctcattacggtagattcaaatcaaccattaatttcactcttccaaagtcgtcctcttcttaacctaaacccnaacctcatctcaaga

SEQ ID NO: 8793 - DNA, 409 bp, Arabidopsis thaliana
  Clone ID: LIB24-003-Q1-E1-G6
aacccagatcgaaaaatcagatttttccagatcaatcagagagttagagatggagtataataacaacaatcagcaatctttttggcagttcagcgaccagctgagagttcagacaccgaatctagcgaatctgtctctcaacgactcgatctggagcacaaactctgtcttcaaagagcgtcgaaacttagacatagccgccaccaccgacaagaacaacaaccagatcgactattatcagaagaagacaacttccgacaacatcaattccaactggaactggaagtcttctggttcaaacaacgacatgggtttaggattcggacctgtgggttcaaaatccaccgtcgatttaaacccaatcgacaaattcaactcaccgttcaacgacacgtggaaattcaactca

SEQ ID NO: 8794 - DNA, 473 bp, Arabidopsis thaliana
  unsure at all n locations
  Clone ID: LIB24-003-Q1-E1-H1
ctgttacgcttgccnggccggtccnaaattaacgggtcgacccacgcgtccgctggtggtgaattgtttgatagaatcattgctaagggacattacactgagagagctgctgcttctgtttgtagacagattgtgaatgttgtcaagatttgtcatttcatgggtgtgttgcatagagacttgaagcctgagaatttcttgctctctagcaaagatgagaaggctttgatcaaggctactgatttcggattgtctgtctttattgaagagggaaaagtatatagagatattgttgggagtgcatactatgttgctccagaagtcttacgtcgcagatatgggaaagaagttgatatctggagtgctgggaatcatcttatacattctactcagcggtgtgcccccgttttggggctgagactgagaaaggaatatttgatgctatattggaaggccatatccgactttgagaa

SEQ ID NO: 8795 - DNA, 455 bp, Arabidopsis thaliana
  unsure at all n locations
  Clone ID: LIB24-003-Q1-E1-H3
cggtccnaaattaacgggtcgacccacgcgtccggaaattagtttccatttctgcgcgagtctactcttgtgtttcttactcttctctgctcaagctgttgcaggtggtggaggtggtggtcactcttgggatggaatcgtggtgactcaggcgaactatcaggcactccaagctatcaaacacgaactcattgacttcaccggagttctcaaaagctggaacaactctgcctcctctcaagtttgctccggctgggctggaatcaaatgcctccgaggtcaagtggtcgccattcagctcccttggaagggacttggcggtactatctctgagaagattgnacancttgggaagtctcagaanaacttagnctccacaacaatgttatcgccggttcggttcctcgttcccctgggtacctcnagaagcctccnttggagtctacncctcaaca

SEQ ID NO: 8796 - DNA, 412 bp, Arabidopsis thaliana
  unsure at all n locations
  Clone ID: LIB24-003-Q1-E1-H4
ttanacgggtcgaggcccgcgtccggccgcataagagcttaccanctttgtgcttcctgcanatacctctttgctgttgatctttctcctccatcaacaaacatgggtaatgacacgtggtatggganctgggcgtaagctgaagagactccgaattaaccagaggtgggctgacaagcagtacaagaagtcncacttgggaaatgagtggaataagccttttgctggttcttctcacgctaaaggaattgttcntgagaaaattggtatttangcnaancagcctaantctgctatccntnagtgtgctagagttcagcttatcaagaatggaaanaagattgctgcctttgtccccaatggtggttgttttgaactacatcnaggaanacgatnaggtcgtgattgctgg

SEQ ID NO: 8797 - DNA, 425 bp, Arabidopsis thaliana
  unsure at all n locations
  Clone ID: LIB24-003-Q1-E1-H9
gctcaaatggtgtttttgggctttatcagatgccagatttcatctgtatccatctgctctctatttctaggcagaagctaacaacagctgtcttcaatgagcgtggtaattggctgacctttggttgcgcgaaacttgggcaactgttagtctgggattggcgaaccgaaacctatatactgaagcaacaaggacactattttgacgtcaactgtgtcacttactcaccggattcgcagctcttggcaactggtgctgatgataacaaagtcaangtgtggaacgttatgtcaggaacatgtttcattacattcaccgagcataccaatgccgtgactgctcttcattttatggctgacaaccaactccctcctaaatgcatctctggacnggactgttcgtgcctgggattttaaaagatacaa

SEQ ID NO: 8798 - DNA, 423 bp, Arabidopsis thaliana
  Clone ID: LIB24-004-Q1-E1-A10
gggacaatctccggaaacttaatcttctctctgtctctctaaccataatctttgtctctcttaccatagccaccaacttacctttctttgaagtgaaatatcccaacaacaacccttttgggatgttactacggccgacaccgatcaagaaccaatccttgggtctaccggctcatgtcgggtcagatgagtgtcgggtttggaccaaagcatgttctgatgagattcttaggctgacttatcagccggataacgttgcgtggcttaaacgcgttaggaggacgatccatgagaacccggagctagcgtttgaggagtatgagactagtaggcttattaggtcggagctgggaccgtatggggtatcatgtatagatatccgttagcgaaaacgggtattccgggcttggattgggatccggt

SEQ ID NO: 8799 - DNA, 409 bp, Arabidopsis thaliana
  unsure at all n locations
  Clone ID: LIB24-004-Q1-E1-A3
cgcccacgcgtccgcgattttcttgggaaaatttctgatttcgagaaaaaacaaaaatccgcaaactcgacgatgatcctgaagaaagtatggggatcggtgtggaaccgatcgaatagtggcaaggatttggtgaatcatcagagagcgatcgatgttcctcctctgttattgtcttcttcatcgtctcttggtgcgtttgatcagctaccgatggatattctagtccagatactgatgatgatggagccaaaagatgctgtgaaattgggcttaacgtgcaaagcctggaaatgcgtagctagtggtaatcgtctctggatattttatctccagtgttctcaanagccatgggactccattttcttcgctgaaactagtttgcgttctggttatcctctccgaatga

SEQ ID NO: 8800 - DNA, 435 bp, Arabidopsis thaliana
  Clone ID: LIB24-003-Q1-E1-F12
gcaatggcttatccaggcaatgggaggtgctccatctggtcctgaagctggccctcgaacaatgaaattccttgacaatttccatgtgcaaacaaagagagagcatgcttgttgggagataacgagaatggtgagaatgatgaggaaggcggtgaggttgcagacccaaaatggatcaccattaaagcagctctgctgctactgttaggagctgccattgcagctgcatttgctgatcctttagtcgacactgttaacaacttctccgcagccacagggattccgtctttcttcatttccttcatcgctttgcctttggccaccaattcaagtgaagccgtgtctgccatcatcttcgcatcccgcaaaaagatcagaaccgcctccttaactttctccgagctatgtggtggagtgacaatgaacaacaatcct

SEQ ID NO: 8801 - DNA, 454 bp, Arabidopsis thaliana
  unsure at all n locations
  Clone ID: LIB24-003-Q1-E1-C4
ggtccgggaatnaacgggtcgagncncgcgtccgacaaaaaagaaaaagatctcaaatacgatctgaaaaataatgatgatgggaaatacatttggttcaagtttggcgagtttattcttcttgtgggcaactattcaacaaatcttcccaaaccatctcagaatcgccattaaagagtttcttatctccacaatacaacaactctcatttgtccagagattttccgacagattcatcaacttcttttcgccttatgtcgaaatcagcttctctcaatacgaagattatcaattcaatcacgcatttgcagccattgagacttaccttggggcaaaagcaactgataaagccaagcatctaagagcangccaagttaaagagagtaaangtttggtccntgaaacgagacgagactaaagtccgagatgagtatgaaggangtactgtcctggt

SEQ ID NO: 8802 - DNA, 419 bp, Arabidopsis thaliana
  Clone ID: LIB24-003-Q1-E1-C7
gcggacgcgtgggcgcgactctactctactctactctactcaaaaccaatcaaaaacccaactttgaatcacaaccagtagaatcacgagtcatgcaattcctccagaactctcgtagaatcgctacggtcttaaaacccattgttaccaccgagactaatctgagattcttctcctctgcttctcaaatctcaagatccttccaatggcggagtcaagcatcttcgtcttcctctgtattaaaagggattgatagtagtagtcacttgtcctctatgagcttgttgatccccagatcgagctttacgtctgaagcggaaaagcttgcgggaaatcctacagtgactgtgaaggatttgcatgataaaatgcttaattctgtaaatgtcaagagatcaatgcctccaaatgcgtggttg

SEQ ID NO: 8803 - DNA, 415 bp, Arabidopsis thaliana
  unsure at all n locations
  Clone ID: LIB24-003-Q1-E1-C9
gnctggaaccctaaatctcgaatctggtaactcggatccgataaatcgttccagagatctgttacttctctattcaaggatctgttatcggtgcgaggatctacggattcttctgttcgcgcataatcggaaatggcagataacaattcaccacctggctctgtagaacagaaagcagatcaaattgttgaagctaatccattggtgaaggatgatacttcgctggaaaccatagttcgaaggttccaggattcaatgtcagaggcaaagactcataagttctgggagactcaacctgttgggcagtttaaggatattggggatacgagtttgcctgaangtccgattgagcctgcaactccattatctgangttaagcaagaaccgtacaaccttccttccgtttacaantgga

SEQ ID NO: 8804 - DNA, 480 bp, Arabidopsis thaliana
  unsure at all n locations
  Clone ID: LIB24-003-Q1-E1-D10
cgttaccctgccagtaccggtccaanaattcacgggtcgacccacgcgtccgcggacgcgtgggcggacgcgtgggcggacgcgtgggttaagccctcactatcctctctctcaaatcgcggagtctccgaagtttctctgtcagacaaaatgcagtcgtcaacgtatgcggttaaaggaaacgctgcgtttgcgtttcagagacggaccttctcttctgacagatcgacgacttctaccggaattcgcttcgctggttataagagcttagccaccaccgggccactctactgttctggttctgaagccatgggagcgacgcttgctcgtgctgataacgggattcagagcgttatgagtttctcttctgtcaaagctcgatnggtcagagctcaagcctcatctgatggagatgaagaagaagctatacctctganatntgaanggaaaagntcctggaacagttttgccctttggttg

SEQ ID NO: 8805 - DNA, 478 bp, Arabidopsis thaliana
  unsure at all n locations
  Clone ID: LIB24-003-Q1-E1-D3
ctgttacgcttgccgggcccggtccaaaattaacgggtcgacccacgcgtccgggtttttgaaggtttgaatgaaggagagaaagatgagtgcttcaangtttatcaagtgtgtcactgtcngcgacggtgctgttggaaagacttgtcttcncatctcctacactagcancactttccccacggattatgtgccaactgtgttcgataanttcagtgccaatgtgattgttgatggcaacacnatcaacttgggattgtgggatactgcagggcaagaggactacaatagactaagacctttgagctatcgcggtgcanatgtcttcttacntgcattctcacttgtcagcaaagctagctatgaaaatgtttctaanaaagtgggttcctgaactgagacattatgctcctggtgttcccatcatcctcgttgggaacaaagcttgatcttcgagatgataagcaaatcccttgcc

SEQ ID NO: 8806 - DNA, 456 bp, Arabidopsis thaliana
  unsure at all n locations
  Clone ID: LIB24-003-Q1-E1-D4
cgtttgccnggcccggtccgaaataaacgggtcgaggcncgcgtccgcccacacgtccgcccacgcgtccgcccacgcgtccgaagaaaaatcgagatgggttcaactccgttttgctactctatcaatccatctccatcaaagcttgatttcacgaggacccatgtgtttagtcctgtttctaaacagttttacttagatttatcatcgttttccggaaaacccggaggagtatctgggtttaggagccgtcgagctttgctcggagtaaaggcggcgacggcgttagttgnnnnnnnnnnnnnnnnnnnnnnnnnnnnnnnnnnnnnnnnnnnatcgagggttttagttgccggaggtggaatcggangattggtgtttgctttagcgggctaagaagaaaaggattcgatgtgttangtgtttgagaaaagatttgagtgctataagangaga

SEQ ID NO: 8807 - DNA, 422 bp, Arabidopsis thaliana
  Clone ID: LIB24-003-Q1-E1-D5
gccctttctccaacacctaccaaaagcctctctctctctctagttcttgatttttcaagatttcaagaaaacatggctgaccaaagtggtgggttggttatgatgagagagtacagaaaaggcaactggacgttgaatgagacgatggttctcattgaggccaagaggatggatgatgagaggaggatgcggcggtccatcggccttccaccgccggagcagcaacaagatatccggagtaataaaccggcggagctacggtggaagtggatagaagattactgttggagaaaaggttgtatgagaagtcagaatcagtgcaatgacaaatgggacaatctcatgagagactacaaaaaagttagagagtacgaagagacgaagggtagaatcgtctattaccgccggtgagtcgtccttca

SEQ ID NO: 8808 - DNA, 411 bp, Arabidopsis thaliana
  Clone ID: LIB24-003-Q1-E1-D7
tttgatggaagcggttagaacttcaggtctctctactatctctgacacattggacgaaacagcatacggcgaggggaaagagcaagctgacagagaaattactagtgagatggaggctttggctgctgcttaccatgtcttcagaaatgttgctcagcccttcttcaattacatagaggaagaggacttgcttaggtttatgattaaggaagaggttgatcttgtgttcccattgtttgatggtgccgctgagaccgggagaattacaagaaaagctttcacagaatgggtggttaaggtgtacacgagccggagagctttagcgcattccttaaacgacacaaaaacagcggttaagcagttaaacaaacttgtgacagcaatcttgatggtggttaccgttgtcatttg

SEQ ID NO: 8809 - DNA, 422 bp, Arabidopsis thaliana
  unsure at all n locations
  Clone ID: LIB24-003-Q1-E1-E1
gcaagttttccatatactaatggggaggtttcataaatttcctctcctaggtttagttctgttcctcggtctgaccggctcacttatcgccgccaatgagtatgcctgttctagtaccgatatacactttactcgtgccaatttccctaaaggtttcatttttggtaccgcaactgctgcttttcaggttgaaggagctgtaaatgaaggatgtagaggtccaagcatgtgggacgtatacaccaagaaattcccacataaatgtaattatcacaatgccgacgttgctgtcgatttctaccatcgttacaaggaagatatcaagttgatgaaaaatctgaacactgangggcttagattttccatttgcatggcccagaatattccccatggtangatggagaaaggaataagcanagcag

SEQ ID NO: 8810 - DNA, 467 bp, Arabidopsis thaliana
  unsure at all n locations
  Clone ID: LIB24-003-Q1-E1-E11
ctgttaccctccagtnccggtccagaattcacgggtcgacccacgcgtccgatctacacttggtgccaataggaagtctcaagaattctttgaaagggtaccagctagggacaataatgtgagagttttgtttactgagaaagttatggaaagtattgaaagggagaccagctgcaagattaaattggatgagaagttcataattgttagtggcaaggacagattgatcttgaggaaaggtgttgatgctgttcacaaggttaaggaggatggtgagatgaaaagttcttctgtttctcacaggagcagatccaggtcacctaggcgaacttctgttggaccatcacgtgctcgaaactctgaacctcaaaggcagcagctgccatcacatggttcgtcaagtttcccaaaaccgctctggaaggcaagataaagtttgtggataatcctttcccccgaaaaanact

SEQ ID NO: 8811 - DNA, 396 bp, Arabidopsis thaliana
  unsure at all n locations
  Clone ID: LIB24-003-Q1-E1-E2
gagatgttgaagtcgatgattcgttttatatgagaaagtgtgtggagctagcaaaaagagcaattgggtgtacaagtcctaatcctatggtaggttgtgtcattgtcaaagatggtgacattgttggccaagggtttcatcccaaagctggtcagcctcatgctgaggtgtttgctcttanagatgctggagagttagctgagaatgctactgcttatgttagtttggaaccatgtaatcattacggaagaacaccgccgtgtacagaagcattgattaaggctaaggtgagaagagttgttattgggatgggttgattcgaaaccaattgttttttccntcgggtattagtncggttgaaagatgctgggatcgatgttaccggtgantggttga

SEQ ID NO: 8812 - DNA, 490 bp, Arabidopsis thaliana
  unsure at all n locations
  Clone ID: LIB24-003-Q1-E1-E3
gttacgtttgcnggtgcccggtccgnaattaacgggtcgacncacgcgtccgctttancggatttttgttttggtgctcgacgactctgattcgaaatctctctctctcggaaaagctgaatctggatcatcaaagtaagtctccatcgttacttttatctcttcgtgaagattctttaatcccatttatttgttcatatttgcaatcttcgaaaattcctgaagctaaacaaaaatgggatatagcgacaaagcactgaaattggacttgatcaacagtgtttctctgtaattagagcgaaatttggaaaaaagatgacatttttctatgatttgcgatgtctgattcattcattcccacatgtttanggttctcttgtgtaanagttttggttccctttccntatgtccgtcntaacnaaatttttgcaggtatcantttnaaaagttttgatnaatttncttcntttgggggtanaagaaggggtag

SEQ ID NO: 8813 - DNA, 416 bp, Arabidopsis thaliana
  unsure at all n locations
  Clone ID: LIB24-003-Q1-E1-E6
gatcaagtcaactctgaacactctatgactaaaagaaaaaatcattcacctcgataccagaaagaagaaaagtcatcgcttttgggaaatttgatgaacaaagaccaaatcttaaaactcgaattcttctggttcctaaaaagtggctgtcaagaagagtgagacatgcatcaaactctctcttctcctgccatggcgtcaaacctccggaaaccctatttcctcaggtacttaactattcttccccaatcgatgatggtcgaaagctgaaacctttttctgcanatcgattaaccgacaaganaatccaacccaacccacccactttgttttgtttgggatgataaaaatgtcggaaaagagtttgctttcntcaanattcctctttnacacgatnactgtttcaacgctactct

SEQ ID NO: 8814 - DNA, 413 bp, Arabidopsis thaliana
  Clone ID: LIB24-003-Q1-E1-E7
tagcatatacaaggacatgaaagaaaaagacgtgacccctgacgaggtgttttttagtgcattgattgatgttgcaggacatgcaaaaatgttagacgaggcttttggcattcttcaggatgcaaaatctcaagggatacgtcttggaactatatcatatagctcactgatgggagcttgttgtaacgcgaaagattggaagaaagcactggagctctatgaaaaaatcaagtcaatcaaacttagaccaacaatttcaacaatgaatgcccttataactgctttgtgtgaaggtaatcaactgcccaaggctatggaatatcttgatgagataaagactttaggggttaaaaccaaatactatcacttactctatgctcatgctggcaagtgagagaaaggatgactttgag

SEQ ID NO: 8815 - DNA, 478 bp, Arabidopsis thaliana
  unsure at all n locations
  Clone ID: LIB24-003-Q1-E1-C3
ctgtttacgtttgccgggnccggtccgnaaattaacgggtcgacccacgcgtccgctttactcnnnnnnnnnnnnnnnnnnnnnnnnnnnnnnnnnnnnnnnnnnnnnnnnnnnnnnnnnnnnnnnnnnnnnnnnnnnnnntctaaatccattagcagtgactcatcttcttcaacacacactaagaagcttatgcatccatgagaactctcaatgggtttatgctgttttctggaggatcttgcctagaaactatcctcctcccaaatgggatggtcaaggagcttatgatagatcaagagggaacaggagaaactggatcttggtttgggaagatggtttttgcaactttgcagcttctgccgcggaaatgagctccggagaaggtagtggtggcggtggtggctcagcggcttatgggaaatagtgattttcaacaataccaagggcttcagcctgaattgttcctcaagatgtc

SEQ ID NO: 8816 - DNA, 466 bp, Arabidopsis thaliana
  unsure at all n locations
  Clone ID: LIB24-002-Q1-E1-H6
gtaccgntgctcacattcgcnggtcgacccacgcgaccancacaacctcgcaagtaactctcatcctcgctgtactgatcagaagaaaaaactctgaaagatgtcgaccggaggaccccaaaaattagaagcacaaggaggaaaagaaggcaaagaatgggatgatggagccgaacacgatggtgtgacgaagatatacgtagcagctggtggtcttggaattgaacaaatcagattcgattatgtaaagaacggacaaccaaaggaaggatcttttcatggtgtgaagggtagaagtactatttctacgattgagattagccatccagccgagtatcttatttccatggagggttggtacgactctaccaatatcattcaaggaattcagtttaaatccaacagacacacttcccagtactttggatatgaatttttgggagatggtacacaattttcacttcaa

SEQ ID NO: 8817 - DNA, 488 bp, Arabidopsis thaliana
  unsure at all n locations
  Clone ID: LIB24-002-Q1-E1-H9
tttttctgncgccacggtcananaatccgggtcgacccacgcgtccgatcnctctctgtctctgtcccgcggagtccccgagagattgatcaccatcacttttgtaccttccttgtactacctatggcgtctgctagcttcgttaagcctaacacnnnnnnnnnnnnnnnnnnnnnnnnnnnnnnnnnnnnnnnnnnnnnnnnnnnnnnnnnnnnnnnnnnnngagtctccttcgcgatccgcgccggtgcttactccgacgagcttgttaaaaccgccaaaagcattgcatcccctgggagaggtatcttggcgatcgatgagtccaatgcaacctgtgggaagaggcttgcttctatcggcttggataacaccgaggacaaccgtcaagcctacaggcaacttctgcttaacactcctgggcctcggngaataaatctccnggttcaattcncttcgaaggagaatctttacaantcaacaaaggg

SEQ ID NO: 8818 - DNA, 427 bp, Arabidopsis thaliana
  unsure at all n locations
  Clone ID: LIB24-003-Q1-E1-A2
gaaagctgaagatgattcgccggaaaaagaagagcaaacggaaacacttgctgcagcagctgaagctgaagaggtggttcctccaattccagaaaccaaaagtgaagaggaaattgttgagaactctattcctccaaactcagccactgatgaagtttcatctccagaagctttagcaagtgaagaggttgagaaggagcaagtggttgccgaaacacctgttgatgaagtcaagactcctgcacctgtagtcacagaagcttcttctgaggaaagtggcaacaccgctactgctgaaagcatcaaaggcatttcaccagctctagtgaaccagctgagagaagaaacaagggcaggaaatgatggantgcaagaatgctctttcagaagagtgagggcgatatggtcanaagctcaagaagtacct

SEQ ID NO: 8819 - DNA, 476 bp, Arabidopsis thaliana
  unsure at all n locations
  Clone ID: LIB24-003-Q1-E1-A3
ctgttaccttgcccgtgccggtccnaaattaacgggtcgacccacgcgtccgcgggacgcgtgggcgcaaacccaacaaagtagagcaaaaccctaaaacggaaaccttccatggcgattatctctgaggtagaagaagaaagcagtagcagccgacccatgatatttccctttagggcaacactcagttctgcaaacccattagggtttttggagaaagttttcgactttctcggagaacagagcgattttctcaagaaaccctccgcggaggacgagatcgtcgtcgcggttagggcggcgaaggagaagttgaaaaaggctgagaagaagaaagctgagaaggagagtgtgaagcctgtggagaagaaagccgagaaggaaattgttaagcttgtggagaagaangtagagaaggagagtgtcaagccaactatagctgctcaagtgctgagcctatagaagtggagaagcct

SEQ ID NO: 8820 - DNA, 470 bp, Arabidopsis thaliana
  unsure at all n locations
  Clone ID: LIB24-003-Q1-E1-A4
ttacgtttgccgggnccggtccgaaaattaacgggtcnacncacgcgtccgttcatctccttcgcgaagcgtcagttctgggagtcgcagtcctccacgtcgtggaaaaagtcctgctggacctgctaggcgaggtcgctctcctcctcctccaccatctaaaggagcatcttcaccttccaagaaagctgttcaagaatctcttgttctccatgttgattctcttagcaggaatgtgaatgaagcccatctcaaagaaatctttggcaactttggtgaagttatacatgtcgaaattgcgatggatcgagctgttaatcttccaagaggacatggttatgttgagttcaangcaagagctgatgctgagaaagctcagctctacatggatggtgcccaaattgatggaaaggttgttaaagcaacgttcacactaccacctcgtcagaaagtatcttcaccccctaaac

SEQ ID NO: 8821 - DNA, 422 bp, Arabidopsis thaliana
  unsure at all n locations
  Clone ID: LIB24-003-Q1-E1-A7
acttctcttgctcttggccgctacggtctcggcatccgttccagggctcatcgaactcgtcgattcgaaaaccatctttgggaacgtagccgaactcttagagaaagagaaactttccatcaactacgccaactgcagaagctggcaccttggtgttgagacctctaacatcatagacttcgacacggtgcccgcaaattgcaaagactatgttgaagactacttgatcacttccaaacagtaccaatacgactccaaaaccgtgtgcaaagaggcttatttctatgccaaaggacttgccctaaagaacgacaccgtcaatgtttggatctttgacctagatgataccctcctctctaagtantccctactacgcaanaatatgggatacggaacagagaagaaccgacccggggggcgtt

SEQ ID NO: 8822 - DNA, 418 bp, Arabidopsis thaliana
  Clone ID: LIB24-003-Q1-E1-A8
ggctgcacttgttcaacttgcaggcaagaaacttctatttgctgaggaccgaaagcaaactctaaaacaggtggatgagttcttgaacacaaaggttgcccctaaagaacttgttgatgagttaaaggaaataggaaaggctcttcttcctcaatcaacaagcaacaaagctctcccagcaccagcaacagtaacagcagaagcagaatcagctacagctacaaccaccacagtcgataaaccagtacctgagccagaaacagttgcagctacaacaaccactgtagataaaccagtacctgagccagagccagtgccagagccagtgccagtgccagcgattgaagctgcagtcgctgcacaagtaatcacagaaccaaccgaaacagaagccaaaccaaaacctcattcaagacct

SEQ ID NO: 8823 - DNA, 456 bp, Arabidopsis thaliana
  unsure at all n locations
  Clone ID: LIB24-003-Q1-E1-B1
gccggtccgnaattaacgggtcgacccacgcgtccggggaaaaggagatagagattgaagatgcgtgacgcaatcatcgccgatcctcttctggccatcgaccatgaaacagtcgcagagaagaagaaacagagcaaaaatctaaagatttctcttttactgcttctgattctcttagcaacttcagtcttagccttggaaccatcagtgacgtggttgaatctgagaatggtgttgtggctgctgacgacgctcgatgttccgagatcggtgcctctgttcttagaagtggcggtcatgcggtggacgccgccgtggctattactttatgtgttggtgttgttaatccaatgtctagtggaatcggtggtggttctttcttgattgttagctcgcagaaagattccaaagctgangctttgacatgagaaaaactgctccaattagctgctcnaa

SEQ ID NO: 8824 - DNA, 482 bp, Arabidopsis thaliana
  unsure at all n locations
  Clone ID: LIB24-003-Q1-E1-B12
ctgttcacgcctgccaggtaccggtccaanaattcacgggtcgacccacgcgtccgaaatggcagcaaccgccgcaacaacgacgtcgtctcaccttcttctctcaagctcacgtcacgtggcatcatcatcccagccttcaatcctttcaccgagatctctcttctccaacaacgggaaacgagcaccaactggagtgaggaaccatcagtatgcgagtggagtgaggtgtatggccgtagcggcggatgctgctgagacgaaaacggcggcgaggaagaagagtggatacgaacttcaaacgttgacgggctggttgctgagacaagagatgaaaggagagatagatgcagagctgacgatagtgatgtcgaagtatatcattggcttgtaagcagatcgcttcacttgttcaacgtgccggaatctctaacctgaccgggagttcaaaggcgccgtttataatcaagggagaaggttna

SEQ ID NO: 8825 - DNA, 475 bp, Arabidopsis thaliana
  unsure at all n locations
  Clone ID: LIB24-003-Q1-E1-B2
ctgntacgcttgcaggtgccggtccgnaattcacgggtcgacncacgcgtccgcacaatctcaaatctctgattcttcgatacgataaattcttcctcgatatagaaaccactgattagatcctaattcgtcgcctagctcaaaagatggtgctttcgcaaaagcttcatgaagcatttaaaggaacagttgagaggatcacaggtcctcgtacgatctcggcgttcaaggagaagggagttctcagcgtcagcgagttcgtacttgccggagataatctcgtctccaagtgtcccacctggtcttgggaatctggtgacgcaagcaaaaggaagccatacttgccctcgganaaacagtttttgattactaaaaatgtaccttgtctacggagagctgcttctgtgggcagangattatgaagctgctggaggtgaagtgtttggtgatgatgaagataagngatgggtggctg

SEQ ID NO: 8826 - DNA, 428 bp, Arabidopsis thaliana
  unsure at all n locations
  Clone ID: LIB24-003-Q1-E1-B4
tttgcaggcccggtccggaataacgggtcgaggcncgcgtccgaccaaanccagaatcttccgaaaccaaacaggagaaattggtaatagataatggtgaaacttcatctgcatcgaaggaagtggaannnnnnnnnnnnnnnnnnnnnnnnnnnnnnnnnnnnnnnnngggattccctgaatctcccaanaaggatatcaatagaagagttgcggctgttactgtaatcgcggctttgtcgttatttgtatcgacaaggctcgattttgggatttctttgaaagatttaaccgcttctgcgttgccttacgaggaggcgttatcgaatgggaagccgactgttgttgagttctatgcagattggtgtgaaagtttgtcganaactagctccntgaatgttaannnaatcgagcagcaataccnggga

SEQ ID NO: 8827 - DNA, 474 bp, Arabidopsis thaliana
  unsure at all n locations
  Clone ID: LIB24-003-Q1-E1-C1
actntttgcccggcccggtccgaanattaaangggtcgacgcncgcgtccggaaaaaaagaagaatctttagccacctttgagatcaaaagatgaacatcgctcacactancttcggcgttttcgganatgcaactgctctgtttcttttcttggctccttcgataanattcaagagaatcatcaagancaantccantgaacaattctctggtatcccttatccaatgactctcctcaactgtctcctctctgcttggtatggacttccctttgtgtcnaatgacaacacacttgtgagcacaatcaatggnacaggagcantgatcgaaacagtctacgtgttaatctttcttttctacgcnncaaagaatgagaatattaagatctttgggaancttcccttgcnttntggcgggattcccannagtagctctcgtcactcnctttgctcctcaaggganacggtagaaaa

SEQ ID NO: 8828 - DNA, 500 bp, Arabidopsis thaliana
  unsure at all n locations
  Clone ID: LIB24-003-Q1-E1-C10
taccctcccgtncccgtccaaaattcangggtcgacccacgcgtccgacttcccctaatttcgcttcgaattcaaaagccctaattcgaaaattcccatttctcaaggtttttaaaagagtattgcaaaagatgtcttctgattcgtcccgggaagagaatgtgtacttggccaagttagccgagcaagctgagcgttacgangaaatggntgagttcatggagaaagttgcaaagacccgtggagaccgaagaacttactgttgaagaaaggaatctcctgtctgttgcctacaagaacgtgantggtgctaagagaacntcctgggaggattatctcttccattgagcagaaaggangatagcagggggcaacagtggatcaaggtttcnantaancaaggnnttacagagggcaannattgnaaacctggactcaagcaaagaattngtgaangggnaattttggaacccttccttgaagggccaaaccncaaatcc

SEQ ID NO: 8829 - DNA, 465 bp, Arabidopsis thaliana
  unsure at all n locations
  Clone ID: LIB24-002-Q1-E1-H5
ggtaccgacaacanattcgnnggncgacccacgcgnccaggagagagaaatggaggaaggtctaaagattcaatctttggtcatttatccgatcaaatcttgccgtggaatctctgttcctcaggctaccgttactcatactggttttcagtgggaccggtattggttagttgttaactataaaggaagagcatacactcaaagagttgagccaacccttgctcttgttgaatcggagttgcctaaggaagccttcttggaagattgggagccaacaaatgactcattgttggtgataagagctcctggtatgagtccgttaaagataccgttgactaggccaagctcggtagcagaaggtgtgtcgatgtgggaatggtctggctctgcttttgatgaaggagaagaagctgcgaaatggtttcaagattatcttggnaaacaaaagccgtttggttcggntta

SEQ ID NO: 8830 - DNA, 480 bp, Arabidopsis thaliana
  unsure at all n locations
  Clone ID: LIB24-001-Q1-E1-H12
ttcccgggnccacccacgcgtccggacgagagagaagtagaagaagaatgatggagatggtggttttgttttattatttagagtaagcttcttcatttttttaaaaacttctattattttgaccttnnnnnnnnnnnnnnnnnnnnnnnnnnnnnnnnnnnnnnnnnnnnnnnnnnnnnnnnnnnnnnnnnnttcggatttgttttttcaataaattgactaattgagtactcgtttaaaggaagtgaagagcggttttttggtagtggtggtcgagaaaagagagagtttgtctctgtgactcagagtgaaatcaatagagcgggaaaagattgttgcttttttttgccatgggaattgatgaacctgtcccaactcaaattcccctcctcctgctaaaatccatcaaccctgcaatggattttgtccgggttttaaagtccccnantttgaagaaanaaggnccttgaagaacaattg

SEQ ID NO: 8831 - DNA, 465 bp, Arabidopsis thaliana
  unsure at all n locations
  Clone ID: LIB24-001-Q1-E1-H2
cacgcgtccgcanacacgtccgcccacgcgtccgcaaacaaacaccggtatcgacgaacggaactaactccgatatccaaaacccactccaagtttcacgaacgaagggcttagtatctgccatggctcctgatgcttctactgctcttgcagcgagggagaaagttcagcaaatcctgaatgcagcttgtaccggaaatctcgaattccttaagaatgttgctaagcagcttgatgaaggaaaagacttgacgaaaactgtggagagtattaaaagacgcaaacaaacgtggagcgcttcacttcgctgccaagagaaagacaaactgaaaatatgcagatatccttttgggaagaactgaaactcaatgctgatgcaaaaagatgaaactggtgatactccgcttgttcatgcctgccaaggcaaaggacanaattgaaaacggttaagtatccntttagaag

SEQ ID NO: 8832 - DNA, 498 bp, Arabidopsis thaliana
  unsure at all n locations
  Clone ID: LIB24-001-Q1-E1-H3
aatgtcttccggacgcacggtccnganacccgggnccacccacgcgtccgcaagagagactttgtggccatggnagcctctctccaatccaccgctacattcctccagtcggcgaagatcgccaccgctccttctcgcggaagttctcacctccgatcgactcaagccgtcggcaaatcttttgggctcgaaacttcctcggctcgcctcacttgctccttccangtctgactttaaggacttcaccggtaaatgctccgacgctgtcaaaatcgccgggattcgctcttgccacctctgctctcgtcntctcgggagcaagtgcggncggaagctccaaaganattgacctatgatgagattcanatcaagacatacatggaangtnaaaggnactggaaaggntaaccaatgncctactaattgacnggggntctgagactttccccgttcaaaacccgggnaaagtatgcaagganagaagttctgcttcgaagc

SEQ ID NO: 8833 - DNA, 449 bp, Arabidopsis thaliana
  unsure at all n locations
  Clone ID: LIB24-001-Q1-E1-H4
cggattaccgctgatttgctcgatgaagaagaagggactgatgcttcaaactctagagacgacgaaaatacaattgaagatgaagagagccctgaagtaacgttttcaggtaagaagaaatcttctaaaaagaagggcggcagtgttttggcctcagtaggtgatgactcagttgcagacgaaactaaaacttctgatactnnnnnnnnnnnnnnnnnnnnnnnnnnnnnnnnnnnnnnnnnnnnnnnnnnnnnnnnnnnnnnnnnnnnnnnnnnnnnnnnnnnnnnnnnnnnnnnncttcttgcagcacttggagaaacccctgctgctgaaagacctgcttcatctacgcctgtagaaaggaaagcaactcaacctgagccaattgcacctgtggagaatgctggtgaaaaaggaaggagaaagaagagactgctgctgccaaanaa

SEQ ID NO: 8834 - DNA, 489 bp, Arabidopsis thaliana
  unsure at all n locations
  Clone ID: LIB24-001-Q1-E1-H6
attgttagccgccgtacggaacanaatcccgggtccacccacgcgtcngaacatttggagcaaacccgaattattccatagaggaattttacaaggtatctaaactatagatggcaaagacctctaaattcttgtttaatagtttctcatgcaccatgtcatgctgtgtgatttagtgagtaagtgaaatgttgatgcttttccgaacttctgaacatgcctgctttttcttctaagtagaaaccgttcaagatgttcgtttttggcaatcatgatgcangagcagctccctgaagatctggtgcgtgtcgatttgctcctcangaaagcacatgaatccggcattaatatacaggtaaaactgtttggccaaacgttgctacttgcccctgtccttaaaaaaagtgctggctaatttttggtccaataatgttgccttgaaatacgttggcaattcctctactcaagaagatancaacgacatgatct

SEQ ID NO: 8835 - DNA, 485 bp, Arabidopsis thaliana
  unsure at all n locations
  Clone ID: LIB24-001-Q1-E1-H8
gtgnaactcaattcccgccgnccacccacgcgtcaagancagatagagacaaggaacaactatgcaacatcatggactatcaaagactctctatagacgcttgcgctcatgcttcccataacgataggttaccgcttagagttgttctccaagtactcttctttgaacaaatgcatctcagaaccgctcttgcaggtggtctaaatgttgcaaacaccgaaacagctcatgcagtgacgatccctggtggaagaacaggacaggagatagttcagagagatggttgggtgactgttgtgcgccaaaaccaggttttgaaagttgatatgcagaaaaatgangtcaagggttggagaactanaagangagtttcagagtattaagcangagatgaaagaagagaattagtaagtcctccagctcaaatgagctcgcctcgtctgggtcaaactcggctggtaagtttcctcctccacgaancttct

SEQ ID NO: 8836 - DNA, 496 bp, Arabidopsis thaliana
  unsure at all n locations
  Clone ID: LIB24-001-Q1-E1-H9
ggattgtccagccggacgtaccggnccgncattcccgggnccacccacgcgtccgcanacgcgtccgcaagctttcttgttggcattaattgcattacttgctacccaattgccttcactaatggctgcaggtttctctttatcgattttcctctgtttctttctcttttaaagcttcattatttaatcctgttcttgcctaaatcaggataagattatgaatgttggattttgagcttctggattttgcaaattttgttgctttctttgactaagatttgagtttcgatggaaattcgcataattttggttcattagttgcttacatgcaaaaatactctctttttaaattgaaatcaagattttgaagaaancatnaaaaatcaaactttggttgntcctttcaagccaatgggggtaaaaaagttaaaaacctnaaactttcnggacaatccttaaaaggttacaagncactaatgctggaattgcaangtgt

SEQ ID NO: 8837 - DNA, 436 bp, Arabidopsis thaliana
  unsure at all n locations
  Clone ID: LIB24-002-Q1-E1-A1
gancacgcgtccggccagtgcagccaaggcctaaccctcagggatcttaccactacggaaagatcaacatcacacgcaccatcaagcttgtgaacactcaaggcaaggtcgatggaaagctcaggtacgctttgaacggagtctcgcacactgaccccgaaaccccattgaagcttgcggagtactttggtgttgccgacaaggttttcaagtacgactccatcactgataacccaaccccagaacaaatcaagagcatcaagatcgtgccaaatgttcttaacatcactcaccgcaccttcatcgangtggtgtttgagaaccacgagaagagtgttcagtcgtggcacttggacggttactccttctttgccgtcgctgtcnagccaaggacttggacccanagaaagagaaaaaactacaacctgctggacgc

SEQ ID NO: 8838 - DNA, 431 bp, Arabidopsis thaliana
  unsure at all n locations
  Clone ID: LIB24-002-Q1-E1-A10
gaangacgcgtgggcttggactcaaatggtcacctgataatcatctcatttatggagaaaccgctaatatatcgtccgttaacgaaacaagaactcagtacacgactttaaggcatttccctgctgattcaagaaagtattgctacactctcaatgtcacgagtaggaatagatatctcattagagctactttcttgtatggtaatttcgacaacagcaacaatgtgtatcccaaattcgatatctccctcggggcgactcattgggcgaccattgttatctctgaaacctatataatcgaaactgcagaactggtgtttctggcttcttctcctactgttagtgtttgtttgtcaaatgccacaactgggacagccgtttatatcctactcttgagcttaagcagttgagtggttcnatgtatgggtcca

SEQ ID NO: 8839 - DNA, 481 bp, Arabidopsis thaliana
  unsure at all n locations
  Clone ID: LIB24-002-Q1-E1-A11
ttngcccgcccgtacgacacanacattcgncggnccacgcatccnattgatattttaggaatggacaagcgcaatgaagttcttgcagcgttatatatggtccggactgatgttagtttgtctgttcgtcaggcggcactacatgtatggaaaaccatcgtagcaaatacaccaaagacgttgaaggaaataatgccaattttgatgagaatgaatctgttcgtgatgcagccctgggggctggccatgtactggtggagcaccatgcaacaacgtctctgcctcttcttcttccagttgtggaggatggtattttcaatgataattggtcttggtgaacttattgaagttactagcgagcaagctttgaaggagttcgtcatacctataacagggcctcttattcgaatcattggagaccggtttccatggcaaagtcaaaaatgctatcttnggtacantaatcatcctaatacaaagg

SEQ ID NO: 8840 - DNA, 463 bp, Arabidopsis thaliana
  unsure at all n locations
  Clone ID: LIB24-002-Q1-E1-A2
acggtcaacatatcncgggtcgacccacgcgtccggtaacaaaagagattaaaagagtacgagctcaaatggaagaagatgaacagttatctgtgttgatgagagggcttcgtggccagaatttgaaggattcggtttttgctgatgataatattcagctaaggcttgttgagactggtgaaagcagtgagttcttacctttggtatatgatccggagaccatttctgcctattgggggaaacggcctcgtgctgttgcttctcgagttatccagttgctttcggttgctggagggtttctatcgcgtattgcaggggatgtnataaacaagaaagttaaagagaatgaggttgctacggcaattgaattgagggaaattgtaacttccttgggtccagcatacattaaacttgggcaanctttgagtattccancagatatattgtcacccgctgcaatgac

SEQ ID NO: 8841 - DNA, 477 bp, Arabidopsis thaliana
  unsure at all n locations
  Clone ID: LIB24-002-Q1-E1-A4
cnggccgccaccggtcatacaatcncgggtcgacccacgcgtccnaggacgcgtgggaatagattggccatcgagagaggagcttcattgacaaagagtcctatagccggaagtgaagaaatttccggtgcgtataatgctaaaggccgtccagatcttgggttggtcatcagggttaaccatctcacagagattgaccaagactcgcaagtcctctaccgtctctttcatctcgtcatctctcaatctctcctctgtcacttcgagctctcctcggagaatcttctctttcaagccaaccagaatgtcttcctcacttcccgggtctgacccagttgcaaattccccgactttcgtctctgttcaatcagctggagatgttcgtaagataaagttctgtcaatggtgtggangaccaaccangcatgaaatacctgacggtgaanagaaaattgagagctaattgcacacattggc

SEQ ID NO: 8842 - DNA, 482 bp, Arabidopsis thaliana
  unsure at all n locations
  Clone ID: LIB24-002-Q1-E1-A5
attggccgcccgtaccgaacacaaattcgcnggncgacccacgcgnccgnccacgcgtccgcataaatctctctctcttctcctctcttctcaaagatcgaacctttcgatttcagtctcttcagagttctttcgttttcatcgaaacaatggcgaagaacgttgggattttggctatggatatctatttccctcccacctgtgttcaacaggaagctttggaagcacatgatggagcaagtaaagggaaatacactattggacttggccaagattgtttagctttttgcactgagcttgaagatgttatctctatgagtttcaatgcggtgacatcactttttgagaagtataagattgaccctaaccaaatcgggcgtcctgaagtagggaagtgagactgttattgacaaaagcaaagtccatcaagaccttcntgatgcaactccttgagaaatgtggaaacactggatgtcgaaggg

SEQ ID NO: 8843 - DNA, 441 bp, Arabidopsis thaliana
  unsure at all n locations
  Clone ID: LIB24-001-Q1-E1-H11
gcagacgcgtggggcagagcataaacctacggataagccccttgatcaagagccgatgcttgcagctagagtgtacattgaggatggtctttgtctcctccttgaagttgatgatatagatcgtttcttggagtttaaccaactccaggacggaggacaccagttgaaacaaagacgacaagcattgttgcagagccttgcggtttcacttcagctcggtgatcccctcgccaagaatgggcaaagccagtctcttgatgattttctctttctaagggttatctctcttccaaagggtcgaaagctacttataaggtatcttcagctaattttccctggcagcgacctaatgcggatagtttgcatggccattttccgtcatttaangtcattgttcggagtcctttcatcctgaccccgatatcatcaaaaaccacaaat

SEQ ID NO: 8844 - DNA, 456 bp, Arabidopsis thaliana
  unsure at all n locations
  Clone ID: LIB24-001-Q1-E1-F4
ggnccacccacgcgtccgcanattattccatctctcttatcgccgctacaaacgtttcttcttcaacctcgttcagagattatcctcccttcttttctcatcttacaaggaagttgggcagttaaagctgctgggatcaccagttttgtcaaaagtggagtgtgaagaatcttttatgtctgaacaggcttctctctttcaatcatctatccggcttttaggagagtactgtcctatatctaggaaaaagtccactcataaagttggtggtttgcgttttgaggaggacatcacgagctgtattggatttcagtttatgcaactgagtgattatcactgcctcttctgacatcccttgtttgtttacgtttgttgaatcaagatggctttgcaaaacattggtgcctccaancgcgaagatgccntttaaaggtataagatgcccgaaggatgatg

SEQ ID NO: 8845 - DNA, 472 bp, Arabidopsis thaliana
  unsure at all n locations
  Clone ID: LIB24-001-Q1-E1-F5
gtaccggtaancaattcccgggnccacccacgcgtcngcactaggttacttgctttgagacgcgctttgtctcttttcagcaaccaacaacatcgttttcctttgtctcaagtctcaacagagcagttgtcgctatcaaactcactcttcagcagaagtcatgtttatggaagattatttcagagacagttatctgtaatccgtgaggcaaatgaagcttctgtaaccaatgtctgcaactcgtcaaactctgctactgaatcggccaaagttccctcccctgcgacgccctctgaggaaatgatggtgaagtacaagtcccagttaaaaataaacccgaggcatgacttcatgatggtcttcacttgcaaggtctgtgatacaagatctatgaagatggcgagccgagaatcatatgaaaacggcgttgtggtggtacgatgtgganggtgtgataatctacatttgattg

SEQ ID NO: 8846 - DNA, 472 bp, Arabidopsis thaliana
  unsure at all n locations
  Clone ID: LIB24-001-Q1-E1-F7
taccgganatcaattcccgggnccacccacgcgtcaggaaaattttcgtttggccggagatgaagataggggcggttcaggagagttggcttatacggactccggtacttaggccggcggttcaaggctcaattcgccggaatggaaagccgcagcttgagtttcctctctcgaacaggttgtctcgttgtgtggttatggctgttcaaggagggagaggatatgaatctccatgggatgaaaaaccctatgaaactcttcctactggtaaaagggtttatgttgatgaatctgatgttgtgacgtttcttgatccccccaaggagttgattccattggaccctgcttcatataacccggctgcttatctctggaaaaagattgaagacatccccgaagagaggcgccaccatttgctgcaattattanagccaaggcttatatctaagagcatgggaaatagcaagcactc

SEQ ID NO: 8847 - DNA, 458 bp, Arabidopsis thaliana
  unsure at all n locations
  Clone ID: LIB24-001-Q1-E1-F8
gtaccggnactcaatcccgggtccacccacgcgtcnggaccatctgagcatctctcagaaacctcaatgaacgtggaaaaagaactagaaatgcctgccgttgaaattttgccagacaatgacaaaaactctgatgtgttggcagttggagtttctggagacagtgacaatgtggtatctgtcttgcccgcttcccaaacttcctctgatcgtgatgaaggaatgattacagttgatgctgaacctacggaagacatgaaacttgatgttccagattctaaattggttactgatactactgttgactctactaataacaaggatgcccatgttgaggctaatactgaaangcaagataattctagtgcacttgtgctaaatgatgcaaataatgaaagtgcancaattgaaacgtgtacctggtccctaagttgcatcctccaatataaagtctgaan

SEQ ID NO: 8848 - DNA, 439 bp, Arabidopsis thaliana
  unsure at all n locations
  Clone ID: LIB24-001-Q1-E1-F9
ggncacttcgctctacattggttggggactagacggatctgtgtggatatcttcagagatgaaaggcctaaacgatgactgtgagcatttcgaaacgtttcctccaggtcatttttattcaagcaaattaggagggtttaagcaatggtataatcctccttggttcaatgaatctgttccttcaacgccttatgagcctcttgcgataagacgcgcctttgaaaacgctgtgattaagcggttgatgactgatgttccatttggagttttgctctctggtggtcttgattcttcccttgttgcctccatcactgcacgtcacttggccggtactaaggcggctaagcaatggggtcctcagctccattccttttgcgttggtcctgaagggctcaacggacttgaangcaaggaaangaggtggcggaatanttggggg

SEQ ID NO: 8849 - DNA, 445 bp, Arabidopsis thaliana
  unsure at all n locations
  Clone ID: LIB24-001-Q1-E1-G10
gcanacatatagttacaaacacacatacacaaaacacagatntataaaaatgtcttgttataaggggagcactaggngagtcggcaaaanaggtcgtcgttatacttgtattcctcttatgtttggttcactcgtcagagtcacttcgaccactgtttgcatgtgatccagcaaacgggttaacccggacgctccggttctgtcgggccaatgtaccgatccatgtgagagttcaagatttgctcggaaggctcacgttgcangagaagatccgcaacctcgtcaacaatgctgccgccgtaccacgtctcngtattggaggctatgaatggtggtccnaagctctccaaggcatttccgacgttggtccaangcgctaagttcggtggtgcttttcccggtgccaacaacttccctcaagtcatcancaaccgcaacttctttc

SEQ ID NO: 8850 - DNA, 416 bp, Arabidopsis thaliana
  unsure at all n locations
  Clone ID: LIB24-001-Q1-E1-G11
gcancattagggctctctctaaattcctcagtctcgagaatcttcatcgtcttcacgagctcactcgaagatgttaacggcagatataccaccgaatcaatcaatctacatccaaaacctcaacgaaaggatcaagaaagaggaattgaagagatctctttactgtttgttctctcagtttgggaggatacttgatgtggttgctttgaagactccgaagctccgaggacaagcttgggttacttttagtgaagtcactgctgctgggtcatgctgtttcgtcaagattgcaaaaatttttccctttctattgataaaacaatggcccttnacaatnatggcaaaaagcaaaagttnagattggccaacctaaaagctgagggaacttccgttcaaaaggataagaagaaggaanc

SEQ ID NO: 8851 - DNA, 478 bp, Arabidopsis thaliana
  unsure at all n locations
  Clone ID: LIB24-001-Q1-E1-G3
gcnccggtccgaccatacccgggnccncccacgcgtccgggangattgttgggttatgtgattcagggttaaaagatgataagcctgtgttggagcttgtgcgtagagtaacatggggtttgttttgtgctgtttatgtggggatcatgttgtttgccttgttggtttctgcgtttatgattagtggttttgtgattacctatttggctcatgaaccacttgttatcaaagagagcttgaattttgattacaccaagagtagtcctgaagcttatgtgcccataagttcatgtgctggtgttgcctttggtttgagtggcaaggagagtattgaaactgggaaggtcaaagggttgaaagacaggacagagataactgtgtcaatgacattgcctgaatccgagtacaatagaaatcctcgggatgtttcaagttccgggttggacttcntatcccgcgaattggtcatgtgcntgcc

SEQ ID NO: 8852 - DNA, 442 bp, Arabidopsis thaliana
  unsure at all n locations
  Clone ID: LIB24-001-Q1-E1-G4
cgtgggtgggagatttatcgggtccttaattggaatccttgacccgggttaanggtggagaaagaacccgtccaatgtnggatnaaggacccgattgggaacactggattcaaangaaaccgggtaanggagctccaatttcnannctccaagcttttttcaaagtcnattcantttgagnaacggtagctcaagcacaataaccgaaaacccgaatcnggatccgactccgagtccggttcattctcagacccagaatccgaaattcaataacactttctcccgagaacttaatttttcgacgtcaagttcnactttagtgaaaccaagatccggcgagatattaaacttcggcgatgaaggtaaacgaagctccggaaaccccggntcaagttcctaatcnggtcaaacacaattcgaaaacaaaagaaagaagtccatn

SEQ ID NO: 8853 - DNA, 484 bp, Arabidopsis thaliana
  unsure at all n locations
  Clone ID: LIB24-001-Q1-E1-G7
angtccctttggacgcccctnccntacanaaacggccggcnnttctgggaaagaaatgctgctaacaacttcgctagaggacattacactgttggaaangaaattgtggatctatgtcttgaccgtgtgaggaagcttgccgacaactgtactggcttanaagggtttttggtgttcaatgctgttggtggtggaactggttctggattgggttctctgttgctaaagcgtttgtctgtagattacggaaagaagtctaagcttggttttaccatatacccttctcctcangtttctactgctgttgtagagccttacaacagtgtgctttcaangcattccccttcttgaacatacccgatgtngcctgtccctcttggntaacgaaaccatctatgacaatttgccgcagattccctaaaatatccaagaaggccaacctacacaaanctttgaacaaggttgatatcccaagatnaattca

SEQ ID NO: 8854 - DNA, 467 bp, Arabidopsis thaliana
  unsure at all n locations
  Clone ID: LIB24-001-Q1-E1-G8
ncaatcccgggtccacccacgcgtccgcanagaatgggaagctgtggaaaagacattcctttggagacacagttcatgctactggaaagcaaggatgaggttgaagggaatggggatgatgctcctactgtttataccgtctttctccctctccttgaaggccagttcagagctgttctgcaaggaaatgagaagaatgagattgagatttgttttgagagtggagataaggcggtggaaactagccagggaactcaccttgtttatgttcatgctggaaccaatccctttgaagttatcagacaatccgtaaaggctgtggagagacacatgcaagacatttcatcatcgtgagaagaagaagcttccttctttcctaaactggtttggctggtgcacatgggacgctttctacacaagatgtgactggcganggtgttgattaanggcttaaaagtccttctgaa

SEQ ID NO: 8855 - DNA, 468 bp, Arabidopsis thaliana
  unsure at all n locations
  Clone ID: LIB24-001-Q1-E1-G9
tcccgggnccacccacgcgtccggaagacagtacttgtttctgtccggcgttaaaagcttcggtggtggtctcttgacttctctgagaagaagaaaaggaagctgagtctcattttagattcagctcacgaggaagtgacgacgatgtctcattctagaagactttcgttggaacctgctatagattcaatcactggtcgatttcgtgatttacagagaaatgatgatgacgtcaacaaacctgattttcgagaactcgatctaggttctcctgtttctaccttaatgccacgtggctctgcttcttcttccgctgctgcgactcctactagcaagctctggctcttctgggctctgcttctgggtaaaccgtcggtgagttctcaagattggctaaaacggttagatgatgccttacaagaagtcattcccggtgagctttctanccccggattcggaatgccgacc

SEQ ID NO: 8856 - DNA, 491 bp, Arabidopsis thaliana
  unsure at all n locations
  Clone ID: LIB24-001-Q1-E1-H10
cgtntagcctgcacgtaccggaccnccaatcccgggnccacccacgcgtccgcanagattccttcttgttcttcttcttcctttgattgctttcgaagatggttggttctaggaagcgttcatcagccaagaacagacttgtttcttcttcaactcgttcttctgggaaggataaggtttctgatgctcgtaaatatggtgaagccttggtgggttcaaggatacgagtttggtggccgatggacagcaaattctataagggtgtggtggattcctatgtctcttccaagaagaaacatcgggttttctatgaagatggtgataaagagaccttggatctgaagaaggagagatgggagttgattgaagaagatgatgctgaatctgaatctgatgagatntccctacaagaggaatctgctggtgagaattctgaangcactccaaaaccgcctaaagggaaanggaaagcatctttaaaaggaaggacg

SEQ ID NO: 8857 - DNA, 476 bp, Arabidopsis thaliana
  unsure at all n locations
  Clone ID: LIB24-001-Q1-E1-F3
cgggnccgccacgcgtccgcaacaatggcactctcttctacttccctctgctcttctttcatctctcaacatccaaaactctccatcactgcttctcctccattgttccatacccaaacaaccaaacccatctctgtaaaacggaaaatcataactctagcagctccagagacactcaccgctgaaacagtcaccggaattgatacttccgacaacactccacaacaaacaataaaggtggtgaagccagatgagaaatcaagagtggtactcaagtttgtgtggatggagaagaacataggattagggattggnccaacatgtacctggacatggnacaatcccacttagtccttacttcttctggcctaaggaaaagatgctggggaaagagcttaaagtcctactcctttgaaagctaaaaccatgggatntcctcaagaaagaaagaatgatnaattcctcctaaaaccaaa

SEQ ID NO: 8858 - DNA, 493 bp, Arabidopsis thaliana
  unsure at all n locations
  Clone ID: LIB24-001-Q1-E1-D3
cngtcctctcagttgccacggtccncgatacccggggncccccacgcgttcggnaaaaaatggcttttgccattgcttctgctctcacttccacactcacattatccacgagcanagtccaaaatcctacccagagaagaccacatgtagcgtccacatcatccaccggtggaagattaatgagagagcgcttggtggtggttcgtgccggcaaagaagtttctagcgtctgtgaaccacttcctccggaccgtcctttatggttccctggtagctctccacctgaatggctcgatggcagcttacctggtgatttcggtttcgatnctctcggtttagggtctgatncggacaccctcaaatggtttgcacaagctgagcttatacataaccggtgggcaatgctggccgtgancgggtatcataataccanaatgtctcgaacggttaggtttcattgaaaatttctcaatggtatgaacgcanggtctcg

SEQ ID NO: 8859 - DNA, 480 bp, Arabidopsis thaliana
  unsure at all n locations
  Clone ID: LIB24-001-Q1-E1-D6
gccntcgtaccggtaagataattcccgggnccacccacgcgtcngcaaggttctgagccttctaaatggtggacagtcaagtgggttgatgagcagctctgataatactgtgaagcgagaggctgctgttgatttacctgacttgattgacaccggtgattcagacgatactttgaacaatctgaatgctatagatactggcagtacagtggcgacagcaggtccattgatggatgatgattggtttggggatagctctgacattggactgagtancagcgagaagaaaactgatgacgacccctttgcagatgtctcatttcatccgaatgaagaaaaagaaagtgcagatgacctcttctctggaatgactgtcggggaaaagtccgctgctgttggtggtaatcatgtgcctgatctatttgatatgtttgggtcaactgcaaaaacttgaagcagagccaaaaagatgcaaaaaac

SEQ ID NO: 8860 - DNA, 398 bp, Arabidopsis thaliana
  unsure at all n locations
  Clone ID: LIB24-001-Q1-E1-D7
gcaaaaacaaagaacaagtgtgaagccaaacgcagaattttgggaaaccatcgttttctacttctcagtcatctactcagccttttgatgatccatttggtgactctcctttcaaagccatcacttctgctgacactgagacaagccaacatcagagttttggagttccttttcagccaacaccaccaacttcaaatcctaacaatgaacataactttggttttggggaagcattttcagctgttaccgattctgaacctggcgttcaaaatatgcaagctccaccgaacttatccgtctttcctcaagagcagtttgatacatcgcagagcgaaatcgatattcttgccggcattctcccaccatctggaccgccaagtttctctgtctccacaacn

SEQ ID NO: 8861 - DNA, 460 bp, Arabidopsis thaliana
  unsure at all n locations
  Clone ID: LIB24-001-Q1-E1-D8
aattcccgggnccacccacgcgtcngcaccgagtgagcttagtcattcccgtactttcttggatgcgcgaagtgaacaagatcttttatctggtatcaagaaggaagctgaagctggaaggttgccagcaaatgttgcagcaggaatggaagaattgtattggaactacaaaaatgcagttttaagtagtggagcttccagggcagatgaaactgttgtatcaaacatgtctgttgcttttgatcgcatgcttcttggtgtggaggatccttatacttttaatccatatcataaagcagtcagagaaccatttgactactacatgtttgtccatacatacatccgtcctcttattgatttcaaaaattcgtacgttggaaatgcttctatattctctgagctggaagacaagattcgacagggacacaatatcgtgttgatatcaaaccatcaaagtgaa

SEQ ID NO: 8862 - DNA, 489 bp, Arabidopsis thaliana
  unsure at all n locations
  Clone ID: LIB24-001-Q1-E1-D9
atttctagcctggcgtaccggtccncaattcccgggnccacccacgcgtccggagctctcggagattcaatcactcatggcgaacgaagacgacgacggtgagaaatccagaagtctgcaccaacagattgctagaaaacccaaaacccagatcgtgattggtgtgccatcgtaccaggaagttttggaaagctcacagacgaagtccacgcctccatctctcttcaagccttcccagagtttctctcaggctttcgctttcgtcaagnnnnnnnnnnnnnnnnnnnnnnnnnnnnnnnnnnnnnnnnnnnnnnnnnnnnnnnnnnngtcgggcgcttctcaggtgccccacagttcaagccaaacgcatcaaactgatggagcctcatcttcttctactcctgtagccactggctctgtacatcaaacacaactcaaaatcgtaacgctattctcgttagccatcgacagaaaggaaacccgcttctt

SEQ ID NO: 8863 - DNA, 482 bp, Arabidopsis thaliana
  unsure at all n locations
  Clone ID: LIB24-001-Q1-E1-E10
gtaccggtccacaattcccgggnccacccacgcgtccgaatttacagaaatgactgaagcagagtccaagactgttgttcctgagtcagtgttgaagaagagaaagagggaggaagaatgggcacttgccaagaaacaggagcttgaggctgccaaaaagcagaatgctgagaagaggaaactcatatttaaccgggctaaacagtactccaaggagtaccaggagaaagaaagggaattaatccagctgaagcgtgaggcaaaattgaaaggaggcttttatgttgacccagaagctaaactgcttttcattatccgtatccgtggtatcaatgccattgacccaaagacaaagaaagattttgcaacttttgcgtttaagacagattttcaatggtgtgttccttgaaggncaacaaggnaaacaattaacatgcttcgccgtgttgaancccaatgtaacctatggatacccgaactta

SEQ ID NO: 8864 - DNA, 482 bp, Arabidopsis thaliana
  unsure at all n locations
  Clone ID: LIB24-001-Q1-E1-E2
cgnacgccacggtccataanaccgggnccnnccacgcgtccgcnacantcctcctcttagctttagccactttttaaccctagtttttcccgccgccaccatcccccaataaccagcatcttccgaaaatcttaatagtttttgccgaggtacttacagggaaagatgtggtgacacaagagacagcaggtcgtatgataaatatattaaggcaacttcaacagacactgccaccatcggcgttggcctcaacatggtcaacgctgaaacccgaacagcagctcgctctccaatccatgctttcctcctaaattcaatccaatccgatctctctgtttatttttacaagttttgtgagctctgttttcaccacaaagcgtcgtcagttttgcatttatgtgtttacaaaagtgtttcttcttcttttgcatttttcatctaattcctttgggaagggatggatgatgggtcggtccaacctt

SEQ ID NO: 8865 - DNA, 432 bp, Arabidopsis thaliana
  Clone ID: LIB24-001-Q1-E1-E5
tcaacaagaaaatccaatggctgatccggcaacgagttctccgttgttggatgaccatgtaggtggagaagatgaaagaggaaggagatcaagatcatcaactttggttcaaaaagtgatcgacgtggaagaagcaaaagctcaaatgatttactctttgccaatgatactcaccaatgttttctactactgtattcctataacttctgtgatgtttgcttctcacctcggtcaactcgagctcgccggtgccacccttgccaattcttgggccaccgtctccggttttgccttcatggtagggttaagtggatcacttgagacattatgtggacaaggctttggtgcaaaaagatacaggatgttgggagttcatctacaatcatcttgcatcgtttcattaagttttcaagcatcctcatcaacatcttc

SEQ ID NO: 8866 - DNA, 476 bp, Arabidopsis thaliana
  unsure at all n locations
  Clone ID: LIB24-001-Q1-E1-E9
taccggtccanaattcccgggnccacccacgcgtccgcagacgcgtgggccggacatgaagatcgtgacattggtactcgtcgtcttcgtcatactttcgacatcattcccggctgccatcaaagccgaagacacgggagatacaggaaatgtgggagtgacatgtgacgcaaggcagcttcagccttgccttgccgcgattacgggaggaggacaaccctcaggtgcatgttgtgcaaagcttacagagcaacagtcatgcctctgtggtttcgctaagaaccctgcgttcgcacagtacattagctctccaaacgctcgcaaagtgctccttgcttgcaatgttgcttatcccacttgttgaaacttatctagagattttataaataaataaacgaaaggaaataaattacattatatcaaacgttatgatacaattcaaccgttttgtgttaatgtactgggcttacatggnt

SEQ ID NO: 8867 - DNA, 481 bp, Arabidopsis thaliana
  unsure at all n locations
  Clone ID: LIB24-001-Q1-E1-F1
gccacggtccgatatacccgggnccacccacgcgtccgtaaaagaagccattgtcgatgctgttctggagaatccatcagcaggaaatctcaagtttcttaatgggttgacagaagagcttgagggcagattgaatcgtctcaagtctgaggaaaccaaagaaattccctctgatgatcaattagacattgatgctcttgatgatgatccatgggggaaatggggtgacgaggaagaagaagaagttgacaatagtaaagcagacgagtcctatgacgatatgcagctgaaactggatttgcgtgatagagtagacagcttatttaggttcctccacaagttatcgaagtctaaagaacaaggaatctaccattaagagaangntcattggcttcangagagcaactttcctggcgaaccttctggaaacaaaagggctaatctacaagcttataacaaaagtgttgagcaaacaaagaga

SEQ ID NO: 8868 - DNA, 488 bp, Arabidopsis thaliana
  unsure at all n locations
  Clone ID: LIB24-001-Q1-E1-F10
tttcagccgnacgtaccggnccacaatcccgggnccacccacgcgtccgcanacgcgtccgctccgtccacttcactctctctaaactctctctcagatctctctctctctgtgattcaacaatggcggtttcttcttcttcgtttctatcgacagcttcactaaccaattccaaatccaacatttcattcgcttcctcagtatccccatccctccgcagcgtcgttttccgctccacgactccggcgacttctcatcgtcgttcaatgacggtccgatctaagattcgtgaaattttcatgccggcgttatcatcaaccatgacggaaggcaaaatcgtgtcatggatcaaaacagaaggcgagaaactcgccaagggagagagtgttgtggttgttgaatctgataaagccgatatggatgtagaaacgttttacgatggttatcttgctgcgattgtcgtcggagaaggtgaaacagctccggtt

SEQ ID NO: 8869 - DNA, 486 bp, Arabidopsis thaliana
  unsure at all n locations
  Clone ID: LIB24-001-Q1-E1-F11
taccggnccacaatcccgggnccacccacgcgtccgcaaacgcgtccgcccacgcgtccgcccacgcgtccgcccacgcgtccggttggttcatgtgtggaagttctctaagaacaacagaaaatttcaaaatggtttctcagataatctcgtgtttatctcaatcttcgtctcttctatgtttatccgattcaaggaggttaattcttccgaagacttgtacttacggcggtttgagccggttttctccaggatttgctagccgccggttatttacggttaatcggaagaaatggagatcggcctgcattttcaactctgggaaaggaacctggaggaaganggaaagttacaaaggagtaactcanaatggncgatacttcaganatggggaaatttcaatgggggaatggcanacaanttccgttnaacttcgttttgcttgtgcactaanggaagttttgttttgacaaggattaaaccgaa

SEQ ID NO: 8870 - DNA, 469 bp, Arabidopsis thaliana
  unsure at all n locations
  Clone ID: LIB24-001-Q1-E1-F12
anaatcccgggtccacccacgcgtccgcacctcctcctccatggttttggaccttccgctgtatggcaatggagccatcaggtcaagccactctctcacttctttcgtctctacgtccccgacctagtcttcttcggcggctcctcttcctccggtgagaaccggtcggagatgtttcaagcgttgtgcatggggaagcttatggagaagctcgaggtcgagagattcagtgtcgttgggacgagctacggcgggtttgtggcgtataatatggcgaaaatgtttccggagaaagtggagaaggtggtgcttgcgaagctccggtgttaatttgcggaggagtgacaacgaggcgtttatcgctangggctaagtgccaccgtatcaaggangtgatgcttcctgcttctgcaacagattttangagattctccgggatggtttcctccaaagagactcgattaatgtc

SEQ ID NO: 8871 - DNA, 486 bp, Arabidopsis thaliana
  unsure at all n locations
  Clone ID: LIB24-001-Q1-E1-D2
acgtcatccgncgcaccggtccanataaccgggnccaccacgcgtccgcantcattctcatctttgctgcggtgcatttttttctcgggaaaatcctttctgggctttccgggaaagttttcttgtcagattcggaaaggtaccaaaaaaaataaattaataaaaacttaccaaacagattttgtgtttatctctctctctatagattcttttgatcacaaatccttttcgtttttgatcatattttgattgagaacaaaacaatcttcaaagtctcaacctttaagtttgattgatctttttttggtaagtaaatcttctgtcgtagattcgatattttctgatcttctcttttcgaattcttcaatcttcaacgatcccaatcctcttcntctggaaatctaatttgcntccntcctcaaattttccnggggaaaaaaatcaaantccttgagttaattanactcccgantttgttggaatcga

SEQ ID NO: 8872 - DNA, 491 bp, Arabidopsis thaliana
  unsure at all n locations
  Clone ID: LIB24-017-Q1-E1-G8
ngttattagcctgccggtaccgnaccnaaattcncgggtcgacccacgcgtccgaaagaaggatatatggtcatgccactgatgtagagattcgtcccttagatgaggaaaaggctgttcaagctgctgttgacctcattggagagatctttctctttggggtcggtggagctgttgttgtttttgaggtgcagagaagttcgcggtcagaagcaagaaaagaggaagcacgtaagcaagaactagaggagttgagaataaaagatgaagaactagaaaagcaagtggcagatctcaagagcaagctagaggagcttgaacaacttgctaaggcacgangactgagcggtattttccagttaaaaccacagcctggtactaccgctagtgggaaaccagacaaatccagttgaatcatcatcatcatcatcctattcaatctaagaanantcaaaccaaagttaacaatacggtaatgatccttttcacaa

SEQ ID NO: 8873 - DNA, 395 bp, Arabidopsis thaliana
  unsure at all n locations
  Clone ID: LIB24-021-Q1-E1-C1
aagcgtcnnnnnnnnnnnnnnnnnnnnnnnnnnnnnnnnnnnnnnnnnnnnnnnnnnnnnnnnnnnnnnnnnnnnnnnnnnnnnnnnnntctaatttgagcctctaaagtctcctcgttttgttcatgttgttgttcaagtgaagaagctcaattatgtttacaacattgttgtaatttcaaaacttcataagaatttctctgataataaagaaaaagctggagtagaactattttaaagtgtcatcatgaagagactaagcagctcagattcaatgtgtggtctaatctccacttctacagatgaacagagtccaagagggtacggaagtaattaccaatctatgcttgaaggttacgatgaagatgctacactaatcgaggaatattccggna

SEQ ID NO: 8874 - DNA, 414 bp, Arabidopsis thaliana
  Clone ID: LIB24-003-Q1-E1-E5
acgcgtccgaaaaggctcatctttgcgactgctcccgtgttcttcgtctctctgtcaatggctcgcctcctcagatgtctgagaagaagtttcatatttagttcatcgacttcgattgcgtacagaaaccctagaatatgtgttcagtcaaatcaaagctatattttcttaagcagccgcaagtttctcagctcggggagttacgtttcagaaatgcggagaacagctttcgagggtaacattctcagattaattcgtttggagattcagtccgagcttgatcactcgcctattcttcagcctgaagagagttttggtccattcacggtggatgagcgtccgggggagcagtggattagcttgagaagaaatttggggaaaaaggaagatattaagattgaagcaaccatgttt

SEQ ID NO: 8875 - DNA, 434 bp, Arabidopsis thaliana
  Clone ID: LIB24-010-Q1-E1-H7
acgcgtccgatcaaatccatcatccatggatttacctgaagaatgttgggaattaatctgcaaagctatcgatgaagacgattatcgattcctggaatctgtttcactcgtatcaaccttgttcctctcaatcaccaatcgcgttcgctctactttcgtcgtcaccgatcgagctgttcctttactcaatcgtcatctccttcgattccgcaacttgaagcgaatcaggttctctgatttcactcaggatctcaattcgattcttctccaggtttctcgttccggtttggatttcgaatcggtagatgtctcgcaaacgcgctatttcccagattttgagatgaagaatgtcaaggaattgaaatgttatggagttggaggttttagtgatagcgatctgggtttcaatcgggagtgaattttccgttgctaga

SEQ ID NO: 8876 - DNA, 439 bp, Arabidopsis thaliana
  Clone ID: LIB24-095-Q1-E1-C8
agcagatcccctccttatcgtggttcacgccgtgattctcctcgccgcagagactcgccctatggtcgacgttcgccatatgccaatggggtgtgaaactggaccctgaagagaaagaagctattactaagctatgatgctatatctactctgtggcgccttttaggatagatctttatatctgctattatggtattagctcttctaggtttggttgttgagcatggacatgtcatggtatgttcgagttttattagacaattggatttggtgagttctccttcatgctgttttccaacagccgtcttgacttattctctataacacgcactggcctgctgtcttcacacagcgtccttgaacccctacacttgaggtcgttctttcgtatccataaatgttttgtctaaaaaacattgttaaaaggaaagtaagatga

SEQ ID NO: 8877 - DNA, 412 bp, Arabidopsis thaliana
  Clone ID: LIB24-026-Q1-E1-H7
agatgatgaagcttgtgaggttgatgaggagtcttcaagtaatcatacttgtcaagaatgtggtgctgagtttaagaaacctgctcacttgaagcagcatatgcagagtcattcgctcgagagatcttttacttgctatgtggatgattgtgctgctagctataggaggaaggatcatctcaataggcatcttcttacacataaagggaagctctttaagtgtccgaaggagaactgcaagagtgaattctcagtacagggaaatgttggtaggcatgttaagaaatatcatagtaatgacaaccgtgataaggacaatactggtttgggcgatggtgataaggacaatacttgtaagggggatgatgataaggaaaaatctggtagtgggcggttgtgagaagggaaaatg

SEQ ID NO: 8878 - DNA, 376 bp, Arabidopsis thaliana
  Clone ID: LIB24-137-Q1-E1-G11
atctatctcactctttgcttctgcaactcacagtcaatggcggctgaaatggcgttagtgaaacccatctccaagttctcttccccaaagctctcaaacccgagcaaattcctctccggccgacgtttctccaccgtgatcagaatgtcagcctcttcctcaccgcctcctccaaccaccgccacctcgaagtccaagaagggaacgaagaaagagattcaagagtcgcttcttactccgaggttctacacgacggacttcgaggaaatggaacagcttttcaacacggagatcaacaagaaccttaacgaagcagagttcgaggctctgcttcaagagttcaggaccgattacaaccagacacatttcgtgagga

SEQ ID NO: 8879 - DNA, 398 bp, Arabidopsis thaliana
  Clone ID: LIB24-131-Q1-E1-G1
cccaagcgtccgctctcgcagctcttctctattttcagcaatcgcctataatattaggtaaagctaaaagggtctgattcgtttgttttttcactgaagaatttggaaggaagtgattccgttgtgaaacagaaaagaagtatgggtactcacattgatatcaacaacttaggcggcgatacttctagagggaatgagtcaaagccattggcgaggcagtcttcgttatattccttaacgtttgatgagcttcagagcacattaggtgagccggggaaagattttgggtctatgaatatggatgagttactcaagaacatatggactgctgaggatactcaagcctttatgactactacatcttcggttgcagcccgggacctagtgggtttgttccg

SEQ ID NO: 8880 - DNA, 452 bp, Arabidopsis thaliana
  Clone ID: LIB24-089-Q1-E1-D7
caaattacaaaagagaaaagatggaaaaagttttctccgacgaagaaatctccggtaaccatcactggtcggttaatggaatgacgtcgttgaatcgcagtgcttccgaatgggcattcaatcgtttcatacaagaatcctccgccgctgcagacgacggagaatctacgacggcgtgtggtgtttccgtctcctctcctcctaatgttcctgtagattcagaggaatacagagcatttctcaagagtaaacttaatcttgcttgtgctgctgtcgccatgaaaaggggaactttcatcaaacctcaggatacttctggtagatctgacaatggtggagccaatgaatcagaacaagcctctcttgcttcttccaaagctacaccaatgatgagcagtgctataacaagtggatctgagctctctggtgatgaagaagaagctgatggtgaa

SEQ ID NO: 8881 - DNA, 351 bp, Arabidopsis thaliana
  Clone ID: LIB24-045-Q1-E1-E7
attctcttccttatctccttaaaaatcttctgctgttttcttttttatatttagagctcctctgtttcttctccaataaccaaaaaaaaaaaaaaaaactcttcctctgtttgttttcaagttctgacatcataaattcagaccgagaaaacataaaaatttgagtcttttgatgatcggaaactgatgactcccgttctctgcgaaatcctgctctctgggctcacggtcaaatctgctctctgccgtagaacccatctcgttcaatctttctccgtcgtcttcctctactggttttacaacgtttcatgaattgctacaaactctaattaattttttcagacagatcat

SEQ ID NO: 8882 - DNA, 424 bp, Arabidopsis thaliana
  Clone ID: LIB24-034-Q1-E1-A7
agaggctagagaatcgagaatcgatcttcgccgaaccaccttgtcttctcttagctcatcgaatctctccgtcgccgtcgattcttcccgccggtgaatctctgccttattgttttcttcaatttgatcgtcctgaattcatcgtcctatttagggtttcgatcacaatctgaagaggaggtcatggacgtttctgctagaaagtcacaaaaagctgggcgcgaaaagttgaggagggaaaaactgaatgagcattttgttgaactgggaaatgtactcgatccagagagacccaagaatgacaaagccacgattctgactgatactgttcagttgttgaaagagctcacatctgaagtcaacaaactgaaatctgagtacaccgcattgacagatgagtcccgcgagttgacacaagagaaaa

SEQ ID NO: 8883 - DNA, 413 bp, Arabidopsis thaliana
  unsure at all n locations
  Clone ID: LIB24-021-Q1-E1-H4
aattttagtatgtctcaattgggtcagtcaaagtctccgtttttccaactcttcaagaggaagaaacaaggctctgctggttttgccgatagtatgttgaagcttgttaggactttgcctaaggttttgaagtacttacctagtgacaaggctcaagatgctcgtctctacatcttgagtttacagttttggcttggaggctctcctgataatcttcagaattttgttaagatgatttctggatcttatgttccggctttgaaaggtgtcaaaatcgagtattcggatccggttttgttcttggatactggaatttggcatccacttgctccaaccatgtacgatgatgtgaaggagtactggaactggtatgacactagaagggacnacaatgactcactcaagangaaaga

SEQ ID NO: 8884 - DNA, 376 bp, Arabidopsis thaliana
  unsure at all n locations
  Clone ID: LIB24-060-Q1-E1-H4
gtcagagaaactccaaatcaagaaccagctcgaggaagtgaaactcgagctcgccggaagaaaagcgagtgctagtggaggagatatgtcgtcttcgtgttcttcgattaaaccggtggggatggagattgaagtgaagataattggttgggacgcaatgattagagttgaatctagtaagaggaatcatccggcggcgaggttgatgtcggcgttgatggatttggagttggaagtgaatcacgcgagtatgtcggtggttaacgatttgatgattcaacaagcgacggtgaagatgggttttaggatctatacgcaagaacagctcagagcaagtttgatttcaaaaatcngttaaaagggtgtgttttgggga

SEQ ID NO: 8885 - DNA, 419 bp, Arabidopsis thaliana
  unsure at all n locations
  Clone ID: LIB24-004-Q1-E1-F9
gagagagatgggtgattctgacgtcggtgatcgtcttccccctccatcttcttccgacgaactctcgagctttctccgacagattctttcccgtactcctacagctcaaccttcttcaccaccgaagagtactaatgtttcctccgctgagaccttcttcccttccgtttccggcggagctgtttcttccgtcggttatggagtctctgaaactggccaagacaaatatgctttcgaacacaagagaagtggagctaaacagagaaattcgttgaagagaaacattgatgctcaattccacaacttgtctgaaaagaggaggagcaagatcaacgagaaaatgaaagctttgcagaaactcattcccaattccaacaagactggatanagctcaatgcttgatgaagctatagaatatc

SEQ ID NO: 8886 - DNA, 376 bp, Arabidopsis thaliana
  Clone ID: LIB24-133-Q1-E1-B2
accacgcatccgcaacctcaacaatctctctcctctctctctctgtatatagaagaatctccattgtctttaatttctctccatttctctttctctcttccttcaaagttttctcttttcttgatgggtttaagagagtaaagatcatcaagtactatgcattaaattgagaagttattaaaaatttcgaaagtaattaaagattgttgatgatgaagagattaagtagttcagattcagtgggtggtctcatctctttatgtcctaaaacttccacagatgagcagagtccgaggagatacggtgggagagagtttcagtcgatgcttgaaggatacgacgaagaagaagaagctatagtagaagaaagaagaca

SEQ ID NO: 8887 - DNA, 393 bp, Arabidopsis thaliana
  Clone ID: LIB24-070-Q1-E1-E7
accacgcgtccgtgactatttcttagtattagtcaattctctgtttccatcttatatggatagtctagacacagagcagagatccttctttggagaaaaagaagatgagagacgagagaggatcgtttcttcacgtatgggtcgtagatagatcttaatcgataaccatctacgccttgatctaaccattcaatataaactttatttccttcttcttttcgatctcaattgttccgaccaaacaagatgaagagatcacgtgggagctccgattctttatccggtttcttaccaattcgccattctacaacagacaaacaaataagcccaagaccaacaactagcggctttctctattccggggccggagactactcccagatgtttgacgca

SEQ ID NO: 8888 - DNA, 399 bp, Arabidopsis thaliana
  Clone ID: LIB24-058-Q1-E1-F6
atctccctctctatctctctcttaccaatttccatttctcgggggaaaataataatacgacttttgaaatctctcactaatatttcccaagaaaacctgatgaattaaaagttcatattttcttggtgttgattggtattagatgactatttcttagtattagtcaattctctgtttccatcttatatggatagtctagacacagagcaaagatccttctttggagaaaaagaagatgagagacgagagaggatcgtttcttcacgtattggtcgtagatagatcttaatcgataaccatctaggccttgatctaaccattcaatataaactttatttccttcttcttttcgatctcaattggtccgaccaaacaagatgaagagatcacgtggaagct

SEQ ID NO: 8889 - DNA, 397 bp, Arabidopsis thaliana
  Clone ID: LIB24-029-Q1-E1-B8
gccaacatcacacaaacatagagattccaaaaaataaaaataaagaaaacataaatcctctgaggaaaaattccgatgagatgacagaaggtggagaatattctccggcgatgatgtcagcagagccattcttgaccatgaagaagatgaagaagagcaaccacaacaagaacaatcagagaaggtttagcgacgagcagatcaagtcactggagatgatgtttgagtctgagacaaggcttgagccaaggaagaaggttcaattagctagagagctagggttgcagccgaggcaagtggctatatggtttcagaacaagagggctcgttggaaatccaagcagctcgagactgagtacaacattctcagacaaaactacgacaacttggcttctca

SEQ ID NO: 8890 - DNA, 410 bp, Arabidopsis thaliana
  Clone ID: LIB24-015-Q1-E1-G5
gaaaaactttcctaattggttcataccaaagtctgagctcttctttatatctctcttgtagtttcttattgggggtctttgttttgtttggttcttttagagtaagaagtttcttaaaaaaggatcaaaaatgggaaggggtagggttcaattgaagaggatagagaacaagatcaatagacaagtgacattctcgaaaagaagagctggtcttttgaagaaagctcatgagatctctgttctctgtgatgctgaagttgctcttgttgtcttctcccataagggaaaactcttcgaatactccactgattcttgtatggagaagatacttgaacgcgatgagatgtactcttacgccgaaagacagcttattgcacctgagtccgacgtcaatacaaactggtcgatgg

SEQ ID NO: 8891 - DNA, 374 bp, Arabidopsis thaliana
  Clone ID: LIB24-014-Q1-E1-G10
caagatgtctggtttcctcttttgtttcgtccaaatctctactttttagggatcttgtccttctcttttctgctgattaaaaccctcgaatttgctccaattcgacgcgaaaaagggcattgagatggtgaatggagaatcatcaactagtacgtcttactctgatagtaacaatgacacaaatgatcaaggaggagactttgaatgtaacatttgtttcgaactagctcaagatccgattgtcactctctgtggccatctcctttgctggccttgcttataccgttggcttcaccaccattcacattctcaagaatgtccggtttgtaaagccgtggttcaagaacgataagcttgttcctctttacggtaga

SEQ ID NO: 8892 - DNA, 373 bp, Arabidopsis thaliana
  Clone ID: LIB24-115-Q1-E1-B2
aaaaaaaaaagtgagagagagagcaaatctgtgtgatggaagttgctcttgagtttgggattatttatcttttcaatatcatttgatgaagaaggatggtgagatgggaagaagtgatgtcaggaggagtatgagatgaaagagagacaacgttggagtggtgaagaagatgcattgttacgtgcttacgttagacagttcggtccgagagaatggcatcttgtgtctgagcgtatgaacaaacctttgaaccgtgacgccaagtcttgtttagagagatggaagaattatcttaagccagggatcaagagagggtctttgacagaggaagagcagaggcttgtgattcgtcttcaagagaaacacggcaaca

SEQ ID NO: 8893 - DNA, 443 bp, Arabidopsis thaliana
  Clone ID: LIB24-087-Q1-E1-A8
gttactcttgagtttgggattatttatcttttcaatatcatttgatgaagaaggatggtgagatgggaagaagtgatgtcaggaggagtaggagatgaaagagagacaacgttggagtggtgaagaagatgcattgttacgtgcttacgttagacagttcggtccgagagaatggcatcttgtgtctgagcgtatgaacaaacctttgaaccgtgacgccaagtcttgtttagagagatggaagaattatcttaagccagggatcaagaaagggtctttgacagaggaagagcagaggcttgtgatccgtcttcaggagaaacacggcaacaagtggaagaagattgctgctgaggttcccgggaggacggcaaagcggttaaggaagtggtgggaagtgtttaaggagaagcaacagagagaagagaaagagagtacaagag

SEQ ID NO: 8894 - DNA, 444 bp, Arabidopsis thaliana
  Clone ID: LIB24-132-Q1-E1-A7
atacgcgcttccatcaaccctttggtcttggaagccaaatcaaacctttccttcaatcctcaaattttcgaaaattttctcttttgctttacgttctctcaattcttatttgtaagaaagtttgttcctttaatcaatcaaatcaaagagacttttgaagattgtttcccaatttgcgtcaatcgggatcgagtcaaatctgaaatcttctccactcatcatctgactataagacttaatcaagggactttttgttcgggtttggttttaaacgtcttggattcgaagtggttaaggtatggatgaaaataatggaggttcaagctcacttccacctttccttactaaaacatatgaaatggttgatgattcttcttctgactcggtccttgcctggagcgaaaacaacaaaagcttcatcgtcaagaatccagcagagttttc

SEQ ID NO: 8895 - DNA, 414 bp, Arabidopsis thaliana
  Clone ID: LIB24-093-Q1-E1-A12
caatcttcagcggatgatgataaggttgacgtggtttcgggttctagaagatatggatctgagaactggatgtcctcagccaggcatgaacctacttacacagatttgctctccggctttgggactaacatagatccatcccatggtcagcggatacctttttatgaccattcatcatcaccttctatgcctgcaaagagaatcttgagtgattcagaaggcaagttcgattatcttgctaaccagtggcagatgatacactctggtctctccctgaagttacatgaatctcctaaggtacctgcagcaactgatgcgtctctccaagggcgatgcaatgttaattacagcgaatatcctgttcttaatggtctatcgactgagaatgctggtgggaactggccaatacgtcca

SEQ ID NO: 8896 - DNA, 436 bp, Arabidopsis thaliana
  Clone ID: LIB24-123-Q1-E1-A1
ccaaaacaaggaacaaagaagaagatcttacatacgaagatcactctctgattcactctgagagacaaactggtttactttggttctgtttgacaaaaggagacatgcaaaaataaatctctatcccttgtttttcttcttcgcttcatcgattactcaaagaggttgttggttgtgagaataattagcttgttaacgaagacgttatgatgcatcagatgttgaataagaaagattcagctactcattctactttgccataccttaatactagcatctcttggggagtggttccaactgattccgttgctaatcgtcgcggttctgctgaatcactaagcttgaaggttgattcaagacctgtgcatatacaaactacaaagcaaatcagttttcaggaccaagattcatcttcaacacagtccactggtcaatc

SEQ ID NO: 8897 - DNA, 412 bp, Arabidopsis thaliana
  Clone ID: LIB24-070-Q1-E1-E8
caacaatggacgtctacggcatgtcttcaccggacttgcttcgtatcgacgaccttctcgatttctccaacgacgaaatcttctcttcctcttccaccgtcacttcctccgccgcttcctccgccgcttcttccgaaaaccctttcagctttccttcttccacctacacttctcctactctcctcaccgacttcactcacgatctctgcgttcccagtgacgacgcagctcatctcgaatggttatcgcgattcgttgacgattcattctccgatttcacagcaaatcctttaaccatgaccgttagacccgagatttcattcaccggaaaacctagaattcgccgatcaagagcaccagcaccttccgtagctggaacttgggctccgatgtctgaatcaaagctttgtca

SEQ ID NO: 8898 - DNA, 416 bp, Arabidopsis thaliana
  Clone ID: LIB24-118-Q1-E1-B3
gaatatatctcttcctctgtttcttcgccattctctcagcttttctccttcttcttcgtctttgtcagagtgaatggagctgtggacagaagctagagccttaaaggcaagtctaagaggagaatctactatatctctcaaacatcaccaagtgattgtgtcggaagatttaagccgaacttcttccttgccggaagatttctccgttgagtgtttcctcgatttctcagaaggtcaaaaagaagaagaagaagaagttgtctctgtttcttcttcacaagagcaagaagaacaagaacatgattgtgtctttagttcacaaccttgcatctttgatcaacttccttctttgccggatgaatatgtggaagagcttgaatgggtatcccgtgttgtggatgattgttcatcaccag

SEQ ID NO: 8899 - DNA, 409 bp, Arabidopsis thaliana
  Clone ID: LIB24-124-Q1-E1-A2
gagaaaatacgaaccggccacatccaaggatccatatccctcaatgggatcaaatcaacgatccaacggccacaatctcttcaccattctcttccgtcaaccttaacagcgttaacgactacccacactctccgtcatcgtatctcgactccttcgcttctctcttccgttacctcccgtcaaacgagttaacaaacgattcagactcatcaagtggcgacgagtcatcagcactcagcgactcagtctcctccgacgagtttcgcatctacgagttcaaaatccggcgatgcgctcgacgtcgatctcatgattggacggagtgtccgttcgcacatcccggagaaaaagctcgacgacgtgatccgagaaagtttcattaatccggcaccgcatgtcctgagtttcg

SEQ ID NO: 8900 - DNA, 408 bp, Arabidopsis thaliana
  Clone ID: LIB24-126-Q1-E1-G8
caaaaatgatgatcggcgaaaataaaaaccggccacatccaacgatccatatccctcaatgggatcaaatcaacgatccaacggccacaatctcttcaccattctcttccgtcaaccttaacagcgttaacgactacccacactctccgtcaccgtatctcgactccttcgcttctcgcttccgttacctcccgtcaaacgagttaacaaacgattcagactcatcaagtggcgacgagtcatcaccactcaccgactcattctcctccgacgagtttcgcatctacgagttcaaaatccggcgatgcgctcgaggtcgatctcatgattggacggagtgtccgttcgcacatcccggagaaaaagctcgacgacgtgatccgagaaagtttcattactccgggaacg

SEQ ID NO: 8901 - DNA, 359 bp, Arabidopsis thaliana
  Clone ID: LIB24-124-Q1-E2-A2
gcgaaaataaaaaccggccacatccaacgatccatatccctcaatgggatcaaatcaacgatccagcggccacaatctcttcaccattctcttccgtcaaccttaacagcgttaacgactacccacactctccgtcaccgtatctcgactccttcgcttctctcttccgttacctcccgtcaaacgagttaacaaacgattcagactcatcaagtggcgacgagtcatcaccactcaacgactcattctcctccgacgagtttcgcatctacgagttcaagatccggggatgcgctcgatgtcgatctcatgagtggacggagtgtccgttcgcacatcccggagaaaaagctcgacga

SEQ ID NO: 8902 - DNA, 434 bp, Arabidopsis thaliana
  Clone ID: LIB24-090-Q1-E1-F7
ctgacatcacaagtctcttccttccagtctcttgccggatcatacaagcaaccattcattctatcctcccaggattcttcagctgttgtgttaccggattccacaaactcaccgctgtttcatgatgtgtgggacactcagttgaacggtctcaagtttgaccagttcagtcccttgatgcagcaggacctttatgctagtcagaatatctgtatgagtaatagcacaaccagtaacattctagatcctccactctcaaacacagtccttgatgacttctgtgccatcaaagacactgatttccagaaccacccttctggttgtttggttggaaacaacaacactagctttgctcaagatgtccagtcgcagatcacatcagctagctttgcagactcacaggccttctctcgccaagattttccagataattc

SEQ ID NO: 8903 - DNA, 442 bp, Arabidopsis thaliana
  unsure at all n locations
  Clone ID: LIB24-112-Q1-E1-F3
ggaatctattgatacaaactctgtctactcagagcccatggcacatggattatacccgtatccagatccttactacagaagcgtctttgcacagcaagcgtatcttccacatccctatcctggggtccaattgcagttaatgggaatgcagcagccaggagttccattgcaatgtgatgcagtcgaggaacctgtttttgttaacgcaaagcaataccatggtatactcaggcgcaggcaatcccgggcaaaacttgaggcacgaaatagagccatcaaagcaaaaaagccatacatgcatgaatctcggcatttacatgcgataagacggccaagaggatgtggtggccggtttctcaatgccaagaaggaaaatggagaccacaaggaggangaggaggcaacctctgatgagaacacttcagaagcaagttccagcctc

SEQ ID NO: 8904 - DNA, 390 bp, Arabidopsis thaliana
  Clone ID: LIB24-059-Q1-E1-D4
cggacgcgtgggtgatgatcggcgaaaataaaaaccggccacatccaacgatccatatccctcaatgggatcaaatcaacgatccaacggccacaatctcttcaccattctcttccgtcaaccttaacagcgttaacgactacccacactctccgtcaccgtatctcgactccttcgcttctctcttccgtgacctcccgtcaaacgagttaacaaacgattcagactcatcaagtggcgacgagtcatcaccactcaccgactcattctcctccgacgagtttcgcatctacgagttcagaatcgggcgattcgctcgaggtcaatctcaggattggacggagtgtccgttcgcagatcccggagaagaagccgacgacgtgatccgag

SEQ ID NO: 8905 - DNA, 395 bp, Arabidopsis thaliana
  Clone ID: LIB24-135-Q1-E1-A6
cttgagaatcctctcttcaaagccatggcgttagaactatggcaaactctcaaagaagcaatccatgcttacacaggtctttctcctgttgtcttcttcactgctctagctctcgccttcgccatttaccaagtcatctcaggctggtttgcctcgccgttcgatgatgttaaccgacatcagagagctagatccttggctcaagaggaggagccaccgattcctcagcctgttcaagtcggtgagatcacggaggaggagcttaaacagtacgatggctctgatcctcaaaagccccttcttatggctatcaaacatcagatctatgatgttacacagagcaggatgttctacggaccaggaggaccatatgctttgtttgcagggaaagacgc

SEQ ID NO: 8906 - DNA, 420 bp, Arabidopsis thaliana
  Clone ID: LIB24-136-Q1-E1-G9
aatttcttcacaaagcaaaacacagaaaaagccattctttttgccccttgagtgctttcagctcttcccacaaggttacagaagtaatgtcacgtgtgtacgtcggaaatttggacccgcgagttactgagcgtgaacttgaggatgagttccgtgcctttggagttgtcaggagtgtttgggttgcccgtagaccacctggttacgcttttctagatttcgaagatcctagggatgcccgtgatgctatccgtgctttagatggcaagaatggctggagggttgaacagtctcacaatcgaggtgagcgtggtggcggcggtcgtggtggtgaccgtggaggtggtggcggcggccgtggtggtcgtggtggctctgatttgaaatgctatgaatgcggtgagactggtcatttcgcac

SEQ ID NO: 8907 - DNA, 427 bp, Arabidopsis thaliana
  Clone ID: LIB24-010-Q1-E1-C8
cccacgcgtccggtggatctttcaaagttccaaaactatgaggagttagtcgctgagctggacaggctgtttgagttcaatggagagttgatggctcctaagaaagattggttgatagtttacacagatgaagagaatgatatgatgcttgttggtgacgatccttggcaggagttttgttgcatggttcgcaaaatcttcatatacacgaaagaggaagtgaggaagatgaacccggggactttaagctgtaggagcgaggaagaagcagttgttggggaaggatcagatgcaaaggacgccaagtctgcatcaaatccttcattgtccagcgctgggaactcttaaacaaacaaaataaccaacaacccttttgctgcaagccgaggatgggggtcgattggtggagactggagagcaaaatggg

SEQ ID NO: 8908 - DNA, 419 bp, Arabidopsis thaliana
  Clone ID: LIB24-132-Q1-E1-F9
atttcatgtgagagagagagttgaattttgcagatgagtatgagaagaagcaaagcggaagggaagaggagcttacgagaactgagtgaggaagaggaagaagaagaagaaactgaagatgaagatacttttgaagaagaagaggctttggagaagaagcagaaaggtaaagctacaagtagtagtggagtttgtcaggtcgagagttgtaccgcggatatgagcaaagccaaacagtaccacaaacgacacaaagtctgccagtttcatgccaaagctcctcatgttcggatctctggtcttcaccaacgtttctgccaacaatgcagcaggtttcacgcgctcagtgagtttgatgaagccaagcggagttgcaggagacgcttagctggacacaacgagagaaggcggaaaagcac

SEQ ID NO: 8909 - DNA, 460 bp, Arabidopsis thaliana
  unsure at all n locations
  Clone ID: LIB24-109-Q1-E1-H7
catatcttcttcttatacccttcgaccaacgaagaaccctagaaatcgattaacaagatgaatagggaaaagttgatgaagatggctaacactgtccgcactggcggtaaggggacagtaagaagaaagaagaaggctgttcacaagaccactacaaccgatgacaagaggctccagagcactcttaagagagttggagtcaattccattcccgccattgaagaagttaacatttttaaggatgatgtagtcattcagttcattaaccctaaagttcaagcttcaattgctgctaacacatgggttgtgagtggtacaccacagacganaaaattgcaagacattcttcctcagattatcagccaacttggaccagataacttggacaacctgaagaagctagcagagcaattccagaaacaagctccaggtgcangtgatgtcncagcaacaatccaag

SEQ ID NO: 8910 - DNA, 388 bp, Arabidopsis thaliana
  Clone ID: LIB24-058-Q1-E1-H3
cccacgcgtccgcccacgcgtccgctttcatgtgagagagagagttgaattttgcagatgagtatgagaagaagcaaagcggaagggaagaggagcttacgagaactgagtgaggaagaggaagaagaagaagaaactgaagatgaagatacttttgaagaagaagaggctttggagaagaagcagaaaggtaaagctacaagtagtagtggagtttgtcaggtcgagagttgtaccgcggatatgagcaaagccaaacagtaccacaaacgacacaaagtctgccagtttcatgccaaagctcctcatgttcggatctctggtcttcaccaacgtttctgccaacaatgcagcaggtttcacgcgctcagtgagtttgatgaagcca

SEQ ID NO: 8911 - DNA, 422 bp, Arabidopsis thaliana
  unsure at all n locations
  Clone ID: LIB24-025-Q1-E1-C8
aaacccttcaaaaagagaaaagtctaaagaatanacaagagccctaatatcaaatcacaaccaaaaaaaccaaagaaagctaattaaagttttctctctagctattcctcttcttttcttgttcttgaaaactagggtttacttcaccaaaagataagatctttccccagaaaaagcaatacccaagtcatgtttctgtgtgtctgtatatagataaaacattacataccctaataaggttacacaaatagctataaaagagggaaaataagatagggattttttggggtgaggaaagatgggaagaggaagagtagagctcaagaggatagagaacaaaatcaacagacaagtgacgtttgctaaacgtagaaatggtttgctgaaaaaagcttatgagctttctgttctctgcgatgctg

SEQ ID NO: 8912 - DNA, 351 bp, Arabidopsis thaliana
  Clone ID: LIB24-118-Q1-E1-C12
ctttcatctgagacagagaggtgcattttgcagatgggtatgagacgaagcagagccgaagggaagaggcgcttacgataactgagtgaggaacacgaagaagaatacgacactgaccatgaacagacgtttgacgaagaagaggctttggaaaagaatcatacaggtaaagctacaagtagtattggagtttgtcatgtctagatttgtaccgccgctctgagcaaagccaaacagtaccacaaacgacacatagtctgccaatttcatgccaaagctcctcatgttcggatctctggtcatcaccatcgtatctgccatgactgcagcaggtttcacgcgctcagtgac

SEQ ID NO: 8913 - DNA, 393 bp, Arabidopsis thaliana
  Clone ID: LIB24-047-Q1-E1-A12
cggacgcgtccgcccacgcgtccgcccacgcgtccgttttgctctcaatagattccattgattcaaaacaaaattttcattaagatttcacaacctccacacacttccaaacacaattaaagagaggaaaaagaatcaataaccctataaataaaaaatcagacaaacagaagtttcctcttcttcttccgtaagctagtaccttttgttcttgaaattagggttaatttcttttttccaaataccatcaattctccagaccataaaaactcaaaaagatcagatctttcctctgaaaaagagatacccaacttatgtttttgtgtgtctgtatatagatagacattacatacccatatttgtgtagagacataaaaagtggcaattaaggta

SEQ ID NO: 8914 - DNA, 390 bp, Arabidopsis thaliana
  Clone ID: LIB24-028-Q1-E1-A3
aatattgtaggcctcattttgagcagcttttcaaggagtctggtagtttcagcaagaactttcagtcacctgcaaagccattgactgataagccaaccccggagctgaataggacacctagtcgacttgctggtatgttctctggaacgcaagacaaatgcgctacttgcactaaaaccgtgtatcctatcgaaaaggtaactgtggaaagccagtgttaccataaatcttgcttcaagtgttctcatggaggctgtccgatatctccatcgaactatgcagctctagagggaatattgtactgcaagcaccatttcgctcagcttttcaacgagaaaggaagttacagtcatctcatcaaatctgcttccatcaaacgcgctactgctg

SEQ ID NO: 8915 - DNA, 424 bp, Arabidopsis thaliana
  Clone ID: LIB24-016-Q1-E1-A5
cccacgcgtccgcaacccttcaaaaagagaaaagatctaaagaataaacaagagccctaatatcaaatcacaaccaaaaaaaccaaagaaagctaattaaagttttctctctagctattcctcttcttttcttgttcttgaaaactagggtttacttcaccaaaagataagatctttccccagaaaaagcaatacccaagtcatgtttctgtgtgtctgtatatagataaaacattacataccctaataaggttacacaaatagctataaaagagggaaaataagatagggattttttggggtgaggaaagatgggaagaggaagagtagagctcaagaggatagagaacaaaatcaacagacaagtgacgtttgctaaacgtagaaatggtttgctgaaaaaagcttatgagctttctgttct

SEQ ID NO: 8916 - DNA, 405 bp, Arabidopsis thaliana
  Clone ID: LIB24-060-Q1-E1-F5
atgtgcttcttctgcgatcaactaagatccgatccgcgagcgtttcagacttcgatcagatccgattaagagaagcaaatcgggtcgggtatgactcgtcgatgttctcactgcaatcacaatggccacaactctcggacttgtcccaatcgcggcgtgaagctctttggtgttcggctcaccgaaggttcgatccggaaaagtgcaagtatgggtaatcttagccattacacgggttctggatcgggtgggcatggaaccgggtccaacactccgggttccccgggtgatgtccctgaccatgtcgctggtgatggttacgcttctgaggatttccttgctggttcttcctcaagccgcgagagaaagaaatgaactccatgggcagaggaagaacacaggatg

SEQ ID NO: 8917 - DNA, 439 bp, Arabidopsis thaliana
  Clone ID: LIB24-123-Q1-E2-A5
cagcagttaagtggtactgagataaatgatatagtttctcttcaagaacagtttctcattacccaccttctcctttttgctgatctatcgtaatcttgagaactcaggatcaatggaggaaggtgggagtagtcacgacgcagagagtagcaagaaactagggagagggaaaatagagataaagaggatagagaacacaacaaatcgtcaagttactttctgcaaacgacgcaatggtcttctcaagaaagcttatgaactctctgtcttgtgtgatgccgaagttgccctcgtcatcttctccactcgtggccgtctctatgagtacgccaacaacagtgtgaggggtacaattgaaaggtacaagagagcttgttccgatgccgtcaaccctccttccgtcaccgaagctaatactcagtactatcagcaagaagct

SEQ ID NO: 8918 - DNA, 419 bp, Arabidopsis thaliana
  Clone ID: LIB24-123-Q1-E1-A5
cagcagttaagtggtactgagataaatgatatagtttctcttcaagaacagtttctcattacccaccttctcctttttgctgatctatcgtaatcttgagaactcaggatcaatggaggaaggtgggagtagtcacgacgcagagagtagcaagaaactagggagagggaaaatagagataaagaggatagagaacacaacaaatcgtcaagttactttctgcaaacgacgcaatggtcttctcaagaaagcttatgaactctctgtcttgtgtgatgccgaagttgccctcgtcatcttctccactcgtggccgtctctatgagtacgccaacaacagtgtgaggggtacaattgaaaggtacaagaaagcttgttccgatgccgtcaaccctccttccgtcaccgaagctaatactc

SEQ ID NO: 8919 - DNA, 423 bp, Arabidopsis thaliana
  Clone ID: LIB24-012-Q1-E1-G11
atttggtgataagtcagtagaaatggataaggagaaatctccagcacctccttgtggaggtcttcctcctccatctccatcaggccgatgctctgcattctcagaagctggtcccattggtcatggttcagatgctaatcgaatgagtcatgatattagccgtatgcttgataacccacctaagaagattggacatcggcgagctcattctgaaatacttactctccctgatgatttgagctttgatagtgatcttggtgtggttggtaatgctgctgatggagcttctttctctgatgagactgaagaagatttgctctctatgtatcttgatatggataagtttaattcttctgctacatcttctgcccaagttggtgagccatcaggaactgcttggaaaaatgagacaatgatgcagac

SEQ ID NO: 8920 - DNA, 436 bp, Arabidopsis thaliana
  Clone ID: LIB24-001-Q1-E1-D10
cactctttctctctctctctctggttccctagaatttgagcaaaatttctaccataattgctaattattaaaaggaaacataagtaatcgttgcttcgatcctttgttacatggatggatcctgaacaggaaatctcaaacgagactttggaaactatattggtaagttcaacaaaaggaagcaataataacaataagaaaatggaagaagaaatgaagaagaaagtatcaagaggagaattaggaggtgaagctcaaaattgtccaagatgtgaatctccaaacacaaagttttgttactacaacaactatagtctctcacaacctcgttacttctgcaaatcttgtcggagatattggactaaaggcggtactcttcgtaacgttcccgtcggtggtggttgccgtcgaaacaaacgattctcttcctcagctt

SEQ ID NO: 8921 - DNA, 408 bp, Arabidopsis thaliana
  Clone ID: LIB24-062-Q1-E1-F9
agattttctttgtctccgatttttttcgcgacgaagaagaagacgagagatagagagagaagtagagaaatcgaaggaatctgtaaccgattttaagatctcaatttttagggttgttgatttttcaatttctgggttaattttttttagggttttcatttggaatcatgtcggatgcgtattgtacggattgtaaaaaggagacggagttggttgtcgatcactcagccggagataccctttgctccgagtgtggtttggttttggaatctcactccattgatgagacctctgagtggcgtaccttcgctaatgaatcttccaacagcgatcccaatcgtgtcggtggtccaaccaacccgcttctcgctgatagtgctttaaccactgttaccgctaagcccaatg

SEQ ID NO: 8922 - DNA, 421 bp, Arabidopsis thaliana
  Clone ID: LIB24-136-Q1-E1-B11
aacaagtgggctacgatctctcgtcttctcaatggacgaaccgataacgctatcaagaatcattggaactcgacgctgaagcgaaaatgcagcgtcgaagggcaaagttgtgattttggtggtaatggagggtatgatggtaatttaggagaagagcaaccgttgaaacgtacggcgagtggtggtggtggtgtctcgactggcttgtatatgagtcccggaagtccatcgggatctgacgtcagcgagcaatctagtggtggtgcacacgtgtttaaaccaacggttagatctgaggttacagcgtcatcgtctggtgaagatcctccaacttatcttagtttgtctcttccttggactgacgagacggttcgagtcaacgagccggttcaacttaaccagaatacggttatggacggtg

SEQ ID NO: 8923 - DNA, 405 bp, Arabidopsis thaliana
  Clone ID: LIB24-069-Q1-E1-F1
ctttcatgtgagagagagagttgaattttgcagatgagtatgagaagaagcaaagcggaagggaagaggagcttacgagaactgagtgaggaagaggaagaagaagaagaaactgaagatgaagatacttttgaagaagaagaggctttggagaagaagcagaaaggtaaagctacaagtagtagtggagtttgtcaggtcgagagttgtaccgcggatatgagcaaagccaaacagtaccacaaacgacacaaagtctgccagtttcatgccaaagctcctcatgttcggatctctggtcttcaccaacgtttctgccaacaatgcagcaggtttcacgcgctcagtgagtttgatgaagccaagcggagttgcaggagacgcttagctggacacaacgagaga

SEQ ID NO: 8924 - DNA, 427 bp, Arabidopsis thaliana
  unsure at all n locations
  Clone ID: LIB24-137-Q1-E1-D3
acagatactgtttctgctcatgggtttaggctttcttgtggtaagcgctggtggtatcagaccgtgtaatttagcgtttggtgctgatcaagttcaaccccaaatccgaatcaggaaagaaagggatcaacagtttcttcaactggtatttcttcactttcacgttcgcgcagatcatctcgctcacagcagttgtgtatatccagtcaaatgtgagttgggacaatcggtttgatcattccggtggctcttatgttcttggcgtgtgtgattttctttgctggcgatanattgtatgtaaaagtgaaagcctcgggtagtccattggntggtattgctcctgttataacagccgncatnaaganacgangtttgaagccggttaaacagccttgggtcaatccttacaacaagatnccggtctaag

SEQ ID NO: 8925 - DNA, 496 bp, Arabidopsis thaliana
  unsure at all n locations
  Clone ID: LIB24-137-Q1-E1-D8
gaactgttcagcctgccggtaanggtccanaattcccgggtcgacccacgcgtccgcccacgcgtccgcggacgcgtggggaacgtttagcaatgcaatctgttagatctcttttctcgaaagagatactagatgttatagcaaccagcacagctgatttgggtcctcttagccttgattcttttaagaaaaacaatttgtctgcatcatggcggggaaccggagtagacccctcctttagacattctgagaatccagcaactcctgatgtcaaatctaataacctgaatgaaaaacgtgacagcatttcaaaagatagtatccatcagaaagttgagacacctacaaagattcacagaaggcaactaagagagaaaaggcgtgagatgcgggcaaatgagttaattcagcacaatgatgacacgattttgaaactcganaaatgctgccattgaacgctcgaagtctgttgattctgcaagtccttggnaaatac

SEQ ID NO: 8926 - DNA, 412 bp, Arabidopsis thaliana
  unsure at all n locations
  Clone ID: LIB24-137-Q1-E1-E12
gcaccatcgcaaaaaccctaatttttctcttcgattttctcttctcacaaaccctaattgtttcttcctcccaccactcgctttctccttccatcgttggtttttttaataangtttctctcttttttcttgtttggggaagaagccattggtttctttaaacgattgaatctataaaannnnnnnnnnnnnnnnnnnnnnnnnnnnnnnnnnnnnnnnnnnnnnnnnnnnnnnnnnnnnnnnnnnnncntctgagggagattttttntctgttgatgcgttgatacgaantttgccgttgttttgttgaattctaggaatagtgattangtggttagggtttctggtttaantgnccatcagggcnangttcccttanngggngggagttacaggagtgatgatgatctcn

SEQ ID NO: 8927 - DNA, 490 bp, Arabidopsis thaliana
  unsure at all n locations
  Clone ID: LIB24-137-Q1-E1-E2
acgcctgtccgtacgcgtccgaaaattccagggttcttcttcttcatttcngtcttttccgctaggtttccgtctctgttttttcttgcattttccccagaattccttcacattctctccttttcctctttttaattcctcaccacctcaaattcttcataaacaaatccacttctgcatggttgggagaatctgttagagaatttttgttgttgttgggttcagatttggaaaatttcctttttttcgagtttcttctgaattattcatccgtggagattctcggatcgggaagggctgcgagaggtggttttcacggcggggatagattcatcttctgtcttctcctgagggggtagccgangctccggcctcggcggtttttaaacccctacctttacaaattctggggaaattagaaaaaaaaaggtttgatttttcagtttttgctctgttccttctcctcgaaagtttttgttttggtccnaga

SEQ ID NO: 8928 - DNA, 426 bp, Arabidopsis thaliana
  unsure at all n locations
  Clone ID: LIB24-137-Q1-E1-F10
ttcttctcatttttttttttgctcttgacgaatgaaaccaaaaaaaaaaaaaatgagagagatccttcatatccaaggcggtcaatgtggaaaccagatcggagcaaagttctgggaagtgatctgcnacgaacacggnattgatcacaccggtcaatacgtcggcgattctccgttacagcttgaacgtatcgatgtctatttcaacgaanctagcggtggaaagtacgttcctcgcgctgttcttanggatctggaacctggtaccatggattctctcagatctggtccgttcggtcagattttccgtcctgataacttcgtcnttggtcaatcngggtgccggaaataactgggcgaaaggtcattacaccgaaaggtgctnagttganttgantcngntcnccaaggttgngagagaaaggg

SEQ ID NO: 8929 - DNA, 508 bp, Arabidopsis thaliana
  unsure at all n locations
  Clone ID: LIB24-137-Q1-E1-F2
acgccttcccgtacgcgtccgaaattccaagggtcnacccacgccgtccgggacactgaagattcatttatagnatggatgcttgaactgggatgagtatttcgaaagttgataantcaacaagttaaacatgatgggattttatgtaaatagaggcaagttggagcggatggaaccttcaacaacatctaaccagcaacccaaaaaaacggcgacgaaaagattcagcaaaaccctgtcgtgatgcagttgacgtatccgataaacacaccaagttgtctataacagctaggaaaaaggatcaatcaactgctcctgggtcctggaaaacacaggagtcacctttgccttctggagcgcaagatgcaaatacttcagtacctctgggatgatgtgaagcattctgatagagcaaatcatcaatctangaatgatacaagtcacaagtcaaagggaaactggattctccnagtgccccttcatccagaaattcagcaaccaanaagct

SEQ ID NO: 8930 - DNA, 481 bp, Arabidopsis thaliana
  unsure at all n locations
  Clone ID: LIB24-137-Q1-E1-F3
tccgaaaattcccaaggtcnacccacgcgtccgancaaangtcgtggnaacctatgaagccacgtctgcanaagtcaangctttggtgagagaccctaaggtggctggtttgaatgaaaaactcagcggctgtgcagaagtacctcgaggagctagtcaaaattgaattccccggatcaaaagcggtgagtgaggcttcgtctagcttcggagctggctatgtcgcangaccggtcacgttcatattcgagaaggtatctgttttcctcccggaggaggtgaagactaaagaaataccggtggaagaagtgaaagctgaagaacctgccanaactganagaaccagccaaaaccgaaggaacaantggtganaaagagganantgtttgaaggagacaaagaaaaagcgaagaccccttgaaaccgcggtcgtgngagcaagaaggaaancaacnagntagaaggacaagaaaggaagang

SEQ ID NO: 8931 - DNA, 451 bp, Arabidopsis thaliana
  unsure at all n locations
  Clone ID: LIB24-137-Q1-E1-F8
acgcgtccgttgtcattctgttttactttcaatgaaaacttacttttggttatacttatgtatgattcatttattcatttaattcaaaaacgtcacaatcccttttttttannnnnnnnnnnnnnnnnnnnnnnnnnnnnnnnnnnnnnnnnnnnnnnnnnnnnnnnnnnnnnnnnnnnnnnnnnnnnaagagagaacccaatgaaaacaactccggaatcttatacactccctcaccttcaccgtcaccgccaactttaaaagtcaacaaagactctcacgttattaaaaaaccaccgtctccgtcttctttctcctccgcggctaagcctcgtcacccggtgatcatttacacacacactcnaagaatcatacacactaatcctaaagatttcatggctcctgttcaaaaactcaacgggaatgacccactccgacgaaggattccggn

SEQ ID NO: 8932 - DNA, 388 bp, Arabidopsis thaliana
  unsure at all n locations
  Clone ID: LIB24-137-Q1-E1-F9
gggttgagaactaccctgtggagaaacttgcttgctacttgtcagacgatggaggagctttgctaacatttgaagccttggctcaaacagctagctttgcaagtacatgggtgccattttgcaggaaacacaatatagagccaaggaaccctgaggcctactttggacagaagcgtaactttctcaagaacaaagtcaggctggattttgtgagggaaaggaggagagtgaagagagaatatgatgagtttaaggtcagaatcaactcattgcctgaagcgataaggagaaggtctgatgcttataacgtgcacgaagagctaacggctaagaagaaacagatggaaatgatgatgggaaacaatccacaagaaactgttanagttcc

SEQ ID NO: 8933 - DNA, 409 bp, Arabidopsis thaliana
  unsure at all n locations
  Clone ID: LIB24-137-Q1-E1-G10
gggcggacgcgtggggccggatttttcaattttcaaattctcgattcgattgaagatggaaggaggtggaggaagtagcggcggaggagctggaggagtggttccggaatcagcgattgaagcggtgaatcaaacacttgcgtacctcaaggaactgaagccacagcttgagcanatgctgactttagctgagccaaaggttctcgctgcaatgcaaccattacagcgagctaagactatgcacttgctanctgaagccaccactactctttaccaactgaggttgaaatgtactggtgttgatcctgatgatcatcgtgtaaaatctgaaatgagcggataaacgtgtacaagagagaannttcaaaanntgtggttgnttcaaagttaaagggaccttttngccccg

SEQ ID NO: 8934 - DNA, 482 bp, Arabidopsis thaliana
  unsure at all n locations
  Clone ID: LIB24-137-Q1-E1-G2
aaatccaaggtccacccacgccgtccgcacacgcgtcngctccctcgcatctccaaatcgaanatcgccctctgcctctcttcgtctccgttctccatctttgtctccggtaagtaactgaaagatggggcgtgttagnaancaagaccgtgaagaaatcttctcgtcaagtcattgagaagtactactctcgcatgactcttgactttcacactaacangaagatccttgaagaggttgccatcatcccatcaaagagactccgcaacaagattgctggattctccacccacttgatgaaacgtatncaagaagggaccattccgtggaatctcactcaagcttcaagaagaagangcgtgaacnccgtatggacttttgttcccngatgaagtctgcnatcaagactgatgangatnnaagtcgacaaaaagaactcttgagatgctgnntctctaagaaatgtcttganactctcggga

SEQ ID NO: 8935 - DNA, 495 bp, Arabidopsis thaliana
  unsure at all n locations
  Clone ID: LIB24-137-Q1-E1-G3
gcctgccgtaccngtccaaaattcccgggnccacccacgcgtccgaattttagcttcattccttcttttgctctgatcaaagtcttctccttcccttctctctctctttcctcctctgcacatttctgggttcttctcttcttatgctctgtttcttttaagacacagaagaaacagtacagagttgagattttcttaaacaaaagtgaaaagagaagaaacaagtgacagctcaaacggacaaaaaccactcttgggtctttcttgcttctgattctttctcttctctaatagaagaanacatcnagaagctaaaaaaatgtcggaaggagtagaagcgatagtagcaaatgacaacggaacagatcaggtaaacggaaaccgtaccgggaaagataacgaagaanacgacnggtncaccggttctaacctaagcannttcctatgggcacggtgggtctgtcctgggaagccttggttcaagctgcgcatcta

SEQ ID NO: 8936 - DNA, 452 bp, Arabidopsis thaliana
  unsure at all n locations
  Clone ID: LIB24-137-Q1-E1-G6
acgcgtccgcaaaaagcaccagtttcaagtgatcctgcaatatctaaagatgtagtgttatcaagctctagctttctccgcgcaactgggtcatcaagacgtgctgctgtatccagtagtcgcgaagctgcagttctgggaactgattctgagccatcaaaccctcaaatcgttgaagctggatcaggctccaattcaaagatccctgttagtcgaaactcacctatcgtctcatctgagatcaacaagctatcatcaccttcaagggcgactacttcagtcatgaagaactatgaggctaatcttaaagggatcgagagtctgcatttttagtcgttggggccagtgaatgatctgaaaccccgggacaagtgtaanttaaaagacaaagatgacctctcctagggccctccctcangttttaacgtgcatttgtgtttaacagggaaggg

SEQ ID NO: 8937 - DNA, 452 bp, Arabidopsis thaliana
  unsure at all n locations
  Clone ID: LIB24-137-Q1-E1-G7
acgcgtccgcttgaaaccacccaaggggaaaaggttagagctttgctgaatgaaaagactgcaacatcacagattcagaacctattaagtgaaaagacagaacttgcgacagagttggaaaactgtaagaaggaagaagagaaaatcaagaaagctatggagagtttaactttggatttgcaagaagtatctgttgaagcaaaggaagcaaaggagaagctcttaacatgtcaagcggagctcgaactttgtggagtccagattgaaagtttgaagttggctgagaaagatacaaatgaaaagcatgggaaaatgcttgaagatgcaagaaacgagattgatggcctgaaaagtagtttggaaaacactgagaatgagttttttaattctaagactgagtggggaacaacgangaacttcatttgatgctatgtgtgaanaaattggaaatg

SEQ ID NO: 8938 - DNA, 401 bp, Arabidopsis thaliana
  unsure at all n locations
  Clone ID: LIB24-137-Q1-E1-D12
gtgaagaggttccctcgtcagaaactcccaaggtagtagaagaagaagtgatagctaccaaagctgaagatgattcgccggaaaaagaagagcaaacggaaacacttgctgcagcagctgaagctgaagaggtggttcctccaattccagaaaccaaaagtgaagaggaaattgttgagaactctattcctccaaactcagccactgatgaagtttcatctccagaagctttagcaagtgaagaggttgagaaggagcaagtggttgccgaaacacctgttgatgaagtcaagactcctgcacctgtagtcacagaagcttcttctgaggaaagtggcaacaccgctactgctgaaagcatcaaaggcatttcaccaagctctagtgaagcagctganaga

SEQ ID NO: 8939 - DNA, 436 bp, Arabidopsis thaliana
  Clone ID: LIB24-136-Q1-E1-G8
acgcgtccggttcaatgcagaggaaaaacagaagagcatagacatagagactatatgtcaactcctagagatcgtcatgggatctacatttcgagcccaagttgactactttgttgagtatttaaagatccaaaacgactacaaagtgataaacatggaccaatggatgggactttaccggttctgtaacgagataagtttcccggacatgggggactataatccagagcttgcatggccattgattcttgacaattttgttgagtggattcaagaaaaacaagcctgaaatcatttctgagtcccctcaagtcgaagcttcaaatctctgcaggatgatcagtgggctctctcatcaaacaagattcaagcacatttttacttcaagttttcatctttcaaacattaaaaaaagacacattatatgattcctggt

SEQ ID NO: 8940 - DNA, 382 bp, Arabidopsis thaliana
  unsure at all n locations
  Clone ID: LIB24-136-Q1-E1-H1
tctctctttcctccatctctctgtgttcttcttacagacaccgagaatggcggatcctgatctgtcttctcctttgatccaccatcaatcctccgatcaacctgaagttgttatctctatcgccgacgacgacgacgacgagtcaggactcaatcttcttccagccgttgttgaccctcgtgtttcacgaggttttgagtttgaccatcttaatccttatggctttctcagcgagtcagagcctccggttctcggtccgacgacggtggatccattccggaacaatacacctggagttagcggattgtacgaagcgattaagctcgtgatttgtcttccgattgctctgattaagacttgttctctttgctgcgtagcttan

SEQ ID NO: 8941 - DNA, 417 bp, Arabidopsis thaliana
  Clone ID: LIB24-136-Q1-E1-H11
acgcgtggggagaaaatggcgatgttagttgagccaccaaatgggattaagcaacaagggaaacattactactccatgtggcaaacattgttcgaaatcgatacaaagtatgttccgattaaacccattggaagaggagcttatggtgtggtttgttcttctatcaatcgtgagactaatgagagagttgctattaaaaagattcacaatgtgtttgagaatcgtgttgatgctttgagaacgttgagggaacttaaacttcttaggcatgtgaggcatgagaatgtgatcgcgcttaaagatgttatgttgcctgctaatagatccagtttcaaggatgtttatttggtttatgagctaatggatactgatcttcatcagattattaaatcctctcagtctctttctgatgatcac

SEQ ID NO: 8942 - DNA, 444 bp, Arabidopsis thaliana
  unsure at all n locations
  Clone ID: LIB24-136-Q1-E1-H4
ccgtgcaanaatccagggtcganncacgcgtccggtannttgaaatgtcaagaatgtagaagagcgtttcaagctgtgacgataccaaaacctccggtggataagaaagacgacgaagacgtttacttttgctcatgggctttgtttccattggggttttccggtgaatttcaagctccaagttggtcacctatttcacctctctttgcctgtcctctgcaaaagttggatggtgaaccaaagaaganaaaggaaccgggtcctcctaggatttactatgacgatgatgacatttatgttgcgatttcggatggagatgacgctggtgatgatggtgattggcaagatgtggtacaagtgaataagaagacgaatgttgggaaanggaaaganacatatgttngaagtnncaagaancctgggagtttgnagaagtccaaaatt

SEQ ID NO: 8943 - DNA, 416 bp, Arabidopsis thaliana
  unsure at all n locations
  Clone ID: LIB24-136-Q1-E1-H5
gaaaatagtgttgaagagaanaattctcttaacaatttgaatgagcctgctaattcactgaaggttataaatgtgtcagttggtaatccacctgttgaaaaagctgttcttattgatcaaactatgggacatcacttggaagaatcggccacttcaattgagtcattgaagttaacttccgagagggagactctcaccacaccgaaaaagactcgcaagcctaaaacgaanaactctgaaggtggaattcaagtttttcaagctggccctgggcttacgaagaaagaangtacagagaaggggagagntnaactacgacngtagctggcgagattatctctgaggagctcctatcacagaagnagagtttaaanancaacgatnnagagtctcnantgcccccnaagttgcaatgg

SEQ ID NO: 8944 - DNA, 397 bp, Arabidopsis thaliana
  unsure at all n locations
  Clone ID: LIB24-136-Q1-E1-H7
ctgtttgcaaatggaaataaggattttaagccgctancttggattctacggattanggttgcacttgatgcagctaaaggtcttgcatttcttcanagtgatcccgtcaaagtcatttacagagacatcaaggcgtcaaacatcttactggactcggacttcaacgcaaanctttcagactttggtttagcgagagacggtccaatgggagaacaaagttatgttagtacaagggtcatgggtacttttgggtacgcagctcctgagtatgtctcaacaggccacttaaatgctacaagcgacgtatacagtttcggggttgttctgctagaactacnatgtggaaggcaggcactaaaccataaccgcccnggccaagggagcaaaancctgggga

SEQ ID NO: 8945 - DNA, 419 bp, Arabidopsis thaliana
  unsure at all n locations
  Clone ID: LIB24-136-Q1-E1-H9
atttgatcaaccatgtcgaatgtcttgctatccccaaacggctacgtatttgcatcgcctaaacctcttggcagattcatcaattcaaagtccggcggacggaaacttttcttctccgtcgttagagcttcttccgatgatgctgattgtaatgccgaagaatgtgctcccgagaaggaggtaggaacagtgagtatggaatggttagctggagagaagacgaaagtggtgggaacatttcctcctcggaagccgcgtggttggactgtctatgttgagaaagatactgctggtcagactaatgtttactccattgagcctgcaagtatatgttgcagagagcgcgattagctcaagtactgcatgatcatcggctganggggctgatgaacncagcagnaatcgtagcaggcattgct

SEQ ID NO: 8946 - DNA, 411 bp, Arabidopsis thaliana
  unsure at all n locations
  Clone ID: LIB24-137-Q1-E1-A7
agtgaggaagatcgacaatggtttgtggaagctatgcaagcacatacaatcgattcaatctctcgtatgaaagtaatatctcaaatcatgaagatgcctgaacaagtcttggaggctcaaggagttacacctgatgatcttgaaggaatgttggctgagctgcaggaacacgtcgagtcgatagatttggccaatggtttgatcttacataactaagtctttgtttttcgaggttcttttttttaatatattatttggatcnttaaatgttttagatcttcactccattggaggtttggttcctctccttagctatctcaagaactctaatgcgaaaattcgagcaaagtctgccgatgttttgactacggttgtccaagacaanccaagnaaccagcaactttgttatng

SEQ ID NO: 8947 - DNA, 452 bp, Arabidopsis thaliana
  unsure at all n locations
  Clone ID: LIB24-137-Q1-E1-A8
acgcgtccgggatgacaatgattcacagggtagtagttcattgccttgttcacctactatccagggttctatagacgatgcccatggtcgtgcttttgaccgtcagctgtcaaaactgagttcctttaacttcagatcctgcaataacaataggagatcttcgcagatgtctgttccgccagaagaattgaggtgtccgatatctttgcagcttatgtatgaccctgtcattatcgcgtctgggcaaacatatgagagaatctgtattgagaaatggtttagtgatggacacaacacatgtcccaaaactcaccagcagctctctcatctttgcttgactcctaactactgtgtcaagggctctaatttctagctggngtgaacaagaacggcgttcanggtccctgatggaccccctgagtctccaagaccttaactattgggnggttggc

SEQ ID NO: 8948 - DNA, 458 bp, Arabidopsis thaliana
  unsure at all n locations
  Clone ID: LIB24-137-Q1-E1-B2
acgcgtccgttcaactttgtcttctcagaatcaaacctctgaagacttttcaccaaaatgacattactttcctctctcggaagagcctctcgatctgctccacttgcctctaagctcctcctcctcggcactctcagcggtggnnnnnnnnnnnnnnnnnnnnnnnnnnnnnnnnnnnnnnnnnnnnnnnnnnnnnnnnnnnnnnnnnnnagtagttgtgcttgggactggttgggctggtataagtttccttaaagatctcgacataacttcctacgaatgttcaggttgtgtctccccagaactactttgcctttacgccattgttacctagcgtcacttgtggaactgttgaagctagaagcattgtggagtctgtccgtaatataaccaagaagaaaaatgggggaaattgaattgtggggaagcagattgttttaaanattgatcatgttaaa

SEQ ID NO: 8949 - DNA, 432 bp, Arabidopsis thaliana
  unsure at all n locations
  Clone ID: LIB24-137-Q1-E1-B6
aaagggaggtgaattcaaaacactaacagacgcaataaagagcgttcccgcagggaacacaaagcgggtgatcataaagatggctcatggtgagtacagagagaaggtcactatcgacaggaacaaacccttcattacattgatgggacaacccaatgccatgcctgttatcacctacgacggtaccgccgccaagtatggaaccgttgatagtgcctctctcattatcttatccgactatttcatggccgttaacatcgtcgttaagaacactgcaccggcaccanatggtaanactaagggagcacaacccttatccatgagantctccggaaactttgctgcnttctacaaactgcanattctncggtttccnagntacantcttgtgatgatncccgggaaaccaanttcntcaaggatttgttacgt

SEQ ID NO: 8950 - DNA, 397 bp, Arabidopsis thaliana
  unsure at all n locations
  Clone ID: LIB24-137-Q1-E1-B7
aaggagaagaaggaatcaagagagtagaaaggaaatgaatctatacgcgcacgatctttctcttctcgatttcaattacaacgtctccggtcccttcggcgagccactatctcaccgcttcctctctcctggccctttcttccaaggcgaagaagacgattaccgccgtaatacgagctacagtcacgacggagctaatggacgagaaccggacacagattcaagagcatctccgccgcatcgccacgacgggaggtctccgttacctctgggaatgggattggagttctcctcctcgtcatttggaaggaanggacacgggtttggccacatgatcatngaactggttgggagttactgtgtcactgtcccttcctgggttgaccttcccangtca

SEQ ID NO: 8951 - DNA, 427 bp, Arabidopsis thaliana
  unsure at all n locations
  Clone ID: LIB24-137-Q1-E1-C1
acgcgtccgctttttcatgttcgtangttgttcctctggttatcctcatcaacgggacccttgaaaccgtgtagccatcttgcttaatgattagagtcttaaagctgtgctctttcttcatcgatttgagcaagtgatcttggaaggctcttgagttctgaattccttgtaagcaatcatggcagggaaaagagaaaactttgtgagggtggatgatttggactctaggttaccatcatcatctgtagccttccaacagaactacgcctccaatttcangtggacaacttcatcctattcatgcaagcaatgaaacttctagatccttcaagaaaggtatccaagaanggttccaaanggcttaagtcnatcggacgttcacttggtttcnggtgtttaacgagcaagtgttcccaagaagncctta

SEQ ID NO: 8952 - DNA, 488 bp, Arabidopsis thaliana
  unsure at all n locations
  Clone ID: LIB24-137-Q1-E1-C4
cngtacgcgtccgaaaattccanggtcnacccacgcgtccganttaagaatgttgttttantgatattattaatctcttgtaatgtnatgtttctgttcttgatttttcctgaagcttgagcatgagtcgcatgatcttgataaacgtgagagggctcttctgaaaaaagaaacgcanaaggtgcaagaagatctaaactctgctaagtcaaagatggangagactggtggctgaatttgaaagtcaactaagaaatcactcaagctgatcaatacaattccttaatcctgaaaaccgaacgaggcagttgcaganattattgaagcttgctgtcctatggatcctgattccttagaacaagaatacagtgactactcaccacaagctggtgaaaaaagttcttgtaactgggctggggagataangttaggtaccgtgggntgaagaaacctgcgagaatgatgaaggatacagttcnaatccaagc

SEQ ID NO: 8953 - DNA, 407 bp, Arabidopsis thaliana
  unsure at all n locations
  Clone ID: LIB24-137-Q1-E1-D10
agtttcgtgtgtaaagcgattggtgattcctcgactccagatgaagatattcagaacactcaaagtgatgataatgttgttgttgttactgctacgactcagagtgacattccccatgattccgagtattcaatttcgaggtttcgaagtatggttaccacactccctcctgttgtcttcctgatgaagaagtgctcagtgaacagcatttggattggggtctgcatcacggctactgttttggtcgctgcgattagggcttatgtagtcaggaaagtcnagagataatcagcgtgctggctctgttgctgatcttgtgagacgtggccagctgaggtctggtgatannaagagctccaaatctcttaacctacgnaaggaccattcaacaagccttttgtgnaaac

SEQ ID NO: 8954 - DNA, 415 bp, Arabidopsis thaliana
  unsure at all n locations
  Clone ID: LIB24-136-Q1-E1-G7
ctcttggattctgaatttgggatcttggggtttcgggttttgaaccatctctttagactttagttacacttttttcattcttttttaagacaaaagagatacgatgaagtctggtctcatcataaccattgctctgttactatacacaagcagctttgttcttgtttctgtagcgaaagagtgtaccaacactcctacgcagctctcatcccatactttccgcagcgagcttctgcaatcaaagaacgaaactttgaagacagagttgttctctcattaccatttaactccagctgatgactctgcttggtctaagtttattgccaangaagatgttgaaagaagaagcagatgaatttgcctggaccangttgtatangaagttnaaagggncnaaatcccccgggaaatttcc

SEQ ID NO: 8955 - DNA, 425 bp, Arabidopsis thaliana
  unsure at all n locations
  Clone ID: LIB24-136-Q1-E1-E2
aactggtcactactgtcccttcctcttttgtcggtaaatggagttacccgtcgtagatctgtctagttacctcgacttctccggtgatgaattaggatccgatctactcgaatcatgccgacaagtgagtcggatcctaaaagaaaccggagctctcattgttaaagatcctcgatgttgcgctcaagacaacgatcgattcattgatatgatggaaaattatttcgaaaaacctgatgatttcaaacgattgcaacaaagacctaatcttcactatcaggttggtgcgacgccggagggagttgaagtgccgaggagtttggttgatgaagagatgcaagaaaagttcaatacaatgcctaatgaatacaaaccacatnttcccaaaggngcccatntcnantgtgggaaatatatgngggaga

SEQ ID NO: 8956 - DNA, 413 bp, Arabidopsis thaliana
  unsure at all n locations
  Clone ID: LIB24-136-Q1-E1-E5
acgcgtccgtgaactttgcacttagctcccaaagtccaacacccgattaaaaactcccataaagagctaaacacgaaacctaatttctccctacacacatctcaaatctctccaattttgttcaaagctcgaattctgttcaaagctcggatttttaattgcttcaatgggtgagaaagattcagaaacagctccgatttgggggaaaactcgagagagagagaggagcaacaacaacaatatacagccaatggatttagagtcgtcctcttctgtatctgggcaacaacgatcgttgactcagagtcgaagttcttatgaagaacgaggtagaggagttaaagagtttcggagttggtttccttggctcattccttgtttcgttgttgctaacgttgccgtcttcgngatta

SEQ ID NO: 8957 - DNA, 413 bp, Arabidopsis thaliana
  Clone ID: LIB24-136-Q1-E1-E9
gggctgttatgcagttggctcagactacaatgcgtagtgagctcggtaaaattactcttgacaagacttttgaggaacgggacactctcaatgagaagattgtggaagccatcaatgttgctgcaaaagattggggtcttcagtgccttcgttatgagatcagggatatcatgcctcctaatggagtgagagttgctatggaaatgcaagctgaagctgaacgtaaaaagagagcccagattcttgagtctgaaggagaacgtcaagcccatatcaatagagctgatggtaagaaaagttctgtaatcttggaatcaagaagctgcaatgatggaccaagtcaatcgtgcacaaggtgaggctgaagcaatattagctagagcacaagcaacagccaagggactggccatggt

SEQ ID NO: 8958 - DNA, 410 bp, Arabidopsis thaliana
  unsure at all n locations
  Clone ID: LIB24-136-Q1-E1-F1
cgtttgaaacttgttatagatctgtgcgttttcgaatgtttttgttttacgagataaaggctccatttttatcgagtcaacagcaggcgccacttttaatggtgacctgactgccgcttggagcctagatcaaatgccagaggaagacccatgaaacttatttctctatagtttcatgattcaatactcttggcgacataatattatttggattctttggttttgatttgtttttcttgtggtgataaggatgcgataatgatggttttagaagtagttgttgggttcttgagatggcattaagtcagacacgggtgcttgttgggtttataacgaaacagcagagcaaccttttgcatggtgcctacattanttattagcttcctaacacgaatggaggcagtcntgat

SEQ ID NO: 8959 - DNA, 408 bp, Arabidopsis thaliana
  Clone ID: LIB24-136-Q1-E1-F10
tttcaatttctccttgtattttggatctttcttacttccgtacacacaaacccaaacaaacaacaaaaaactgttgtctctctctctctttggtggaattcaaaaaatcgaattcgtggttgcgtttggtttttcttccttcttcgggtcacgagaacaatgggacaacaaaatttgatctacagcttcgtcgctcgtggtacggtgattctcgtcgagtatacagaattcaaaggaaatttcactgccgtcgctgcacagtgtctccaaaagcttccttcttcgaataacaagtttacatacaattgcgacggacacacgttcaattacctcgtcgagaatggcttcacgtattgtgttgttgctgttgaatctgttgggaggcaagattcctatgggctttcttgg

SEQ ID NO: 8960 - DNA, 406 bp, Arabidopsis thaliana
  unsure at all n locations
  Clone ID: LIB24-136-Q1-E1-F11
tatcgtatctatagtcggcgganagttaccaaatcacatctccaggcgcacaacagtaccactagctatggccggacggaactctcctcctcgaanaagctatggattaggcaacgaagcttcagcgaaatggaggttgagcaagcacaattagaagatgatgaagaacaagtggagatcgatatcgtcgacgaagccagtcttctctccctgagcatgaaaccggacagaaacatggcgttgctcgacgattatgagatggaggagcttggacacacgcctaatactcatcatcggagcggatatgtggcggtggtggggatgcccaacgtcgggaaaagcacgctttcgaatcaaatgattgngtcagaanatatcgattgttacagataaacctcanacgacg

SEQ ID NO: 8961 - DNA, 398 bp, Arabidopsis thaliana
  unsure at all n locations
  Clone ID: LIB24-136-Q1-E1-F3
acgcgtgggcaaaattatccgatctgattctanggctganacattcaanatccganaactggagatcnccganaaganaaaangattcatcgagcttctaggtcaactaaccgtcaccggatcagtaacagacgaanaattcgatcggcgattcgaagaantcagatcntatggtgacgaccacgtgatctgcgtgatcgangaagaaacttcgggaaaaatcgctgctacgggtantgtgatgatacagaagangtttctgaggaattgcggtaaagctgggcacattgangacgttgttgtggattcaaggtttcncgggaaacanctggggaacaangttgttgagtttcccatggatcattgcaaatcaatgggttgccataangggagtccaa

SEQ ID NO: 8962 - DNA, 423 bp, Arabidopsis thaliana
  unsure at all n locations
  Clone ID: LIB24-136-Q1-E1-F4
tgnctcagaatcaagggtcnacccacncgtccggtaagagacagagctcaagcaacagtctcactcgagataaaataaagtcgtgattttgattggacccatgattctcattcgtataaattatcatctttcggcttaatcggaaaatggacgttctcgccttatcctcttccgcttccgccgccgcancctccgcttctctcgccggaaaattcctgtcgtttccttctagggttagagtgagaanaaaccgagagaatttgttagctaaacagaataagtttttagtttctgcttcgaaaagagaagagcctaagctcaacgaatgggatcaaatggagctcaactttggccgtttactcggcnaagacncgaaattgactttggctaanatagtagctagaaatgtggattcagaancct

SEQ ID NO: 8963 - DNA, 395 bp, Arabidopsis thaliana
  unsure at all n locations
  Clone ID: LIB24-136-Q1-E1-F5
aaagatgcttatccaccacaaggatattctcctcagggatatcctcagcaaggctatccacctcagggatatcctcaacaaggttatcctcagcaaggatatcctccaccgtacgcgcctcaatatcctccaccaccgcagcatcagcaacaacagagcagtcctggctttctagaaggatgtcttgctgctctgtgttgttgctgtctcttggatgcttgcttctgattggagtctctctctctctgcataaagcttcgggatttatttgtaagagggttttggttaaacaaaaaccttaattgatttgtggggcattaaaaatgaatctctcgatgattctctttcgttttatgtgtaatgttcttcggttcataacattttaaaccantgtc

SEQ ID NO: 8964 - DNA, 421 bp, Arabidopsis thaliana
  unsure at all n locations
  Clone ID: LIB24-136-Q1-E1-F9
cgagtctcgttcaagctggtgactccatcatcgaagttgaggaggtgtcaaagaactctaggacagagctgaaatccatagcagattgcatgatcgctgcgggttgtgcgaaagagtgtgcgactacttataaatccattcgaaaatcgatagttgatgaatcgatttaccgtctcggagtaganaatataagctcatccaaggcgaaaaagatgccatgtgaggttgttgagttgaagatgaatangtggatagaggcggttaaggtctcnatgaagactctcttcaatggcgaaaagactctatgcgangaaatcttcgaatcctctgtttctcttagagagttttgtttccggagacatctccaagggaaggagctcttcttctgtttggattcccggaaactatcaccttaangaga

SEQ ID NO: 8965 - DNA, 404 bp, Arabidopsis thaliana
  unsure at all n locations
  Clone ID: LIB24-136-Q1-E1-G1
atgtgcaattggaataggtggcccccttccattaatttgtcttctattcttcccgctacaactcattccccatcagcagttctatatgttggtgtagtggattcaaatatagtactcgtaaaccagggtctaactttgtcagtcaaaatttggttgacaactcaactacattctggcggaaattttacattttctagcgctcaggatccattctttggagttggttcggatgttctttctccccgtaacattggaagtcccctagcagacaacgttgaacttggatcacagtgctttgctgcaatgcaaatgccactggaaaactttctggtttcatgtgggaactgggagaacagttttcatgtcatatccttgactgaagggtcgggtaatccaaagcntcg

SEQ ID NO: 8966 - DNA, 416 bp, Arabidopsis thaliana
  Clone ID: LIB24-136-Q1-E1-G10
aaagaaagaaaagtctccaaagctcaaaaagcaatgactcgaccgtcaagattacttgagacggcggcgccaccaccacaaccgtcggaggagatgatcgcagcggaatccgacatggtggtgatcttgtcggctcttctttgcgctcttatctgcgttgctggtctcgccgccgtcgtacgatgcgcttggctccggcggtttacagccggaggagattcgccgtcaccgaacaaaggcttgaaaaagaaagctcttcagtctcttccaagatccactttcaccgccgcggaatcaacctccggcgccgccgctgaagagggagactcgacggaatgtgctatttgcctcactgacttcgccgacggtgaagaaataagagtgcttcctctttgtggtcattctttccacgtgga

SEQ ID NO: 8967 - DNA, 484 bp, Arabidopsis thaliana
  unsure at all n locations
  Clone ID: LIB24-136-Q1-E1-G3
ctgtttacgccgnccgtagccgtccangaattccaagggtcgacccacgcgtccgatctctccaatatcgccgattatatataaatgactcttcgattctgtttcttcttcgtcgtcatcgccggcttagggttttctctataagcaaatcttatcttctccttttcctccgttttttctggtcagcttttgcttttagattacccttgttgcctgcgatcgatctgaaaaaagaggaactttatcttgctgacggctgttataaaaagacgtggcatttcttctctgattgtgtttatttttatgacggagaanatgaacacacttgtaatctatcagactctaactgttactgttggtgttttctaatgctgtcggcaagacactatctttaggactgctaagggaagtttaagaggttacacaagttgacctttttctancaaagntaaagggnttantaatgggtaaaanaaaaaaaaat

SEQ ID NO: 8968 - DNA, 433 bp, Arabidopsis thaliana
  unsure at all n locations
  Clone ID: LIB24-136-Q1-E1-G4
tccgngggcaggtccttctggtgaaggaggagaagaagacgacgggtttanagaccntgtgaggcatactatgtttgaaaagggacagagcaagcgtatttggggggaactttacaaagtcatagactcctctgatgtaattgtccangttattgatgctagggatccacaaggtactaggtgtcatcatttagagaaaactttgaaagagcatcacaagcataaacacatgattctattattgaacaagtgtgatctggttccggcttgggccactaaaggatggttgagagtattatcaaaggaatatccaactctagcattccatgcaagtgttaacaagtctttcggaaaggggtcacttctctcanttttgaggcantttgctcgtccaaagaatnacnaaccagccataaccgttggaattttttgg

SEQ ID NO: 8969 - DNA, 417 bp, Arabidopsis thaliana
  unsure at all n locations
  Clone ID: LIB24-136-Q1-E1-G5
tttgccgagtggaaaatttccggtgaagccgtcccgagtgactcgggctcttgcccggtatctttcagcttcaatagtggagataaccggtttatgtcgagcaaatccagcttccataagtggtgttgactggtttttatcttttttccagtcaatcggattattatcgattgctttacttcttttccatgttttctttcaataatttctaaaaatctgagttggtaattagttttaagtgctagctatttaaaattaatgtctctggcttttggttttagaaacctcgatttgcaagaaatcgttcaaacgattacatctgggtttgaaagattgaaggataatccgatgcttattaggattcctcttaagccgtctatttctttgggagctccatccaaatcctaatccgggngg

SEQ ID NO: 8970 - DNA, 411 bp, Arabidopsis thaliana
  unsure at all n locations
  Clone ID: LIB24-136-Q1-E1-E10
cgttgccgacggtgtcgatgtcatctctctctccgttggaggcgtcgtggttccttattaccnatacgctatcgctattggagcttttggagctattgacanaggcatattcgtctctgcttccgccggtaacggaggtcccggtgctttaacggtgacaaatgttgctccgtggatgacaacagtcggagctggaacaatcgatagggattttccggccaatgtgaaactcggtaacgggaagatgatttctggtgttagtgtatacggtggaccgggtctggatccgggtcgaatgtacccgcttgtttacggtggtagtttactaggcggcgatggttactcatcgtctctgtgtcttgaangctcgttggatncgaatttagtgaagggaaagatcgttctttgtga

SEQ ID NO: 8971 - DNA, 406 bp, Arabidopsis thaliana
  unsure at all n locations
  Clone ID: LIB24-135-Q1-E1-A2
atcacggggactcctggtaccggcaaatcgacgacggcttctgctctagccgaagccacgaatctccggtatatttgcatcggagatctggtcaaagagaaagaattctaccatggntggggacaatgagctcngagtgtcacttcatcaacgaagactcggtgattgatgagcttgacgatgctatgatagaaggagggaacattgtggactaccatggctgtgacttctttcctcagcgatgggttgatcncgttgtcgtgcttcgaaccgagaactccgttttgtangaccgtttaacgaataggggttattcaggaancaagcttagtaacaaccttcaangcgaaatgtatcangtcctactcngaagaancacatgacagttatgatgaggaaaatnggt

SEQ ID NO: 8972 - DNA, 424 bp, Arabidopsis thaliana
  unsure at all n locations
  Clone ID: LIB24-135-Q1-E1-A4
tgttgaaattaggattctattcgggcgaagaggatatggagttctcgagcttttcaagtgggactgcaagtgctgttaagacttggcaagcatcgcttggggtccgtgaggatggggtaatgacagcagagcttcttcagaggttgttcatggatgaagacgtagagacagataaggatgaagcaagtacaatgaagaaagaggaagctggtaatggggcggtatttacttcagtgacacaagtccctgagaagaagcaatcaatcgtgaaagatcaaagtgacagagaagttgacgttactcaaaatcgggtttttcttcttggagaaaacagatgggaagatccctccangctcattggcangaacaaaccggtagacagaattgaatcaacaaacaccanaacgaggtgcatcacttgtcg

SEQ ID NO: 8973 - DNA, 419 bp, Arabidopsis thaliana
  Clone ID: LIB24-135-Q1-E1-A7
tatgatgacagtcacaggtaaggtcagtaaaagttggcaatctctcttcaggagcaactgagcatgatattaaagagtttttctctttctctggtgaagttgaaagcatcgatatccaaaggttagtgatattgtttccttgttctttgatttcaaaattttgacatttaaagctttttttgatcaattaacttccgaagctttttctcagcaaatttagatacagttctcttaaacttactgactctgagctttgtttttgttttctttttctaactagcagtaacgagcatagtgcttatgtcacatttaaagaaactcaaggagcagagactgctgtgctcttatctgtgggttcactcttatctcaatattaatggtagtaacaattcaactcttacataacactgttaatttag

SEQ ID NO: 8974 - DNA, 424 bp, Arabidopsis thaliana
  unsure at all n locations
  Clone ID: LIB24-135-Q1-E1-A8
aaactaaaaaaaaggcagaacccnagatccaagatcagacctaatctaatcgaaactcatagctgaaaaatgaagagagatcatcaccaattccaaggtcgattgtccaaccacgggacttcntcttcatcatcatcaatctctaaagataagatgatgatggtgaaaaaagaagaagacggtggaggtaacatggacgacgagcttctcgctgttttaggttacaaagttaggtcatcggagatggcggangttgctttgaaactcgaacaattagagacgatgatgangtaatgttcaagaagatggtttatctcatctcgcgacggatactgttcattataatccgtcggagctttattcttggcttganaatatgctctctgagcttaagtcctcctcctcctttcgggcgangttctaa

SEQ ID NO: 8975 - DNA, 370 bp, Arabidopsis thaliana
  unsure at all n locations
  Clone ID: LIB24-135-Q1-E1-B10
ctgtcactaggtggcttgttctccgatacaagccagatgctagattttacaactatcagatggctgcagagaaaatcacgctcaaaagctaaacccagttctacctcaagtttcacaccttgtgaacatcttgaagtaaaagcagatggaaaattaagggataatttggattctcagaccggaaaaaaggaagaaaagatcatccagtactcgagaaagaaaaagttgaatccaaagccttcagcagaacaagttcaggagctagctaccctagctaaatcaaaagattttgataagacatgtaaaaattttagcagtaggtcacatctggataagtgcaattcgttctgagatgaacagtgangattgg

SEQ ID NO: 8976 - DNA, 408 bp, Arabidopsis thaliana
  unsure at all n locations
  Clone ID: LIB24-135-Q1-E1-B11
cccgggtcgacccangcgtccgcttttttttcaaacctctctcctcgancctttantttctaatcaccgaccaaaattgatcggaaacctanagctcttcgtattgctccgccaccatgcatatccggngccagatcttcgntaaatctcctgactgtcaaaaagtcgtcgctctgcaattggntcctgcgcaatctctantaactctttcgggtatcacttccttactcgaatcgtcgcancgtatatcgttttcggcttgctcgattactctagatgggaagcttttgaatggctctacacggatccaagtatcgaagcntccttctgtatccatgcncactcttttcgctcgcntccgtggaggtggaggagatggtggggcaaggggagccgagtcncgcgaat

SEQ ID NO: 8977 - DNA, 449 bp, Arabidopsis thaliana
  unsure at all n locations
  Clone ID: LIB24-135-Q1-E1-B3
agtcnaagaattaacgggtcgacncacgcgtccgctaaanttcgaaatctcactctctctcattttcgactttanaaatggcgaccaacgcagatccagctccgacgaanaaaccaaggaacagtagaaaggcgttgaagcanaagaatgagctcgtggagacgccaccatcgcctgtctccgtcaaggggaantcngcnaagtctttcgagcaagatctgatggagatgcangacaatgttggagaanatgaanatcgagaaagataanacggaggagttacttaaggagaaagatgagattctgagaaagaaggaggangagctanagaccagagacgctgagcangagaagctcaangtgggagctgaagaagcttcagaaagattaaaggattcaaaacctancatgacttttgcttgcggtcagtcatctctcaaacanggctg

SEQ ID NO: 8978 - DNA, 420 bp, Arabidopsis thaliana
  Clone ID: LIB24-135-Q1-E1-B6
acgcgtccgatttaggaaacgagagaaatgagtttcttcgctgttgcttgctccgcgccaagatcttctatgcttctcaccggcttgaattcgagcttctctgatatgcatcgcagcccactatttgttttcccggtgactatatcatcccggagcgtgaaacgcttcgccgctgtttcgtctgattccgtactagaccctgaatccaaaaatcaaactcggtcccgtcgcaaaaataaggaagcagttacgccaattgctgaaaccgagaacaatgaaaagtttccgacaaaggtcccgcgtaaatcgaagcgtgggcggcggagtgaagcagacgctgtggaagattacgtgagaagctccctcgagcgtactttctccaccataaagggagcagaatccggaggttttggagaacaa

SEQ ID NO: 8979 - DNA, 402 bp, Arabidopsis thaliana
  unsure at all n locations
  Clone ID: LIB24-135-Q1-E1-B9
gatgaaaaaaggaccaaaacccatttctctttctcgggctcaaatctgaatctccgtacgttgtctnnnnnnnnnnnnnnnnnnnnnnnnnnnnnnnnnnnnnnnnnnnnnnnnnnnnnnnnnnnnnnnnnnnnnnnnnnnncttcttcttcttcttagctaacaaaaacggaagcttgctgttgttgttgtttgttgctccggagacagagagagaaagagacgctgagagatttgcggcagaggcantggttgtgctaccaacagagtcagatctnnnnnnnnnnnnnnnnnnnnnnnnnnnnnnnnnnnnnnnnnnnnnnnnnnnnnnnnnnnnnnnnnnnnnctttccaagcttttccttgaagacanaaagcacagattccaactggggttttaant

SEQ ID NO: 8980 - DNA, 382 bp, Arabidopsis thaliana
  unsure at all n locations
  Clone ID: LIB24-135-Q1-E1-C10
acacgtccggcaacttcaactgcgccggaagaatgtggaagcgagtcagcgaacccgtgcgtcaacaaagctaaagctttgcctctcaaagtcatngcaatcttcgtaatcctcattgcaagcatgattggtgttggngctcctctctttagccgtaacgtttcgttcctccaaccagacggaaacatcttcactatcattaagtgtttcgcctccgggatcatccttggaaccggttttatgcacgttttacctgantctttcganatgttgtcatctatatgtcttgaagagaacccgtggcataaatttcctttctccggatttctcgctatgttatcgggtcnaatcantctagccattgactccatggccacgancc

SEQ ID NO: 8981 - DNA, 407 bp, Arabidopsis thaliana
  unsure at all n locations
  Clone ID: LIB24-135-Q1-E1-C11
angcgtccgtttctcgatctttgagatttctttcaaaggaagaaaaaaaaaaaaaactcgcgatgtccgccgaatcagctanccaaattcctaagggacaggttgatctactagattttattgactggtctggtgttgaatgtcttaaccaaagctcaagtcactctttgcccaatgctctcaagcagggatatagagaagatgaaggtttaaacttagagagtgatgctgatgaacaacttctcatctatattccttttaaccaagttatcaaactanattcctttgctatcaaaggccctgaagaggaaggtcctaaaactgtaaagtttttctcaaacaaagagcacatgtgcttcagcaatgtcaatgattttcctccaagcgacaacgctgaactaaccgna

SEQ ID NO: 8982 - DNA, 419 bp, Arabidopsis thaliana
  unsure at all n locations
  Clone ID: LIB24-135-Q1-E1-C12
acncgtccggagctcgttgcacactgtggtggctggaggagctccgttgagtagagaggtgacggagaagttcgttgagaattatcccaaggttaagatcctacaagggtatggtttgactgagtcaacggctatagctgcttctatgtttaataaagaggagactaagaggtatggagcttctggcttactggctccgaatgtggaaggtaagattgtggatccggatacgggtcgggttttgggtgtgaatcaaacgggtgagctgtggattcgaagtcctactgtgatgaaaggttatttcaagaataaagaagctactgcttctaccattgattcagaaggatggttgaaaactggagatttgtgttacattgacngtgatgggttttggnctttgttgttgaaaaaattaaang

SEQ ID NO: 8983 - DNA, 471 bp, Arabidopsis thaliana
  unsure at all n locations
  Clone ID: LIB24-135-Q1-E1-C2
gaattaacgggncgagccccgcgtccaantgggacnttaaatcaagagttgcaccggttagatccacantgggaatgggttgctnccgattaatttagccnaactacatgggaagtannagaanattgtnccgggcatatttangaccccgaaaatanaanccaaacgatcttcttacgggaagtatcttttgcatcggggtggtgctggctacaatcctactacatccgaagcagcgaatgcaatcccaatgctggaccaactgacatatttccaagactatatagagaaagtaanataggttagtaacacaagagaagagccaatataanttggcangtttagagaagaccaatcagctaatatccaaaggagttggcaattgtcgtcnggggaagcaatgatctgatcattacatattttggaagtgttgctcaaangaccccaaaactgacaatcgaccccttatnc

SEQ ID NO: 8984 - DNA, 469 bp, Arabidopsis thaliana
  unsure at all n locations
  Clone ID: LIB24-135-Q1-E1-C4
acgctncccagtgccggtcaaagaattaacggggccganccacgcgtcnncggaancgttgggctggtgttgagagcaacgcncttacagttgatggagttcctgttgattcttatctcaccaggtttgtgtgggatgaagctaagtacccaacaatgtcacctctgaaggaggttgtggacaatattcagtctcangttgcaaaaattgaggatgatctcaaggttcgtgttgctgaatataacaatatccgtggtcaactcaatgccattaaccgaaagcaaagtggaagcttagctgttcgtgacctctcaaacttggttaagccagaagatattgtcgagtccgaacatctcgtaactctccttgcagttgttccgaagtattcccaaaaagactggctancatgtnatgagacnttgaccgattatgtgggttccgaaggtcccgaaagaaaattgtttgnggg

SEQ ID NO: 8985 - DNA, 478 bp, Arabidopsis thaliana
  unsure at all n locations
  Clone ID: LIB24-135-Q1-E1-C6
aactttccgccgnccaggtaacggtcaaagaattcccgggncgacccacgcgtccggtgacgggaagagtgacgaccaaggtagacattttcagccttggggtcatacttatggagctaatcactggtcgtaaagccctagacgagacgcaacccgaagacagcgtccatctagtcacatggttccgtcgggtagcagccagcaaagacgaaaatgccttcaaaaacgcaatagacccaaacatcagcctcgacgacgataccgtagccagtattgaaaaagtctgggagcttgctggtcattgctgtgcccgtgagccttaccaaagacctgacatggctcacatcgttaacgtcctttcttcactcaccgtccaatggaaaccaactgagaccgaccctgatgacgtctatgggatagactacgatatgccgcttccgcaagtgcttaaagaaaatgggnaggcttccaagggact

SEQ ID NO: 8986 - DNA, 406 bp, Arabidopsis thaliana
  unsure at all n locations
  Clone ID: LIB24-135-Q1-E1-A12
tttttggggtttttagactttgcttgtctagttttgtcttgtgtgtggtgatgtcttatagtaattcaaacccggaaaattattcagctgcaacgagctcgccggagcttaaactatatcaagcatttatcttttctgttccaatttgtttcacatttattattctcttcttgttttacttgatctacctccgtcgtagtagctctgatttgtcttctcttggaatgcgaactactttcatccccgggaactctctctccacgattgaattaggattgagcaaagagctgagagagatgcttcccattgttgtctttaaagagagcttcaccgtaatgggattcacaatgttcagtgtgccttggggactatcaaccaaatgacaagcttcaacagattccnggaa

SEQ ID NO: 8987 - DNA, 460 bp, Arabidopsis thaliana
  unsure at all n locations
  Clone ID: LIB24-134-Q1-E1-F8
gcccngcccaggtgcaaagtcanagaantcccgggncgacccacgcgtcnncccacgcgtccgcccacgcgtccgcccacgcgtccgcccacgcgtccggtcaccgtctctgagtaacaatggtctttcctccgtcgtcacgcctcccaaaactctccgtggtctcaataagcctaagtgtattcaatgcggcaatgtagctcgctccangtgcccttttcaatcttgtaagggttgttgttcaagaacagagaatccctgcccgattcaacgttcttaaagtagcttcnacgtctggtgagaagacgcangcgcnaagtactccaatcttcagagcagaaagcaaccnaagggcactcccggggantacaactagagtttcggtcaatccggnaaactttctagcaactttgccnaattttaataancctgaaatgcttcttcccgccanagaaaacct

SEQ ID NO: 8988 - DNA, 438 bp, Arabidopsis thaliana
  unsure at all n locations
  Clone ID: LIB24-134-Q1-E1-G1
naacacaatgtgtgggattctcgctgttcttggntgcatcgacaactctcaagctaaacgttctcgtatcatcgaactctctcgcagattgaggcacagaggtcctgattggagtggactccattgttatgaagattgttatcttgcccatgagcgtttagccatcattgaccctacttcaggagaccaacctctctataacgangacaagaccgtcgctgtcactgtaaatggagagatatacaaccacaagattttgcgtgaaaagcttaaagtctcatcagttccgtactgggtagtgactgtgaagttgattgcacatctttaacgannaacatgganaagggaattanccaanatgtgggttggaatgntccccnttggncctccttgatantccncgacaaaanntttaattgctgcaaagggacgcctatt

SEQ ID NO: 8989 - DNA, 399 bp, Arabidopsis thaliana
  unsure at all n locations
  Clone ID: LIB24-134-Q1-E1-G10
aacggttacagaattagggttttgtttcttctctctcgccgattgatcttgaaatgtcttccccaattataattagggcaccgaagaagcaaccgccggagccgccatgtctgatttcgttactccccgaagaaatcgtcgtcgatatcgtagcccgtgtccctagatgctattaccctactctctcccaagtttcaaggcgtttccgatcactcgtcgcttctccggagatttacaagagacgatccttcttcggatgcacagaacaatgtctctacatcgcaatctccaaagatcaaacctctgatatccattggtttactctgtgccggaaacctaacggacaacaattctccggcaccaccgcctctgatcatcgcctggtaaatatncccaatc

SEQ ID NO: 8990 - DNA, 444 bp, Arabidopsis thaliana
  unsure at all n locations
  Clone ID: LIB24-134-Q1-E1-G12
accggtcaaaaattcncgggccgacccacgcgtccaaattcgtcaacagaaccctatattgttgcacataaccagcttcttgctcatgcagcggncgttgatgtttacaggacgaaatataatgatgnccaaaaaggtatgattggaccagtgatgataacnanatggtttcttccatttgatcatagtcaagagagcaaagatgcaactgagcgggctaaaatatttttccatggatggttcatggggcctctaacanaaggtaaatacccagacatcatgagggaatatgttggtgatcggcttccagagttcagtgaaacagaagccgcacttgtnaagggttcatatgattttcttggtctcaactattacgtcactcaatacgcccaaaataatcaagacgattgttccttcggacgttcacacngccctgattggccc

SEQ ID NO: 8991 - DNA, 431 bp, Arabidopsis thaliana
  unsure at all n locations
  Clone ID: LIB24-134-Q1-E1-G5
cgttgaaacagaaaccgatctcgtcgctgattctcttttcttcggatccttcnagataatggctcgatctttctctcgttcactttctcnatccaaaggccgtttcgccgccgcgtcatcctctctcctcccttcgtcgcaccttgtttcattccgatctcaatcttccgatngtcggggagatctgtacgagattgatacctccgcggcttctcaatcgccgtcggatcctttaatacagaagctagaagacgccgttcaccgggattttngtgcgccgaactcagcctggattggctccctttggtccctggtgcgtnctaatngggttcctcctcccggattcgggttccaagcccaagggaacccccaantccgttggtgaaaactcggaaaccgtttacaacaacgaaagaaaccttaaccnacaa

SEQ ID NO: 8992 - DNA, 404 bp, Arabidopsis thaliana
  unsure at all n locations
  Clone ID: LIB24-134-Q1-E1-H10
tcatgagactgatttcgtgaaaatatcgtcantatatcaaattagaagttgatggaaaacatgggggattcgagcatagggccgggccatccgcatctccctcccgggtttcggtttcacccgactgatgaggaactagtagttcattacctcaagaagaaagcagattctgttccacttccagtctcaatcatcgcagagattgatctttacaagtttgatccttgggagcttccaagcaaggcgagttttggagagcacgagtggtacttctttagtcctcgggatcggaagtatccaaatggggttaggccaaaccgggcagcaacttccggttattggaaagcaacgggaaccgataaaccgatatttacgtgcaatantcacaaaggttgngtcaagaa

SEQ ID NO: 8993 - DNA, 455 bp, Arabidopsis thaliana
  unsure at all n locations
  Clone ID: LIB24-134-Q1-E1-H12
catccatgtaaggntcacgggncgacccacgcgtccngtaataaatgaataatatgtttctcttgaaaaaaaaaaaaaaaggattcagagaaggaggaagcaggagggtctggtggtggtgaggaggtgaaagcctaaactcctttctgatcacatcgcacatattgagtctctctgtcagatactgttgcctaatgcctagtagtcatctggcaaatgtgtaagttaaatctgtggatgtaatattttgttgttggagtctgaactgcgtaaagcagctttacttttggtagagacaagaggaagaagctgcatagccaaaggataggttgcttgtatgtctatagcatttaacataaaagcctccttggattgtctttgatttgtgaggctcccttttcgagacattgtcaangtttcntttgnttaaagtcctttgggttnaaagggaggcc

SEQ ID NO: 8994 - DNA, 437 bp, Arabidopsis thaliana
  unsure at all n locations
  Clone ID: LIB24-134-Q1-E1-H4
acgcgtccgaccagttcgtcacaagcttcgagcccagctcggnaaacaaaattggnacttgctgcataaagtttagtttttttattgaatttggnangatgattgggaatccagtaattcaagttccatcatcactaatgccatcatcctccatgattgcttgtccncgagtttcacccaatggggttccttatcttccaccaaaacctagaactaggcatttantggtcagagctgcatccaattccgatgctgctcatggtcaaccatcgtctgatggggggaagaatcctcctcaccgttgttttgggatgtgccaagaatatatggagacngactttaaaaccttgagtgattttggggtttggtaagagaatatttggggaangtggtgttggnttgttaatgtctctggagctactcctcctgcnctaact

SEQ ID NO: 8995 - DNA, 441 bp, Arabidopsis thaliana
  unsure at all n locations
  Clone ID: LIB24-134-Q1-E1-H5
acgcgtccggttccaagaaattcctctacttaatacagctgattctacagattcctgctacgaaatttctgggtcngggttgatctttgtctcaccagtcaacccaattcaggactttgataaaggtggaaatggcggctttattagcttctcagagctgctgctatggcggtgagaccgcaagagtcaccaaagctattggtttcagtagctctttggagaatcatttcactggggaanccnacncagtgttatgggcagcaagtctaagagatttcgtattgagatgagacagtcgggaantgccctctaaggttggaatcaatggacgttcagtcaaaatggttcctgcgagtgaggtggtgaagaggaaagatggtgtgaatggatcggctgggaaaggtgttaatggancgaagtttggttagtantagaaacatt

SEQ ID NO: 8996 - DNA, 439 bp, Arabidopsis thaliana
  unsure at all n locations
  Clone ID: LIB24-134-Q1-E1-H6
agcacggaaaagtctgatctgcagttgaaaaacgagctagctgcgatcatcgtgaagatgccaagattgtttcacatgaagggctccactaaacacggttcaggatcacaatgcanctantggagagcttgaagatcacatcaaangacaagttttttgaccaagacattagtgctacggtcatacttcaaagcggtgttcatantatgcctcagaaaggagggccatcgtctttgatacagcgatggagaacaggtggatcttgcgattgtggaggttgggacatgggctgtaatctcagaattcttacaaatcagcacaacctctcctacaanaagtcggcaacatcaaactcaccagcctcttcaaacagattccgaactcttcnttctgggaaaacaagcgggaggagcatcngttcntgaagctttaaaaccga

SEQ ID NO: 8997 - DNA, 444 bp, Arabidopsis thaliana
  unsure at all n locations
  Clone ID: LIB24-134-Q1-E1-H7
acgcgtccggaaaaaccaactaaagatgcggcggctctagagacacagtcgccggaagatttcgatcaaccatctccgcttcgtaaaatcatctccgtcgcttccatcgccgccggtgtacagttcgggtgggccttacagctctctcttcttactccgtacgttcaactcctcggaatccctcacaaatggtcatctctcatttggctctgtggtccagtctccggcatgattgttcaaccaatcgtcggtttccacagtgaccgatgtaggtccaaatttggtcgccgtcgtcctttcatcgccaacggagccgcactcgtcgccgtngcctgttttcctcaaccggtaagnctgcgggtttcnggtaanaaantggaaaataactccaaggagaaaggttaaagttcgaagctataaggattcttggccctcgggttcctg

SEQ ID NO: 8998 - DNA, 437 bp, Arabidopsis thaliana
  unsure at all n locations
  Clone ID: LIB24-134-Q1-E1-H8
acgcgtccgaaanaacaaaggaaatcgccatggaagacgttaaccagttgttcgatgctgctttcgagttcgcacactatcccggcgctcaaaacgaaacttccgttaaggaattcctcgatcgcttccctcttcctgttatcttcaatgctttgcaaaccgatccggatataccaggatttgaaaacacgttggtgacttgcttggataggttgtttaagactaagtatggcgcttcacttattcctcagtatatgcctgttctgcaagttggtctcaangcagattctgcagttgtgaaatctctggcttgcaaaactgttctgtgtctcttggaggattgcgatacaaacgacgtttcttctgttcaactaagttgtaacaattggcataanaccctcntcgacntgactatatcattaacagggatgatgaag

SEQ ID NO: 8999 - DNA, 405 bp, Arabidopsis thaliana
  Clone ID: LIB24-135-Q1-E1-A10
aaacaagtgaagagaattgagatcaatgatcaacacagtcaaagagctgtcactactgcactatggtgcaacttcctcgtgttttcactcaagtttggggtttggtggacaagttctagccatgtcataatggctgaagtagttcactccgtagctgattttgctaaccaggcacttcttgcttatgggctcagtagctcaaggcgtgccccagatgctcttcatccctatggctactcaaaagaaagatttgtatggtctttgatatctgctgttggcatcttttgccttgggtctggtgctaccatagttaatggagtacagaacttgtggacttcttcgccacctccgaatatggaattaactgctgtggtaattggtggtccttccaaattaaaggccctc

SEQ ID NO: 9000 - DNA, 412 bp, Arabidopsis thaliana
  Clone ID: LIB24-135-Q1-E1-A11
tatgataaagattacatttttaggctaaaggaagtttcttttttcatgaatgtctgaatgagaagttttttttataatgaaaatctcagtttagggtttaggggaaggaaaaaaaggtctttgagaatcggttttactagattgaagacgagagttttgaatgattggtgaatttgttgatcatcaatggagaagaagagatcaccaagaagtagtaagagtcctggacctgcaattttccctaaaagccctcttgtctacgagagttataagtctggttgtggttggaaattgataaagttcttcgatttcggtcatgtcaaatctggtaataagagacttggttcaagagaagaagaaattcgtcagagattctgctggtaatgtttaaactaaaagtccgccttgattg

SEQ ID NO: 9001 - DNA, 465 bp, Arabidopsis thaliana
  unsure at all n locations
  Clone ID: LIB24-134-Q1-E1-F7
ggtaccngtcacaaattcccgggccgacccacgcgtccnannatngcnacaactcatnttgggaatggacacggtttccatttacgatatggactggtcatgcccaacagcaatagttgttggaaacgagggcaggggaataagtgacgaagcgttggagttatcacatctgcgttgcagtattccgatgaatggaatggttgattcgtttaatgtctcagtggctgcagggattctgatgcaccacncagtcnctgatagaaccactcgtctgggaagccatggagatctgtcngaagcagaganngagatantgatggctganttctcacttcgtcacagtanaacgctcaatttgcattgcttacgaattcgctaaacgtaagcancaacactctacntcctccnanttttgaaaccgttgtccttaatctctccgctgntttgcctgttaaanggcttcga

SEQ ID NO: 9002 - DNA, 478 bp, Arabidopsis thaliana
  unsure at all n locations
  Clone ID: LIB24-134-Q1-E1-D8
agtacaaatcanagaattcccgggntcgcttaaanggcntgcttcgcgacgaaccgccacagataaggttcttctttttttttccaatatctctggattttttttcccctcgttgaagaaaatctagtggtgattaagccataggggaaacanaacccagagagacgagtttgctagatttttttttttttttggaggctgcatgagtttggagaagaaggcgagtagtacaaattacaactccagaaaggagaagaggagaatcaatttanagaatggttgtttcaatggctttggtcanacattctccgtctttcgattttctgtttcattttccgggtcgacagaagncgttttctatcgccggttgctttttctagcgttcgctatcatcgcntccaantcttgtaacatgggttaantctccggctcttcaccttcaangttctcngcaaggttaaacagttttagttcgaag

SEQ ID NO: 9003 - DNA, 411 bp, Arabidopsis thaliana
  unsure at all n locations
  Clone ID: LIB24-134-Q1-E1-D9
gtaccggtcacaaattcccgggncgacccacgcgtccncggacgcgtgggttttgtccttttatatcggcggagacatgacggcggcacaagggaactctaacgagactctgttttcttcttacaagatgggaagattcgatctctctcatcgagtggttctggcgccgatgacgcggtgcagggcgttgaacggagtaccaaacgcggcgttggcagagtattatgctcaacggaccactcccggcggttttctcatctccgaaggcaccatggtctctcccggatccgcanggttcccacatgtgcctggaatctattcagatgaacaagtataagcatggaagcaagttgtggaagcagttcacgctaagggaggtttcatcttttgtcaattaaggcatgttggacn

SEQ ID NO: 9004 - DNA, 434 bp, Arabidopsis thaliana
  unsure at all n locations
  Clone ID: LIB24-134-Q1-E1-E1
aaatcaaaatgtcttctcatactgcaactaagtacgatgttttcctaagtttcagagggcatgacactcgccagaacttcatcanttttctctacaaanaactggttcnaaggagcattcnaancttcaaagacgacaaanagctggagaatggccaagatgatttcgtcggagctcaaacgcaccatcgaggtgtcaagattcgccgtcgttgttgtctcagagacctatgctgcgtcttcttggtgtctcgatgagctcgtaacgatcatggatttcgaaaaaaagggttccatcaccgtgatgcccatcttctacggcgtnggaaccgaatcnagttangngggcaaaccggngtnntcncctgaacagtttaagaaacattggaantagatgaagatnatgataangtgcttacatggagggaaagcatt

SEQ ID NO: 9005 - DNA, 452 bp, Arabidopsis thaliana
  unsure at all n locations
  Clone ID: LIB24-134-Q1-E1-E11
accggtcanagaattcccgggncgacccacgcgtccncggacgcgtgggctcaccaaaataataacatgtaatgtgtatacagtatacctaatcaatcattanctttctttaattttgttggattttttgcatattgcaaagtttagaacgcgagcgaattctccgcggaattggggttaaaaggaagaacttttagggtttttgattcttcgggttttctcgtgctttgattcctttcaagtcaaagcaaagcattaccttttctcgtccatccatcagcctgggcttgattagccaaccctgttaaggcagggtttgaactaaaagtgagatagtgagatggatgtctcagcacttttaacgtctgctgggattaatatagcgatatgcgtaatgcttgtancgctttaatccattccacgaaaagcanncaacccaattatggtgttaa

SEQ ID NO: 9006 - DNA, 466 bp, Arabidopsis thaliana
  unsure at all n locations
  Clone ID: LIB24-134-Q1-E1-E3
cccgggncgacccacgcgtccngtgnggnacaagttccagaacctatggaaatcgatgtnnatggaagatctatttctggaaaagaagattttgnaagtatacgggaagatggagaacttccctcnttggtcacggcggctgcttcgttaaccagttccaatcataccccatcnaaagtatctaatcaagcacggtcaaggcanttggccttgatgacaaanaatctanattctccgattagcaaaggaaagtccccaagtttcaagaaatacgaagatgatttggatcctgttctgggacgatgatagtganntacatgaagccaaccgggaagaactgaagcgcatgttggaanaatttatgncctgagaaaactggataantcatgggtgggantaaagggtccgagaagaattttgcgccttgtgttccccaangaaaacaaattggcgggaaanttgtgga

SEQ ID NO: 9007 - DNA, 476 bp, Arabidopsis thaliana
  unsure at all n locations
  Clone ID: LIB24-134-Q1-E1-E5
cnttgcccgcccagtacaagtcaaagaattcccgggncgacccacgcgtccncgaagattgtttcttcttactccaatcctctttctcacttctcgcagttgggattttcttctggaaagaatcaagtcctgtaacttatatgcatctggctgatcaaataaagtaatggtggacgatacatcaccttttctggaggttttttgtgaagtttctggtaaagactaccgattcacaacagggacaaaggcggagtttgctgtctctgtgatcaacaggaaacttggttcgttgaaacctcgagtgatttacatcgaagcagcaaaggaaggtgaagagcctattagttttggtgataatgctagtcttctgaattatggacttggttggaagttgaagacagttgttgatgctgatctacctggaacggagaaaaacaatcgacaacagcggttttcttctgtattttcgacgggtt

SEQ ID NO: 9008 - DNA, 477 bp, Arabidopsis thaliana
  unsure at all n locations
  Clone ID: LIB24-134-Q1-E1-E6
gnccagtaccaatcaaagaattcccgggncgacccacgcgtccgtgttgttctcgattaacgaaaaagacttgtcgttctcaattcttatcgatttaagaacaaatcatctaacgaagattacttccgaagatcagaaacaaacacaaactgtgaatcgttgtttgttaattctctttaaaatcgccagaagaaagagatctccgttttctacagaagaaaagcaagagagtaagaatgggatcggaacaaaacgatagcacaagcttcacgcaatcgcaagcttcagagccaaagctatgtgttaaaggatgtggtttctttggatcaccatcaaacatggatctctgttctaaatgttacagaggcatttgtgctgaggaagctcaaacagcagttgctaaaagctgctgttgaaaaatctttcaagccttctcctcctcgtagtctcttcataagcagaacctcctgctgttgt

SEQ ID NO: 9009 - DNA, 419 bp, Arabidopsis thaliana
  unsure at all n locations
  Clone ID: LIB24-134-Q1-E1-E7
ctcgtaacacgcctgagagttctcgtcgtccttatctcgatcttggttgattcgctctccgatcggaaattagggcttttgttttctgaagatgacgactgcagcacgaccaacctgggctccagctaagggaggtaacgagcaaggtggtgctcggatctttggtccatctcagaagtattcgtcccgtgatgtcgccgctcacacaactttaaagccaaggagggaagggcaacacactcaagaggaactccagaagataaatcttcgtgatgagcttgaagagcgtgagaggagacatttccatcaaaagacaaatcntccatggatgatagagatncncagaagaaggaatcaagcntttactgggaagactccaaaaanggattctgaaagaancggattatccctcgcanttg

SEQ ID NO: 9010 - DNA, 420 bp, Arabidopsis thaliana
  unsure at all n locations
  Clone ID: LIB24-134-Q1-E1-F10
acgcgtccgcgtttgtttcttcttcagccatatcggaaaaaangatatccgacgagccattcggtgtttgttccgagaagctccgatcgatcngtgttanggtttttctttttccgccttatgaatctctctatcgcggtttcattagattcagtttaactcgagtgatgaaaccaatctccgtgctagagctctttgatcccgtggctggtaggatattacggcgtttgtagctctgtcgtcgtggatagagtnagaacgacgaaatcagccttggtttcctaactgtatctgaatttttgcaacaatgtctgagctaaaagagcgcctgcttcctccaagacctgcttcagctatgaacctcannagatgcttctgtgactcggccttctgcttctgggaagacaacccctctgggnt

SEQ ID NO: 9011 - DNA, 448 bp, Arabidopsis thaliana
  unsure at all n locations
  Clone ID: LIB24-134-Q1-E1-F11
ngtaccggtcaaagaattcncgggncgacccacgcgtccncccacgcgtccgtgcgattctgctactctggagaaangaagacgaatgattanttaaagnagaagaagaggagtcttgcgatagaanangatttttgcgatatcttcatataaggaagatggtcttatctcaaggctctgcatctctctccttttctcatccataggtcatgcgtccatgatcaattggnataatacgtaattgtcagatggtatacaacaactgtggacaagagtgtatgtttttcactgtggcagtgttggaaaaagaagcaatgcgaggaggcacacctcttcacttaaagagcaaaatcgatgagctgatcaacagtctcttggatttgtgcttctgtacttcttacgangaangtgtgttgacttttcgaccttgttccttgggttccntgga

SEQ ID NO: 9012 - DNA, 464 bp, Arabidopsis thaliana
  unsure at all n locations
  Clone ID: LIB24-134-Q1-E1-F2
ctcaccgggccgncccacgcgtcaactcaaaactcatttcatactngtaaccttcaagaccttgaagagaataagtccttacaaaagtcaattcgggttggnactccggtaagaaaatagacaatatccggncgccgcaacaaccggcttaccacgangatgtcgaaattcctttctctctttcaatggtaaacaaaaccttcctaaaaggaagagagttaaaatgttgctacaaggcaagcattgatgggtttggtgcaacaaagttccacgagcgttgtgacttcaaaggtccatgtgttatcatagcttacactaaagacaagtctttcaagtttggtggatttaagtccggaaggatatagaagtactgatgattattacganacatttgatgctttcctcttctattggctcgangattgtgatgacccaatcgtccttcctaaggtttggaggaagtg

SEQ ID NO: 9013 - DNA, 473 bp, Arabidopsis thaliana
  unsure at all n locations
  Clone ID: LIB24-134-Q1-E1-F3
ggccncggtcaagcaacccgggtcgacccacgcgtccncttgttttacatttccttattaagaaatatctctagatgtgttttctttaaacagaaactctctttcccttcaagtcaaaatcatgtacatcaaagataaatcttagaagcttgtttcaatggaattccatgtcagacttatgaatattccacttgaagttcaatttttgttgttgtttttcaaagtgtctagattctcaacactatgactcatcttcttacttttaagatttaacctctgttttatgatctccttgtagcactatcaaagtttctaaagaagttttggtttcttgttttttaagggatcatctgaagcttaagggagaaaagtttctcgttgttgccnttgataataataancctttggggnaattaaaaggnagggnnnatttccnaccaaggtcnaaggnntaaccccattaatttccaaaa

SEQ ID NO: 9014 - DNA, 474 bp, Arabidopsis thaliana
  unsure at all n locations
  Clone ID: LIB24-134-Q1-E1-F4
cggtcaaagacnacccgggncgacccacgcgtccnggtaatttcggtgttgctcgtcttatgagagataaactcactaaanagcttgttgctgtcaagtacatcgagagaggagacaagattgatgaaaatgttcaaagggagatcattaaccacaggtcactaaggcatcctaatattgtcagatttaaagaggtcattttgacgccgactcatctggctatcataatggaatatgcttctggcggtgaactttacgaagcggatttgcaatgcaggacggtttagtgaagatgaggctcggttcttctttcagcagcttctatctggagtcagttattgtcattcgatgcaaatttgccatccgtgacctgaagctaagagaatacattgttggatgggaagtcctgctcctcgattaaaaatttgtgattttgggatattcaaagtctcctgttcttcattcacaaccaaa

SEQ ID NO: 9015 - DNA, 475 bp, Arabidopsis thaliana
  unsure at all n locations
  Clone ID: LIB24-134-Q1-E1-F6
ccngtacaagtcacagaattcccgggccgacccacgcgtcnncggacgcgtgggcggacgcgtgggatgggagtgtcctcaatgtgatttctataattacgggaggaatgtagcttgcttaagatgtgactgcaagcgacccagggactcttcactcaattcagccaactctgattattcaagtgaccctgaacttgagagaagactggtcgaaaacgaaaagaaagcacagaggtggcttagtaaagtagcacagggtggttctgatgcgaacagtgttgatacagatgaagatttcccagagattatgcctttgaggaaaggagtgaatagatatgttgttagcacgaagaaaccacctccttgagaaaaagttggctaatactgagaacagagtagctacaagatggaaactcgaaaaggagcgacgataatgcnttgggaagtaaaacaactangagcttgaatgagattc

SEQ ID NO: 9016 - DNA, 480 bp, Arabidopsis thaliana
  unsure at all n locations
  Clone ID: LIB24-134-Q1-E1-D6
cccgnccggtaccaatcaaagaattcccgggncgacccacgcgtccnagatcttttaaatcaacctgataaccgagtctgcgctgattgtggcgcttctgatcctaaatgggcatcagcaaatatcggagtattcatttgcttaaaatgttgcggtgtgcacaggagcctcggcactcatatttcaaaggttttgtctgtgacactagatgaatggtcagatgaggaagtcgattccatgattgaaattggaggaaatgcgtctgctaattcaatttatgaagcttttttacctgacacgtgctctaagcctggacctgatgttaatcatgaccagcgtatgagattcattagggcaaaatatgaactgcaagagtttctgaaaccaagcttgcggattacatccgggaaaggctcaacaaagagttcagcttttcttacatcaagtctttctagaaaggatnatgggataagttttccg

SEQ ID NO: 9017 - DNA, 412 bp, Arabidopsis thaliana
  unsure at all n locations
  Clone ID: LIB24-133-Q1-E1-B6
agtttgaaacttgaagaatgccacaggatcaaccagtttggtcttatgggttttctcatgaactgtggctcaaagttgaaagctttctctttggcaaactgtctgggcatcagtgacttcaactcagaatcctctctgccatcacccagttgcagctctttacgttctctgtcaatccgatgctgccctgngtttggggatgcaagtctcgctttcctgggaaagttctgtcatcaacttcangatgttgaactctgtggactaaacggagtgacagatgcaggtgtgcgcgagttgctacagagcaacaatgttggtctaagtgaangtgaacctgaacgaatgtatcaatgtttcagacaacacagtctctgcaatttctgtttgccacggacgcacattggagtctctt

SEQ ID NO: 9018 - DNA, 420 bp, Arabidopsis thaliana
  unsure at all n locations
  Clone ID: LIB24-133-Q1-E1-C1
tcctcgctgcgggagttttttgtgacgacgctcaatacaaactctgaatctggaaataccggagtgcaaatacttgatagaaactggggagcaggttggcaccttttatctttgttaattgctaccagaccttctgaaagaataagttgcttggatgctcttaagcatccctttctatgtggaccaagatggcgtgttgccccatcaatggatatcatcagatggggtcttggatcaaccgcagtaaagatttcagaagaatacatttaccgcatgcctcagcgccaaagacttgcccacttcattggactgatggagatgctaaatccttatccaaagccaaacgtatgaattaccacctctcatgattcttgagctttgatatatgtattgcttaatcnagtgtgttaagtgtgaaaa

SEQ ID NO: 9019 - DNA, 419 bp, Arabidopsis thaliana
  unsure at all n locations
  Clone ID: LIB24-133-Q1-E1-C2
atttctctctcttttgcttacttcactcacagtttcgccgccgggataaatccgttcaatcggcgtttgccacctgccattgttacaagcaatgcattatatcgttaatggcgtancgcattgagaagagagagagagagcagggaaacaatgatttcccaggtggagagagatctgtcgattcaaaatcggcttccgggaagcgatcacactactccttctccgccaacatctcctcatctctgccggagccggtcgaaatcctcctctgtctccggggcaacagcaaagtcggaacgtcgctcaccgtctctcatggatcattttatctgttcntctccggcgtcanggaattctccttttcgctcctatcatctacatctcctgtangctttttcacctacacgcggcgtcgtttg

SEQ ID NO: 9020 - DNA, 414 bp, Arabidopsis thaliana
  unsure at all n locations
  Clone ID: LIB24-133-Q1-E1-C7
aattctacgtacacgtaccacttcttctcctcaaattcatcaaacccatttctattccaactcccaaaaatggcgattcgtcttcctctgatctgtcttcttggttcantcatggtagtggngattgcggctgatttaacaccggagcgttattggagcactgctttaccaaacantcccattcccaactctctccataatcttttgactttcgattttaccgacnagaaaagtancaacgtccaagtaggtaaaggcggagtaaacgttaacacccataanngtaaaaccggtancggaaccgccgtgaacgttggaaagggaggtgtacgcgtggacacaggcaacggcaagcccggangagggacanacgtgagcgttggcaagcggaaaagtcacggangtggcgtcgca

SEQ ID NO: 9021 - DNA, 412 bp, Arabidopsis thaliana
  unsure at all n locations
  Clone ID: LIB24-133-Q1-E1-C8
tcttcttcttctcctttttcaaaaatttgtcacctccgagatcagatctgatcgtcggaattgagatggcgaggaataaacttgtaagtggtagtcatgggatatggaaatatttcaacccagcgttttatctccgaagaccaagacgtcttgctttgctcancatcctcttcgtctctgtttcaatggttgtttgggatcgtcaatctctttcccgagactaccagtttgaagtttccaagttaaatgagagaagttttgcggttgcagcagatgttggaagagataaagagcgtcactgaggatgtgtctgtcaatagtttgaagggatgttcaggaagatccagttgatgctcagcgaatgcagagagttaaagaggcaatggttcatgcttggagttcatatgaaaag

SEQ ID NO: 9022 - DNA, 417 bp, Arabidopsis thaliana
  Clone ID: LIB24-133-Q1-E1-D1
cacagtccacacacagcgagactctatttactcgccggcggaagaacaaaatggcgggaagagcgattttctctgtatcttgttcatctactccttccttgtgtatcccttattcaactgcttcgttttcatcgatgaatcgactggcgctccccgccgtccggatttctccccgaaccaacagatttcccaggattcactgctctatgtctgctaacgacatcaaagcgggaaccaatatcgaagtcgatggtgctccttggcgtgttcttgagtttcttcatgttaaaccaggaaaaggtgcggcatttgtgagaactaagatcaggaactatgtgaatggtagcacagtcgagagaacatttcgtgctggaatttctgttgaggaagctaatatatataaagaaacaaacaatt

SEQ ID NO: 9023 - DNA, 422 bp, Arabidopsis thaliana
  unsure at all n locations
  Clone ID: LIB24-133-Q1-E1-D10
gatattgaaattgacgagagacagagccaaagctccgaaccacgccatgtctctagtccccggcgggaatcgctgttccccttttttgttaagactaggaaagctcagagtcagaggcatgtccagagtttgatcgtcgtatccttgggcttatcaatatcagctgactctcagagtttgctctcatgctttgcccaccacaagggcttagtggcggatgccttgatcgtcctctcggagttgtccctgaacagaatccaaaggctataagctcttttcangaagatttgaaacctgcttcttgctcataccaacatcatttgaggagcatgacaatcttctttccttggcatatgacaactgctcatctgatcctgccccancctcatcctcgctacacgaaagcccattcacttcctgan

SEQ ID NO: 9024 - DNA, 422 bp, Arabidopsis thaliana
  Clone ID: LIB24-133-Q1-E1-D11
ccagctgaaaatatgctttatcattgttccgtttgcaatttcacatcgtgccttggttgtaccaaaaacccaccactccttgttattgagcatatgaagacccacaaacacccacttactctcttacctagaagaatctcatgtatctgtgacgtttgtgggaagaaatgccagtttacggcgtatgtatgtcttcagtgtgattttgttaccgcaagaaagtgtatcgacaggccccgtgtcatcaatatcaatcgtcatgatcatcgcatatatttaactcatcatctcggcactgggtattcggaatgcggagtttgtcacaaaaatgtaagtcagtacaagggggcttactcttgctctgtttgccctaactatgctgttcattctacatgtgccgtgagaactgacgtatgggatgg

SEQ ID NO: 9025 - DNA, 473 bp, Arabidopsis thaliana
  unsure at all n locations
  Clone ID: LIB24-133-Q1-E1-D12
ctgttacgccntcagtagccgtcnanaattcaagggtcgaccnacncgtccgattaaanggggcncnanaattngtaagatcgggnggggcnatttaaatccaatatcagaaacacgtcgaacgagaccaataagagctagcttctgatacatttcgactttggcgtttctcgatctgttgtttctgctcccaaataaaaataaaaaaaaatcggatcggggatttccccaaatcgtaaaattaggttttgttcttcatttctagccctagcttagttttatcgttatcttattcattaaggtttgattctacctttgtttcgcttccctcctcgaattttgcaattccgttattaaaggatcctagtttttctggctcttgtactacgtcaagtttcatggattctcgagtttcgattctcttcgtctgtgcaatagccgtgtcatgctttacgtctgggtctgcttcatca

SEQ ID NO: 9026 - DNA, 419 bp, Arabidopsis thaliana
  unsure at all n locations
  Clone ID: LIB24-133-Q1-E1-D2
ttctgcaacttctccaaatctcatactttccagaaaatcattttcccaagaaaaataaaactttcccctttgttcttctccccccaacagcaatcacggcgtaccaatcggagctaggaggagattcctctcccttgaggaaatctgggagaggaaagatcgaaatcaaacggatcgagaacacaacgaatcaagtcactttttgcaaacgtagaaatggtttgctcaagaaagcttacgagctctctgttctttgtgatgctgaagtcgcactcatcgtcntctctagccgtggtcgtctctatgagtactctaacaacagtgtaaaagggactattganaggtacaagaangcaatatcggacaattctaacaccggatcggtgggcagaaattaatgcacagtattatcaacaaag

SEQ ID NO: 9027 - DNA, 413 bp, Arabidopsis thaliana
  unsure at all n locations
  Clone ID: LIB24-133-Q1-E1-D5
tatcacaatcataaccacaaaaacaaacactatgggacacctcaaaagtctcttcacaattcttttcctaatagctatgtcttcaaccgtaacatttgccggtaaaatacccgcgatcatcgtgtttggcgactcttccgttgatgccgggaacaacaactatatcccaactgttgctagaagcaactttgagccatatggacgggactttgttggtggaaagccgaccggacggttttgtaacggaaagattgcgacggattttatgtccgaagccttagggcttaaaccaatcattccggcgtacttggatccttcttataacatttcggattttgcaacaggtgttacctttgcttctgctgccactggctatgacaacgccacttctgatgttctgtcngtactacctc

SEQ ID NO: 9028 - DNA, 413 bp, Arabidopsis thaliana
  Clone ID: LIB24-133-Q1-E1-D6
tactttgaaggcagttttgatgcttgcagatcaactgattagcagagttgaatatatgcattcaagggggtttcttcaccgtgacatcaaacctgacaatttcttgatgggacttggtcgcaaagcaaaccaggtgtatatcattgattttgggcttgcaaagaagtatagggatctccaaacacataggcatatcccctatagagaaaacaagaaccttacgggcacagctcggtatgctagtgtcaacactcacctaggagttgagcaaagtaggagggatgatctggagtctcttggttacgtactcatgtatttcctgagaggaagcttaccgtggcagggactaaaagctggcacaaagaagcaaaagtatgacagaattagcgagaagaaagtatcaactcctataa

SEQ ID NO: 9029 - DNA, 412 bp, Arabidopsis thaliana
  Clone ID: LIB24-133-Q1-E1-D7
acgcgtccgcaatgatcggtgctataacaagcgggcctatagctgatttagttggaagaaagggggcgatgagagtttcctctgcattttgtgtagtcgggtggctagcaatcatctttgccaagggagtagtggctctggaccttggaagactggcaacgggatatggaatgggagcattttcctatgtggtgccaatctttatagcagaaattgcacctaaaactttcagaggggctctaaccacactgaaccagattctgatctgcactggagtgtcggtttccttcatcataggcacactagtgacgtggagagtcttggcattaataggaatcatcccatgcgctgcctccttccttggcctcttttttatccctgagtctccaagatggctggcaaaagtggggcg

SEQ ID NO: 9030 - DNA, 427 bp, Arabidopsis thaliana
  Clone ID: LIB24-133-Q1-E1-D9
gtcgtgaattacctcaggcagcccctcctggcctaggatcacctcatcagaacaacagagtatcgagtttacctggtactcctcaaaggtttagtattccgcagcgattagcttctttggtcagatttcgagagaaacggaaaggaaggaattttgataagaagattcggtatacagtccgcaaggaggtagctttgaggatgcaacgcaataaaggtcagttcacatctgccaagtcaaacaatgatgaagctgcatctgctggatctagctgggggtcgaatcaaacctgggccatagaaagtagtgaggctcagcatcaagagatctcatgtcggcactgtggaattggcgagaagtcaactccaatgatgcgacgtggacctgccggggccaagaacactttgcaatgcatgtggacttatgt

SEQ ID NO: 9031 - DNA, 419 bp, Arabidopsis thaliana
  unsure at all n locations
  Clone ID: LIB24-133-Q1-E1-E1
agatgtatctgaagagaccgatatggagcgatggcgcgtcagcaacgccggagaatccatcagaatcggagaccggagaagaatcagacgcggcgtcgatggtagtcgaagagctggtgacttctctcaatacacagagactttacagggagctgacactatccctcaggaccggtttacgcgatgcttgcgctgaattctccttccttcgcatccgtggtcttagatctcttctcaaaactctccgaactgtcgctgattcagattcaatcattcgtctcttctctcatacccaaaccatttccgatntccaactggttccggtgctttttcaacattcattgaaaagaagcggagggatgataaagtgacgaacttggatcatatattcagtgtggagccgatgaagataacaagtc

SEQ ID NO: 9032 - DNA, 416 bp, Arabidopsis thaliana
  unsure at all n locations
  Clone ID: LIB24-133-Q1-E1-B5
acgcgtgggcggacgcgtgggtcgcagtctcccactgattcagcagctctttgaactactcttcgacaatggccgaacgtggtggagaacgtggtgttgagcgtggtggagaacgtggtgatttcggacgaggattcggaggccgtggaggtcgtggagatcgtggagggcgtggacgtggaggccgtggtggtcgtcgtggagggcgtgccagtgaagaagagaaatgggttccagtgaccaagcttggtcgtctcgtggcggctggtcatatcaagcagatagagcagatctatcntcattcactcccggttaaggagtaccagatcattgatatgctcatcggtccaacattgaaggatgaggtaatgaaaatcatgccggttcanaaacaaaccangggctggtcaaaggac

SEQ ID NO: 9033 - DNA, 466 bp, Arabidopsis thaliana
  unsure at all n locations
  Clone ID: LIB24-132-Q1-E1-E6
acgcgtccgcnanctanganatttaccttgcacttttgatctgtgttctcagnagattattcgtaccaccatggtcggcggggaagttaaaattcttcgcgggtacnaactccgtctcatccggtgcaccgtctctttgccactatcagatcctcctctcgatgaatcccaacccggaacccatccacacgactctcttataangtcccttttgtcttcaatcgaggctgggaantatcttgaagctttagcctccgaanctactaatctaatacncgnanagtacgagttcgagccggttgattccgccgaagcgagtttactccgancttcncaacaaagtcgaatcgttcgtgttgaacgattcttcgggatgaaanccgataanggtccggngttccgtttcntgtggangttgcttagcaaacggcggntgcgtttgggttcacttgnttgcaatttggcc

SEQ ID NO: 9034 - DNA, 343 bp, Arabidopsis thaliana
  unsure at all n locations
  Clone ID: LIB24-132-Q1-E1-E7
ttctattccaactcccaaaaatggcgattcgtcttcctctgatctgtcttcttggttcattcatggtagtggcgattgcggctgatttaacaccggagcgttattggagcactgctttaccaaacactcccattcccaactctctccataatcttttgactttcggttaaaatattttactttgccattcccaactctctcacttatttttgttcttaatgttagaaatacatgtttgttctgaatttatattatgaatttatattatggttttcactaagtgttagaaatacatgtttgccattccattcncaactctctccataattaagctgtntttttt

SEQ ID NO: 9035 - DNA, 388 bp, Arabidopsis thaliana
  unsure at all n locations
  Clone ID: LIB24-132-Q1-E1-E9
gggtgcaaaccaaaatgtgtgaagccacttctcgaatatcaggcatgtgtcaagagaatccaaggtgatgattctggccacaagcattgcactggccagtattttgactactggcaatgcattgacaaatgtgttgcaccaaagctgtttgcgaaactaaaatgaaaagaggtgaagctggagactctattgtcttgagtttgctacatgtggtttaaaattgatgtataaaatgcagtggatgttgaacttttttttactgcaaaccaagattgccaaatggctctgcttcttgggttttgtttccatcgcaagtttgcgcttactacatttttttgctacttgagtaattgcatggcctaataacangaaggnaannaanaaaagg

SEQ ID NO: 9036 - DNA, 496 bp, Arabidopsis thaliana
  unsure at all n locations
  Clone ID: LIB24-132-Q1-E1-F3
ctgtttcccttgccctacngcgtccggaaattcccnaggtcgacccacgcgtccgcccacgcgtccgattaaaccaatcagattgcaggttcaatatcgtatgcatccagctttgtccgagtttccatccaacagcttctatgaaggaactctacagaatggagtcacaattattgaaaggcaaacaacagggattgatttcccgtggcctgttcctaaccggcccatgtttttctatgttcagctgggacaagaggagatcagtgctagtggaacatcatatcttaatagaactgaggctgctaatgtggagaaacttgtgactgctttcttaaagagtggagttgtccccagtcagattggagttataactccatatgagggacaagagggcatacattgttaattacatggcaagaaatggttctctccgacagcaactgtacaaaggaaattgaaggttgccagtgttgaatcctttcaaagggaaggaaan

SEQ ID NO: 9037 - DNA, 412 bp, Arabidopsis thaliana
  unsure at all n locations
  Clone ID: LIB24-132-Q1-E1-F5
tatacctttctctgtatttccttcacctccggctaaatctccggcgaccgcgtaacttgttctccggtctgaatagtgaataaacacacacacggagccaaatccaggagaaattaggtttgaattaggagagattaggagaatacaaattggtttggtggttttcaagtatgctaccaagtgggttgaaagaaacccaactccgtgagagcaacaacaaccaaaaagtcnatcctcaaccaatggaaggagtctatcaatcagaatcctgaagctatggaagcacttatctccaatctcttcggaaacatctcgtctttgaaatctgcttanatcgagcttcaaagtgntcanagtccttacgatnccgacaaagagtcagggcngcgggncaaagttgtcagttcntgaa

SEQ ID NO: 9038 - DNA, 463 bp, Arabidopsis thaliana
  unsure at all n locations
  Clone ID: LIB24-132-Q1-E1-G5
acgcgtccgctttcataaagctcataacatacataaaaaatgggtgaatcttttagattattcaatcatcatcacttcctcacaacttttctcataatcatagccatgctcaaattggttcatnnnnnnnnnnnnnnnnnnnnnnnnnnnnnnnnnnnnnnnnnnnnnnnnnnnnnnnnnnnnnnnnnnnnnnngtacccaagactctgtttctcttcactctcaactcatgctagtctcatccaaacaagccccaagctcatggctcatgcggctctcaacatcacattagcctcggctaaagtaacttcagcaantgatggtgcgtctctcgaatagtcggctcaagcctaaagaagtctcgggnnatgagagactgcgtcgaaggagttangggtgacacgtttggnnggagcttagggaaatcgattgggtgagangtngtccagcntaaagtgggctc

SEQ ID NO: 9039 - DNA, 427 bp, Arabidopsis thaliana
  unsure at all n locations
  Clone ID: LIB24-132-Q1-E1-G9
ctttttccccaagtcggtacagattgagagaagagattacaagatccatannnnnnnnnnnnnnnnnnnnnnnnnnnnnnnnnnnnnnnnnnnnnnnnnnnnnnnnnnnnnnnnnnnnnnnnnnnnnnnnnnnnnnnnnnnnnnnnnnnnnnnnnnnnnnnnnnnnnnnnnnnnnnnnnnnnnnnnnnnnnnnnnnnnnnnnnnnnnnnnnnnnnnnnnnnnnnnnnnnnnnnnnnnnnnnnnnnnnnnnnnnnnnnnnnnnnnnnnnnnnnnnnnnnnnnnnnnnnnnnnnnntgtctacaatggctgattcatttttccttagatctcctcgatcancanncacggctcatcttaactgttgttgtnggccctgntgnnaangttgggntaagnattggtgatccccctgggggatgattcgggn

SEQ ID NO: 9040 - DNA, 411 bp, Arabidopsis thaliana
  unsure at all n locations
  Clone ID: LIB24-132-Q1-E1-H9
acgcgtccgtgacggagaaggtgatcgtggtcaaaaccctagaattatggagagggactcagattctatcaaagatccgatctcagagccttcatggtttacccccaaaaagcttctctttgtgttttgtgttgtcaacttaatcaattatatagatcgaggagctanagcaagtaatggtatcaatgggagtcgtggttcttgcacttcgagtggtacatgttcatctggcancggaatacagggagatttcaacttgagcaaattttgaagatggagttctgtcatctgctttcatggttgggcttcttgttgcntctcctannatttgcntccttagctnaggagtgttnatncggttttagacttatcgggngttgggtttgtcaatctggagtcgccncggtgaat

SEQ ID NO: 9041 - DNA, 406 bp, Arabidopsis thaliana
  Clone ID: LIB24-133-Q1-E1-A1
ggattccattgccttggtcactattgccagccaaccgatcagcccttgagaggttatgtacttgcagctcggactagcaaagccgtcaatgctgatgatttcccgcccttgaaaaagcctgtgagttattctttagtttggagtgcagattcagagaaaaatggtggtggttatttctggctacctaatcctccggttggttacagagcaatgggagttattgtaacccatgaaccaggtgaacctgaaacagaggaggtcagatgtgtaagagaggatcttacagagagttgtgaaacctctgagatgatacttgaggtgggttcttcgaagaagtcgaacggctctagttctccttttagtgtatggagcacccgaccttgcgagaaaaggatgctgtcacaag

SEQ ID NO: 9042 - DNA, 420 bp, Arabidopsis thaliana
  Clone ID: LIB24-133-Q1-E1-A10
gaaaccctaaatctcgacctcaaaccctgaaccatggctgaaggactcgtgttgaaaggcacaatgtgtgcccacactgatatggtcaccgccattgctacaccggtcgataactccgacgtgattgtaacttcgtcgcgtgacaaatcaatcatcctctggaaactcacaaaggaagacaagtcatacggtgttgctcagcggaggatgactggtcactctcacttcgttcaagacgttgttctctcctccgatggacaattcgctctctccggatcttgggacggtgagcttcgtctctgggatctcgctaccggagaatctactcgtcgtttcgttggtcacacgaaagatgttctctctgttgctttctctaccgataaccgtcagatcgtctctgcttctcgtgatcgtacgatt

SEQ ID NO: 9043 - DNA, 420 bp, Arabidopsis thaliana
  unsure at all n locations
  Clone ID: LIB24-133-Q1-E1-A12
gaagnaaatacttgtttggtaaagtcnctatccagattaagcttgttgagggtgattcagcaggaacagtcactgctttctacatgtcttcagatggtccgaaccacaacgaattcgattttgagttcttanggaacactaccggcgagccttacatagtccagaccaatatctacgtgaacggagttggaaacagagaacaaagactcaacctttggttcgatcccaccactgagtttcacacttactcaatcctctggagtaaacgcagtgttgtattcatggtagacgaaacaccgattcgagttcagaagaatcttgaagagaaaggtatcccatttgctaaagatcaagcaatgggtgtttacagctccatttggaatgcagatgattgggctacacaaggaggtcttgttaaaa

SEQ ID NO: 9044 - DNA, 450 bp, Arabidopsis thaliana
  unsure at all n locations
  Clone ID: LIB24-133-Q1-E1-A3
tccaagaattcgngggtccgtcagnccacgcgtccgctcttctccggcgacgattcgtgaaacaatcagttaattgcataacattccttcaaatcctcgccgagcgatccttctccaccgtgaagattcctccaggtcgtcgcaaaaccaccgaattcgacaaacttatcaacgaagctggcagctccggcgatttcgagaccgtacgccgtctcctaaacaaccgtatagttctcggatctttcaacacgagcgacacattcaaattcctcaccaacaccgcttcatactcctcctatttagaagatctccgccgcgttttgcctcaagatcgacggcggtttctcgcggaaaaacgcttacgacattttaatctctccgtctctgtaagctcggncgcatcgacgacgctttaatcgttatcggagacatgtctaacgggagattagg

SEQ ID NO: 9045 - DNA, 411 bp, Arabidopsis thaliana
  unsure at all n locations
  Clone ID: LIB24-133-Q1-E1-A4
catggaaactgacaaactattgtttattgcacctctcaagaaggactttttatatacagacatgaaaactgagaacatgacagtagatgagactgatgatactcggaagcaagtgtatgaggaaaaaaaatcacggctagaaaagattataacgcgtcctagtaagtccttatcaaagggatcagattctttcaaaggacccaaagaatctatacttttgcttgggttggcgtgganatgttgtgaatatgatcaaggagtttgatagttancttgggtccaggcagttcattggaaatattatcagatgtncccnttagggggacagaagaggagtggcccagnnttatcccaccgggaaaattcagggaacatcccatntttcacaatagcgttggggaacncataggg

SEQ ID NO: 9046 - DNA, 421 bp, Arabidopsis thaliana
  Clone ID: LIB24-133-Q1-E1-B12
acgcgtgggcgggttgttagcagccggacaaagcagtacgataactggtacatatgctggacagtttataatgggcggttttctgaatctccggcttaagaaatggatgagggcagtaataacaagaagctgtgctattgtgcctacaatgattgtggcaatcgtgttcaatacttctgaagcttccttggatgttttgaatgaatggctcaatgtccttcagtctgtacaaattccttttgctcttctccctcttctaaccttggtatccaaagaagaaattatgggagacttcaagattgggcctattctccagagaatagcttggactgtggctgcacttgtaatgatcatcaatgggtatcttctgttggatttctttgtatcagaaagtcgacgggtttctgtttgggagttacgg

SEQ ID NO: 9047 - DNA, 393 bp, Arabidopsis thaliana
  unsure at all n locations
  Clone ID: LIB24-132-Q1-E1-E5
acgcgtccgcggacgcgtgggaaaaagtatcattatcatcttcatcgaattagatggcaccggtgaagaggagggtgttcaagacaaataatgaaatggcagtggagctggccaaatacacggctgatctttcctccaaattttgcaaagaaagaggagttttcaccgttgttctctccggcggcgacctcatagcctggctctggaaattgttagaagctccttatattgattcaattgagtggtctaagtggcacatcttttgggtcgacgagagggtttgtgcttgggatcatgcggatagcanctanaaactcgcttacgatggttttctctccaaggttccagttcnagctgaaaacatctacgctatcgataanggggctcgggggc

SEQ ID NO: 9048 - DNA, 375 bp, Arabidopsis thaliana
  unsure at all n locations
  Clone ID: LIB24-132-Q1-E1-A9
tcagcggccgagcttggagatgctctcaagaaccttggctcggtcacacacgaggacattaagcgtatgatggcagagattgataccgatggcgatggatacatctcgtaccaagaattcattgatttcgcaagtgccaatcgtggtcttatgaaagacgttgccaagattttctaaagtaaaatgaacagatctaatctatatttatatgaaagggtttgagaattaatcggtgttcaatttgttttgtaatgacaatcatttgatgaagtatgtttttttttctttatgtctttattttcatgtantgggaaagatcntggattantcttgaagtggattgtccgagtgtattggaagaattctcnattcttt

SEQ ID NO: 9049 - DNA, 445 bp, Arabidopsis thaliana
  unsure at all n locations
  Clone ID: LIB24-132-Q1-E1-B1
agnggttccgtacggcctccggaattcccnaggtcgacccacgcntccgcaaagttgccgctagggtcaccggaaaacttcagagttgtgtcttctattgaattctccgggaagtattagtgatggggctttctcttggggaacaacatttcattaaaggtgggattgctcaagatcttcgaactgatggtcggaaaagattgacttaccgtcctatctacgtcgaaaccggtgttattccgcaggctaatggttcagcgagagttagaattggtggaaccgatgtgattgctangtgtaaaggctgaaattgggaggccaagttcacttcaacccgataaaggaaaggttgcagttttcattgattgcantccaacagctgaaccgacatttggggggagaggaggtgaggaattgtcgtctgaacttgctttggctcttcana

SEQ ID NO: 9050 - DNA, 438 bp, Arabidopsis thaliana
  unsure at all n locations
  Clone ID: LIB24-132-Q1-E1-B10
acgcgtccgtagaagagaagagagagcaaaaaacaaagagagagatgggtgagacaaaggcagatttcagggacatgtcaagaattcctaaagttcgagaggggttctacgcgacgaacaatcagtttcagaaagcgggtccaaagggtttcgttcaagtgaaggttctggagaacgacaatctctacgtgcgtgtcgacttgcctggtgttccagacgacgccgttcgctacagagttgacgccgtgagacaaaaggttgtctttttctccggtgaaactctgaacaacggcaaggaaggtgtgcgtcagtactctgggaaccgctgggcttggctgtgactgctgcgagatnacaggcgtggatgccaaaatgaaagatggagttttgaggatgattctcacaagggtcaaggttgtgancaaaggctcaagacaa

SEQ ID NO: 9051 - DNA, 426 bp, Arabidopsis thaliana
  unsure at all n locations
  Clone ID: LIB24-132-Q1-E1-B11
acgcgtccgaaaaaccattgaaacaattatgaattccattaagtttcccatacttgatcgaacaacaaaaaattccgttatttcaactacgttaaatgatctttcaaattggtcaagactttccagcctatggccgcttctttatggtaccagttgttgtttcattgaatttgcctcattaataggctcccgatttgactttgatcgttatgggttagtaccaagatcgagtcctagacaggcggaccttattttaacagcaggtacagtaacaatgaaaatggctccttctttagtgcgattatatgaacanatgcctgaancgaangtatgttattgctatggggagcctgtacaattacagggggggatgttcagtaccggnntcttatagtactgttncgangaagttggataagncaattc

SEQ ID NO: 9052 - DNA, 465 bp, Arabidopsis thaliana
  unsure at all n locations
  Clone ID: LIB24-132-Q1-E1-B5
acgcgtccgactttttccatttcctcgacaaactccnnnnnnnnnnnnnnnnnnnnnnnnnnnnnnnnnnnnnnnnnnnnnncaacgaaacataaatcctctgttttggtttaagagatggagatagaagcaagcagacaacaaaccaccgtaccggtttcagtcggcggtgggaattttccggttggtgggttaagtccgttgagtgaagctatatggagagagaaagctccaacggagtttgtcggagacgtgtcagcgaggcttacgtggcaagatctgacggtgatggtgactatgggagatggtgagactcaaaatgttcttgaaggtcttaccggttacgctgaaccgggatctctcacggctctcatgggcccttccggctccgggaaatctactaagctcgacgcattanctaagcccgnctcgcctgctaangcctttccccccggggaacgntct

SEQ ID NO: 9053 - DNA, 519 bp, Arabidopsis thaliana
  unsure at all n locations
  Clone ID: LIB24-132-Q1-E1-B6
gttacgcctgggncgtaccgagtccggaattcccgggtcgacccacgcgtccgcccacgcgtccgcggacgcgtgggttgttatgcacggctgcattcactgcttttgaactcccaccaaatggagccatcggaacaaaaattctggaattcctctttcattcaaggcctgacttggtcaacattagaagcattgatgaggccgttgtcattggcgctgctctatcattgtcatcttcagcttttgttctacagcttcttgcagagaaaggtgagctccctacaagatttggctcagcaaccttgggaattcttcttctacaggatatagctgttgtgccgttactagtcattcttccagtgttggaaagccaggatattgggtggggaaagcatatggccaatgcttgcagaaagaaagtgcaaaagggctcttgggtgggggttgggatccntcctctcctgggaggaaaagttcttcctccgttacaatttccganggttgttgcaganacaaaga

SEQ ID NO: 9054 - DNA, 398 bp, Arabidopsis thaliana
  unsure at all n locations
  Clone ID: LIB24-132-Q1-E1-B9
caaggcaaaaaatccaaaattgagttttttttttcttcattttttacaatggtgtctcggtttcgtcttgctctagaggctgttttgggttcgagacgacgtaagaannnnnnnnnnnnnnnnnnnnnnnnnnnnnnnnnnnnnnnnaagaagaagaagaaaggtttctctgtaaaccctaaagattataaacttatggaagaagttggatatggtgctagtgctgttgttcatcgtgctatttatcttcctactaatgaagttgttgctatcaagtctttggatctcgatcgctgcaatagtaatctggatgatataaggaggggaggctcagactatgactttgatagaccatcccgaatgttataaagtccgntttgttccgtttgctgttgatn

SEQ ID NO: 9055 - DNA, 463 bp, Arabidopsis thaliana
  unsure at all n locations
  Clone ID: LIB24-132-Q1-E1-C8
acgcgtccgcccacgcgtccgcccacgcgtccgcggacgcgtgggaaagtttataactttctgagattttgagagaagcatcatcatcaaccaattgggtttaaatcagaagagaagcaatgatctccggcgacacattatcagctaaaaaacctaaatcagttccacaagaagaagaccaagacccaccaagccaatcaatcgcacttctcgacaatcacacagattcctccggttctgattcttccactagaagcatctcaagctgcttcatcttcacatctctacttctcgtcacctgcatcgctctatccgccgcttcagctttcgccttcctcttcttctcttctcaaaaacctgtcctttccttaaaccaaatctcaaaggtcancagctttcgacaagattcgtagctcgtccgctcangaaatcgacaagnctggtggtccttttgatttaacaa

SEQ ID NO: 9056 - DNA, 411 bp, Arabidopsis thaliana
  Clone ID: LIB24-132-Q1-E1-C9
tctctctcgccccattctctatcataatgacaggtgccacaccggaaaaccgaacggccccgtcgccaccaccggtgaaacatgtgccggagtcagttctgccggctaaaccaccaaagaggaacaattatgcattcgcgtgtgctatcttagcttccatgacttctatcctccttggttatgatataggagtgatgagtggagcaatgatttatataaagagagatttgaagattaatgatttacaaatcgggattctcgctggaagcctcaacatctattcacttataggatcttgcgccgccggaagaacctctgactggattggtcggcgttacactatcgtgttggctggagccatattcttcgccggagctatccttatgggattgtcccctaactacgctttcc

SEQ ID NO: 9057 - DNA, 398 bp, Arabidopsis thaliana
  unsure at all n locations
  Clone ID: LIB24-132-Q1-E1-D12
cttctcattggccgccatggtgaantactctcaagagcccgataatatcaccaaatcttgcaaggcgagaggagccgatctcagggtccacttcaagaacactagagaaacagcgcacnccataaggaagctaccattgaacaaggccaaaaggtacttggaagatgtcatagctcacaancaagctatccccttcacccgtttctgtcgtggtgttggtcgtaccgctcangcaaagaacaggcattcgaacggacaaggtcgctggcctgctaaatctgctcaattcgttcttgatcttctcangaatgctgagaggcaatgctgaagtcaaaggtttggatgtcgatgcccttttcatttctcatatccagggttgnnccanncagnanagncag

SEQ ID NO: 9058 - DNA, 471 bp, Arabidopsis thaliana
  unsure at all n locations
  Clone ID: LIB24-132-Q1-E1-D7
acgcgtccggtctttaactcaggagaagaaatctcgaccccagaaagagtcccatagaaaacccgatggcatttctcgcgaggtttatgcgcttaccgggggcgttgcacctcttatgccttcaattgatttaaagcgccgtcctcctgcagatgagaaggttgcttggaaatggctttccttcacaaattctgctaggaaagatgatttgcagctttaccattgggttagagtggttaatgatgttccaccaacaggtgactattcctttgccaaatataacaagtcagttgatattttgaaatacacagacgaggagtatgagaatcatttaacggattctgtgtggaccaaggaagagacagatcagttgtttgaattctgtcaaaattttgatctccgctttggtggtaaaagctgatngaattccaagtatcacggaccggttggaggaattgaagattcgntaca

SEQ ID NO: 9059 - DNA, 429 bp, Arabidopsis thaliana
  unsure at all n locations
  Clone ID: LIB24-132-Q1-E1-D8
acgcgtccggcaaatcttccttagccattgaacatctgaacaagtatcttgaagtattcatggctgatcatgatgcctggagagaacttgcagaaatttatgtttccttgcaaatgtacaagcaagcagctttctgctacgaggagctcatactaactcagcctactcttccattgtaccacttagcatatgccgatgttctctacacaataggtggactanaaaacctcatcgcagcangaaagtactatgcagcaactatagacttgacaggtggtaaaagcacangagcacttctcggaatatgcttgtgtggatcagcaatcgcacangatctcaaanggcagggaanaagagnggacanggggcatgggtggaccaggagcttcaagtccnttgggtgcanctgcattggggcggagagntgca

SEQ ID NO: 9060 - DNA, 431 bp, Arabidopsis thaliana
  unsure at all n locations
  Clone ID: LIB24-132-Q1-E1-E3
aaaagnnnnnnnnnnnnnnnnnnnnnnnnnnnnnnnnnnnnnnnnnnnnnnnnnnnnnnnnnnnnnnnnnnnnnnnnnnnnnnnnnnnnnnnnnnnnnnnnnnnnnnnngtaacgttagagaaggtgattcccctccgaaataaaatataaaaacccttcgatttttggaagcaaacatttctctccgtcgcgaacctaatcgacgactattgttgatcaagaagaaggttttaaagttgaaagatcatggatatcccagagaagatggagatggatcaactgaatcaagggtcgagctcatctcttaccaataagcgaaaaagaggtcgtcctcgcatagacgaangncaagactcaggcanccagtgaacccaacctgttgangagaaaccgagangtccagttgnttccggggntggggtggggggtc

SEQ ID NO: 9061 - DNA, 425 bp, Arabidopsis thaliana
  unsure at all n locations
  Clone ID: LIB24-132-Q1-E1-A6
cagaagcatctcctggtctacggtcgctaagtttggatgacttcattcagtctaaagctaaggtgagcccatctgtggcgtacgatgcgactacgatgaatgagctgagaaaatggaacgagcaatatggtgaaggaggcagcaggacaaagtctccttttggcttctgatgaatttttttttgttttggtagatcaaagtgttttcatctgtcttttactttgtgatcatagtgtaactctcagtgctatagcctttttagtatcattttatttgatgtaaactatatataatggaacacgaaacactgtacgaccacatacaaaattcttcactataacataatganttccttgtattaaaannngngnnngaganaaaagggcggccgccnctanaggatncaangcttaacgttacgcgtg

SEQ ID NO: 9062 - DNA, 468 bp, Arabidopsis thaliana
  unsure at all n locations
  Clone ID: LIB24-130-Q1-E1-D2
acgcgtccgcgttttttggcttctgggttttttatttcaagtgttcaatttccgaattaggtaagaaagttaggttttgagatctgtgcgaattgtgagagatgtccacgccgttgaaggtgtggcaacgttggtctacaccgacgaaagcgacaaatccagattcgaatggctctagtcatggaaccggtttagacatggtgaccccagtttcgggtcgggttagtgagatccagttcgatgacccaagaatattgcctgagaaaatttcagagcttgaaaaagagcttttcgaatatcaacatagtatgggtcntcttctgattgagaaaaaggagtggaagttcccagtatgaagcgcttcaacaggcttttgaagaggtgaatgagtgtctannagcanggaacgtaatgcgcatcctgantgctanaggcagattttgaaaagcgggaaaganggttttgagg

SEQ ID NO: 9063 - DNA, 464 bp, Arabidopsis thaliana
  unsure at all n locations
  Clone ID: LIB24-130-Q1-E1-D4
acgcgtccgcancgaatgaagctggtacgtttgcaanaaacgggcttgtggaacaaataaccatgacttgggacaaatctgactatttttggtatataacagacattacaatcggttccggtgagacatttttgaagactggtgattcacctcttcttacagttatgtcaagctggacatgctcttcatgtgtttgtcaatggtcagctttcaggaactgcttatggaggacttgaccacccanaactaacctttagccagaagatcanactacatgcacgtgtcaacaagattgctcttctgaagtgttgcagtgggtctcccgaacgttggtacacattttgaacagtggaatanaggagttcttggtccggtcacattgaagggagtaaaccatgaacatgggacatgtcananntngagatgnncnagnanattggtgtaaagggtgaagccctgagtct

SEQ ID NO: 9064 - DNA, 451 bp, Arabidopsis thaliana
  unsure at all n locations
  Clone ID: LIB24-130-Q1-E1-D7
aagattctttgtctctttctctgtcgcattgatttgtaaaaaagtgtggcagagagaaaccatggctatggcggaaatggcaacgaagtcttcactatctgcaaaactcactcttccttcttcttctactaagaagacactgagtctgagacaagtctctgtttcacttccaacatcaacttcaatctctctgttatctctctttgcatctcctcctcatgaagctaaagctgctgtttccattcccanggancaaatcgtctcctctctcactgaagtggagaaaacaatcaaccaagttcaagaaactggttctagtgtatttgatgcaacgcagcgtgtgtnccaagtagtagngagatgctcttaaacnagctttggacactgcttacccantgcaaggcaagctggtgaagaagctgtgaagcttgcgtctcctgcggttctcngg

SEQ ID NO: 9065 - DNA, 434 bp, Arabidopsis thaliana
  unsure at all n locations
  Clone ID: LIB24-130-Q1-E1-D9
acgcgtccgcttcttcctcgcttaaacccattaattcaatttcttcanagccagcaataagatctggcaaattaaaccattccactatgcttcgtatagttcaaatcacgcttctttgtttcgttctcgccgccgggatctcgatctccgccgtgatcgccgagaatgaatctatagangagatccttctagcgaatggattacctttggggctatttcctaaaggcgtgaaaggatttaccgttaatggcgaaacgggacggttctcggtttatttgnngtcagtcaggcnaggctaagtatgagacangagctgcattacgatgaagattgtttcggggaacgataggttatgccncaaatcanggatttancgggaatctcagngcaagagctgttcntgtgggtacaggtgaaaggaatccngagtcgac

SEQ ID NO: 9066 - DNA, 435 bp, Arabidopsis thaliana
  unsure at all n locations
  Clone ID: LIB24-130-Q1-E1-E10
gaccaaatatctgttggacaagcttgttgtgctgaagcttaatggaggtttgggaaccacaatgggatgcactggtccaaaatcggttattgaacgttcgtgatggtttgacatttcttgacctgattgttatccagattgagaatctcaacaacaagtataactgcaaggttcctttggttcttangaactcattcaatanacatgatgacacacaaaagattgtggaaaaatacaccaagtcaaatgttgatattcacacttttaatcagagcangtatcctcgtgttgttgctgatgagtttgtgccgtggccangcaaaggaangactgacnanganggatggtancgtcccggtcacggtgatgtantcncatctctcatgaacagtggcangcttgaggcgttcgtatcggngggtaatgggagtatgt

SEQ ID NO: 9067 - DNA, 451 bp, Arabidopsis thaliana
  unsure at all n locations
  Clone ID: LIB24-130-Q1-E1-E2
gggctgtccctgagctgacccaacagatgtgggattcaaagaacatgatgtgcgcagcatgacccgcgccacgggcggtacctaactgcctcggccatgttccgtggcaagatgagcacaaaagaagtggacgagcanatgataaacgtacatgaacaaaaactcttcctactttgtggaatggattccaaacaacgtgaagtcaagcgtctgtgacatagctccccgaggtctctcaatggcatcgacatttattgggaattccacatcgatccaagagatgtttaggcgggtgagcgagcagttcactgctatgttcaggaggaaagctttcttgcattggtacacaggtgaaggaatggacgagatggagtttactgaagctgagagcancatgaacgatctagtctcaagagtacagcaataccangaccaactgcaagatggacga

SEQ ID NO: 9068 - DNA, 425 bp, Arabidopsis thaliana
  unsure at all n locations
  Clone ID: LIB24-130-Q1-E1-E4
tcgttcgtttttttcccggtaaatccggcgagaaaaagttcacattgaatctacgagaaaatttccttccatttcactccacgagttttcacctctcttgttcaatctctcaacgtctctccctcgtttctcgttttcgctttttccccttttcctcttctattttaccggaatccgagaatttttgatcagatctagtttcagaaataggttagttccaacaatgttgacggaacgaggaaggcgaatttctggtttcaatgggagtttcgaatttagcaatagaaaattccgtggttatggattcgtagatcgatctcaaggtttccatgaaaggagtccttcaagatcatgttctgtttcgaaaatccttcgnatcangccaccaacctcgtctccaccgtcttcggcttcganatgcgctg

SEQ ID NO: 9069 - DNA, 440 bp, Arabidopsis thaliana
  unsure at all n locations
  Clone ID: LIB24-130-Q1-E1-E7
acgcgtccgggcgtgctcgcctaacacagatggggaaatatttcacagcatacaggattgatcatatattgggattcttcagaatctgggagcttccagctcatgctatgactggtttagtggggaagttccgtccatctattcctttaagtcaggaagagttggaaaaggagggaatatgggattttgaccgcttaagcaagccctatatccagaagaagtttcttgaggagaaatttggagatttttggccttttattgcatcaaactttcttaatgaaactcagaaggacatgtatgagttcaaggaggactgcaacacagagaagaagattgtagcaaagctgaagtcattggctgagaagtctttgttgctagaaaatgaggacaaagttcgacgtgatgtcnttgacattttacggaatgttgttctgatnaaa

SEQ ID NO: 9070 - DNA, 415 bp, Arabidopsis thaliana
  unsure at all n locations
  Clone ID: LIB24-130-Q1-E1-E9
tgaagcattcgaagtcggcacagtcccattcaattccgatggttggggaccaccagatgcttccgacacttcctccaccagcgtcgcggcggcgaatctcctcccaaacgtccccttcgcttccttctcacgatccgaaaaactcggacgcgttgctgattggactcgagctctctcaaatccatcagctcgtcctcacaccggatccanatcagatccatcagcgatcttcgatttctcaagcttttgcagtagatgaatgatttggtctaacanactcaggtggnaacgccgaccangacgccgctttccgattagncgacggaaaancaccgccgcgtcctaanttcggacctaaatggagattcaatcaagaccatanncganatcagcttcctcaacgtcggggacngaa

SEQ ID NO: 9071 - DNA, 465 bp, Arabidopsis thaliana
  Clone ID: LIB24-130-Q1-E1-F1
acgcgtccgcttgaaaatccgagacatccacaatgccgccaaagttggatccgagtcagatcgttgacgtgtacgtccgagtaaccgggggagaagtcggagcagcgagttctctagctcccaaaatcggtccgctaggtctcgcaccaaagaagatcggagaagatatcgcgaaagaaaccgcaaaggaatggaaaggattacgtgtaaccgtcaagctcacagtgcagaatcgtcaggcgaaagtgacggtggttccatcagcagcagcactcgtcatcaaggcgttgaaagagccggagagagataggaagaaggtgaagaacattaagcataacgggaacatctcgtttgatgatgtgactgagattgctaggatcatgagacctagatctattgctaaggaattgagtggaacagtgaagggagattcctgggaactgtgtgtccgttgggtgtactgtg

SEQ ID NO: 9072 - DNA, 444 bp, Arabidopsis thaliana
  unsure at all n locations
  Clone ID: LIB24-130-Q1-E1-F3
gggcggacgcgtgggcgttattatctcatcttggtccgaaaactatggagatccatctgaaaacaaagaccttcttacccagttcaagaacgctgcatctgccattgcttctgatgagaagatcgcattactcggtgctattcagtctctgtttgaagggtccatgtacacctttgtgtttctctggactcctgctttgagcccaaacgaagaggacattccacatggtttcatatttgcaacattcatgctggcttcgatgcttggtagctccattgcctctcgtttgttggcacattcgtctccaaaagtagagagctatatgcagatcgtatttgtgatatcttctgctgctctaatgcttcctgttgtaacangcttcttggtggcggccctcaggtgtaaaaggtggaagcatatncttcnctggatgcattcagttaa

SEQ ID NO: 9073 - DNA, 432 bp, Arabidopsis thaliana
  unsure at all n locations
  Clone ID: LIB24-130-Q1-E1-F5
ctcttctctctaaaatatttcagagatgagagaagcatctcctttggccgaccaaatttcttctagttttgctgtcccaatatataatcgggttttatgtccagcatctccgacttccggagttgtgatggctggccctctgtttggcatcatccggcttctataaggagcgttggccagcttcgtcgttttttctagtcgtccggtgtatgaggttcgtatcacgtttaatattcgctgtttggttattataaatccagtagatccggttatgtctctacttttgttcaattatttcgaggattaatagttctgctccggtggcctctaacaaggttatgtgttgatagctttgttggatctangatgtntctttcgatttagttgtcangacagttctgncgcctaagttagctggttaaaagccantag

SEQ ID NO: 9074 - DNA, 411 bp, Arabidopsis thaliana
  unsure at all n locations
  Clone ID: LIB24-130-Q1-E1-F6
caaggttcgtgtttgcatcttatgaagactgcgtattcagacggatttgaagagtctgctatatgttgtgtattaaaagaaactcttaaagctcttgattatcttcatanacaaggccatatccatcgggatgttaaggctggaaacatacttcttgatgacaatggtgagattaagcttggcgattttggtgtctctgcttgcttgtttgataacggtgataggcaacgtgctagaaacacatttgttggtactccttgctggatggcaccggaagttttgcanccgggaaatggatacaattccaaggctgatatctggtcanttggtataacagcacntgaattgggcccatggtcatgcacctttcncaaantatcctcccatgaaggtgctcctaatgacnattca

SEQ ID NO: 9075 - DNA, 470 bp, Arabidopsis thaliana
  unsure at all n locations
  Clone ID: LIB24-130-Q1-E1-F7
acgcgtccggttgaatcatggtttccgaaacaaccaaatcttctccacttcactttgttctcttccctttcatggctcaaggccacatgattcccatggttgatattgcaaggctcttggctcagcgtggtgtgatcataacaattgtcacgacgcctcacaatgcagcgaggttcaagaatgtcctaaaccgtgccattgagtctggcttgcccatcaacttagtgcaagtcaagtttccatatctagaagctggtttgcaagaaggacangagaatatcgattctcttgacacaatgggagcggatgatacctttctttaanagcgggttaactttctcgaangaancantccagaagctcattgaagaagatgaancctcgancaagctgtcnaaattccgatttttggtttgccntaaacaagcaaaaacngccaggangtttcantaatcccaaaaggatccnct

SEQ ID NO: 9076 - DNA, 428 bp, Arabidopsis thaliana
  unsure at all n locations
  Clone ID: LIB24-130-Q1-E1-D11
acctaaaaatcgcaanagaagaanaattcggatcaaaattgtcttcaagcatcatggatccatacagggttcgtccttcaagcgctcatgattcccctttcttcactacaaactcgggtgctcctgtctggaacaacaactcttctttgactgtcggaactcgaggtccaatccttctggaggactatcatctgcttgaganactcgctaactttgacagggagcggattcctgagagggttgttcatgccaggggagccagtgcgaagggtttctttgaagtcactcatganattacccagcttacttctgctgattttcttcgaggacctgngtgttcagactcctgttatcgttcgtttcgcaantgtcatccangagcgtggnagtcccgaggactcncagagcatgcgcgtnggttttgcggt

SEQ ID NO: 9077 - DNA, 418 bp, Arabidopsis thaliana
  unsure at all n locations
  Clone ID: LIB24-129-Q1-E1-G9
catgactatcccaccgaggatggtagtgcggtaagagactacatccatgtgatggatttagcagatggccatatcgctgcgctcaggaagctatttgctgatccaaagattggttgtactgcttacaatctagggactggtcaaggaacgtctgtgttagaaatggttgcagcttttgaaaaagcttccggcaagaaaatcccgattaagctctgtccgagaaggtcaggagatgcaacagcagtttatgcttcaacagagaaggctgagaaagaacttggctggaaggcaaaatatgngagtggatgagatgtgcagaggatcagtggaaatgggcanacaataatccatggggttaccagaataagcnttgaatttacttcctttgnttggagttaccatttctaattactcaant

SEQ ID NO: 9078 - DNA, 415 bp, Arabidopsis thaliana
  unsure at all n locations
  Clone ID: LIB24-129-Q1-E1-H10
ggcgaaaaaagaagatgaatatcgttggattgagcaaacgtttcttctccgatcgtcgctctcttcacgggatcaacaatgctctcttganaacagtgttcaccggtcggaaaccgattctcggattctccggccgatcgattcacgagctacgcaaaactgggaatttcgtaatccctcgtgttttctccgtgtcgcgaaatctaacgacgaaggcttcgtcttcttcttcgaaacaanctgcgtttctacgatggtatttganaaagctcgaatcacatccttttangactaagagtatcantacttctgtcatctanatggctgcagatctcanttctcagangatcacaatggaagccaactgggntcctttgacttgatnagaacagcggagaatggcnaacttttgggt

SEQ ID NO: 9079 - DNA, 372 bp, Arabidopsis thaliana
  unsure at all n locations
  Clone ID: LIB24-129-Q1-E1-H9
ctaaaagcagaggctggtgccaaagttcagaagttcactgaatgggctctcaaatgtataggtttccactcccgatgccagggggcaaaggatagagttagccaaaattcggctgctgaaattgaactacaactttctgctttcaagatgttcttagatctagcaggaaaccatctctcaggaagagacttcactgaggcctttgatgcancttgtttcccgctcactctgttctccaactcgtttgatcctggctgggcatctgggatgtcaagctactgttatacagggactgntcggtatgcntgttgaangtggcgcaagataangtgaaccaatgtttcccntgaagcttcacgttttgggnagtac

SEQ ID NO: 9080 - DNA, 491 bp, Arabidopsis thaliana
  unsure at all n locations
  Clone ID: LIB24-130-Q1-E1-A3
ctgcncgtaccggactcgaggccgacccacgcgtcccnnnccttanaatagccggagagaagaaggcgagaagaggagcgacaagggcgaagctgcagaattcttcggtaattttcagattcggttgaataatggcggctgcggcttttgggcagttaaatctagaggagcctccaccgatttggggatctcgtagtgtcgattgcttcgagaagcttgaacagattggtgaaggaacttacggccaagtgtacatggctaaagaaattaaaactggtgaaatcntggctctgaaaaagatccgtatggacaatgaaagagaagggtttccgataaccgctatccgggagatcaaaattctgaagaagctgcatcatgaaaatgtcatccatttgaaagaagattgttacttctccaaggtcgagatagggatgatcaaggaaagccagataatancnagtacaagggtggnatctacatggtccttgagt

SEQ ID NO: 9081 - DNA, 432 bp, Arabidopsis thaliana
  unsure at all n locations
  Clone ID: LIB24-130-Q1-E1-A4
caagacgacaagtgatgaaaagatagagacaaagaaaggcttcaagtttgttgataactgctgtcnaaagagttcgttcccttgagagattctgactctgacanaagagttcccccaaccggaagagaaattcaaagatcatgaaaacggtgaaagatgcgacgacgaccaggaattggaggattacaaaaggccgcanctgctagggatcagtaccggttactaggagaaaatgtagccaagttacggactgatatgatgaaagaacagctctccacgttccgttcccagcttgaagagttcgctcgtaaacacaagaatcacattcgtaagaatcctgccttcagggctcagttccatganatgtgtgcnaacattggtgtggatccncttgcttctaanaagggtttctgggctgaacccccntgggaa

SEQ ID NO: 9082 - DNA, 435 bp, Arabidopsis thaliana
  unsure at all n locations
  Clone ID: LIB24-130-Q1-E1-B11
ttggtgatttatcgttaatccatggcggctccgtcgccgtcttcaccaccaaacctcctctctcctccaccattccgatctcccgaagcttcttactttctccgaacttgttcaaatttctctcaattgaaacaaattcacaccaaaatcatcaaacacaatctcaccaacgatcagttactagttcgtcagctcataagtgtttcttcntccttcggagaaacccaatacgcttctctcgtctttaatcaacttcantctccttcnacttttacctggaaccttatgatangatctctctctgttaancanaaacctcgtgaagctcttcttctctttanccttangatgatcgctcatcaatcccagtttgnnagattcacnttcncttttgttancanagcttgtctccgcttcntcgtcggttcgtttagg

SEQ ID NO: 9083 - DNA, 416 bp, Arabidopsis thaliana
  unsure at all n locations
  Clone ID: LIB24-130-Q1-E1-B12
taatattcgttggatttgttggtttaagggatcctccaaggaaagaggtgcgtcaagccattgcagattgcagaacagcaggtattcgggtcatggtcattactggagacaacaagagcacagcggaagcgatctgccgtgaaattggcgtatttgaagcagatgaacatatctcctcaagaagcttgacgggaatagaatttatggatgttcaagatcagaagaatcatctacgacagactggagggctcctgttctcaagggctgaancaaaacacanncaagagattgtcaggttactgaaagaanatgggagaantggttgccatgactggagacgggagtcaatgatgctcctgctctgaanttggctgagattggtgtggcnatggncatttccggcacagngggtggca

SEQ ID NO: 9084 - DNA, 495 bp, Arabidopsis thaliana
  unsure at all n locations
  Clone ID: LIB24-130-Q1-E1-B5
ngcctggccgtaccggtccggaattcccgggtcgacccacgcgtccggaagattccagccagtgaaagtacctgaacctaccgtggatgaaactattcagatccttaagggtctgcgagagcgatatgaaattcaccacaagcttcgttacacagacgaatctttagtagcagctgcacagttgtcataccagtatataagtgatcgtttccttcctgacaaggcaattgacttgattgatgaagctggttctcgggttcgacttcgtcatgcacaggtccctgaggaagctagggagcttgagaaggagcttaggcagataacaaaggagaagaatgaagctgtccgtggccaggactttgagaaggctgggacacttcgggatagagaaattgaactcaagagctgaggtatctgcaatccaagcgaaaggcaaggagatgaagcanagcagaggagtgngaccgggtgaaggaaggcccnatggtcacggag

SEQ ID NO: 9085 - DNA, 414 bp, Arabidopsis thaliana
  unsure at all n locations
  Clone ID: LIB24-130-Q1-E1-B8
aattgtcggtgaatcaacgtttttctgttacacatatcaatcaannnnnnnnnnnnnnnnnnnnnnnnnnnnnnnnnnnnnnnnnnnnnnnnnnnnnnnnnnnnnnnnnnnnnnnnnnnnnnnnnnnnnagagttttgtcagatctcgccgggaaattagcaatggcgttttagtctgtttacctgtgaagcttttgcgtaaacgctggattcttctcaaatctctctcacctgatctcttattagattccgaggatggcgctaaagcgagggctatctggagttaaccggattagaggaagtggtggtggatctcgatctgtgcttgtgcttctcatatttttctgtgtttttgcacctctttgcttctntgttggccgaggagtgtanatcgattcctcagatgantattca

SEQ ID NO: 9086 - DNA, 411 bp, Arabidopsis thaliana
  unsure at all n locations
  Clone ID: LIB24-130-Q1-E1-C10
ggaattgtttttgcagaaagtctctcatctgaactcagaaaatctccgagttcgtatatcttctccgtttgagcaatggcgttggtcatgcacacatacaagggaaacaaaggtgccaatanggcacttattgctgcagagtatgcgggtgtgaagatcgaggagtccgcagactttcagatgggcgtcactaacaagtcacntgagttccttaagatgaaccctattggaaaggttcctgtgcttgagactcctgaaggtcccatatttgaggagcantgccattgcccgatatgtgagccgtaagaatggtgacaactctttgantggatcctcccttagtgaanangctcacantgagcaatggatcganttctcctcattggngattgatgctaacangttgaaatg

SEQ ID NO: 9087 - DNA, 460 bp, Arabidopsis thaliana
  unsure at all n locations
  Clone ID: LIB24-130-Q1-E1-C3
acgcgtccgcttcactaacgcagagaccanaatctctctcatttcgccatagctgagagcttcttctactttcccttagcttcttttttccttcatttttgttctacccttgcgantctctgaaatgaaccctcaagctaatgaccggaaggagtttcagggagattgttcggcgacgggagatctcacggcaaagcacgattcagctggaggaaacggaggtggaggtgctangtataagctgatgtcaccggccaagcttccgatctcnaggtcgactgatatcacgattcctcctgggttgagtccgacttcgtttttggaatctcctgttttcatctccaacatcaagccagaaccttcccctactactggttctttgttcaagcctcgaccagtgcacatttctgctagctcaaagttcttanacangcanggggttccatcagaacacctttag

SEQ ID NO: 9088 - DNA, 457 bp, Arabidopsis thaliana
  Clone ID: LIB24-130-Q1-E1-C7
acgcgtccgggtttgtgaaggttttttctagggtttcgaaaagatgccggcgacagcaggaagagtgcgtatgcccgcaaacaatcgggtgcatagtagtgcagcgcttcagactcatggaatatcgcactgggacgaaacctcacacgtctcgaaactctatggttcgattactccgccacgaagtccgattactatctctactgtcacaacattttgttcttgttcctcgtcttctctctcgttcctctccctctcgttttcgtcgaattggctcgatctgcttctggtttgtttaatcggtataagatccagcctaaggttaattactctttatctgatatgttcaaatgttacaaagacgtcatgacgatgtttatcctcgtcgttggtccattgcaactcgtttcttatccttcgattcaagatgattgagatacgatctgggattaccatt

SEQ ID NO: 9089 - DNA, 465 bp, Arabidopsis thaliana
  unsure at all n locations
  Clone ID: LIB24-130-Q1-E1-C8
acgcgtccgcgaatcantcactctctcttctttagcgtttttattttgtcttcctcgttttcttctacctttttatattttctctcttttcagttttctctagaaaaaaacactagtaatcagtttgcgtttgataaatatttgatgtggcaaaactcttgtggatcttgatgttcaaacattcatgtctccggtgattagtgaaatccttagatcnggtttaactatagactcgtcttaatcatagtacttaattttctctgtgtgttttaatangaataataaaactgaaatgggatcttccacaagtggaaattgctcgtcggtttcaaccantggtttanctaantccggttcagannctgatctccggcancgtgntcnaatcgangancggaagaganaggagggananaggcnngcaggagaatctggcgaaggagggtcgagggatgagnggaaggc

SEQ ID NO: 9090 - DNA, 426 bp, Arabidopsis thaliana
  unsure at all n locations
  Clone ID: LIB24-130-Q1-E1-D10
agacatggttacgctctcaggtggccacaccatagggttctctcactgttcttctttcgagtcccgtcttcaaaacttcagcaaattccatgacatagatccttcgatgaactatgcgttcgcgcaaaccttgaaaaagaaatgcccgagaacatctaaccgaggcaagaacgcagggacagtcttggactctacttcctcggttttcgacaatgtttactacaagcaaattttgtccgggaaaggagtgtttgggtctgatcaggcacntctaggcgattcccggactaagtggatcgttgagacgtttgctcanggaccaaaangctttcttcagangagtttgcagcttccatggtaaaacttgggaactttggagtcaaagcngactggacaaggttangagttaacaactcgcttcgtcaa

SEQ ID NO: 9091 - DNA, 396 bp, Arabidopsis thaliana
  unsure at all n locations
  Clone ID: LIB24-129-Q1-E1-G8
ctggtccaccgttcaatgcagccagttactactacccaaaaggcatttactacgtaatggattacttcaaaaccacttacggtgaccctttaatatatgtcactgagaatggatttagtaccccaggtgatganggactttgagaaggctactgccgattanaagcggnttgagttatctctgtagtcatctctgtttcctcaagtaaagtcatcanggagaagaatgtcaaccgtgaaaggatattttgcttggncncttggggataattncganttctgtaacgggntttaccgtcaagattcggacctaanttacgtngagtttcgcaanatancactgggngatannggacctcaagagcaatcngggnanattggttccaagaatttcaga

SEQ ID NO: 9092 - DNA, 429 bp, Arabidopsis thaliana
  unsure at all n locations
  Clone ID: LIB24-129-Q1-E1-C2
acgcgtccgggttcgctgccgccgaaatttccgatcaaccttaataaggaatatgacgtctctgtcggtaaatgatcggaaggattttgtanatgggcagatgaagtactggcgtcaaatanccgaatccgatggtttcganatcgatgatgttccagtaccaanaggaaccaagagctggactgtggtctgtcgactgtaancacccacgttttaggcttanggcttgtttacccaagatttatgctanggttggtcntcaccgttacaatttgctcanggggacaaacttcgagcaccttgagttacnaaaatacaacgagtcaangaactgtgtgtgntcnnacnatagaacttcggttgcangtagatctttctaggccanttgcagaanaacttttcaanatncgnagttgatgaaaaaaagtt

SEQ ID NO: 9093 - DNA, 430 bp, Arabidopsis thaliana
  unsure at all n locations
  Clone ID: LIB24-129-Q1-E1-C8
acgcgtccgcataaagttctttctcttactcatctccgccgccggcagtaaaaatatcacatcgttagggtttcacggcggagattcaagttctttgacctaggaagctttcactatcaccggagactatttcaatggcaaccatggctaggtcgtttctgcaggcgatatcgaaggatgaggcggtggctcctccgcttagagttgttcagatcgaaggactggctgtactaaagataatcaaacactgcaaggagttttcaccgacccttgtcactggacagcttcttggacttgatgttggtagcgtcctcgaagttaccaattgttttcctttcccgggtcaggnnnnnnnnnnnnnnnnnnnnnnnnnnnnnnnnnnnnnnnnnnnnnnnnnnnnnnnnnnnnnnnnnngaaggttaatgtttac

SEQ ID NO: 9094 - DNA, 432 bp, Arabidopsis thaliana
  unsure at all n locations
  Clone ID: LIB24-129-Q1-E1-C9
ccgcccacgcgtccggtttactgcaagaaggaaatttgggttgctcaagcaatgtagaagcgatgaaaattttgatggaagttttttcggaaacagaangtttgaatgtgagataattttcaatttcaggggatttggatgggtttttgccggaacgttctcttcttccgtggatgcacgccaaatgttcggcgaaatgacnaaaagaagcttgtaccagtggaatactcttcttaacagtttanccagagatgaaacaatgggaagaagtcttgtatcactttagtcatatgtttcgcgatgaagaaaagcctganaatttcacncttccagttgctcncaaggcctgcgggganctgcgggaagttaattaanggtgaaatgattcatgggttcctgaagaaagatntcactcctggggtcngacccttt

SEQ ID NO: 9095 - DNA, 382 bp, Arabidopsis thaliana
  unsure at all n locations
  Clone ID: LIB24-129-Q1-E1-D6
acgcgtccggtcagtttgactaataaatttcagatggctgtttctctgacagcttgtaatcgttggctattgacaggaacaccaacccctaacacaccaaatagccagctttcacatatccaacctcttttaaagtttcttcacgaggaagtctatggagaaaatccaaagttttgggaagctggcatccttagaccatttgaagcagaaatggaggagggtcgtttgcgtttacttcagctgcttcangagatgcatgataagctctangaaagaaagatctgcagatgattcctccgtgtatcaagaaggtgacataccttaatttccttccagggcatgnaagaagctacaatgnnctagtgggagacagttangcgta

SEQ ID NO: 9096 - DNA, 433 bp, Arabidopsis thaliana
  Clone ID: LIB24-129-Q1-E1-D7
acgcgtccggtttatcagtgcaacagatacaatcaaaaggatgaagagtaatattttcgggatggaaggcaatatggaccaagcttcttcagaagataatgtcagtacaatcaaagagtgatggggtcaacacttctcttttcgaaaagagagaacatatagagaaactgcaccggactcgtaatcttcttcgtaaagttcagttcatctatgatttacctgcaagactgcaaaaatgtatcaagtcagaagcctatggcgatgctgtcaggttctatactggagcaatgccaattctcaaggtatatgggcgatacatcattccaagactgcaggcgagcttccgaagaagctatagaaattatcataaagaacttgcagacgaagctattttcagattcagaatccatacaggcgagaagctgaagctgca

SEQ ID NO: 9097 - DNA, 449 bp, Arabidopsis thaliana
  unsure at all n locations
  Clone ID: LIB24-129-Q1-E1-E10
acgcgtccggcatatgaaagagaatatggaaacacataaaaaattaagagttgtcattctttgaatccccgcnnnnnnnnnnnnnnnnnnnnnnnnnnnnnnnnnnnnnnnnnnnnnnnnnnnnnnnnnnnnnnnnnnnnnnnnnnnnctttnnnnnnnnnnnnnnnnnnnnnnnnnnnnnnnnnnnnnnnnnnnnnnnnnnnnnnnnnnnnnnnnnnnnnnnnnnnnnnnnnnnnnnnnnnnnnnnnnnnnnngagttcggctacgaaccagagtaaacaagggaaacccaagaacaanaacaatcctttttacagcaatgaatacgntacaacagataggatctgggagctggttttaagctctctgtgctgaaagatcctacaggacatgatatatccttgcantatgatcttgggcgtgaggttggncgaggcgatttggggata

SEQ ID NO: 9098 - DNA, 428 bp, Arabidopsis thaliana
  unsure at all n locations
  Clone ID: LIB24-129-Q1-E1-E2
aacagcttcgtattcgctcatcttcttcgctttctgatcttggaaatcgcaggcattgttcgtctactcgaggatttcaattttggtcatnnnnnnnnnnnnnnnnnnnnnnnnnnnnnnnnnnnnnnnnnnnnnnnnnnnnnnnnnnnnnnnnnnnnnnnnnnnnaccggcggttcgtatttccgacgggaatctaatcatcanaaaccggacgattctaaccggtgtaccagataatgtcatcacgacgtcagcatcggaagctggaccggtanaaggagtcttcgtcggngctgtatttaacaaggaangagaagtaaacacatcgtaccgatcggtacgcttcggcaattcccggnttatgtccntgtttccggtttaagctctggtggatgggccaagagaatgggagaaatgggccgagata

SEQ ID NO: 9099 - DNA, 431 bp, Arabidopsis thaliana
  unsure at all n locations
  Clone ID: LIB24-129-Q1-E1-E4
aaaccancgagttcctcctcaagatccgcgaaatggctacacgtggtggtgggggaatgaacaaattcagtcgttggggacctccttccggcggccgtggtcgtggtggcgactctggttatggtggcagaggtagctttgcttcccgtgacagaagcagcaatggatggggaagagagcgagaaaggagccgtagccctgagagattcaacagagctccaccaccgtcttccaccggatctcctcctcgcagcttccacgagacgatgatgatgaaacacaagatgaanaagagagatacaaagctctgataaagncaagtgacaagaagattgtgttgtgggggatttcccntatcattgtgacattatatattttttggccgatgaannaacagnngaananggannnnacgaccagggaggaatgtt

SEQ ID NO: 9100 - DNA, 453 bp, Arabidopsis thaliana
  unsure at all n locations
  Clone ID: LIB24-129-Q1-E1-E9
acgcgtccgaatttctcgtagaagaagatcaaatcgctctgaatatgacatcaattgaggcaacagaaacgcttaacgctcctccaaagcttcagatctggaacaacgctgccttcgacgatggagattctcaaatcacttccgccatcgaagcttcttcttggtctcacctcaacgaatcattcgattccgattgtagcaaggagaatcagtttccgatttcggtttcctcttcgctccaatcctcagtctcgatcaccgaagctccgtcagcaaaatccaagaccgtgaagaccaaatccgccgcagatcggagtaaaaagcgagatatcgatgcangagatcgaagaagtagagaagggggatcggacgattatcgacgaaattgggagtcgctccgattagaggaaggcggagcaaaccgcaagaagcattgctatacgtgggaagaat

SEQ ID NO: 9101 - DNA, 442 bp, Arabidopsis thaliana
  unsure at all n locations
  Clone ID: LIB24-129-Q1-E1-F3
tctggtcagctgtctcttccccattctctagggttttcaaagctcaacctcaanctccactangatctcttcttcttctcnaatctcaagttgaaagatgcaaggtgtgattcgatccttcgtctccggtggaaatgttgtgaaaggctctgtgctgcaacatctccgtggtgattaacccggcgattcagccttctgtgttttgttcacgctctgaancaactcaacctgcacgtatgggangaatctggnttcgaggagcacaactatttccgaangtcatgaaatccaaangcaaaaantngctgntgngatncttggctttgggtgtactacngangacactgnttatggagggntgttaaaatcccnggacacaanacaatgntgggtgccttggtggntgtgaaacctgggtgagcaaaaaagctcgtgcntgggt

SEQ ID NO: 9102 - DNA, 421 bp, Arabidopsis thaliana
  unsure at all n locations
  Clone ID: LIB24-129-Q1-E1-F6
caaaaaaaaacttaagttgactgagaaaactaagcaaaaagatctccgatcggaatcttcttattcgccatggatgctctttctcaggcgatcagttccgggatctccgttccttacaagaacaattcttcttctctcgttccttctcacggactcacctccttaatcctccggaaatcgagatctccggtgaatccctcatcacgatctcgcgtctcggtgcgagcttcggagattcaacacagcaaaacctcagcttcatcgatcgatctcagcgatccaagattggaaattaaagtatgagaaagatttcgagcaacgattcaagcatacctcacatcactgatgtcttacctgatgctgaagccattcgttcaacggttttgtcttangatgaggtctccgacggaaggttttgttg

SEQ ID NO: 9103 - DNA, 423 bp, Arabidopsis thaliana
  unsure at all n locations
  Clone ID: LIB24-129-Q1-E1-F8
tgcaactgcaacagttgagattttgagcgtgtcaaggattctgattgataacgatattcaagttcagcaatctcattgcagtagaaaatggaatcgaatcatcctcacttcaagctaattttgggatcttcttcgattgctcgacgtaagatactaacagatatgggataccaattcactctcatgagtgctgatattgatgagaaaagcatccgcaaggagaaacctgaagagttggttttggctttagctgaggcaaaggctgatgctattgtgtcaaaactacaaattaagtgaatgtgaagatgaggaacaaccganagtcttgattgcatcggntacagtggttgtctatgaanatgctgttnagaganaaaccctcgngtgtccgaagaagcanagggagtacagaaggaaggctat

SEQ ID NO: 9104 - DNA, 449 bp, Arabidopsis thaliana
  Clone ID: LIB24-129-Q1-E1-F9
acgcgtccgaggagatcctcatccagcatgagaccttccaagactctctttgtgattaactttgatgcggataatactaggacccgggatctagagaaacactttgagccgtatggaaagatcgtaaacgttaggatcaggaggaattttgcatttatccagtacgaggcacaagaggatgccaccagagcattggatgcttcaaataacagtaagctgatggataaggtgatctcggtggagtatgctgtgaaggatgatgatgctagaggaaatggacacagtcctgaaagacgccgtgataggtcacctgaaaggagaaggcgatcacctaagtccttacaaaagagaaagaggaagccctgattatggccgaggagctaatcctgttgctgcctacagaaaggaaaggaccagtcctgactatggtccaaagactagcccaagtc

SEQ ID NO: 9105 - DNA, 434 bp, Arabidopsis thaliana
  unsure at all n locations
  Clone ID: LIB24-129-Q1-E1-G5
acgcgtccgcccacgcgtccggctgaagtctctgacattgcaattgcagtacgtgaaggcgcagatgctatcatgctttctggtgaaaccgcacatggaaagtttccgctgaaagctgttaacgtaatgcatactgtggcgttgagaaccgaggcaagtctacctgtcagaacctcggcatcccgtaccactgcttacaagggtcacatgggccaaatgtttgcttttcatgcttctataatggcaaatacactgaagctcaccgctaattgtatttacgagaaccggatccatggcagtgcttctaagccactaccgcccatctgcaacaattttcgccttcacaagaccaagngaagaataatgcaaaggcttgctcgttatcaangtgtcatgcctagatatatggagttctcggatgatggcagaagata

SEQ ID NO: 9106 - DNA, 423 bp, Arabidopsis thaliana
  unsure at all n locations
  Clone ID: LIB24-129-Q1-E1-B8
aaagacgcaaacctcgcatccattcctgttgaggagttgattgaaaaggctgatggatttgccggagtcttcccaggagcacaaatacgaaattgtgaaaaagttgcaggagaggaagcatattgttggaatgactggtgatggtgtcaatgatgcccctgctctaaagaaagctgatatcggtattgctgttgctgatgctacagatgctgctcgtggtgcttcagatancgtgctcactgagcctggactcagcgttattatcagtgctgttctcaccagcaggagctattttccagaagaatngangaactannctatcgatgcangtctcaatcacnatcccgtattggtgtttgggttcatgcntagtgccntttganatggggaatttgncttcncaagccttcaangggttcctga

SEQ ID NO: 9107 - DNA, 454 bp, Arabidopsis thaliana
  unsure at all n locations
  Clone ID: LIB24-127-Q1-E1-G10
ttacgcttgccggnaccggtccanaattnacgggtcgacgcacgcgtccgnggacgcgtgggccgattcagagagaacancgaatatgaccgccgattcaaccgtcgcactcgttcatagcgtcgtttctaacggtgatgtctccaacggaaacacctccgcttcctctaagaaatctcgtgagattgaccgtcgccgccgcagacggaagcanaagangaacaacaaagcatcccaagccgatgtagatgcatcggacgtttctgctgcttctgaatccaaagagaatacagatccccagccacaggtttgtgagcanattgtgatagagtatgttccaagagcaagctgaatttgaagatggttttancgatgagtttaaggaaatcttcgagaagttcaacttccgcgaacctcttgcctctgaaagaagncggtacganagatgagtctg

SEQ ID NO: 9108 - DNA, 446 bp, Arabidopsis thaliana
  unsure at all n locations
  Clone ID: LIB24-127-Q1-E1-G11
taantgagttttttttttaattagaaacaaatggggttgagtggtgttcttcatgtggaggttgaggttaagtctccggctgaaaagttctgggtagcccttggcgacggcatcaatctcttccccaaagctttcccnaacgactacaaaaccatccaagttctagccggcgatggcaacgctcctggctccattcgcctcattacttatggagaangatctccactggtgaagatatcggcgganaggatcgaagcagtggatttggngaacaaaagcatgtcgtacagcatcattggcggngaaatgttggangtactacaaaaccttcaaaggaaccatcaccgttatccctaaggatgggtggtagccttctgaaatggtctgggtgagtttgagaanaccgcccaagagatcgangattcaaaatgtcatcaangaccttg

SEQ ID NO: 9109 - DNA, 416 bp, Arabidopsis thaliana
  unsure at all n locations
  Clone ID: LIB24-127-Q1-E1-G12
caaggtgtgacctgagaatcacaacacaaaacaatctcactcgaaattcctttgactcatcatcatcaccatgtggagaagaatcgtctcctctcagctcaaaaccctagccgccgatgtcgtcgctgcttctcctcgtcgatcgagagccgccaccaccangacctgtcggtttctatctcggcgccaatcgatnagccatttccgcatcttctttcgntatccctcgtcgtttcaagctccgattcaatatagactcctgcgacgaanaacgtggaggatgtaatgcccattgcgactgggncacgangaaggaagagcttgaagctgaacttnagggaaacgaggctggatgatattggacttcccctgaaaaggnccttttgggacctaaaggaaactcctgcnaattgtga

SEQ ID NO: 9110 - DNA, 390 bp, Arabidopsis thaliana
  unsure at all n locations
  Clone ID: LIB24-127-Q1-E1-G7
gggtcttcttctttgtctctgctcttcactttcaattataacctcttcgtcttcttcgccgtctctggtattaactccggcgagttttttttttttttttttactttgatatgaatttgcgagatttactgtttaattcangangacaattttggatttttgatcggatgtgaaattcagagtttttcattcttcttcatcatcttataacaaanaagaaacanaagaaaanactttttttttctttctttcnagtgtttcggaanctangggtgaagcaagcagacaanaaagggcatggaacagagaaatgacngttangacaantctttcnctagacataggatnaatacgcgaagagatncggttacgaagtttcatgtcnggaaa

SEQ ID NO: 9111 - DNA, 393 bp, Arabidopsis thaliana
  unsure at all n locations
  Clone ID: LIB24-127-Q1-E1-G8
attttctatttccgaataacaaaaccgatcggcggagacatgacggcggcacaagggaactctaacgagactctgttttcttcttacaagatgggaagattcgatctctctcatcgagtggttctggcgccgatgacgcggtgcagggcgttgaacggagtaccaaacgcggcgttggcagagtattatgctcancggaccactcccggcggttttctcatctccgaaggcaccatggtctctcccggatccgcagggttcccacatgtgcctggaatctattcaagatgaacaagtngaagcatggaagcangttgtggaagcagttcacgctaagggaggtttcatcttttgtcaatnatggcangttggncgtgcttctcatgcagtgta

SEQ ID NO: 9112 - DNA, 409 bp, Arabidopsis thaliana
  unsure at all n locations
  Clone ID: LIB24-127-Q1-E1-G9
cctctttctaatcggagttactttaatccccttgaaccatgtcaaagagaaagactaaagagccaaaggtcgatgttgtgactcttggaccatctgttcgtgagggagagcaagttttcggtgttgtccacatctttgcttcattcaacgacactttcattcatgttactgatttgtctggtcgtgaaactcttgtccgtatcaccggtggaatgaaggtgaaagctgatagagatgagtcctcaccttacgcagctatgcttgcagcacaggatgttgctcagcgatgcaaggaacttggtatcactgccatgcatgtgaanctccgtgccacaggtggaaacaagaccaagacacctgggcctgggagcacagtctgcccttaanaagncccttgctccgtttcggg

SEQ ID NO: 9113 - DNA, 488 bp, Arabidopsis thaliana
  unsure at all n locations
  Clone ID: LIB24-127-Q1-E1-H1
ntgtttacgcctgccggtaccggtccanaattcccgggtcgacccacgcgtccgcggacgcgtgggtccatctctcaagacgtctccgccgtaatcatgacgaacgcttcttcagcgccaccgccgccgcaggcaaaacgcagacttgggagaacgagtaggtccgctatgaaaccaaaaatccacagaacaaaaactcgtaaaacgaagaaaacgtctgcaccaccggagcctaacgccgatgtagctggggctgataaagaagcattaatggtggagtcaagtggagccgaggctgagctaggacgaccatgtgactactatggagatgattgtaacaaaaatctcatgaagcattaatggcgataatggagttttaacgtttgatgatgatatcatcgatcttttgttgggacgagtcagattctggccacttgtacacaaacacaacgtgcggtgggtgatggggagttgnaataacataagga

SEQ ID NO: 9114 - DNA, 426 bp, Arabidopsis thaliana
  unsure at all n locations
  Clone ID: LIB24-127-Q1-E1-H12
agaactgaagaagcatattcgacggtcaccaccaaacctcttccgtcggattttcactctccgtttatcgaacatctgagatctctctccacttccgtcaccgaagatgcattccagtcatcttcttctcgaggagccgatcaggatggcttcaatcctcgagccttccaaatctagtttcttcccggcattgactaagatcgtcggaactctaggtcctaaatcccgatccgtcgaggctctctccggntgtctcaaagccggcatgtctgtggctcgatttgatttctcgtggggagatgctgattatcaccaggagacacttgataatttgaaagttgctgtgaggagcactaagaagctttgtgctgttaagcttgatactgttggncctgagctacaaagtttattaacnaatcctgggaa

SEQ ID NO: 9115 - DNA, 408 bp, Arabidopsis thaliana
  unsure at all n locations
  Clone ID: LIB24-127-Q1-E1-H2
tttttttcttcttctcggnngtttgtanaatcaacaaaaatggtggaagaccacaagcacgaggaatcgatcttggagaagattgttgagaagatccatggccacggtgactcgtcttctctgtccgattccgacgacgataacaaatctacatcgtcttcgtcgtcgtccttcanntcaaagatttaccgacttttcggaagggagaaacctgttcacaangttctcggtggtgggaaacctgctgatatattcctttggaggaacaagaaggtatctggtggaagtcntgggtgctgtaactgcntcttgggtcttattcgagttattcgaatancatcncctcgcctttctctgtcactttgcnanttttgctccttgangncattgttcttgtggtncaaatgg

SEQ ID NO: 9116 - DNA, 430 bp, Arabidopsis thaliana
  unsure at all n locations
  Clone ID: LIB24-127-Q1-E1-H6
gaagaagaagaaaaaaaacataatttgaggaagaagaaaaaaaattcggatttgttttttcaataaattgactaattgagtactcgtttaaaggaagtgaagagcggttttttggtagtggtggtcgagaaaagagagagtttgtctctgtgactcagagtgaaatcaatagagcgggaaaagattgttgctttttttttgccatgggagttgatgagctgtctcacctcaaattctctcttctgctagaatcatcaacctgcaatgatttgtccggttttaagtctctagttgaagangaangtcttganagcattgntggntctggtttgtggtatgggaggagattaggatcanggnacatggggtttttgngganagngatgcctcntanngatttgctgcctttgtttgggaatncaaaaaaggt

SEQ ID NO: 9117 - DNA, 422 bp, Arabidopsis thaliana
  unsure at all n locations
  Clone ID: LIB24-127-Q1-E1-H7
tgatactgtggttgagccttacaacgctactctgtctgtccatcagcttgttgagaatgctgatgagtgcatggttcttgataatgaggccttgtacgatatttgcttcaggactctcaaactcactacccccagctttggtgatttgaaccacttgatttctgctactatgtctggtgtgacttgctgtctgaggttccctgtgtcaactcaactctgacctccgaangcttgctgtgaatctcatcccattcccccgtcttcacttcttcatggtgggttttgctcctctcacctcaagaggttctcaagcagtaccgttccctcacagtccctganctcacccancaaatgtgggactcnaagaacatgatgtgtgcngcagacccanggcacggncnctacctcaanagcctccggcc

SEQ ID NO: 9118 - DNA, 406 bp, Arabidopsis thaliana
  unsure at all n locations
  Clone ID: LIB24-127-Q1-E1-H9
gagctggtcattcttcctcgttcatcactagatgagactccacctgaacaacaaaaccaaccaccacctcctccacctcctccacaaaatagcnnnnnnnnnnnnnnnnnnnnnnnnnnnnnnnnnnnnnnnnnnnnnnnnnnnnnnnnnnnnnnnnnnnnnnnnnnnnnnnnnnnnnnnnnnnnnnnnnnnnnnnngtttatatttgacgctgagggcggtctggtggatgagaaactcctcttctttgctcaacaagcccagaaacgtcgggggaaagctggcagggcgaagaatgtcatattctcaagaagatagaggacgctacataaagccaatgcttccaaagggtccagtaaaaagattagctgtggatgcaacccttaagagcagctgcaccatanca

SEQ ID NO: 9119 - DNA, 458 bp, Arabidopsis thaliana
  unsure at all n locations
  Clone ID: LIB24-128-Q1-E1-A1
acgcgtccgatatgacgttctaagagacagaagacagaagatgaatctgaggagaccaaagaagcaaatgcaaagcaaagagaggctgataagacaaagctcctccttcataaaatccctctcaatgtcccgtctcaanagttaaaagtagttattaccgggcagttcacacttgaagttatgccacccaaaagaaaaggacgttattacaatgcagttgttacttttaatangtccagaagaagcanataaagcatttgaaaaagttaaangagaagcagttaaggagaaaagtgggtttgggcacaaaaaatggttgcgtttaagctgagttcaaggatcaaggagcttgtttatacgttcgnaaaatgggttcaagatgaatctgagggagaccaaagagggcaaatgcanaccattgtgangatgatcatttaaanagacttggaagaactgaa

SEQ ID NO: 9120 - DNA, 486 bp, Arabidopsis thaliana
  unsure at all n locations
  Clone ID: LIB24-128-Q1-E1-A12
attctacacaggacggcacaagtcataagnctcncgggtccgacccacgcntccaaagtcnctngggcgnacgcgtgggcggacgcgtgggcggacgcgtgggcggacgcgtgggatcccggcgccggagaccggaagaaagaagaaaggtttgatccgagtgcacaaccaccgttcaagatcggagatataagggcggcgattcctaagcactgttgggttaagagtcctttgagatcaatgagttacgtcgtcagagacattatcgccgtcgcggctttggccatcgctgccgtgtatgttgatagctggttcctttggcctctttattgggccgcccaaggaacacttttctgggccatctttgttctcggccacgactgtggacatgggaagtttctcaanacattcctctactgaatagtgtggttggtcacattcttcattcctttcatcctccgttccttaccaatgggttgggagaaa

SEQ ID NO: 9121 - DNA, 436 bp, Arabidopsis thaliana
  unsure at all n locations
  Clone ID: LIB24-127-Q1-E1-F9
tggcttcnacggctacgaacactgatttcttcaagactttgctttctcctttctcaaatgggaatgcggcgcaacgaagtagtagacagaacattgtttggttaaatcggaagcaatctggaaataataacagatctcttcgtgttaatggattattcggaggcggaaaaaaggacaataaagaggatggacaatcaaaggcaggaattctaggtaacatgcagaatttgtatgagacagtgaagaaagctcaaatggttgttcaagtagaggctgttagagtgcagaaggagcttgctgttgctgaatttgatggttantgtcaaggcgagcttgtcaaggttacattatcaggtaaccagcaaccanttcgcactgatatcactgatgcaacaatggagttaggttctgaaaaactttcactgctggtcacana

SEQ ID NO: 9122 - DNA, 478 bp, Arabidopsis thaliana
  unsure at all n locations
  Clone ID: LIB24-127-Q1-E1-D10
tgttacgcttgccggtaccggtccagaattcccgggtcgacccacgcgtccgcccacgcgtccgaatcannnnnnnnnnnnnnnnnnnnnnnnnnnnnnnnnnnnnnnnnnnnnnnnnnnnnnnnnnnnnnnnnnnnnnnnnnnncgcaacagatctctcatctccttcacttgttgactgtttataccacaggacaatggctgacaaagatgaagcagcgacgcgtggaaatgattgggaagttgtttctcttactgcttcagcttacgctgctgctcctggtcctaaaccagtagtggactcgaaagatgatgatcacaaggaagttactccttgttacgaagctgagacatctcatcccttatanatgtctccgccactttgttttcccaccaactggtcaagcttgagaatactagtgaccttaccggaggctagcttaacgggggtccattgcaagggaaagggagtgntttt

SEQ ID NO: 9123 - DNA, 489 bp, Arabidopsis thaliana
  unsure at all n locations
  Clone ID: LIB24-127-Q1-E1-D11
ctgttacgcttgccagtnccggtccagaattcccgggtcgacccacgcgtccgggctaagaaagtcccaagccaagaaggctgcttcaagcagtgatgagtcatctgatgactcttcttcagatgatgaacctgcacccaagaaggccgttgctgctactaacggaactgttgcaaagaagtctaaggatgactcatcatcatctgatgatgattcttcagacgaggaagttgctgtcaccaagaagcccgcagctgctgctaaaaatggctctgtaaaggccaagaaagagagttcgtctgaagatgattcatcttctgaagacgaacctgcgaagaaacctgctgctaagattgccaagccagctgctaaggattcttcatcctctgatgatgactcagatgaggattccgaggatgagaaacctgctaccaagaaagcaactcctgctgctgccaaangctgcaagcagctcanattcatcaagat

SEQ ID NO: 9124 - DNA, 436 bp, Arabidopsis thaliana
  unsure at all n locations
  Clone ID: LIB24-127-Q1-E1-D2
aaaccatttgggagtttggagctttggacgacgacaatggncccgaagaaaggagtgaaggtanctgctaagaagaagaccgcggagaaagtttcaaaccctctattcgaagaggaggcctaagcaattcggtattggtggagctttacctcctaagaaggatctctctcgctacatcaaatggcccaaatccatccgtcttcaaaggcaaaagaggatcctgaagcagaggttgaaggtccctccaagctcttaaccaattcaccanagactcttgacaagaatcttgctaccaagcctcttcaaggtccttctgaagtacaggccagaagacaaagctgccaagaaangagcgtcttgttanngaangcccaagctgaanctganggaaagccttctgagtctaagaagccccattgtngtcaaatacgggctc

SEQ ID NO: 9125 - DNA, 420 bp, Arabidopsis thaliana
  unsure at all n locations
  Clone ID: LIB24-127-Q1-E1-D3
gccgtatccttagaaaaacgatggatctacggtgcaaagagctcaattctcnaaccgggttttgattcgaacgattttggatcgacctgacggcggagctggactcgccggtcaaacggttcgaatcggtggttgggtaaaatccggaagagatcaagggaaaanaacgttttctttccttgcggttaacgatggatcttgtccagcgaatcttcaggttatggtggatccgtctctctatgatgtctctaacttggttgctacgggaacttgtgtgactgttgatngagttttgaaggttccaccgaaaggtaaaggtacgcagcagcagattgagcttaacgttgtgaaangtgattgangttggaacggtggatgcgtctaagtatccacntcctaagactnagttgactcttgaga

SEQ ID NO: 9126 - DNA, 386 bp, Arabidopsis thaliana
  unsure at all n locations
  Clone ID: LIB24-127-Q1-E1-D4
gggcggacgcgtgggcctcgaccctttaatttctaatcaccgaccaaaattgatcggaaacctagagctcttcgtattgctccgccaccatgcatatccggcgccagatcttcgttaaatctcctgactgtcaaaaagtcgtcgctctgcaattggatcctgcgcaatctctattaactctttcgggtatcacttccttactcgaatcgtcgcancgtatatcgttttcggcntgctccgattactctacatgggaagcttttgaatggctctacacggatccaagtattcgaagcttccctttctgtatccatgctcantccttttcctcgnctccggtggangtggaggagatggtggggcnancgggagccgaagtctcgnca

SEQ ID NO: 9127 - DNA, 424 bp, Arabidopsis thaliana
  unsure at all n locations
  Clone ID: LIB24-127-Q1-E1-E8
gagtccccgagagattgatcaccatcacttttgtaccttccttgtactacctatggcgtctgctagcttcgttaagcctaacacnnnnnnnnnnnnnnnnnnnnnnnnnnnnnnnnnnnnnnnnnnnnnnnnnnnnnnnnnnnnnnnnnnnngagtctccttcgcgatccgcgccggtgcttactccgacgagcttgttaaaaccgccaaaagcattgcatcccctgggagaggtatcttggcgatcgatgagtccaatgcaacctgtgggaagaggcttgcttctatcggcttggataacaccgaggacaaccgtcaggcctacaggcaacttctgcttaccactcctggcctcggcgattacatctctggttccattctcttccgangagactctttaccaagtccaccaanggacggtaaa

SEQ ID NO: 9128 - DNA, 427 bp, Arabidopsis thaliana
  unsure at all n locations
  Clone ID: LIB24-127-Q1-E1-E9
tactgtgctcctgaatacgcaatgagcgggaaattaactgttaaatcggatatctactgcttcggtgtagtgttgcttgagctgattactgggagaaaagctattgatttaggtcaaaagcaaggcgagcagaatcttgttacttggtcacgtccatacctcaaggatcagaanaagtttggacatttagtggatccgtctctacgaggaaaatacccaagacggtgtttaaactatgcgattgcgattattgcaatgtgtcntaatgaagaagctcattatcgaccgttcataggtgacatagttgtggcactagagtacttagccgcacagagcagatctcatgaagctcgaaacgtctcancaccgtcaccaagagatttcaagaacgccgccgacgagactgtaagaactcncaaacagcttt

SEQ ID NO: 9129 - DNA, 427 bp, Arabidopsis thaliana
  unsure at all n locations
  Clone ID: LIB24-127-Q1-E1-F10
atctcctttgtgtccataatcgaaacgctttttgcgatttatcctaatcttttttctatcttctgctacaaatttggttcttttttggttgaatttggataaaatcataatctcctcttcaattttcttgtgaaatggaaagtttcagtgattgggaatcctcaagcgaggatctgcagagcagaattagcttacagagagcttggatttagatttggctctgatgtaatctccggtgaatcgagaaatagggttaagtttctgcaaccaaagctctaaatggaaaganatcgcgatacgttgctcttcgaagatctgtcaaatgtgaagccatcgtctccgatgacgcttctccgtttctcaaatccactccaaaatctaaaatcgctcgaagagtgnaaaattattggntggggcttccgttaag

SEQ ID NO: 9130 - DNA, 441 bp, Arabidopsis thaliana
  unsure at all n locations
  Clone ID: LIB24-127-Q1-E1-F11
acgcgtccgtttgctttcttattttgtcttctcacaatctgttcctatcaatcacacagataataatcctcagcttctctctcgctggatttcaacattcttccactcatcgcttctctttaccaaatcaaactcaacacttcactcaactcttatcggaccttccaaactatatccttcaatggatctatggactcttcaattaaaagacgtcacgatccgaaaccctatcttctcatcatcgatccctgagaaatcatcgtcgttttctaggaaactttgtgaattggagtttaggtttctcaatcgtaaggtttctgcttctccgtatcgttccttggttgttcgaagctacctcgaagaagagtaacgacgattcttcttctcctggagatgcttctcagganaacaaaccttctaacgggnaacaagtccggggga

SEQ ID NO: 9131 - DNA, 486 bp, Arabidopsis thaliana
  unsure at all n locations
  Clone ID: LIB24-127-Q1-E1-F12
ctgtttacgcttgcagtaccgggtccagaattaacgggtcgacccacgcgtccgngctcctgctcctccaccaagcacccctcttcagtgctgaatcttcaaagccatcatcatcgtcaaaccagaaacaagggatgtctgctgttttccagcaactcagctcgggtgctgtgacctcaggtcttagaaaagtgacggatgatatgaagacaaagaaccgtgctgatagatctggagctgttagtgcggttgagaaggaaactcgtaccagtaaaccggccttttcgaaaactggaccaccgaaaatggaacttcaaatgggtcgcaagtgggctgttgagaaccaaattgggaagaaggacttggttatcagcgagtgtgattccaaacagtctgtgtacatatatggttgcaaagattctgtcttgcaaatacaagggaaagttgaataacatcaccaattgacaaattgcacgaaaagtgggt

SEQ ID NO: 9132 - DNA, 428 bp, Arabidopsis thaliana
  unsure at all n locations
  Clone ID: LIB24-127-Q1-E1-F5
gaatctcccgatcactgtttccgcaaattcacagaagacggactcttcctcattagtttcagccgtnaccatcaagaactcatagtctatcgtccttcttggctcacttactccanaaccgatgattccacaaccaccctacntcctctacctcgccgtgcttcnaaattcgacagctttttcactcaactctactcagtcaatctcgcttcttctaacgaactcatctgcaaagacttcttcctctatcancaaactcngtcntttcggtcttttcgctacttcaacagctcagatcnatgattcagncatcnccttctaatgacgctgttcctgggtgttccttccattgataaagattactttcgtacttcntcgattagatgntggngttgttcttgatgagagggtttttcntcatgatgtcg

SEQ ID NO: 9133 - DNA, 420 bp, Arabidopsis thaliana
  unsure at all n locations
  Clone ID: LIB24-127-Q1-E1-F7
gaacaaaacttggcttccaaaagaaaanatcgacgaggtctcaaaggaagcagagaaagtaaaaagctggttangataagaatgtggctgagcaagaaaagacttctctgtggagcaaaccggtgttcacgtccactgaagtgtacgctaaagtatttactctacaagacaaggtcacaaaggtgaataagatcccaaagccaaagccaaagatagagaaagtaaccaaggacggagaacacaacanaggaggaggaacaatcaaaatcctctgatgaagctgccanagaagaagaaagtcacgacgagctttgattaaggatatataataaataagagttttcgttaatttttgtgtttttaagagggaaaatagngattanaagtaggcagctganatgagcanaaggattttattcc

SEQ ID NO: 9134 - DNA, 419 bp, Arabidopsis thaliana
  unsure at all n locations
  Clone ID: LIB24-127-Q1-E1-F8
acgcgtccgggtacaagctgatcgatctagaccaagaacctcagagaatgtattagcatcgtcaaaggatacaacaccacaaaactatgagagagtcgaaagaccaatctcttcaacaagacacgcangttcttcaagaaaagctgttgtatcgagcgtacgagccacttcttcagctgatttcacagagaaccgctctagcagagttgtcccaagcaatggccgttcctcaaccgctcagaggactcagctcgtccctgacccaaccactagaccgtcatcttcttcttttacccgagctgcgccgtcgaggactgctcgtgacatcacgctccagagctttgagcnactcaccataggggaatggaaaggaggaagtgagangcttgggctttatcgtggagccgtgttgnggggac

SEQ ID NO: 9135 - DNA, 470 bp, Arabidopsis thaliana
  unsure at all n locations
  Clone ID: LIB24-127-Q1-E1-D1
cgttngccggcccggtccanaatnaccgggtcgacccacgcgtccnggactaacactaaatctaaactttttgcagangagcanaagattcantaattgagattgatctcaaaaaccaaagctctcgtgctcttgtcgttgatgttggttgtgtagactttgtatacaatgatgaaaagtttggngaatgctgttggagcnaagacggcgagggcttgcgacagctgcgtgaagagacgtgcacggtggtactgcgcggccgacgatgcttttctttgccantcttgcnacagtttggtccantcagcaaaccctcttgctcgccgccacgaagagagtccgtttgaagacggctatcccggcggtcgtnaaaccatancanccactcatcagcttctcctccacatgangtcgccacgtgggcaatcacgggtttactcgtaaagctccgaacnccacgtggctctggt

SEQ ID NO: 9136 - DNA, 485 bp, Arabidopsis thaliana
  unsure at all n locations
  Clone ID: LIB24-127-Q1-E1-A3
ctgttgcccctgccggtaccagtcnaaccgtggtcgagccacgcgtccgcaaatttctgaatttcgtctctaacatccacaaaatcnaatgcgttgtgtgaatcgcgttgattgttcttggtcacggccaagcgaagcttaccgtatcttaccctccggtggncacctttcatctggattccatcaatgtcctttatcgtctctatctttccgttcctctttcgtgtgttgctcctcctccacatctggaccgtccgattcaaatcccgaatcatcttcaaatcgctcttacagccgtagatggcagaatcctcttccccggcgtnnnnnnnnnnnnnnnnnnnnnnnnnnnnnnnnnnnnnnnnnnnnnnnnnnnnnnnnnnnnnnnnnnnnnnnnnnnnnnnnnnnnnnnnnnnnnnnnnnnnnnnnnnnnnnnnnnnnnnnnnnnnnnnnnnnnnnnnnnnnnnnnnnnnnnnnntccaatg

SEQ ID NO: 9137 - DNA, 451 bp, Arabidopsis thaliana
  unsure at all n locations
  Clone ID: LIB24-127-Q1-E1-A9
acgcgtccgatttgaagatggatccatcactatgacaattatttttctgccaccttgacttgtacggcttatattccaaaaatttcttttattgttcacctctttttcttcaatccttcaatttctctcaccaaccctaatttccccaaatttggtaatacgatttcgtcaatttacttcgcaatcgattcaattcaattatgtctctattactggaagagatcattagatcagtagaggctttgctgaagctcagaaatcggaatcaggaaccctatgttgacccgaatctaaacccggttcttctagttccaggaatcgctgggntcaattctaaacgccgttgatcatgagaacgggaacgaagaacgtgtttgggttaaggatctttggtgcngatcaatgagtttccgaacaaagatgtgggcccgaatttggtccttcaacnggg

SEQ ID NO: 9138 - DNA, 481 bp, Arabidopsis thaliana
  unsure at all n locations
  Clone ID: LIB24-127-Q1-E1-B10
tttacgcttgccggnaccggtccanaattnacgggtcgacccacgcgtccgcctatttttctttttgtcattttttgttccagccgtctgttgatatcaagacggttctttcgggtctaatggaaaggctttcgaactatgctgcatccagtgtggaagcattgcctaatttcctgcaagtagaagccttttcaaagttaaattatgccattgggaaggttgtagaagcacaggcggacttgccggccgcagcatctgtaacattgtatttgtttcttctaaaattcactctccatgtctattccgatcgtctggactatgtggaccaagttttggtataacgctttctgaggatggatcatgtgttactcaactatctgccacaggaaagctttgtgatgacaaggcagcaaaacaagatcgtcgcatttcttagcgctccattggnaaagtataataaatgtagtaactaatcctgaag

SEQ ID NO: 9139 - DNA, 485 bp, Arabidopsis thaliana
  unsure at all n locations
  Clone ID: LIB24-127-Q1-E1-B11
ngttacgttggcccggccggtccaaaattnccgggtcgacccacgcgtccgcccaaatgtccgataggatactgtgcaagttctttgtccatggctcgtgcttgaaaggcgaaaattgcgaattttcccatgactctaaggatccgcccaataatgtttgcacattctatcagaaacgaatatgtttgtacggaagtagatgtagatacgatcatgtcagagctgcttccaatcttcctcttagctcagattctgagtctttagatcgctctatatccaccaccccctctaggcatttgcaacaacaaggcgataataatgacggtgacaaatcctctaacgtttactgtatccaccctagagagtacccgatctgctcttttgctgcagctggtgattgccctcgaggtaaccangtgtccacatatgcatgggtgacctcctgcantactgtggcaaaaantgttttgcatcccttttaganc

SEQ ID NO: 9140 - DNA, 441 bp, Arabidopsis thaliana
  unsure at all n locations
  Clone ID: LIB24-127-Q1-E1-B12
acgcgtccgcctatggcttgtttctcggttgggaccggctcatgagctgtcttctcttaacggtggttctcaagagtcaccaccaactactactacatctcttaagctantgtcggggtcatgttatctcccgcatcctgaaaaggaagctacaggtggagaagacgctcactttatctgcgatgaagaacaagctattggagttgcagatggagttggcggttgggctgaggttggtgttaatgcgggactgttttcgcgtgagcttatgtcttattcagtatctgcaattcaagaacaagcataaaggttcttctatcgaccctttagtggtgttangaagaaagcacattctcaaaccaaagccaaaggctcctccacggcttgtatcatcgttttaaaagataagggattacacgccattaatctcgggagacagtg

SEQ ID NO: 9141 - DNA, 407 bp, Arabidopsis thaliana
  unsure at all n locations
  Clone ID: LIB24-127-Q1-E1-B2
gctcatcactgaaaagagcttaaaccagagagatctgataagagaaattttagagtctctctgcttcaacaagatctacatcgaccaggagattagaaagaatcatgggttctaagcataacccaccagggaataacagatcgagaagtacactatctctactcgttgtggttggtttatgttgtttcttctatcttcttggagcatggcaaaagagtgggtttggtaaangagatagcatagctatggagattacaaagcaagcgcagtgtactgacattgtcacngatcttgattttgaacctcatcacaacacagtgaagatcccacataaagctgatcccaaacctgtttctttcanaccgtgtgntgtgaagctcaangantacacgccttgtcaangagcc

SEQ ID NO: 9142 - DNA, 424 bp, Arabidopsis thaliana
  unsure at all n locations
  Clone ID: LIB24-127-Q1-E1-B4
gtcnatgccgagcanacttcttccagtcctagtctgctangtttttcttttcccctttgcatcatcatcngattattctggggtatctcttccatcttcgtcgcctaaagtctcggtgggcctgtactacgagtctctctgtccctactgctcttccttcattgtnaaccacctcgcgaagctcttcgangacgatctcatatcaatcgtcnatctccatctctctccgtggggcaatacnaanctcngttccganaacgtcactgcngtttgccatgcatggggcatttgaatgcttcttggataccgtagaancttgtgcaattgatgcttgngctaaagtaagcgatcanttcccgttcatatactgngtcgaaaagtnggggactggnggatnatatgaccaagtgggagacgngttatg

SEQ ID NO: 9143 - DNA, 424 bp, Arabidopsis thaliana
  unsure at all n locations
  Clone ID: LIB24-127-Q1-E1-B5
acgcgtccgaaaangnnaaaaatttaggaccggtgggtttgaagtttgaggtgttcaacggaagtgctccttctttgttctctactacatattcatggacaaagatggcaaacattatattcttggatcagccagtaggatctggcttctcctactcaaaaactccaattgataaaactggtgacataagtgaagtaaagaggacccatgagtttcttcaaagtggctaagcaggcatccacaatatttctccaaccctttatatgtagttggagattcttattccggtatgattgtcccggccctcgttcaagaaatctcacaaggaaattatatatgttgcgaanctcctataaatctacanggttanatggcntggaaaaccctggtaacatataanggactttgaaacaaaaactccngc

SEQ ID NO: 9144 - DNA, 483 bp, Arabidopsis thaliana
  unsure at all n locations
  Clone ID: LIB24-127-Q1-E1-B9
tttacgccgnccgtaccggtccnnaaattcncgggtcgacccacgcgtccgnnnnnnnnnnnnnnnnnnnnnnnnnnnnnnnnnnnnnnnnnnnnnncgggaagcagcatttccactggagctgcaaaatcttcctatcaaaattatagatcgatccaagttttagattcgagaattattttctccaaattagatttatatatcaaaaggaatcgaaaatagacagcaatttttgttttgtcggatcgtattgaatcagctgtgaattttagcgccaatttaaccactgaatcgtttgattagaagctaagatttggtcttacgatcgatctaagtagggttcttcttcttaagtgtgtgttttgttaaaattagtaaagagagatggagaagaagaaagtcgcgactccgctaagtgtgccatggccattcgagacctgttgtggattgttctacagtccaaacactcccgaagggttcctc

SEQ ID NO: 9145 - DNA, 397 bp, Arabidopsis thaliana
  unsure at all n locations
  Clone ID: LIB24-127-Q1-E1-C10
acgcgtccgtctcactctctcgctacatggagagtctctcgattcccgccgcttcttggttttccggcggaaccattcctccgacgaaggtgagagtttctccgccgcatcatctccggcgacctcccaacaggaattcncatcgcttggccgccattaatgccgcttctcgctctgtgagtgagctantgnangaggatgtgttgcaaatgttcatgaaaganagagaagaanatggagatttcatatcnaaagtttctgataggcnctggttaaaggagattctcgaatctattgatgttaattccaanggagcttcttcntcagctgttganctanatgannctccggaaaagcttgacacatggngcctnatgatgatgaaagtggtncttga

SEQ ID NO: 9146 - DNA, 488 bp, Arabidopsis thaliana
  unsure at all n locations
  Clone ID: LIB24-127-Q1-E1-C11
ctgttacgtttgccgggcccggtccanaatnnacgggtcgacccacgccgtccggttcaatctgattttatatgatctcatcattgtctttgactttgtttgtttagcttccttctttcctagactggtttggctggtgcacatgggacgctttctacacagatgtgactgccgagggtgttgatgaaggccttaaaagtctttctgaaggaggtacccctccgaagtttctgatcatagacgatggttggcaacaaatagaaaacaaagagaaagatgaaaactgcgttgttcaggaaggagcacagtttgctactaggcttgttggtatcaaggagaatgcaaaatttcaagaagagtgatcagaaggatacgcaagtgtcaggactaaagagtgtagttgacaatgcgaagcagcgccataatgtgaagcaagtttatgcatgggcatgctttaactggatactgggggtggagttaaaacccnc

SEQ ID NO: 9147 - DNA, 494 bp, Arabidopsis thaliana
  unsure at all n locations
  Clone ID: LIB24-127-Q1-E1-C12
ccttgcngtaccggtccganaattcccgggtcgacccacgcgtccgatctttgccgagtgggaaaatttccggtgaagccgtcccgagtgactcgggctcttgcccggtatctttcagcttcaatagtggagataaccggtttatgtcgagcaaatccagcttccataagtggtgttgactggtttttatcttttttccaagtcaatcggattattatcgattgctttacttcttttccatgttttctttcaataatttctaaaaatctgagttggtaattaagttttaagtgccaagctatttaaaattaaatgtctccgggcttttgggtttaanaaccccnaatttgcaaaaaaatcngtcaaacnaattacaaccggggtttgaaagaatggaagggtnaatcccgnncctaatanggatcncccttaagccgtctaaantcccttggggangcncccanccaaaaccaaatccggggggggnaaacaaa

SEQ ID NO: 9148 - DNA, 441 bp, Arabidopsis thaliana
  unsure at all n locations
  Clone ID: LIB24-127-Q1-E1-C4
acgcgtccgagcgagcttgtccgatttgtaagcacgagacggaaccatgttgtgcggaggctcacgtgtcttgcagcatttgtccgaccacaatcatcataattcgattggtttaggattagggttttgtggtgctaagattgtgcagctctcttcattctttctcaggccttctcaggctatggcgaagagtcatcatttcagccgtaaattgcgtcagcggatgatttcttcatttgggtctcattgcagaacatccggagaagtcccaattcttcacaattgtttcagccaacgagaagatgatcctgagcttccaagttgaagggttatctccagtgtcaggaggcattgttgctctagggaagtttgatgccttacatatcggccatcngagagcttacaattcaagcttcaagaatttggggctccatgtattaa

SEQ ID NO: 9149 - DNA, 440 bp, Arabidopsis thaliana
  unsure at all n locations
  Clone ID: LIB24-127-Q1-E1-C8
acgcgtccgcgaaaccactcaaccaaaaaactagggttctgtttctcgtctctctctcaaacccacattgcacaatccatttctcgtttctctgatttagatccaaagatggatgggatgaagctttcgttcccaccggaaagtccaccactttcagtcatcgttgctctttctctctcagcttctccggtgacgattgattcttccgccgctgcaacaaccgtcccttcttttgtcttctccgacgggaggaaattgaatggagccaccgttcttcttcgctatgttggtcgatcagcgaaaaagcttcctgatttctatggcaacaatgcttttgantcttctcaagattgatgaagtgggtagattacgcatcctgtcntctcttctgggttcaagagtttgagaatgcgtgtgggtcgtgttgataagtatctcga

SEQ ID NO: 9150 - DNA, 428 bp, Arabidopsis thaliana
  unsure at all n locations
  Clone ID: LIB24-127-Q1-E1-A11
acgcgtccgcaaaacgttactcttctctctcattctctttcgcttctcgatagcttctcaaatcatggttcagcaaatatgggagacgttgaaggaaacaatcacagcttacactggactttctccanctgcgtttttcaccgtacttgctctcgctttcgccgtttaccaagtcgtctccggtttcttcgtttctcctgaagttcaccgacctcgttctttggaggntcagcctcaatcggagcctcttccaccgccggttcagctcggagaaatcactgaggaggagcttaagctttatgatggctccgattctaaaaagncccttcntatggcgatnaaaggccanatntatgantgtttctcagancaggatgttttatnggaccaagtgggccaaaagctctgttttgaagggaaaagatnca

SEQ ID NO: 9151 - DNA, 424 bp, Arabidopsis thaliana
  unsure at all n locations
  Clone ID: LIB24-125-Q1-E1-A2
aaaacaaaaggagttatacagagagaaaacgtgaatacgagaagatcactgtacttattgggttttgatctttgatggctccactgagtccaagagtagtggtgaaggtggatttgaagaagaagccatggcagcaggaccagccattgcacaatagatggcatccggagataccaccangtagcanaggtcaaggctggtgagtttttccgggtagaaatgattgatgcaatgggaggtgttatcaaagacaatgactctgcaagcgatatcaacaacctantcctaactactactcatcacctaagtgggccgattanggttgtacatgaggaangtgttgcagctaaagcatgtgatcttcttgccgttgngatatgcaactttgggtcntcttccaaggagatgaatgggggantcactg

SEQ ID NO: 9152 - DNA, 427 bp, Arabidopsis thaliana
  unsure at all n locations
  Clone ID: LIB24-125-Q1-E1-A7
ctctctctctttcctcctctgcacatttctgggttcttctcttcttatgctctgtttcttttaagacacagaagaaacagtacagagttgagattttcttaaacaaaagtgaaaagagaagaaacaagtgacagctcaaacggacaaaaaccactcttgggtctttcttgcttctgattctttctcttctctaatagaagaaaacatctagaagctaaaaaaatgtcggaaggagtagaagcgatagtaagcaaatgacaacggaacagatcaggtaaacggaaaccgtaccgggaaagataacgaagaacacgacggctccaccggttctaacctaagcaatttnctaaggcacggtggctctgtctgggacgcctggttcagctgcgcatcnaaccaaagttggctcaaggtggtaatggacatt

SEQ ID NO: 9153 - DNA, 496 bp, Arabidopsis thaliana
  unsure at all n locations
  Clone ID: LIB24-125-Q1-E1-B1
gaactgtntacgccgcccgnnnttcccaagtcgacccacgcgtccgttctagtcaacggagctaaacgtggttgttcaggctggggatatggtaaagaccctgcctttgctcccctcttgtacaagccccatgctgcacgtggcaagcgtttcagacagctcaagcccaccaccatcccacgtatgtaccactccagcgccatcattcttccacacggtaaggttcttgtcggtggnagcaacaccancganggttacaagtacaacgttgagttcccancggagcttcgcgttngagaanttctccccagcttacctcgagccgggctctagccaacataacggncaaagatcgtcaccaccggcaccccaaancangtcataatacggacaagtcttcaacngtganaggtcgacccttaaaggaaaatgggaggcaaaccanaggggaaatctcaaanggtaccatgttaggcccctggccttgacaanaaaa

SEQ ID NO: 9154 - DNA, 397 bp, Arabidopsis thaliana
  unsure at all n locations
  Clone ID: LIB24-125-Q1-E1-B2
gtttgcaagagaaagataggctaccaagtgatgtttgcaaacctgtcagatcaaatgtgccgatgaatgcagatagttctgattcttcaaggaggcttgttccagtttcccgtgagctggagaagcctgtttgcaaagatactcacatggggagacatggtgtaaaatctgcattagatggtgaaagtcttcgtttatcaaagcaagaaaaaccaaagcgtatgaatgaaataagcgcacccaaagaagagaatgcggnacaatctttgggcgttgtatctgcgtctaattgcggaaagtcaaagatcaaaggcgtctcactgattgagctgttcactccagagcaagtagaggagcatatccgcggtcttcgtcagtgggtaggccaagagtaaaa

SEQ ID NO: 9155 - DNA, 500 bp, Arabidopsis thaliana
  unsure at all n locations
  Clone ID: LIB24-125-Q1-E1-C11
gttaccttgccgtnccggtccgaaattcacgggtcgacccacgcgtccgcncacgcgtccgatcagaatccttacaagaccatttgtgtctgtctccaccaaacccttcttttctccatttttcttttttgctttgtttcngtgctacgatttgtcaaaaaaaagaaacccaaatcaaaagcttcgaaatttcataagatttctttgtttttctgaagatccaaggcacacagaaaaacagctttttttgtttcntcaatcaangattttccagggttttgataaccccatgggttcagggttctctctgtttcanaagaatttatcgtcttgttatgggagatcgangatctgttgcagcctgggnttaagagaatttgcctgaaagttgtgtggctttgattctccaagaatttggattcccgttganatcgtacaatctccaagctanacacgggttttcaagggcgcttctngggctgaattccgtttgggnaacc

SEQ ID NO: 9156 - DNA, 438 bp, Arabidopsis thaliana
  unsure at all n locations
  Clone ID: LIB24-125-Q1-E1-C3
acgcgtgggctttcttcattcaaagagcaaaactatctaattccatggcgttctccctcctctctccaattcctacctctgcctctctttttttcactctctccgccattaccgcttctaataatgcttcctcctcctctctctcccgtctttactctttatatcancccaaaggaaccttacgaaccaggaaccgcgacctcgtttttcggagcttctgggaacttgaggattgtttccatggcggagaataggcaattggtttgtacgattggtggccggaagccggtgntgaattggatgatatggatnaaggtgaaanccaggaggattggaaatgaagacgaangacgacgnnganttnagacanntccaagcgnantanttccccctggntgnttncgcctggagaagattgggatgtttttggggtctccg

SEQ ID NO: 9157 - DNA, 422 bp, Arabidopsis thaliana
  unsure at all n locations
  Clone ID: LIB24-125-Q1-E1-D2
aaatccagacaaggagcttcagaaagagctgaaatcgagttataaagcacttgatgatgatcagaagagcgtatttctggacatagcatgttttttcaggtcagagaaagcagattttgtttcaagcattctgaaatcagacgacattgatgctaaagatgtgatgagagaacttgaggagaagtgccttgtaaccatttcttacgataggattgagatgcatgatctattgcatgcaatggggaaggaaattggaaaagaaaaatccatcagaaaggcaggcgaacgtcgtaggttgtgggaaccacaaagatattcgtgatatcctggagcataacacgggcactgaatgtgttangaggcatcttcttgaacatgtctgaagtcagaaggaatcangctttttcctgctgctttcacga

SEQ ID NO: 9158 - DNA, 413 bp, Arabidopsis thaliana
  unsure at all n locations
  Clone ID: LIB24-125-Q1-E1-D5
aatattgaagaaagtttctctgatatttgttanatggaagaagattgcgagtttcgacattgggatgagttgattccagatgctcttggtttaatctttagccacttacctcttcaagaagtactaacagtggtgcctagagtttgcaaagcatggaacagagctgttactggaccttantgttggcaagagattgacattgagctgtggagtaaccgttttcaccagtctgatcatcttgaccggatgcttgagatgttatccctagaagcgcnggctctttgcganaactctccgntactgggcttcnnaaatgactccnanncgtcnccttcatttgcacaacatgnntggttcacttaagaccttggaangtgncaacaangtgngnccggacnaattccgggtggtgg

SEQ ID NO: 9159 - DNA, 343 bp, Arabidopsis thaliana
  unsure at all n locations
  Clone ID: LIB24-125-Q1-E1-E3
gatagccttagctttgtagctctaagaaataggtcgggatctctcatggaagatgcaataattttttgtgggagcttgatctgatccgtaaagatgttggtgattgtgagatacttgagatcattttaaaatattgtcgacctaaagtgaacgtacatagaggatccattatcaaagtcgcaccaccgatcaaggatcatcaagtttatgctttcataaaacgtggccaagagttgagtttagcgataangttcctagatgataagcgcaagaccaattcatcaaaatcgattcacatctcatgtcangtcctcgggcacataggtaagagaatncgatgcat

SEQ ID NO: 9160 - DNA, 421 bp, Arabidopsis thaliana
  unsure at all n locations
  Clone ID: LIB24-125-Q1-E1-E7
ttcggacagaacaaaactccctaatccaaatgtcaattcctttggtctctctctgaataatcatctctcttcaaaccctattcaattttaactatcgatcttcggctaagtctccaatggcggcggcgtttgcctctcttcccacatttagtgtcgtcaattcctccagatttcccagaagaagaatcggtttttcttgctccaaaaagcccctcgaagttcgttgttcttccggcaatactcgttacactaagcaagaagaggggcatttacatcactgaangaatgtgngatttcattaggctttatcggttggtttaatggtttcagtancttcgattgctttgcctcccaatgctcagngcaggtggcgaaggccagtgnttnnagatgtttcaagtgttgatctccggnccgtccg

SEQ ID NO: 9161 - DNA, 404 bp, Arabidopsis thaliana
  unsure at all n locations
  Clone ID: LIB24-125-Q1-E1-F7
actggaaagagtaaaggaaggaaaaaacggaattttgacgatggatgcagagatattccaagtgacgccgacgtttcacctggtggaagtgaagaaatgtaatggagatacaatggagtatcagaagttagtggaggaggatcttaggcctgctttggcagatattgtttgggtttggcaaggcgagaaggagaaagaggagcagttactgcaggatgaacaaggagagcaagaaccatcatagcaagttcagctacaagcctacaactgcaagcacatgaattgttgcaggaacatgaaaatggtaaccctcttgcgacttcagctgaancagaagcaagcatcaagaaactctaacgaagncagaggaangaangcaatangcaagtgcacaaanatggatt

SEQ ID NO: 9162 - DNA, 419 bp, Arabidopsis thaliana
  unsure at all n locations
  Clone ID: LIB24-126-Q1-E1-A10
gcaagtnnnnnnnnnnnnnnnnnnnnnnnnnnnnnnnnnnnnnnaaaaggggttgcgatttgnnnnnnnnnnnnnnnnnnnnnnnnnnnnnnnnnnnnnnnnnnnnnnnnnnnnnnnnnnnnnnnnnnnnnnnnnnngtacctatggcggctgccggaaatggtctttcccggcggagacatagagccggaagtttcagagattcaccagaggaggaaggtccggtggagttaccggaggcggcgaggttgagagatcgaggagggagtaatannnnnnnnnnnnnnnnnnnnnnnnnnnnnnnnnnnnnnnnnnnnnnnnnnnnnnnnnnnnnnnnnnnntcggttaaatagccggagtaaacggcggacaggagaacgcttaatgatggttcacggttaatctagangacggttgca

SEQ ID NO: 9163 - DNA, 436 bp, Arabidopsis thaliana
  unsure at all n locations
  Clone ID: LIB24-126-Q1-E1-A11
ttcctcagccatggccgtcgggaaaaacaagagaatctctaagggtangaagggaggaaagaagaaggctgttgatcctttctccaagaaagattggtatgatgttaangctccttcaatcttcactcacaggaatgttggaaagacacttgtttccataactcanggtaccaaaattgcctcagaaggcttgaaacacagantttttgaggtttctcttgcngatcttcangttgatgaggataacgcttacangaagatccgtctcaaagctgaagatgtccagggcaagaacgttctgtgccaattctggggcatggacctcaacaaccgattaacttaagtcattggtttaagaaattgcaaactttgattgaaggccatgttgatgttaaancccancgggaantnanactcccaaggcnattcccggtat

SEQ ID NO: 9164 - DNA, 496 bp, Arabidopsis thaliana
  unsure at all n locations
  Clone ID: LIB24-126-Q1-E1-A2
ctgttacgcctgccgtagcccgtccgaaattcaagggtcgacccacgcgtccgcccacgcgtccgcttcttcacagaaggaacgttcgaattgattcgcttcntaatgtcactctctacaatagcttctggtatcggcgttctcgancttccttgtttgcgtctgttaccaatctcaagcanncaaatccagtttctcantgttgaanctaganaacantctagaagaataagacgcgagcgctccttcagcccttttccaagtacttattcaatcgaaccgtcgtcntcgtcatggtttctcagagctcaattcgagttttgatcgttccaacagtggagaaactggttccgataccactcttaaanatggtgaanaagtgaggagtgaaanctcttcaggtgttggtgatagctatgtgggcttgtttgtgggaatgctcggtttggacaacgattctcctgataagngancaagcgaaagggacnccatggga

SEQ ID NO: 9165 - DNA, 451 bp, Arabidopsis thaliana
  unsure at all n locations
  Clone ID: LIB24-124-Q1-E2-H8
ntttcgcttcaattcantannnggnganaaatctctcactgcactttatctcgagagctcanatcnccgatctacagcctttcgcttcncctcttctgttcatataacaactgantaatgtcgatctccgcccaaaatccggatatttccggcgatagacaatccggncaanatgttcgtactcanaacgtgatggcttgtcaanctgtttctaatattgttaanacctcacttggtcccgtcggcctcgacaagatgttggtggatgatattggtgatgtgactattacaagtgatggtgctactattcttaggatgttggangtcgagcaccctgctgctaangttcttgtcgaagttagctgaacttcaaggatagagnangtcggtgatggggactacatctggttgttattgtagctgctgaanttgttggganaagggcaaaatg

SEQ ID NO: 9166 - DNA, 475 bp, Arabidopsis thaliana
  unsure at all n locations
  Clone ID: LIB24-124-Q1-E2-D3
acgcgtccgtgataggtttcangacgacacccattattgtaaatctgctgctggagtcnttttttgtctgaatcttcttcttgttgagacactgtttcttcttggtctgtgatttttgttttgttctcattaggacgttctttattccggttcagatttactggatcgtcattttctctttgaaattgtatntttttgttccttttcnggtangttgtnaaagctatgagattgctgtaagaatccaagactgaccaacatgtttcncctgtgctcggccacaagctgccgttaccattctcagattttatttcntggcaattggcnaagctgttcttccttcanganagaagttgattcacagaatncagttcaaggtgacaatgccttccnttggtatcncctaaatgggaacacgcctgcagaaagaatttccgtancctcaaagccaactgggaagtttccttgaaccggt

SEQ ID NO: 9167 - DNA, 455 bp, Arabidopsis thaliana
  unsure at all n locations
  Clone ID: LIB24-124-Q1-E2-D4
acgcgtccgctgggtttgaatcaagaagcaaatacttgtttggtaaagtctctatccagattaagcttgttgagggtgattcagcaggaacagtcactgctttctacatgtcttcagatggtccgaaccacaacgaattcgattttgagttcttagggaacactaccggcgagccttacatagtccagaccaatatctacgtgaacggagttggaaacagagaacaaagactcaacctttggttcgatcccaccactgagtttcacacttactcaatcctctggagtaaacgcagtgttgtattcatggtagacgaaacaccgattcgagttcagaanaatcttgaagagaaaggtatcccatttgctaaagatnaagcaatgggtgttacagctccatttggaatgcagatgattggggctacacaaggangtcctgttaaaactgantggagt

SEQ ID NO: 9168 - DNA, 458 bp, Arabidopsis thaliana
  unsure at all n locations
  Clone ID: LIB24-124-Q1-E2-D6
acgcgtccgcaantttatctcncaaaagacaaancacaanaaaatggcttccantgctctctcaagcgccatcgtcggaacttcattcatccgtcgttccccagctccaatcagtctccgttcncttccatcagccaacacacaatccctcttcggtctcaaatcaggcacngctcgtggtggacgtgtcacagccatggctacatacanggtcaagttcatcacaccagaangtgagctagaggttgagtgtgacgacgacntctacgttcttgatgctgctgaggangctggaatcgatttgccntactcntgccgtgctggttcntgttcganctgtgctggtaaagttgtgtctgggatcggttgatcagtctgacnacagtttccttgatgatnaacagattggtgaatggtttgtnncaacntnngcggcgtagcctaactccgnatgttaa

SEQ ID NO: 9169 - DNA, 457 bp, Arabidopsis thaliana
  unsure at all n locations
  Clone ID: LIB24-124-Q1-E2-D7
acgcgtccggtttgaatcttggagggatgggttgcagtgccggagttatagctgttgatgtcgctaagggattactacangttcataggaacacttatgctacttgtagtaatcacagagaacatcactcagaacttatacttggggaaaatcaaatcaatgctactcacaaactgtttgttccgcgttggtggtgctgcggttctgctttcacacagatctatagaccgtaaccgcgccaaatacgagcttgttcacaccgtacggatncataccggatcagatgagaggtcgttcgaangtgcgacacangaagaggatgaanatggtatnantggagttaccttgacatagantcnanctatggtggctgcaaggactcttaagataaatatcgcaactttgggtcntcntgtacntccattnananagaagctagccttccttaactactttt

SEQ ID NO: 9170 - DNA, 469 bp, Arabidopsis thaliana
  unsure at all n locations
  Clone ID: LIB24-124-Q1-E2-E1
acgcgtccgctcttcttaaaccccannnnnnnnnnnnnnnnnnnnnnnnnnnnnnnnnnnnnnnnnnnnnnnnnnnnnnnnnntggatcttctctttctctttttctctcttctcctctcttacctctttttcaagatctggaaactcatagacncaaagcaagacaaagattgctacattttanactaccaatgtcataaaccaaccgacgatcgaatggtgagcactcaattcagtggagagatcatttatcgaaaccaaaaccttggtttaaccgaatacaagttccttctcaaagccatantaagctcagggattgggtgaacaaacctacgctccaagacttgtctttgaaggtcgagaagagcgtccttccgttacaagatgggatctcccgagatggaagagttctaccgtggacaagcaatcgggnaaaactcctgggagaagaaaatcaaantttctcct

SEQ ID NO: 9171 - DNA, 452 bp, Arabidopsis thaliana
  unsure at all n locations
  Clone ID: LIB24-124-Q1-E2-E6
acgcgtccgcgaaattgccttgttantatcgggtgcgacgattgtggaccanattgttacaataacgagctgaaaactatgttcagaggcgtgagacacaggaagtaagaatgttggacaacgcgatgcctcttggtcttcaagagagtactacacagactaaaacgaacatggatggtaatagtagagcatacgttagcatcagcacaagatgtggtggcaanggttttggcaaaagggtctgctcttggacaanatgcagtgaataaagccaaggctttcgacnaaangcaccaattaagagccaatgcttctgctaaagtttcatcttttgacaagcgagttggtcttactgagaanttatctgttggtatttctgctgttaatgananagttaaatctgttgatcaaaagcttcaaagtctncgataagactatngcaagcaatattt

SEQ ID NO: 9172 - DNA, 460 bp, Arabidopsis thaliana
  unsure at all n locations
  Clone ID: LIB24-124-Q1-E2-E7
acgcgtccggtcttctcatctcttacaagactgtttttgtgttcanttttgagtanatatggaagtggttgctgttgggtcaatgaagacgcaaanacangagacatgggcttgctctgtcantgagtcttttctcctcctcgtcggaaagaatctggcttgtcttctccttgtggcagaatcattactganaggtttggttgctgttgaccagaggttgtctgtcaaggagggttacanaanaggaagccgtattgaggaaaacaaanatgctagtgacagtgacnatgacgacgatgatgaagacgctgatnaggactacgatgatgaggatgatgctaatgatgaagatttctcagggggtgaanggggatgaaggngaagaaagaagctgattcanaaggatgatctgtgaccantggcgggaggagggaancgnatgatgaaagatgacgatgcn

SEQ ID NO: 9173 - DNA, 454 bp, Arabidopsis thaliana
  unsure at all n locations
  Clone ID: LIB24-124-Q1-E2-F5
acgcgtccgtcnctctctgtgctcttccagtctctatcgatcgccttctgaattttccggcggaaaagcaaatgtccgttaacgacagtatcgatcctcggttcgtattccacgttgaagatgaatctttgcgtttccgtgtgggagattcaggtactaagatccgggagctcgaaaccgtcggcgatcgccatttcagaacccagcaaggtttctgcggaaatanaattgagaaagatgaaaccatgtattccgatggagatgatgaanagtacgacgtttctatccnaagacgaactgctctgattcagcctggtattgattccggtaacaattatgattcngctgcagctgaagaaaccaanagagaaagtaaaaatccagttggttgggaactggttgtganagaagatggggaangtattcaacgattgatcancatgaaatggaattt

SEQ ID NO: 9174 - DNA, 461 bp, Arabidopsis thaliana
  unsure at all n locations
  Clone ID: LIB24-124-Q1-E2-F8
acgcgtccgcccacgcgtccgaatttttgcaaaagcaacgtacccatcttatcattattttataaagatcctatgtctatccgtaaatggactaatctttagacacacagagaatataatgagtttgaaaataaagtttctgcttctgcttgtcttgtatcatcatgttgattctgcctctatcgtcaagtttcttcctggttttgaaggccctcttcctttcgaacttgaaaccgggtttgtaatttttttttttttttaaccaatgcatttatttgtgtatgtaaacaagcattcttcttaatgaaggtacattggtattggtgaggacgagaatgtgcaatttttctactatttcatcaaatctgaaaacaatccanaagaagatcctcttcttatatggttaaaatggaggacctggatgttcgtggtcctgggtgggtaatanttttggagaaagg

SEQ ID NO: 9175 - DNA, 453 bp, Arabidopsis thaliana
  unsure at all n locations
  Clone ID: LIB24-124-Q1-E2-G5
acgcgtccgctcttcgttactaatgtcatcgtattcttcagattccacggcggcgcgtgatcaacatgcgcctcnactccgtccacgacacganggctctttttcttcttcttcttcatcagccagacctacagctctcgccgttctattaggacggatcaccggccaccgagcaccgtcgatgctggttagagaaacagcggcgcgtgctctcgaggagagacgaatcgattggggttactcgaagcctgtagttgctgctgatatactatggaacgctgctttagttcttgcgtcagcggttatgcttgtcggtaccgttgaagaaagacctaatgaaccgattanggtttggatctgtgtgtatgggttacagtgtttgttccatgtggttttgggtttggtctgagtattggagaagaanctcaactcgtagagctatggaattggant

SEQ ID NO: 9176 - DNA, 462 bp, Arabidopsis thaliana
  unsure at all n locations
  Clone ID: LIB24-124-Q1-E2-G6
acgcgtccgcaacngcancatccttctcccttgtgcganatcgtttgcgtgngatttgtctgaaaagtagcgaaccatgggtaaagagaactttcanatcaanattgnggtcattggccacgtcgattctggaaagtcgacanccactggacacttgatctacantcttgggtggtattgacaatgcgtgtgatcganaggttcgagaaggacgctgcttgagatgaacangangtccntcaantacgcatgggtgttggacancacttaaggctgatcgtgagcgtngtaccaccattgacattgctctctggaagttcgagaccaccacgtactactgcactgtcattgatgctcctggtcatcgtgatttcatcaagaacatgatcactgngtacctcccatcactgantgnnctgtccttancattgactccaacactggtggttttgaagcnggtat

SEQ ID NO: 9177 - DNA, 456 bp, Arabidopsis thaliana
  unsure at all n locations
  Clone ID: LIB24-124-Q1-E2-G7
acgcgtccgccanantcaaagataaacggaggagangagagcttcgncgtcttcttcttcttcgcctccatgaatctcctcaggacnattcattacnagtctannattantcgattttantgttttgcccctacangcncctttgcttcttctgtgtcactctctccacagagacacataatctctctcgtttctagcnctaatcgtggaaggtgcttcgcattctcgagcgtctctggtgcttcgctttataatactcaagaggatgggaagaaagaagagtccnanagaaattacgcttcgacganggaaggagatgaagtggtttaccaagaaaacgctganattagtagaatgtgccatgttcgctgctgtgacaggcctcgtttactttcncaagcaattcgctcgccanttgataacnactttgggtgtttcctctcactngcaattggg

SEQ ID NO: 9178 - DNA, 496 bp, Arabidopsis thaliana
  unsure at all n locations
  Clone ID: LIB24-124-Q1-E2-H6
tttccctggnccgtaccggtccgaaattcccgggtcgacccacgcgtccgcggacgcgtgggtggcatccgganataccaccagtagcanaggtcaaggctggtgantttttccgggtanaaatgattgatgcaatgggaggtgttatcaaagacaatgactctgcaagcgatatcaagaacctagtcctaactactactcatcacctaagtgggccgattagggttgtagatgaggaangtgttgcagctaaagcatgtgatcttcttgctgttgagatatgcaacttgggtcctcttccaggagatgaatggggattcactggttcgtttgatagaganaatggtggcggtttcttgactgaccatttcccttgtgcgaccaaanctatttggtactttgaagggatctatgcctactctcctcanattcctgnagtangatttccgggtttgacacacccaggagtcattgggcactgcacatccantgaact

SEQ ID NO: 9179 - DNA, 484 bp, Arabidopsis thaliana
  unsure at all n locations
  Clone ID: LIB24-124-Q1-E2-D1
acgcgtccgaactgttcttcatcgaattctatcttttgagagaaactaaattaagttgataatcgaagaacttcctcgaaattaggacttcttctgctttttgttgtttcctagagattttcctagaacgtggtccaagaaaatcacacaaaaaggttcattccttttttcttaccagaaaccacaaatcaaaatcatctcccctgtctttgtttgaaatctctcaaatttaagaaggatcatccattcactaacctgagattttggataggtttcatctatttcaggtgggaattccagtgcatcgaccatgatcaacacctaaaactacaaattgacccgttttgcccttggggaatcactataaatgtcgagaaagaacaagactcccaacgttgggcaancgtgggccgccaaccgtgggctggccaacgtttcctcccnncttcaatttccccggccnaatntttgaaatcgaacggtt

SEQ ID NO: 9180 - DNA, 427 bp, Arabidopsis thaliana
  unsure at all n locations
  Clone ID: LIB24-124-Q1-E1-G2
acgcgtccgcggacgcgtgggttatccttttaccctcatcatcctccactatttacagttttgccactctgactttatgctagcttcttccggtgactggcgataacacgagagagccttcgccttctccaagcttcatactcttccgacgataaagattagaagacatgaagaacggtaaccggagaaagttatcagagaaagcgatgtcgtttcacggcagaggaacaacgccgttatcaaatccaggcgagcttcgaagaccgaaaacgttaccggagttattctccaccggtcaaagcatcaccgtaccggagacggtttcacttccgccacgtttgacgaaacttttacttaacgtgacggtacaaggaagtttaggagccgtacaaantataatctcgccggaatccaccgtgaggtgatt

SEQ ID NO: 9181 - DNA, 438 bp, Arabidopsis thaliana
  unsure at all n locations
  Clone ID: LIB24-124-Q1-E1-G5
acgcgtccgctcttcgttactaatgtcatcgtattcttcagattccacggcggcgcgtgatcaacatgcgcctctactccgtccacgacacgacggctctttttcttcttcttcttcatcagccagacctacagctctcgccgttctattaggacggatcaccggccaccgagcaccgtcgatgctggttagagaaacagcggcgcgtgctctcgaggagagacgaatcgattggggttactcgaagcctgtagttgctgctgatatactatggaacgctgctttagttcttgcgtcagcggttatgcttgtcggtancgttgaagaaagacctaatgaaaccgattagggttttggatctgtgtgtatgggttacagtgttgttcaatgtggttttggtttggtcctgagtattgggagaangaaactcaactcgta

SEQ ID NO: 9182 - DNA, 431 bp, Arabidopsis thaliana
  unsure at all n locations
  Clone ID: LIB24-124-Q1-E1-H2
acgcttcngttgggntgatgaagtgtcctgtaattgtagacaatgcatggcacaanatancagcttcgtcgtcttcttcttttgcttcctcggattctcctcccgacatggcaaagattgttcgcgaagttgatcctctangggacgattctccccccgagttcaaaatgtatatggttggtgctgagtntgggaacatgccaaagtgctacgctttgnacangttcacanactttgttccgatggggggcttttccgatgttaatcaaggttgtgcanctgctgaaggaaangttgatcacnaattcnatatgaanccatatggtgaaaccattgaacaatatgccaaggctttgtcctgagataacgagcaannccatggttaaaaatcgacagattcaggttantgataatgaccgcggagntcatat

SEQ ID NO: 9183 - DNA, 430 bp, Arabidopsis thaliana
  unsure at all n locations
  Clone ID: LIB24-124-Q1-E1-H6
acgcgtgggtggcatccggagataccaccagtagcagaggtcaaggctggtgagtttttccgggtagaaatgattgatgcaatgggaggtgttatcaaagacaatgactctgcaagcgatatcaagaacctagtcctaactactactcatcacctaagtgggccgattagggttgtagatgaggaaggtgttgcagctaaagcaggtgatcttcttgctgttgagatatgcaacttgggtcctcttccaggagatgaatggggattcactggttcgtttgatagagagaatggtggcggtttcttgactgaccatttcccttgtgcgaccaaagctattttggtacttganagggatctatgcctactctcctcaaattcctgggagttacgantttcccgggtttgacacacccaaggagtcaattggc

SEQ ID NO: 9184 - DNA, 422 bp, Arabidopsis thaliana
  unsure at all n locations
  Clone ID: LIB24-124-Q1-E1-H7
gggcggacgcgtggggtccacgatgaagatgaaagcggatgaggctatttggggatcactgcttaatgcttgtaagatacatggccatctggatttggctgaagttgctgtaaaaaacctggttgctttaaatcctaataatggaggttatgtcgctatgatggcaaatttatatggagagatgggtaattgggaagaggcacgtagagctagaaagatgatcaagcaccanaatgcttataaaccaccangctggagtcggattgagatcgataacgangtccatcaagttctactctcttgacaaatcacatccgggagactgaggagatatacatgatacttgacaagtctgatctcttcctgacacttttggaangtcctagnttctcctatatgacttgacacagctgcactcctgc

SEQ ID NO: 9185 - DNA, 429 bp, Arabidopsis thaliana
  unsure at all n locations
  Clone ID: LIB24-124-Q1-E1-H8
ttttcgcttcaattcaataaaaggcgaaaaatctctcactgcactttatctcgagagctcagatctccgatctagagcctttcgcttctcctcttctgttcatataacaactgaataatgtcgatctccgcccaaaatccggatatttccggcgatagacaatccggccaagatgttcgtactcagaacgtgatggcttgtcaagctgtttctaatattgttaagacctcacttggtcccgtcggcctcgacaagatgttggtggatgatattggtgatgtgactattacaaatgatggtgctactattcttaggatgttggaggtcnagcaacctgctgctaaaggttcntgtcnagttaacctgaacntcaaagatagagaagtcggtgatnggactacatccngttgttaattgtagcctggctga

SEQ ID NO: 9186 - DNA, 475 bp, Arabidopsis thaliana
  unsure at all n locations
  Clone ID: LIB24-124-Q1-E2-A3
acgcgtccgcatcaatggcttcacttcttattttcccccatcttcaccattttgattcttcactggaccgtatagaggtactagtagttcgccattcanaagcatcaaggcgatttctcactccgaaagcttcanttaatggcancggnatcacaaacggngctgcagcggnaaccacctctaaacctantcgcaangggaggaanaanaagcaaacatcgacggtaattgagaaatataacaccgagactgatcctgaattgaatcnggagttagctgattacgacgacnggatccagtttccgtacgacgatncgcctcttgtgtgttgcttcggagctgtacagaangactttgttcccngtggtncgaatccaatgataatcccgatgcatcctgataagtacccgcagtgggaaagatctacaagttgggatncaaccnggngttttgggaaaagctccgggaaggtccg

SEQ ID NO: 9187 - DNA, 469 bp, Arabidopsis thaliana
  unsure at all n locations
  Clone ID: LIB24-124-Q1-E2-A4
acgcgtccgtgtttatgtgcttttaaaccctgctatcaatcacacacagaaggatcttccagtgactatttatgaaagtgaattgcatgtcattgatggaatcccgcagctaattttcgctcatacaagctacacaatcgagacagttgaagctgaacggatatcanttgatcatgttgcacatcttaaaccatctgacggaggctcagcagcaacccagttggctgctcatcttactggtanacatagtgccatcaanatgcttaatagcaagaatcagagtgctttaccaaaatcttgctgcaatgcaagaaaggtgataaatcctgtgacanctcagttctgagacaagtatctagcctgctaagaagattgcctgccatgggaatcagagagatttcaaganaatttcctgatggagtacaacgacannttactaatnacttacctancgatgattacaaagttg

SEQ ID NO: 9188 - DNA, 509 bp, Arabidopsis thaliana
  unsure at all n locations
  Clone ID: LIB24-124-Q1-E2-B8
ggnaaggcttcgcctggccgtaacggtccggaaattcccgggtcgacccacgcgtccgcgccggatactacgccgatgacgattgcggcagcgccagcacgccagacagatcgatcagccactggtttcaaccctgcttacgtcacgacggcgaacgcggtgagcgttccggttcangttcctccggcgactgtggtttccgaaggattaggtaaagatgcgttgatctcatggttcataggagaattcgctgcggcaaacgcgataatcgacgcgatgtgctcgcatctaaggatanctgaagaagcggtatctggatcggagtacnaacctgtattcgcggcgatccatcgccgtcgtctgaattggatccctgttcttcagatgcanangtatcattccatcnctgaagtagcgatcgagcttcagaaantggcggctaaganancggaggatnttaaacataagaaaacatcatgaagaggcngangaaagatctgaaagaagtg

SEQ ID NO: 9189 - DNA, 465 bp, Arabidopsis thaliana
  unsure at all n locations
  Clone ID: LIB24-124-Q1-E2-C3
acgcgtccgcanaaagcgcgagatctgagtgacggagtaatttcaaagggaggttttcgagatcagaaatggcgcaacccctcgtgaagaaanacgatgatcacgacgatgagttggagtattctccattcatgggaattgagaaaggagcggttcttcaagaggctagagtctttaatgaccctcaggttgatcctagacgatgctcccaggtcattacnaagcttctttatttgcttaaccaangggagtcattcaccaaggttgaagcaacggaagttttcttttcagttacaaagctttttcantcaaaagacacgggtttgaggagaatggtctacttgatcattaangagttatctccatcatctgatgangttatcatcgtaacaanctctctgatgaaagatatgaatagtagaaattgatagtttcgagcaaatgcaanccgttgtctcctgccgg

SEQ ID NO: 9190 - DNA, 450 bp, Arabidopsis thaliana
  unsure at all n locations
  Clone ID: LIB24-124-Q1-E2-C4
acgcgtccgtatcttcttccccttgnctttggaagctgctattcctctgtaaaacaatagcatgaagaanaagctccagacacgttttccagcgacanggattaagaagattatgcaaactgatgaggaagttggcacaatagcaatggcagtccctcttcntgtttctaaagctttggagctgtttttacaanacntgtgtaatcacacgtatgatgtaactcnaagccnangtgcnaaaactgtcaacgcctttcatttgaagcagtgtgtgcaagcnactaatgtctttgattttctaananacactgtcgctaaagttcctganttgggtgggctcagacactgangaccaatcagctaccaaaaagaaggaaagttgttgatggnaatagtttcaacgaanaagatatgnacangancactcaaatgcatganggtcaaacatac

SEQ ID NO: 9191 - DNA, 456 bp, Arabidopsis thaliana
  unsure at all n locations
  Clone ID: LIB24-124-Q1-E2-C7
acgcgtccggtttttcatgcttcaaaccctccttgcactctccgcttccctccgttacctttacttctctattgcttagctcgaaaaatggcatcttcagccgcccaaatccacgttctcggcggaattggnttcgcttcntcttcttcttccaaganaaatctcaatggtaaaggcggtacctttatgccgagaagtgccttcttcggtacaagaaccggtcctttctccacacncacttctgcttttctcagaatgggcaccagaaatggcggcggcgcttctagatacgcggttggtccggttcgtgtggttaacgagaaggttgttggaattgatttgggtacgacnaactctgcagtatctgctatggaaggaggtaagcctacgattgtgactaacgctgaaggtcagangacaacgccttctgttgtggcttacacgaagantggtgat

SEQ ID NO: 9192 - DNA, 462 bp, Arabidopsis thaliana
  unsure at all n locations
  Clone ID: LIB24-124-Q1-E2-C8
acgcgtccgctttantcgttgggaaaagtttgntnatacggagtggccaattcttggtgtanaatgagaatcngatagagagagagtcatggaagctctgaaaaccgcaacttttagccctatgtcngtgttatccgagaanagatcacganccacgaaaagcctttctcgctcccnaacctctttccaccaanatcacaggagaccaatctcccaagaaagcttcttgaagagattcantggtggattggttcttctaacttctgttctaagcagtgcaacagctcctgctaaatccctgacgtacgaggaagctctgcaacantctatgaccacttcttcatcttttgattcggatggtctgattgaagggatatccaattttgtcanaggacaatcctttggttattgccggtggagttgctgcattggctgttccatttgttccgtcccaagttcaga

SEQ ID NO: 9193 - DNA, 439 bp, Arabidopsis thaliana
  unsure at all n locations
  Clone ID: LIB24-124-Q1-E1-F5
acgcgtccgtctctctctgtgctcttccagtctctatcgatcgccttctgaattttccggcggaaaagcaaatgtccgttaacgacagtatcgatcctcggttcgtattccacgttgaagatgaatctttgcgtttccgtgtgggagattcaggtactaagatccgggagctcgaaaccgtcggcgatcgccatttcagaacccagcaaggtttctgcggaaatagaattgagaaagatgaaaccatgtattccgatggagatgatgaagagtacgacgtttctatccgaagacgaactgctctgattcagcctgntattgattccggtaacanttatgattctgctgcagctgaagaaaccaacagagaaagtaanaaatccagttggttgggaactgggttgtgagagaagatggggaaaggtaantcaacgatttg

SEQ ID NO: 9194 - DNA, 422 bp, Arabidopsis thaliana
  unsure at all n locations
  Clone ID: LIB24-123-Q1-E1-B4
aacctctcttcatcgaaaatgtggagactctctgtgtcaattttcctcttctcatgtctcttcgtttcttcgtcttcgttgggcgattcggaggcgacgtgttccggtatagttccgttacggtaccggtacgataagatctcgataaccgactttggangcgttggagatggtcgaacggtgaatactaaagcgtttanggcggcgatttatcggattcagcatctgaagaggagaagaggcacgcctttgtntaaaactccgggagtgtatttgaccgagagcttcaatcctcactagccatnatgacncctttacctaanctaaaagggggcntgaataaaaccgnttcaaggaaanctggnaattgggcanttgaatgattccnttgcccgtccttattggaaaaaagggaaaanagt

SEQ ID NO: 9195 - DNA, 432 bp, Arabidopsis thaliana
  unsure at all n locations
  Clone ID: LIB24-123-Q1-E1-B6
acgcgtccggttatgggtcgatgtgttgaagaaaacgttggagcatggcttagcaccaaaatcatggacggattacttgtatctaaccgttggaggtacactctccaatgcaggaatcagtggtcaagcttttcaccatggtcctcaaattagtaacgtccttgagctcgacgttgtaactgggaaaggagaggtgatgagatgctcaaaagaagagaacacaaggctattccatggagttcttggtggattaagtcaatttgggatcatcactcgagcacgaatctctctcgaaccagctccccaaagggtgagatggatacgggtattgtattcgagcttcaaagtgtttacggaggaccaagagtacttaatctcaatgcatgggtcaattaaagtttgattacgtggaaaggnttgtgattgtgggac

SEQ ID NO: 9196 - DNA, 491 bp, Arabidopsis thaliana
  unsure at all n locations
  Clone ID: LIB24-123-Q1-E1-C1
tgttacgcctgttggtaccgccccnaaattcccaaagtcgacccacgcgtccggtttcgaagaatggcctaatgtcctctcactcttgggtggtctgattgtgatcaaaacactgattataaccgcaatcggtccccgagttggcctcacaatacaagaaagcgtaagagttggctttcttctttcccagggaggagaatttgcatttgttgtgttctctctagccaacaggctaggagtgcttccaaatgagctgaacaaactgctcattatcgtagttgttttgtctatggcattaacaccttatcttaaccaacttggaagaaaagccgccgattttcttgatgagagacttgatcccggagaagaaaataggtgaagatgtgaacttcgatgttagtgaatcaaatgtcatcattggatttggacaaatgggtcanggttctgggcaaatttttgtcaacgccaantgggctcaagataagtggatc

SEQ ID NO: 9197 - DNA, 457 bp, Arabidopsis thaliana
  unsure at all n locations
  Clone ID: LIB24-123-Q1-E1-C4
acngccccaaaattcccaaggtcgacccaggcgtccgcatcgttgcttagtaagaaagtagaaagtttctgagaatctcgggcacgaattgaatcagataattcgctagaatcggtttaacgctttaaaggcaatcgctttgcattctcatgaattctcttatactcggtgctgctagaangttcgtggggttgcatttganagtttcagtgaaccttttgcaaaatgaatctttctcttcgtattcgttctcttctgctagtgctgctgangtgagccctaaaggggagacctttaaatcctcgtccttccttgattcactgcgtttancnacnannntcactgacnanggaaattctgantccgttctggatgttctcanaagttatgggtncactgaatctcagatcccagcatcatcangagtgattcaagantgcttanagacaatgatgcg

SEQ ID NO: 9198 - DNA, 427 bp, Arabidopsis thaliana
  unsure at all n locations
  Clone ID: LIB24-123-Q1-E1-C7
ccanannatcaaaagcatttagttttctttcccatcctgtacccgaatgttcttgcantacgcgaacccatccggtttcaaatgccacanatcttggggtgacacaccgttgtccgcaatgggtggatggtgctgtaagcgaaagattaaaggagtataagaacgcanagaaagaagaggatcttgatgaataggacttgtcttcttcaggattgttctttggtcacaaggaaagtggagggaataatantggtaacaatgagactgtaaattncnangctaacnataangaagaaggtcagcttgaacatcaagaanaacttnaaggcatcgaangataaggcttgtggttgaagatgcaacaatgagcangtcgcagatanatctaaccttttctcaaaaataatttaatgcctggttattacat

SEQ ID NO: 9199 - DNA, 436 bp, Arabidopsis thaliana
  Clone ID: LIB24-123-Q1-E1-D1
cactctctctaataattctccagaacattttgcacattccgtttcactccgtgttgttggatcccccaaagaaaatgagttgctttgggtgttgtggggaggatgatgatatgcataaaactgctgattatggaggtcgtcataaccaagccaaacactttcctccaggaaatgatgcaaggcaccaccaagcctctgaaactgcacagaagggtcctccagttgtgaagttgcagcctattgaagtacctattatcccttttagtgaactcaaagaagcaactggatgattttggatcgaattctctcatcggtgaaggctcttatggaagagtatactacggggtattaaaacaatgatctgccttcagcgattaaaaaagttggattctaacaaacagcctgacaatgaattccttgctcaaggtttccaatg

SEQ ID NO: 9200 - DNA, 494 bp, Arabidopsis thaliana
  unsure at all n locations
  Clone ID: LIB24-123-Q1-E1-D3
ctgttaccctgncggtaccgctccgaaattcccgaggtcgacccacgcgtccgtgcgaatgcagctccanagcaacagagaacgatgcttggtganaatctatacccgcttgtggagcagctgganccagaatccgcagctaaagtcacgggaatgcttcttgaaatggaccaanccgaagtacttcacttgctggaatcaccanaggcacttaaagctaaagttacagaagcaatggatgttctgaggagtgtagcacagcagcaagcgggtggtgcagctgatcagttagcttctctgtctcttggngacaacatcgtaccttgagagttctaagttatatctgaaagagctcagtttatatacactgtaaaagtgtttattttgttcttttggagaatcagaaacanagttgttcctgaaagttttgggatttttggagtttttggttttgggccaagannttttaacaatttcccntccggtggtttttg

SEQ ID NO: 9201 - DNA, 440 bp, Arabidopsis thaliana
  Clone ID: LIB24-123-Q1-E1-D4
acgcgtccgattctttgggtaactttcgcttactctctccccattctctctcgaagagagcctcgccggagtttgtttttcttcttgtttcgcggccaaaaccgcctttgtgtaaagctaccttgttattttcctccgttaaccatctggtataggttgctgctggactctttagatggcagactctcggaatggtaatgcccgagcccctcctagtggagtgcctccaaaagctgggaatacttattccatagatgttaaaaactttatctcacgtgcaagagcattgtatgaacactggaagaagcacagtgcagacttatggggatctgccgacgctcttgccattgctaaccctcctgcttctgatgatctgcgttacctgaaatcttcagcgttgaatatttggcttcctggggtaagagtttccaagatacaat

SEQ ID NO: 9202 - DNA, 489 bp, Arabidopsis thaliana
  unsure at all n locations
  Clone ID: LIB24-123-Q1-E1-D5
gnaactgtttacgcctgcccggtaccggtccaaaaattcccgggtcgacccacgcgtccggtacaatactgcaactgtcggagtggtaggagatggattcatggctcgtgatctaacgttccanaacacggcgggaccagacgctcaccaagcggtggcgtttagatccgacagcgatttttctctgatcgagaattgcgagttccttgggaaccaagacactctctatgcccatggtcttcgtcagttctacaaaaactgtcgtatccaaggaaatgttgactttatctttgggaattcagctgctgtcttccaagactgtgaaatcctaatcgcaccgcgtcaaattaaccctgaaaagggcgagaaaaacgcagtcactgcccaaggaaggattgacccgtcccagtccacgggtttcgtgttcttgaactgtttgattaacggaacagaaggagtacatgaagctgtttaaagctaaccctaagg

SEQ ID NO: 9203 - DNA, 427 bp, Arabidopsis thaliana
  unsure at all n locations
  Clone ID: LIB24-123-Q1-E1-D7
agatagagagaagaatcatctcctatactctagctccaacaatggctaacaaaaacccacttcaaaaaccctttcttttcataatcttatcaatcaatctcatctttcttcaagcagaaacaactactcaaatctctaccaagaagacttatgttatccacatggataaatctgccatgcctttaccttacactaatcacctacaatggtactcttcaaagataaactctgtaacgcaacataaatctcaagaagaagaaggtaataacaacaggatactctacacttaccagactgctttccacggtttagcagctcagcttactcaagaagaagcagagaggcttgaggaagaagatggtgttgtagctgtgatacctgaagacnagatacgagcttcacactacaagaagtccaacgtttcctg

SEQ ID NO: 9204 - DNA, 440 bp, Arabidopsis thaliana
  unsure at all n locations
  Clone ID: LIB24-123-Q1-E1-E2
acgcgtccgcatttcgatttttttccgggtgaaaagggaggagaaacatggttgtacgtatcagactgtcgagatttggatgcaaaaatcggccattttttagggttatggctgctgatagcagatctccaagagacgggaagcatcttgaggtcttaggttacttcaatcctttgccaggccaggacggtggtaagaggatgggtctcaagttcgatcgaattaagtactggttatctgttggtgctcagccatcagacccggttcaacgtctcctattcagatccggtttacttcctcctcctccaatggtggctatgggacgtaaaggtggagcacgaagacacacgcccagttgatccgatgactggtcgctatgtggatgcagagaataaaacagttaatgccaatgataaccagcctaaggaagangatacaga

SEQ ID NO: 9205 - DNA, 441 bp, Arabidopsis thaliana
  unsure at all n locations
  Clone ID: LIB24-123-Q1-E1-E3
acgcgtccgcnagaacaaccctagattccgatgatgaggggtctcgtttccggcgccaagatgctatcatcaaccccatcgtcgatggcgacaagcatcgccactggtagaagaagctacagtctgattccgatggttattgagcactcatcgcgaggagagagagcttacgacatcttctctcgtttgctcaaggagcgtattatctgcatcaacggtcccattaatgacgacacatctcacgtcgtcgtcgctcagcttctttacctcgagtctgagaatccttcgaagccgatccatatgtatctcaattcccctggcggccatgtcaccgccggtcttgcaatttatgatactatgcagtacattcgttctcctaatagcacaatttgtttgggtcaagctgcatcaatggcttctcctccgttgggaancgggtgg

SEQ ID NO: 9206 - DNA, 417 bp, Arabidopsis thaliana
  unsure at all n locations
  Clone ID: LIB24-123-Q1-E1-E4
gacgcgtgggcgtcactcgtcacatgagaggaacaacanganaagtcaaaacgttgaagctttctcgaataacgcnnnnnnnnnnnnnnnnnnnnnnnnnnnnnnnnnnnnnnnnnnnnnnnnnnnnnnnnnnnnnnnnnnnnnnnnnnnngaccagattcaaaattgcgtagcgtactaattcaatatagagagaagttagatcanaagaagaacacgaaactctgactgtgtctctctttctcttcgtgtgtttcnatatntanatataataagacaagatntctggtctggaattagaaagaatcctanttggggttttttcttangagtaagctctaatggcatattaatgtaaaagagcngactttataagaanaccnctacgtgggcagttgccgttggttgccttgtcng

SEQ ID NO: 9207 - DNA, 489 bp, Arabidopsis thaliana
  unsure at all n locations
  Clone ID: LIB24-123-Q1-E1-B3
gttacgcctgttggtaccggccccgaaattcccgangtcgacccacgcgtccgcggcgtttcactcgcaagactgactcgaaaacaccatcccagcctctggtatcccgtcgctctgcaaactatcaaccgtctctttggcagcacgaatatctcctctcgctcggtaatacatatgtgaaagaggacaacgtcgagagagttacgttattgaagcaggaagtgagtaaaatgctcaatgaaacggaaggtttactcgaacagctagagctcatcgacactttacaaaggcttggagtttcttaccattttgaacaagaaatcaagaagacactaacgaatgtgcatgttaaaaatgtgcgagcacacaaaaaccggatagatcgaaaccgatggggagatttatacgcgaccggccttgagtttccgactcctaaggcaacatggtttcagtatcgcacaaagatgtttttgacgggaaatantggag

SEQ ID NO: 9208 - DNA, 414 bp, Arabidopsis thaliana
  Clone ID: LIB24-122-Q1-E1-G7
acgtggagctactttgtaattataaagatttattgtttcccataaactggttaaatgattttagaaactaaagtaaaatgagcttgacactagagtttctgcttcttctgattgtacttatcttgagtcaccatgctcattctggctctattgtcaaattccttcctggttttgaaggcccccttccttttgaactcgaaaccgggtacattggtattggtgaggaagaggaagtgcaattattctactatttcatcaaatctgagaagaatccagaagaagaccctcttcttctatggttaagtggaggacctggatgttcctctcttactgggccttctttttgagaatggaccggtggctttgaagttcgaggtttacaatggaagtgttccatctttggtctctactaca

SEQ ID NO: 9209 - DNA, 468 bp, Arabidopsis thaliana
  unsure at all n locations
  Clone ID: LIB24-122-Q1-E1-G9
tttagttgnccggnccggtccanaaataacgggtcnagcncgcgtccgnncacacgtccgaaaacatggccgagtcaccctccgagtcaacctccgactcgcttagcaccaccacatccactaagcccgctcaatccgggactgtttctatttcaagccctcaaagtcaccatgtcgtcttccccgagatcccaatcgagatcgtcagtgaagaagaaatggctattctcgatgcagctcttgcagcctcccgctccatcctcccttccgtgatccgttctgtttctccgtcacggataaccgccggcggaagtcccaaaacaatccgctcaattactctcttctccaagaggaaattatcggcttgttcagatatcgaagagtcttatctacatcgatttaggagaaatcaagctttaggtgtcacaagatntcaccggaactgaatggtgtgagaaacaaatgggg

SEQ ID NO: 9210 - DNA, 425 bp, Arabidopsis thaliana
  unsure at all n locations
  Clone ID: LIB24-122-Q1-E1-H3
acgcgtccnggaaaagatagctccggagctcttcctcgtcgccggtaacccggactctttcgtcgtcgacgacctcctcgacttctctaacgacgacggcgaagttgacgacggcttaaacactcttcccgattcttcaacactctccaccggcactctcaccgacagttccaactcctcctcgcttttcaccgacggcactggcttctccgacctatatattccggtaattttccgttattattttctcaaatccacgccaatatttatgaaatagtaacactnnnnnnnnnnnnnnnnnnnnnnnnnntaatcaagaatgacgatatagcagaattagaatggttatcaaattttgtggaagaatcattcgcangagaagaccaagacaangcttcanttaatttccgggttaaaaaaancct

SEQ ID NO: 9211 - DNA, 436 bp, Arabidopsis thaliana
  unsure at all n locations
  Clone ID: LIB24-122-Q1-E1-H4
cgggncgacccacgcgtccatcttaatggagtggaggggaatccnctgctcgttgctttttattgtttccgtgggagagtcgtcaagtagatttgggataatgtggcatcctaatcttggtgttgattctggacaatacttgacttggccaatcttaagtgctaagtgtattcgtggttattgccatcctcctccccatgtatcttatctttgagcacttagcttcttataatcaaccagaggaacagaagtttcttattggacttattctgatggttcctgtttatgccgtggaatcgtttttgtctttggtgaattcagaagcagctttcaactgcgaggtgattagagattgttatgaagcttttgcactctattgtttcnaagagatatttgataacntgcctaaaanggggaagaacgttcaatttgaant

SEQ ID NO: 9212 - DNA, 408 bp, Arabidopsis thaliana
  unsure at all n locations
  Clone ID: LIB24-122-Q1-E1-H5
ttaagccctcactatcctctctctcaaatcgcggagtctccgaagtttctctgtcagacaaaatgcagtcgtcaacgtatgcggttaaaggaaacgctgcgtttgcgtttcagagacggaccttctcttctgacagatcgacgacttctaccggaattcgcttcgctggttataagagcttagccaccaccgggccactctactgttctggttctgaagccatgggagcgacgcttgctcgtgctgataacgggatccagagcgttatgagtttctcttctgtcaaagctcgatcggtcagagctcaagcctcatctgatggagatgaataanaagctatacctctgagatctgnncgggaaaaagtctgggaacangttttgnccctttgttgggggttgcctgtcn

SEQ ID NO: 9213 - DNA, 417 bp, Arabidopsis thaliana
  unsure at all n locations
  Clone ID: LIB24-122-Q1-E1-H6
aggagggatcaagctgcttcatcggtaatgtgaacgcaactgcggatgctttagtcaacttcaaaggaaaagactaccacgtaccggcttggtctgtaagtgttcttccggactgcgataaagaggcttacaacactgcaaaagtgaacactcaaacatcaatcatgaccgaggactctagtaagccaagagaggctggaatggacctggagaccggagtccgctcagaagatgattcttaaaggcagtggagatctcattgccaaggggtcttgtagaccanaaagatgttacaaacgatgctagtgactatctttgggtacatgactanggcttcatctcgacaaagaaagatnccacttttggngnccgaaacnatgacgttaccgggttcacaagcaatggcccatgttctan

SEQ ID NO: 9214 - DNA, 382 bp, Arabidopsis thaliana
  unsure at all n locations
  Clone ID: LIB24-122-Q1-E1-H8
gatncccgggtcgacccacgcntccgattcaattgtgcaacgtccaatggttgtgggaggaagcgtagttccgaggccaatgatgtatgtcgcgctgacttacgatcataggctaattgatggaagagaggctgtgtatttcttgcgccgtattaaggatgttgtggaagatcctcagaggcttcttctcgacatatgataaagatccaagacagaagagatcataagtttctgtctttttaccaagtttcctttcaggtaaaaccattacggatactgcaatctgcaaatgatgctttgangaaaagancgaaacttttttttttggagttttcttaatagttttaagagtttttgccgggcgaggaangcatccgtgtat

SEQ ID NO: 9215 - DNA, 441 bp, Arabidopsis thaliana
  unsure at all n locations
  Clone ID: LIB24-123-Q1-E1-A3
nagagcgtccgcagcagttggagtggggattncgntaaagaagaaagttccattgacggagacatactcnagtcaatcctctcctanttaccactcctagacctcgattccgcttgccaagtctccaaatcatggaaccgcgccgtcttttactccctccgccgccttaaaaccatgccgtggttgttcgtctacaaccagagaaattctccgccgtacaccatggcgacgatggcgatggcttatgatcccaagtccgaggcctgggatcgaagctcaacaccgcatcatctcccgtcnaacacgtctccgttgctcgatcctctcactcnacgttgctctacgctttatctccggcgaagattctctttctcaaccgacgcgtttcatcngacttggcaacacgtggcaccgccganagtttgggaggatcgattcnaa

SEQ ID NO: 9216 - DNA, 493 bp, Arabidopsis thaliana
  unsure at all n locations
  Clone ID: LIB24-123-Q1-E1-A4
ctgttacgcctgccggtaccgntccgaaaattcccgaggtcgacccacgcgtccggatctggaggtttgtacacttacaaatgctggttcttgctctagtgtaacaaggtatgagtctggtggtggtggtactcaaggctatgttagagaaggttacaatcagcctgtgactggttatgttgacaatgatgcggtgattgctcagttttatcaagacgaattgtctanagttgctcgagccgaagcatcggggatcaatagtcttagtcctacttctgttgttgcacaagactggcctcatcctcatcaaggacaggaaaatcaaggggaagccattgatattactcangaaagtgatattcttcataatcataacggtaacatgggaaagataanaatgttgcaanggataagatttnaangaaggcaaaagtttcccaactccgtgatnatgaccnaatttggtccnggngaaaatagnagaaagaatcct

SEQ ID NO: 9217 - DNA, 432 bp, Arabidopsis thaliana
  unsure at all n locations
  Clone ID: LIB24-123-Q1-E1-A7
acgcgtccgctgaatctgagctatctctggatcagcttgggatccgccacgtcacttctgacagccgccggagatgaacctcacgtgaccgttcttcagatcggatcttctgtgtgtaaccgtcgaggaggacnnnnnnnnnnnnnnnnnnnnnnnnnnnnnnnnnnnnnnnnnnnnnnnnnnnnnnnnngaaacactctaatggcgacaatgagcaaagctcaaaggaccaaacccacttctggatctcagcgtcttgttctgttctgtatagttgtgttctcattcctcctcctcttctcttcggtgatctccaccggcaaattgggattgccttatcaacaaaccctaatcgactatttcgtgtggtctcctcgtggtaaagagacagcattcgttgtcggagaagtactgtattggggaaacagaatc

SEQ ID NO: 9218 - DNA, 433 bp, Arabidopsis thaliana
  unsure at all n locations
  Clone ID: LIB24-123-Q1-E1-A8
acgcgtccggagaaaggaaaaaaatggtgaatccttcttcacctggaattgccatactcggagctgggatcttcgtcaaaactcaatacattccgagattagctgagatctccgatctcgtcgacctgaaagcgatttggagccgtactgaggaatctgcaaaaggagctgtggagatagcaagaaagcattttcctgaagtgaagtgcaaatggggagatgagggtctcaatgagatcattcaagacagttcaatagttggtgttgctgtagttgtagctgcagaaaccatggttgaattgtcactgaagatgctcaaggcaggaaagcacgtccttcaagagaagccagctgctgcttcaatcagtgagatagaaactgcaatgtcaagctatagaaatatttctgctgattccccaatgccgtccaattn

SEQ ID NO: 9219 - DNA, 432 bp, Arabidopsis thaliana
  unsure at all n locations
  Clone ID: LIB24-123-Q1-E1-B1
tcaacttatccccatttctctgaaaaccctaacaaatcctcctcttgttccgccactgccgccgccgctactcaacggtggtgaattttctatacggtcagttcgatcctctttttatcgacaatcctacacaaatccataatcatggccgccactgcttcctccgaagcttctgaaggaccagtgatgggtctcatcaacaagcgtctccgtgctctccgtaagaaatacaaccgaatcactcaaatggaagaatcgatttctcaaggcaaaaccctaaacaaggagcaagaagaagtcctccgctctaaacctgccgtcgtcatcctaatcgacgagcttgaaaagattcgtgctcctctctccgccgctgtgacaaganggaaatcagcctcgctactcagcttaaccgtgcttcatccgatnaaacca

SEQ ID NO: 9220 - DNA, 442 bp, Arabidopsis thaliana
  unsure at all n locations
  Clone ID: LIB24-122-Q1-E1-G4
aacccgggcccgacctttctcgtngaanctttgagctctctacctctttanctccggagatgtataataacatgggacctcaaccggggatgccaagacctccaggaaaccctgagcctggtccatttggtaatcctttcactggagctggctcgggttttatccgtggtggtttgggagcgtatggggagagaattttaggatcgagctctgagtatgttcagagcaatataagccggtacttctctgatccgcaatactatttccaagtgaatgatcaatatgtgaggaataaactgaaggttgttctgtttcctttcctacaccggggacactggaccagaatatctgaaccagttggtggtaggctctcatacaagcctccaatatatgatatcaatgctcccagacntgtacattccccttaaggnattggggaacc

SEQ ID NO: 9221 - DNA, 459 bp, Arabidopsis thaliana
  unsure at all n locations
  Clone ID: LIB24-122-Q1-E1-D12
taccttgcaggccggtccanaataacgggtcgaccacgcgtccgcgcttntttattttgtaatttaatttcggttgctttttaaatatctaactccgagatttttaagggattgctatctatttttttttttttggggattggttagtttctcggttagttatgttaagtaacgaactttaaaattagggttttgatttggttttttttttatttcagtggttaagttcaatgtctgtgtatctttaataacgcaccagattcatgttgtaggtatcagtagtaaaggtgggacatttgtgtcgcattgaggaagaaactttggatttcagactcacttgggacctaccctttaatggcttcttcaacttctgggattttctttcaaggagatgatgaatctcaaagcttcattaactctcacttgacttcctcttatgggaattcatccaactccgnt

SEQ ID NO: 9222 - DNA, 434 bp, Arabidopsis thaliana
  unsure at all n locations
  Clone ID: LIB24-122-Q1-E1-D5
acgcgtccgcccacgcgtccggttctgatgaaatactggggggatacttgtacttccataaggctcccaacaagaaagaatttcatgaagaaacatgccgaaagatcaaagctctccaccaatttgattgtttgagagctaacaaatcaacttctgcgtggggtgtcgaagctcgtgtgcctttcctagataaagaatttttaaatgttgcaatgagcatcgatccagagtggaagttgatcaagcctgatctcggaaggatcgaagaagtgggtgctacgcaatgcctttgatgatgaagaacgaccttatctaccaaagcacattctatatagacagaaagaacagtttagtgatggaggttgggtatagctggatagatggtctgaaagatcatgcaaataaaacatgtctctgaatactangctgtcaaa

SEQ ID NO: 9223 - DNA, 457 bp, Arabidopsis thaliana
  unsure at all n locations
  Clone ID: LIB24-122-Q1-E1-D9
ggtccanaaataaacgggtcgaggcncgcgtccgattttngtagaaatcgaaactgggcttgatcaattttgactctttgcatccaatttcgattctaatctccgtaattgttctccgaatcgggtcaatttcaagttgggaaacaaaccctagcgaacctccattgatgtgatctctctctctctctcacaacttgagaatcaactcnctagaaaatatcagaaaatcgttgaaaaaatctggtcttttctggagggaaatgccaggggtagctgtgaagctctatagcgtcttctttaagttactattgaaacatcgtcttcagaatctgatttcaatttcangctgctgatggcttatcngattcctttggtgtttcgacccgatgcganganatccgtcggccgccgcgaatccagtctttcaccgaacggtgttgccaccaaagatatacgc

SEQ ID NO: 9224 - DNA, 417 bp, Arabidopsis thaliana
  unsure at all n locations
  Clone ID: LIB24-122-Q1-E1-E6
tcctttctcacaagccaatggcgcaacttactaattccctcaattatctcttttctgtttctctcttattatttgtatcgttccactgcttatgttttcgtttttcgttggttgcagcttgttcaaactccactgacgatcaacagattcaacaccatcaccaccggaaatgggttggtccctcaggccacaaagtcatcaccgtctcacttaacggccacgctcagtttcgctccgtccaagacgctgtggattccataccaaagaacaataacaagagcatcacaatcaagattgctcccggattttacagagagaaagtggtggttccagctacaaaaccgtacataacgttcaaaggagctggtaggggatgtgaccgctatagagtggnacgaacgtgcgtttcggacttgg

SEQ ID NO: 9225 - DNA, 418 bp, Arabidopsis thaliana
  Clone ID: LIB24-122-Q1-E1-E7
gaagtcactggccgtgctacaagcaagtgggtgatgatgaaccaagacacgagacggcttcagaaagtttctgatgatgttcgggacgagtacttggtcttctgtcctcaagaaccgaggttagcatttccggaagagaataacagaagcttgaagaaaatcccgaaactcgaagatccggctcagtattcaatgattgggcttaagcctagacgagctgatctcgacatgaaccagcatgtcaataatgtcacctatattggatgggttctcgagagcataccacaagaaattgtagacacgcacgagcttcaggtcataactctggattatagaagagaatgtcaacaagacgatgtggtgggattcactcaccaccaccacctctgaaattggtggaaccaatggctctgccacg

SEQ ID NO: 9226 - DNA, 414 bp, Arabidopsis thaliana
  unsure at all n locations
  Clone ID: LIB24-122-Q1-E1-E9
ttngattgcttagttttttcccgggagactgaaacatgttcacggcggcagcttcgtcaagcgtgggaaggtggcggacggcgtttctctctctcagggacgaaatctcaaccactccaccgccgccggttcctctgttgctcgaggatctactcttctctcaatcccattcccttatctctgccgtctctcacctcccactgcacgagctcacttccgattgcttgttcctgctcgatttggtttccaaagctgatggtcctgactggatccctgtctctcgtcatacttgtcaactgattcacgatgtttgtgctcgtctacttttccaactaaattcttcgtcatggccgctccttcttcactcttttgcttctgtcttggagtttcttcttcgccaacccaagccttctt

SEQ ID NO: 9227 - DNA, 410 bp, Arabidopsis thaliana
  unsure at all n locations
  Clone ID: LIB24-122-Q1-E1-F1
ngtggagaagcatcggataagcctattgatagtgctgttctctcaaggatgaagcaatttagagcgatgaataaactaaagaaacttgctttaaaggtcattgcggagaacattgacacggaagaaatacaaggcttaaaggcgatgtttgctaatatagatacagacaatagtggtactatcacatacgaagaattgaaagaaggattagccaaactgggatcaagactcactgaagctgaagtgaaacagctcatggatgctgctgacgttgatggaaatgggtcaatagattacattgagtttattactgcaacaatgcatagacataggcttgaaagtaatgagaacgtttacaaagccttccaacattttgacaaagatggggaatggatacantacgacagacg

SEQ ID NO: 9228 - DNA, 456 bp, Arabidopsis thaliana
  unsure at all n locations
  Clone ID: LIB24-122-Q1-E1-F11
ggtccanaataaacgggtccaggcccgcgtccgancgtaaagggtttgtttttcgtttcttctccgattgttcagaggaattgcgaattaagataaagatgaggccagtgttcgtcggcaatttcgagtatgaaactcgccagtcggatctggaacggttgttcgacaagtatgggagagtcgaccgagtggncatgaaatctggaacttttcttcaaaggaacaagatttgccatcttcttcttcttcctgcaaaatcatttctacattttcatacctgcctttatcatcttgtgcctancaatcttcactgactctatagaaactttggaatttgtctgtctattaccaatcatcgatgcttcagatggaagtctantgaatccnncattgccagtgccttgcnttcccatatcngaactccnccnntcacaatgtttaaagccattgcctggg

SEQ ID NO: 9229 - DNA, 467 bp, Arabidopsis thaliana
  unsure at all n locations
  Clone ID: LIB24-122-Q1-E1-F12
gttanttgcccggccggtccaanataacgggtcgagcncgcgtccgggttgattttctcaacaatggtgtctctggccaagtttcactactgtgatcaaacactccacctccgactcgacactcaccgtaaaccgcagcctaaacctgtttcataccgaatcttacataaacctcctccttctcgcgtcatcagagcttcttcgttttcatcaaaccctaaaccctctttcctcaaaaccacctgcgtgaccttaacaacagccgccgctttactctccgcttccctccacctctccaccaaacccgtcaccgcagcaactctcgtctcanctcctcctccaccatccacggcggcggatctcacttccgatcaaatctcgtcgcgtccaaaggaagaagaagaagaagcagcgctggagaagcacctcactaangaatccaaacgacgtcgaaggccctcnatcaa

SEQ ID NO: 9230 - DNA, 413 bp, Arabidopsis thaliana
  Clone ID: LIB24-122-Q1-E1-F6
gtcaccttttcttctcagctacttcaggcggagaaacactttccgtggtttagtgttgaggacgatcactgtttgtaattcgatggcgaggaagaagatcagagaatatgactccaagagacttctcaaggagcatttgaagcgtcttgctaatattgacctgcagattcgctctgctcaggtgacagaatctacggatttcactgagttaaccaaccaggagtcatggctatcgtccacaaagctagttgtgaaaccggatatgctatttgggaaacgcgggaaaagtggtttggtagctctaaagctggatcttgctgaagttgcaagactttgtcaaagcccgcctcggcactgaggtcgagatggagggatgtaaagcacctatcactacattcattgtggagcctttt

SEQ ID NO: 9231 - DNA, 345 bp, Arabidopsis thaliana
  Clone ID: LIB24-122-Q1-E1-G10
actggcgtattttagccgtccgccatttccatcgctctctctcgtttcttctctgctcatttactataaccaacaaggtctcttctcttctcttctcctctctgcatcattttgatccgattcgatggctgctccacctgctagagctagagccgattatgattatctcattaagcttcttctcatcggtgatagcggtgttggtaaaagttgtttgcttctaaggttctctgatggctctttcaccactagcttcatcactaccattggtattgattttaagataagaactattgagcttgatggcaaacgtatcaagcttcagatttgggacactgctggtca

SEQ ID NO: 9232 - DNA, 478 bp, Arabidopsis thaliana
  unsure at all n locations
  Clone ID: LIB24-122-Q1-E1-G11
ctgtttacgtttgcccgngcccggtccaaaaattnacgggtcgacgcncgcgtccgaaaaganaagccagtaaaaagggctggaaaagggaaagacaagccgagtgataaagtgctgaaaaatgcaatcgttgagatcttgaaaagagtggactttagtacggctacgttcacggacatccttaaagaacttgctaaggagttcacagaagatctcactccaagaaagtcatctataaagatgataatccaagaggagctcaccaaattnnnnnnnnnnnnnnnnnnnnnnnnnnnnnnnnnnnnnnnnnnnnnnnnnnnnnnnnnnnnnnnnnnnnnnnnnnnnnnaggaggtgaaagcctaaactcctttctgatcacatcgcacatattgagtctctctgtcagatactgttgcctaatgcctagtagtcatctggcaaatgtgtaagttaaatctgtggatgtaatattttggt

SEQ ID NO: 9233 - DNA, 416 bp, Arabidopsis thaliana
  unsure at all n locations
  Clone ID: LIB24-122-Q1-E1-G12
ttctctatatctctactcttgagaaatggctcttagaactgtgctcgtctccgacgtccctagcctcccggattctgtctacggtttatccgaaggtttagagttgagcaaaccgacgtcgtttaggttaccggggttttcggtgattggacatagaggaatcggtatgaatgtgttgcaatcgtctgatcggagagcgagaggtgttaaagaaaactcgattctttcattcaattccgccgctaagtatccgattgatttcattgagttcgatgttcaggtgacaaaagatgattgccctgtcattttccatgatgatttcatctactctgaagaaaatggtattgttaatgagagtagagtgacggatctgagtctgtctgagtttctcctttatggacctcanaagggaaact

SEQ ID NO: 9234 - DNA, 407 bp, Arabidopsis thaliana
  unsure at all n locations
  Clone ID: LIB24-122-Q1-E1-D10
tgtcaaaatggccccaagctcttagcattcaggcgcatcctctgaatgtcccaacgagttttaagcaacgggcaatgttagttgatgagatatggcatgctgttggagatggagcctcggatttagattggtatgtcaagcgtactattcttggaggcgtttactcaactaccgagatttacatgctcaccgatgactccttagaacatcgcgatacatgggcattcttggatgacagagtcaaagatgcttttgatcttaagaagagcatacangaggccaagtattttgcagaagacatagganctggagttgggaagtcggttcaaggactgatgaatggganttatgcaggacaatgtccagaagaagtggtggctccgcgttttgaaaaagattacnccttt

SEQ ID NO: 9235 - DNA, 404 bp, Arabidopsis thaliana
  unsure at all n locations
  Clone ID: LIB24-120-Q1-E1-G3
tcttttaacatctcaccatcttcttcttcaatggaaactccggattaaatgacacttctgtaacttcctatatttactaaaatgccatctcgcctctctccgccagatattccgccgctgcaaccgacgcctacggttagtgacggccatcatcgtttccagactcttccacttatcatagccggttctctgactttaaccggagttttactcatcctcgtcactttacttatttaccgaagactctaccgaaaccgtacggctccttcagatcttatctccaactccaagtctcctcaacactaccaatgtcgacgcttctcttactctcagctccgccgcgctacaaactctttctccgaagtcgantcacctcggtcacggcggattcggctctgtttaca

SEQ ID NO: 9236 - DNA, 463 bp, Arabidopsis thaliana
  unsure at all n locations
  Clone ID: LIB24-120-Q1-E1-G4
cttttagcccggccaggtaccgaaacaancccgnggncgacccacgcgtccgccanattgtcaccgattctggccatcaatcctatctgacatattgttagaaaggattgatggccagattgtcaccgattctgacgaggatgtagacacagaggatgaaggtgaggagaaaatgtttgatactgcagctttggctgcgcttttgaaggcagccactggtggtggaagttcagaaggtggcaattttaccataacatctcaggatggcacgaagcttttctctatggatcgacctgctggtttgagttcatcgttaaggcccttgaagcctgcagcagctccacgtgcaaaccgttccaacatcttttccaattctaatgtcacaatggcaagatnagactgagattaacttgancgaangaagnnaaacaggaatttagaaaaagttgcanacccctcccgt

SEQ ID NO: 9237 - DNA, 407 bp, Arabidopsis thaliana
  unsure at all n locations
  Clone ID: LIB24-120-Q1-E1-H3
ggatgaatttattgcggacaagactcgaagacaaacctttgggaggagctagcaaatcccaccgtaaattgtcgccgagagacttatccgaaccaaaaacaaacctttcgggaaagggaggaccaccacaaccgagacccagaacctcttctccccaacaagcaagaagagagacatcaaaactaacctttaattccaccgatgaacctttgaaccactccaagagcaaccacaccttcagatccgacaaagaggaagccaaatacggcggaataaaatggatgttggctcaaacaaaccatctactctcgagatctggccaaagatcacccgcaattaagccatttaggatccggccaaaagatccactgctaacccctttgcaaagtagcgaanccagcaatcca

SEQ ID NO: 9238 - DNA, 420 bp, Arabidopsis thaliana
  unsure at all n locations
  Clone ID: LIB24-120-Q1-E1-H4
ggccacgcgtccgcccaagcgtccgctcaggtaaaaaaactgagtcgagatttggtgacgtgatgaatcatttggtgataatctctgtgttcttgagctcagtattgttgttatatagaggagaatctggaatcacaagtagttttattcgatctgaatggcctgcggttgatataccacttgatcatcatgttttcaaagtcccaaaaggatanaatgcaccacaacaagtacacataactcaaggtgattatgatggtaaagctgttatcatctcttgggttacacctgatgaaccttggttctagccaagtacattacggtgcggttcaggggaaatatgagtttgttgctcaagggacttaccataactacacgttttacaagtataagtctggctttattcatcactgccttgtc

SEQ ID NO: 9239 - DNA, 381 bp, Arabidopsis thaliana
  unsure at all n locations
  Clone ID: LIB24-120-Q1-E1-H6
tgatagacagactgctgtaagaaatagcttttggaaccagtttgttgtcttcttcaatcaagtcttatcgcttggacctacgtttattgatgatgtcgaagacgagacttgcttctcanacatgagcttgtatgatgaaagagaaactgaaaaccggcttgcactatgggaggactatgaactaagaggattcttgccactgcttccagctcagacgattctcaacttctcaanggaaacattcgtttggaactgaaggtcccaaaggaaaagganagctcgtataaaagangatctttgcanncaanggaaagctttgaccagtngtgatnaaaangttgntgaggnancatggtgnattttgattcaggagcagtaana

SEQ ID NO: 9240 - DNA, 413 bp, Arabidopsis thaliana
  Clone ID: LIB24-121-Q1-E1-A10
gaagattgacaggggatacatctccccgtacttcataactaacccgaaaacacaaaaatgtgaactagaagatcctctcattcttatccacgagaagaaaatttccaatataaacgcaatggtgaaagtattagaactggccctcaagaagcaaaggccgctgctgatcgttgctgaggatgtggagagcgatgctcttgccaccctaattctgaacaaacttcgtgctaatatcaaggtctgtgctgtgaaggcccctggttttggagagaaccgaaaggccaatttacatgatctagctgccctcactggagcccaggtaataacagaagagttgggtatgaatctagacaacattgacctcagtatgtttggaaactgcaagaaggtaacggtatccaaagatgatactg

SEQ ID NO: 9241 - DNA, 429 bp, Arabidopsis thaliana
  unsure at all n locations
  Clone ID: LIB24-121-Q1-E1-A7
ccgcccacgcgtccgcggacgcgtgggaaagatctctccttggacggtgctcttattgtagattccattgatgatgcagaggtaaaacttggaggtttgataaagaacaatggttggaccatggagagtgtagattacaaggacacatcggttccagaagaaataagaatcagaggttttagattcaacaagtggagcaactcgaaaagaagttaactcaacctggcaaattttctgttgaagattgaagttatctttgcacatttatgtgacacttttttaaaaagtgttatttggcaatatgattantttagcaaattagctatttttttaggagaatgccaaatgattcattaatttgtccttccaaatgggagagcttaantctttccttcgttttgtttccaacgaaacacttccttttctttg

SEQ ID NO: 9242 - DNA, 404 bp, Arabidopsis thaliana
  unsure at all n locations
  Clone ID: LIB24-121-Q1-E1-A8
acgcgtccgctgagattatcggcacttttgtcctcgtctacaccgtcttctccgctaccgaccctaagcgaaatgcccgtgactctcacattcctgtattagcaccattgccaattggattttccgtgttcatggttcatttagccacaattccaattactggcaccggaataaacccggctaggagttttggagctgccgtcatctacaacaatcaaaaggcttgggatgatcagtggatcttctgggtcggtccatttgtgggtgcagccattgcagcattttaccatcagtttgtgttgagagctggtgcaatgaagggcctatgggtcagtcangangccagcttcatgagctccatgcttaaaatttgttaattcgaactagcgaacaggtgaangaat

SEQ ID NO: 9243 - DNA, 406 bp, Arabidopsis thaliana
  unsure at all n locations
  Clone ID: LIB24-121-Q1-E1-A9
accttccttaaccagaaccaaatttcagatttttaaacaacataagctctaatggcgtcaccaaagtcacccacaagaccaacccaacaaaacccacaacccaatttccacgattttcttcctaccatggccggaaacctaggcggtgaaggtctgatcggagagctatgcaacggcttcgagcttttgatggacagagagaaaggtgtcatcacgttcgagagtctccgacgtaacgctgcggcggttctgggtttaagagatttgactggatgaagatgtccggtgtatgataaagaaggtgattttgactgcgacggtgcgttgaatcagatggagtttgtgtgttgatgttaaggcttagccctgatttgatggaagctcccggtgtcncgtcacggaggtc

SEQ ID NO: 9244 - DNA, 411 bp, Arabidopsis thaliana
  Clone ID: LIB24-121-Q1-E1-B10
aaaaaagaaagacaaagaggattgaacggtagacgtagacgccattggagtttgaaagggaattagtcgacgttttatggatcattgtcgtttcggtgtcattttcttcttcttctttcgctagcacgatttaaagcctgactagatccatcatcggccatggaggattctacagccacggctacgtcttcgtcttccactcattatttctccattttcacgaattatcctctcatttccgccgtcacctctttcactatcgctcaattcatcaaactcttcacctcctggtatagggaacggagatgggatctcaaacagcttattgggtctggaggaatgccttcttcgcattcagcgaccgttacagctctcgctgtagctattggtttacaagaaggctttggggga

SEQ ID NO: 9245 - DNA, 503 bp, Arabidopsis thaliana
  unsure at all n locations
  Clone ID: LIB24-121-Q1-E1-B2
ctgttacgcctgccggtacgcntccnaaattcccanggtcgacccacgcgtccgctctcgtaacagtagaagcagagtgcaaatctcactgactactaccaaggcaccaatcaccatgaccatgatgatcattacagtgttcttaacagtgattgcagcggttctcgcaatccttgtcaagaattctcaaaccggttctggcatcttcgcaccgcctgaaatctccggttcgcgtgatgttttcccgtcggcgaaagtggttaacttaaccggagcctctggtcctgagagtatagctttcgatccagcaggtgaaggtccgtacgttggtgtctcagatggtcgtatcttgaaatgggcgccggtgaaaccggcttgggatggtcaagatttcgctcacacatccgtcctaacaagcaaggagtgtgctcgcccatttgcaccaagagttggancatgttgtgtggaaaggccattaagggttgccggttcgataagaaaac

SEQ ID NO: 9246 - DNA, 442 bp, Arabidopsis thaliana
  unsure at all n locations
  Clone ID: LIB24-121-Q1-E1-B3
catgttgttacccaattgtctcttccgcatgggtgcggcagccatacacatgtcaaaccgccggtctgaccggtggcgagccaaatacaagctttcccacctcgtccggacacaccgtggcgctgacgacaagtctttctactgtgtctacgaacaggaagacaaagaaggacacgttggcatcaacttgtccaaagatctcatggccatcgccggtgaagccctcaaggcaaacatcaccacaataggtcctttggtcctaccggcgtcaagaacaacttctcttcctcaacgtccctaatccgacgttaaatcctcaaccccgaaatggnaaccatacntaccggatttcaagctgggcttcgaacacttttgcattcacgcangaggcaaancggtgatngacgagctccaaaagaatctacaactatcaggagaacac

SEQ ID NO: 9247 - DNA, 484 bp, Arabidopsis thaliana
  unsure at all n locations
  Clone ID: LIB24-121-Q1-E1-B4
acgccnccgtagcctcgaaaattcaagggncgaccgacccgtcggntcaaacntaacaaangcttcagacttcaattctttagctacctctctcccatggcagtaagtgttttctttccttctttccttctcctcttcttcttatttaggtctagagctttctctcagattatagtttttgtttcgattccgtcaatctctgaccctttttttggaggatttgtagaaagttgagtcttaatctatttgcatttatggttcttcctattgagataacatttctatggattgcgatgtctattaagtattcaactttatgattctgatttgcnttagataagaaaagggtttatgaaaagttactatttttaagggaaaagttccaatttgcctaacaaaggatttcactttaacaatggtacctggggcgaaatcgatnaanccaaattggtanttggtcctggttttgggattcctaaagtgg

SEQ ID NO: 9248 - DNA, 426 bp, Arabidopsis thaliana
  unsure at all n locations
  Clone ID: LIB24-121-Q1-E1-B9
tgcccngggaccgtaccagtccatgaaattcccgggtccacccacgcgtccgaacacgcgtccgcccacgcgtccgctgggtttttccttactctctaaganaaaccactactttggtnnnnnnnnnnnnnnnnnnnnnnnnnnnnnnnnnnnnnnnnnnnnnnnnnnnnnnnnnnnnnnnnnnnnnnnnnnnnnnnnnnnnnnnnnnnnnnnnnnnnnnnnnnnnnnnnnnnnnnnnnnnnnnnnnnnnnnnttcgccngagctggcgtcgtcaccgtcgaagaaatccgtagcgcttctgctgtttcttctgatcnnccgtctctttatcctcccgttatcaagacccctgtttcgttacncattcctcaagctattgggttatccaagtgcatctggagcaggtcatgaattgcaacagnggc

SEQ ID NO: 9249 - DNA, 425 bp, Arabidopsis thaliana
  unsure at all n locations
  Clone ID: LIB24-120-Q1-E1-F9
tccgtctcctcctctctctctattcatcagcctcaacctctctttcgtcgtcgactcagtttccgatttagggttacccaatcttcgccatgtatcgcacggcagcttcacgagccanggntcttaagggagttcttactcgtattttgngaccagcgcgttatgctagttctantgctgttgcggagacgagttcgtcaacgccggcttacttgagctggttgagtggtgggtctcgtgctgcgcttacttcattggatatgcnnctatnaggtgtttctcttcntccgccgcttgctgataaagtctanncgagcaaacttnagatcactacncttccaaatggncttaangatancctcagnggacgactccgaatcccggcancttcgatnggnttacangttgaattgcgggttcnatta

SEQ ID NO: 9250 - DNA, 456 bp, Arabidopsis thaliana
  unsure at all n locations
  Clone ID: LIB24-120-Q1-E1-C5
tanccgccaggtaccggtcaaagaattcccgggncgacccacgcgtccggagtgattcatggattctttaaactactaataatggatttttgttgtgtcttaatgaaataatgggagcagctgaagcaagagcattgtggcaaagaacagctagtcgttgctttgttgttcatgaggatgctaagatggctccgaggttagcttgttgccaacaccaacaatcttcttcgggcaacaccgaaaaaaacagcttttcttccggaagttttggagattcctctgatttctcttgtgataccaaatggtggcttaagggatcaactggttttgatgaggaggttacaaactcctttcttgaagataccaaatgcaagaaattgcatgaatttgtcgacttaatcggaatacgagaagaagaagactacagctttattagcaagaaagctgacgcctaca

SEQ ID NO: 9251 - DNA, 384 bp, Arabidopsis thaliana
  Clone ID: LIB24-120-Q1-E1-C7
gagagaaacctgagaaaatcgaagatggctacgaacattgggatgatggattctgcatatttcgtcgggagatcggagattctggcttggattaactctactctccaactcaatctctccaaagtcgaagaggcttgttcaggcgctgttcattgtcagctgatggattcggtgcatcctgggactgttccgatgcacaaggttaactttgatgcgaagagtgaatatgagatgattcaagaactataaggttcttcaggatgtgtttaataaactcaagatcactaagcacatcgaagtgagcaaactcgttaagggaaggccattggataacttggagtttatgcagtggatgaaaaagtactgtgattcctgttaaatggg

SEQ ID NO: 9252 - DNA, 381 bp, Arabidopsis thaliana
  unsure at all n locations
  Clone ID: LIB24-120-Q1-E1-D11
gaagtcacatgttccttcttcttcttccttcatcatccccaaacacacacaaactaaaaaaaaggcaaaaccctagatccaaggatcagacctaatctaatcgaaactcatagctgaaaaatgaaganagatcatcaccaattccaaggtcgattgtccaaccacnggacttcttcttcatcancatcantctctaangataanatgatgatggtgaaaaantgaagaagacggtggaggtaacatggacgacgagcttctcgctgttttaggttacaaagttaggtcatcggagatggcggaggttgctttgaaactcgaacaattagagacgatgatgagtaatgttcangaagatggtttatctcatctccgcgacng

SEQ ID NO: 9253 - DNA, 402 bp, Arabidopsis thaliana
  unsure at all n locations
  Clone ID: LIB24-120-Q1-E1-D2
taaagctgtcttctccttagcgagcaagattgcgccaagtgtcatttttgttgatgaggttgatagcatgttgggtagacgtgaaaatccaggggaacatgaagctatgcgtaagatgaagaacgagttcatggtaaactgggatggtttaagaacaaaggatagagaacgggttctggtactcgctgccaccaacagaccatttgacctagacgaagctgttattanacggcttccccggagattgatggttaatcttccagatgcaacgaacagatcaaagatcttgagcgttattctagcaaaagaagaaatagcaccaagacgtcgatttagaagctatagcaaatatgacangatgggtactcangaagtgacttaaagaatctgtgtgtgaccgca

SEQ ID NO: 9254 - DNA, 400 bp, Arabidopsis thaliana
  Clone ID: LIB24-120-Q1-E1-D4
aaattcaatcatcaatgttaacggacgagagagaagtagtctgtgtcaccggcgccagtggctgcatcggctcgtggctggtccatcagctcctcctccgcggctactccgtccacgccaccgtgaaaaacctccaggatgagaaagagacgaaacatctagaaggtctcgaaggtgcagccacacgcctccatctattcgagatggatctcctacaatacgacaccgtttccgccgccatcaatggttgctccggcgtattccacctcgcatcaccttgtatcgtcgatgaagtccaagatccccagaagcaactacttgacccggcggttaaaggaaccataaatgttctgacggcggcaaaagaagccagtgttaagagagttgttgtgacgtcttc

SEQ ID NO: 9255 - DNA, 411 bp, Arabidopsis thaliana
  unsure at all n locations
  Clone ID: LIB24-120-Q1-E1-D5
acgcgtccncccacgcgtccgcacgatcgagcaagagagagatggatggtcgattacctgacaaaggcattctcaagagcgaggctctaaaacagtacatcatggaaacaacagcgtatccaanganaacacgaattgcttaaagaacttcgagaagctacaatccagagatatggaaatttaagcgagatgggagttccggttgatgaaagtctatttttatcgatgcttgtaaagatcatcancgcgaaaaacactatcgagatcggtgtgttcaccggttactcacttttcaccgtagctcttgctttgcctgaanatggncgtattactgcgatagacnttnatcaagcangttacaatttgggacnannannttatgnnggaanggcagggggttggattaacaan

SEQ ID NO: 9256 - DNA, 438 bp, Arabidopsis thaliana
  unsure at all n locations
  Clone ID: LIB24-120-Q1-E1-D7
taagaattcccgggncgacccacgcgtccnttcaaaaggtcttgaacaactaagggctagcgattcaaccgcggacaataacgaagaagaacacgctgcaaagggacaaagtttgttagaagagatcgaacgagagttcgaagctgctacagagagccttaagcaacttcaagttgatgattctactgaagacaaagaacactttacagctgcaaagaggcaaagtctgctggaagagattgaacgtgaatttgaagctgcaacaaaagatcttaaacaactaaatgatttcactgaaggcagtgctgatgatgaacaatctgcaaagagaaacaaaatgttggaagatatcgaacgcgaatttgaagctgctacaataggtcttgaacaactaaaggctaatgatttctctgaaggcaataataatgaaagaacaat

SEQ ID NO: 9257 - DNA, 456 bp, Arabidopsis thaliana
  unsure at all n locations
  Clone ID: LIB24-120-Q1-E1-E11
cgcccggtaccgntcaagaattcccgggtcgacccacgcgtccnaaccaacgcaaaagaacaatgtctaacgttgtagtaatcgccgttgttctcatcgtagcatcgctaacaggacatgtgtcagcacaaatggntatgtctccgtcgtcaggaccatcgggtgcaccagactgcatggcgaacctaatgaacatgacaggctgtctctcgtacgttacggtcggacaaggtggtggtgcggccaagccgggcaagacgtgttgtccggcgctagcggggctagtgganagctcgccgcactgcttatgttacctcctctccggtgacatggnngcacaaacttggnatcaatattgatanngcaaagggctctcaaacttcccggagtttgcggcgtgattagctcccgattcctcaantttggttcncctttttgggaatccctggttggngc

SEQ ID NO: 9258 - DNA, 424 bp, Arabidopsis thaliana
  unsure at all n locations
  Clone ID: LIB24-120-Q1-E1-E2
ccgggncgacccacgcgtccncagaaccctacagatcatcccctacctcgctgcttcgggtcgaatcagcgagtcgggtcaaaattcacctgagaaaaatgttcgcgaggcggttcacttcgttcttcaaaggatcttcaacctcaagcccggacaaaacagctgggacattgggctcttttggtcgcaaggcagtgtctttcgtcttgattacagtcactggtggtgttgctttgagtgctctcgatgatctttctatctatcgtggatgtagcagcaaggcgatggagaaggtgatgaatagtaaggtgatgattgaagccatcggagagccaattgagaaagggccatggtacaatgcttcactagctgtttctcaccaaangcactcaagtgtcttgttcattccctgtgattggaccac

SEQ ID NO: 9259 - DNA, 450 bp, Arabidopsis thaliana
  unsure at all n locations
  Clone ID: LIB24-120-Q1-E1-E4
tatccgccggcnacnggtcaagattcccgggccgacccacgcgtccggaagcaccaaccgacacaagttttggatctcaaattgtgtctgcgaccgcgttgtttccaacactttgagcaagttaaagagagagagcttttattctttggaggatctaaataggtccaagctcgtcatgcagctaggaaaaagaagaggattaatatacagttattagaaacattaaagtttcttctgtgttttgtagaacaaggagatgatgcggtacaaagaggagaaagaggtgaagaaggaagctttcaggaagtatttggagtcaagtggagttcttgattctcttactaaagttctggtttctctgtatgagcagaatgacaagccttcctctgctctagaattcattcaacanaagctaggtggtccatcagtctctgactatgagaagcttca

SEQ ID NO: 9260 - DNA, 407 bp, Arabidopsis thaliana
  unsure at all n locations
  Clone ID: LIB24-120-Q1-E1-E5
aaaactactgcagaacttgagcaagaggaactggagaaggcaccaaagttcaaagcaaaacctttgaacaaaaagatatttgaaagtaaaggagaaatgggtatcttttgcaacaccaagaagcacataacgatacctcaagagtttcactttgcgacagatgagaggatatcacgaccagaatctgtcttagatatattccgacaagctctcactgaactccgaatcttgccatgaaaaacctctaccaaggaacactgctccaaaccccttcaatcttaagacagaagaaagaggcgctgagaaagagaanaaattttatatggaactcatgtctaagaaattagganatgtaaaggcaagagttccaaaggcaaatccatatccttacacgacgggnctaaccc

SEQ ID NO: 9261 - DNA, 400 bp, Arabidopsis thaliana
  unsure at all n locations
  Clone ID: LIB24-120-Q1-E1-E6
acgcgtccgccttgaaagagagattgaagtactaaagcctaaagtaagagagaacatattcgtgtcgtcttccacagacaaagacgcgatgaaaaagacaattctttctattcattttctggacagtcttggnctctcttatcattttgagaaggaaatcgaagagagcctaaaacatgctttcgatgaagatagaagatttgatcgctgatgaaaataaattgcacacaatctccaccatcttccgagttttcaggacatacggttactacatgtcttcggatgttttcaagatattcaaagganacgatggtaaattcaaggaaagtttaataagaagatgtcaagggtatgctaagcttctacgaagcagtgcactttgggacaacgacagatcata

SEQ ID NO: 9262 - DNA, 453 bp, Arabidopsis thaliana
  unsure at all n locations
  Clone ID: LIB24-120-Q1-E1-E7
tnagccggccggtaccgggtcanagaattcccgggncgacccacgcgtccgctttcatccgcaaggtctattccatcatctccatccagctgctcgttacaatcgccgtcgctgccaccgtcgttaaggttcattctatttctgtattcttcaccaccaccaccgccggcttcgctctctacatacttcttatattgactccattgatcgttatgtgtcctttgtattactatcaccagaagcaccctgtgaactatctgttactcgggattttcaccgtcgctcttgcctttgcggttggcttgacctgcgcctttacaagcgggaaggtgattctggaatctgtgattttgaccgctgttgtggtcatatccctcactctatacactttctgggcggccaaaagaggccatgacttcaacttcctcgggacctttcttgttcngtgctgtc

SEQ ID NO: 9263 - DNA, 381 bp, Arabidopsis thaliana
  unsure at all n locations
  Clone ID: LIB24-120-Q1-E1-F10
tcttatccggaaaccaaaaacttccggtgataaaacctccttcgtcatctctctacttcttggataaaatggcgtcaactttcactgccacatcttctattggttcaatggttgctccgaatggtcacaaatcngataagaaacttatcagcaagttgtcttcaagctcatttggaaggagacaaagtgtgtgtcctagacccagaagatccagttctgcaattgtgtgcgcagcanaggaattacatttcaacaaagatgggactaccattaggagacttcaagctggtgtcaacaagctcgcagatcttgttggtgttacacttggacccaaaggacgaaatgttgttcttgagagcangtatggatnaacacgaattt

SEQ ID NO: 9264 - DNA, 400 bp, Arabidopsis thaliana
  Clone ID: LIB24-120-Q1-E1-F2
tcaaccaaaaaaccaattgcgtaaacactttcccttgaatacagagatcacattcgatcagcgagctgatttctcacaagggatatcaaaatttctggtgaagtgggattgtaaaattcggcgttgaaagatatataaagagtggaaggttctggagtcgtttcaattcatggatgatggtactcctaagaagctaaacatattacctgatcactttagtgctcctagtcccacagcagaatcttctcagcacgatactccatcatcttcgcagccaaaggacgatagttctctgaggccttatagccagtcacggactcgcagaaacctgaaaagagcagcaactatgttgaatttgttcactcttcgccgtctgccttgggtttcagatggtcaagag

SEQ ID NO: 9265 - DNA, 407 bp, Arabidopsis thaliana
  unsure at all n locations
  Clone ID: LIB24-120-Q1-E1-C3
angatcccccaaagcgagttcatcatcttcttcgcctggattcgatcaagactagcactttcatcagatttgattacaatctctcttatcttccaagttataatcataatatccgaggcaatttgggatctgggtctttcctctacattcaatttcttaataaagctggcctctttcttccgagatggttcttgagcgatgatgagtgactctcagcgatcactttctgtgcgattgagccgccggggtgagagaagcaatcattactcacaatctaaagatgctgtggctggcttcttctctcccaccagattgcatgctgattacactttgaaaaaaatttggaaggcaggcttccttcgcttgcttcttgttgggcggcattgtctgggatgctnctcattcta

SEQ ID NO: 9266 - DNA, 385 bp, Arabidopsis thaliana
  unsure at all n locations
  Clone ID: LIB24-119-Q1-E1-G5
tagttcctctgttgatctatccaatcgaatcttacgaaaattttcgagtgaagatgaggtcgcttcaagcaccggttgtttgccctagtgttcgtcccanacaattgggtgtctctgctttacttgtcaactgctctgtttcgaaaactaggagtctcangaaaacanttctggggtaaccagaccaaaaatgacaagtctcangctgctacagtgaatcttcgtctgcatcttcngaggtataagagtatcaaatgtcttttcagctcgcactctgatggnaccggnagcacagcagagaatttcaacgagaacgatgagngattatgtcaagtcnantgtattggnagccgttgaagtaaaaattgggccacatggggttcan

SEQ ID NO: 9267 - DNA, 334 bp, Arabidopsis thaliana
  unsure at all n locations
  Clone ID: LIB24-119-Q1-E1-G7
tgaagaatcaagattagcaatggcccatacatcagaatctgtgaatcctagagatgtttgcattgtgggtgttgcacgtactccaatgggtggctttctcggatctctttcatctttacctgccacaaagcttggatctttagctattgcagctgctttgaagagagcaaatgttgatccagctcttgttcaagaagttgtctttggcaatgttcttagtgctaatttgggtcaagctcctgctcgtcaagctgctttaggtgcangaatccctaactctgttatctgtactacagttaacaaggtttgtgcatcacgnatgaaagcggtaatg

SEQ ID NO: 9268 - DNA, 429 bp, Arabidopsis thaliana
  unsure at all n locations
  Clone ID: LIB24-119-Q1-E1-G9
acgcgtgggcggacgcgtccgcggacgcgtgggttaaaatagaaccaaagagtaaacacttaagcaaaacaattttgtcctactcttaggttatctccaatgaagaacttaaagatggttttcttcaagatcctctttatctctttaatggcaggattagccatgaaaggatctaagatcaacgtagaagatctccaaaagttctccctccaccatacacaagaacaacctccaaaccataagccttctattgtttcttgtcgtttttgtgtggatcctctacatgttaacccgacctaaacccgtttaccttgttgatttctcctgctaccttccaccgtcgcatctcaaggtcagtatccaaacctaatgggacacgcaagacgtggcaagagaaancaggcnangtgttgggaagaacaanaggag

SEQ ID NO: 9269 - DNA, 433 bp, Arabidopsis thaliana
  unsure at all n locations
  Clone ID: LIB24-120-Q1-E1-A10
tatcgaanaagatgatttaagaaagactattggagagggcattgcaagctccaagattctcactagcaacgctattgacatcttccacactgncgttancgccatggccaagcttaacttganggtccaggacttcaanaacatnacaggcggaatcttcgctccttcagacaaaggagcagctcccgtcaacaaaggaanccctcctgttgcctgatgattctcccgtggccgatccaagatggtcctgctcgccgtcctcntgaangacattgacganaccngaatcccaacatgggtttcaggtggctgaccacggaagctcatgactaacgctggangttggcaagtaangacggtggtgctacggatcaggngcaacctttggnggtgggnacggacnggnanggacaagtttaaaaacngttcaaca

SEQ ID NO: 9270 - DNA, 404 bp, Arabidopsis thaliana
  Clone ID: LIB24-120-Q1-E1-A2
aatttcacacttgttgttaagccaccaaaaacaggaggttattctactgcagtcgttgattttagtagtccggaagaagcaaatgaagcatttgaaaatgttgaaggagacgtagctaaggataaatcgggtttgccacaaaaaaaggctgtgttgaagctgagttctggattagcagttagtttattcgttcgtaaaatggttcaagatgattctccgtgtgaaatctctacctccgagagagctcgtgcagaggagaacaatgtgagttctaagagacagaagacggaagatgaaactgaggagaccaaagaagcaactgtaaaccaaagagaggctgataagacaaagcttttccttcataaaatcccacacgatgttccatctcaaggagttacatggag

SEQ ID NO: 9271 - DNA, 396 bp, Arabidopsis thaliana
  unsure at all n locations
  Clone ID: LIB24-120-Q1-E1-A5
gcctcctaattctggtcctaccaacaaggagcctgcgaaggaccaagcttctggcaagaagtcaaaggggaactcgaaaaaaaaggctgaaggaggtgataaagcgctctctggttcagggaacgatggtgcctctcatagtgatgaaagtgtcacagcgggttcatctgatgaaaatgatgagaatgccaatcaacaggaacagggttcaattcgaaagccaagctttggacagatgcttgctgacgcaagttctcaaagtacgactggtgaaatccaaggttcggtgcccatgaagccggtagccccggggactaatctgaatatcgggatggacttatggtcttcccaagctggtgtaccagtgaaggattaacgaaagctcaagccngcaag

SEQ ID NO: 9272 - DNA, 400 bp, Arabidopsis thaliana
  unsure at all n locations
  Clone ID: LIB24-120-Q1-E1-A6
gaagtcaaaggctgagaacagggcacaaaagaagatctctgatgtgcatgcttgggaaaatagcaagaaagcagccgtagaagctcaacttaggaagatcgaggaaaaattagagaagaaaaaagcgcagtacggtgagaaaatgaagaacaaagtagctgcaatccacaagttagcagaagagaagagagcaatggttgaagctaaaaaaggagaagagcttctcaaagctgaagaaatgggtgctaagtatagagccactggtgtagtaccaaaggcaacgtgtggatgtttctaagcctttattgaatttgtatctttgtaacaattcatctcnnnnnnnnnnnnnnnnnnnnnnnnnnnnnnnnnnnnnnnnnnnnnnnnnnnnnnnnnnnnnnnn

SEQ ID NO: 9273 - DNA, 409 bp, Arabidopsis thaliana
  unsure at all n locations
  Clone ID: LIB24-120-Q1-E1-A7
acgcgtccgtgcaattaaatcggtagagtgaggcannnnnnnnnnnnnnnnnnnnnnnnnnnnnnnnnnnnnnnnncctatcatctctgagagttttctcgagaaacttttgagtgtttagctactagattctgaattacgaatcatggaaggaattgatcacctcgccgatgagagaaacaaagcagagttcgacgttgaggatatgaagatcgtctgggctggttcccgccacgcttttgaggtttccgatcgaattgcccgccttgtcgccagcgatccggtatttgagaaaagcaatcgagctcggttgagtaggaaggagctgtttaagagtacgttgagaaaatgtgcccatgcgtttaaaagggattatcgagcttccgtctcaatgagggaagaagcangg

SEQ ID NO: 9274 - DNA, 413 bp, Arabidopsis thaliana
  unsure at all n locations
  Clone ID: LIB24-120-Q1-E1-B1
tgaacaacaacaacaacccctaaaatctcggaagccataatgagcagagcattgttcaggaacgtagccgtcgacaccgctcggctcatacggcggaacgcggcggcgtcaacagaccaatatggtaagaccggagttgctcaatcgagaccttatttccggtcacgtcagcttctcgaaagagcaaaagaaacaggagtcnnnnnnnnnnnnnnnnnnnnnnnnnnnnnnnnnnnnnnnnnnnngaggattgggttcnttggntggtatcttggtatggttaaatcacacccagttgtgaccaaaagtgtcacttcctctcttatttacattgccgccgacttgtcttctcagacgattgcgaaaacttcttctgaagtcttatgacttggtgagaacaggcanggggttgg

SEQ ID NO: 9275 - DNA, 430 bp, Arabidopsis thaliana
  unsure at all n locations
  Clone ID: LIB24-120-Q1-E1-B12
tcgacccacgcgnccgcggacgcgtgggcggacgcgtgggtgagctgatgcttgtaaaagtgaatgcacatccagaatccagggcagagatcatgtggctagttgacacattcatgagcaagagttgtagatatagcggaacatgcattgactatcgaggtaactggagatcctggaaaaatgattgctgtagaaagaaatttgaaaaagtttcagatcagagagattgtnaggacangaaagatagcactganaagggaaaagatgggtgcaactgctccattttggcgattttcagcagcatcctatccagatctcaaggagcangcgcctgttagtgttcttcgaagtagcaaaaaaggagccattgtccctcaaaaggaaacatcancaaggggagaagnttaancccgttgaagcccattttttt

SEQ ID NO: 9276 - DNA, 404 bp, Arabidopsis thaliana
  unsure at all n locations
  Clone ID: LIB24-120-Q1-E1-B2
atgtctggtggtggaggaagtaaatccaaaagtaaaaaaagtaaactcaaagctaaattgggaaagaaaaaaggtatgtccggaggcatgtcaggaagtgaagaaggtatgtctggaagtgaaggaggtatgtccagtggtggaggaagtaaatccaaaagtaaaaaagtaaactcaaagctaaattgggaaagaaaaaaagtatgtccggaggcatgtcaggaagtgaanaangtatgtctggaagtgaaggaggtaaacacggaggtcttggaggtaaattcggaaagaaaagaggcatgtccggaagtggaggaggcatgtcaggaagtgaaggaggtgtgtctggaagtgaaggaagtatgtccggaggtggtatgtctgggggtancggaagtaaacac

SEQ ID NO: 9277 - DNA, 409 bp, Arabidopsis thaliana
  unsure at all n locations
  Clone ID: LIB24-120-Q1-E1-B3
acgcgtccgctcgacgagaaaaaatggcaaccatttcgaatctcgctaancttccccgcgccacctgcgtcgacnccaaatcttctncctcttccnccgtcttacctanatccttcgtcaatttcngcgctttgaatgcaaagctttcctcttctcagctttctcttcgttanaaccaacgatcaataccttccctctctgtgaggtgttcagtgtctggtggaaatggnactgctggnaagagaacgactcttcatgatctatatgagaaggaaggtcagagtccttggnatganaatctttgccgtccagtcacagatcttctcccgttgattgcncgtggngttanaggtgttactagcaaccctgcgatcttccaaaagagccaattccaantcaaatgcttatt

SEQ ID NO: 9278 - DNA, 403 bp, Arabidopsis thaliana
  unsure at all n locations
  Clone ID: LIB24-120-Q1-E1-B4
tgcttcttcttcttcaaaatctctctcttcaccaaatcctcagaagatgagcaacgacaaggatagcttcaacgtctccgatcttactgctgctcttaaggacgaggatcgagctggccttgtcaatgctctaaagaacaagctgcagaatctggctggtcagcgttctgatgtgctcgagaatctgactcccaatgtgagaaagcgcgttgatgccttgagggatatacagagccaacatgatgaactanaggcaaaattccgtgaggagagagctattcttgaagccaagtatcaaacgctgtatcagcctttgtatgtcaagcgttatganattgtgaatggcactactgaagttgaactggctccagangatgatnccaaggtggaccaaggagaggga

SEQ ID NO: 9279 - DNA, 385 bp, Arabidopsis thaliana
  Clone ID: LIB24-120-Q1-E1-B7
tcggctatggagatctccggcgacaagattgatttgaaggacggtgaagcaacaacaccaccaaaaacagatatcgagtcacagattctcgcggctatgcagtcccgagtaacctacctcagagataaagcagacaacttcacctttgaaggtgtgcggaggttgctggaggaggatctgaaattggagaaacatgctttggatgtgcataagagctttgttaagcaacatttggttcagtgcttagcaggtgctgagaatgatgaaacttcagaaaattctctagaaactgagaagaaagatgatgtaactccagtgaaagaagcagcagagttatctaaagagcacacgacgaaaaaagatggtaaggaagatatgactggtg

SEQ ID NO: 9280 - DNA, 400 bp, Arabidopsis thaliana
  unsure at all n locations
  Clone ID: LIB24-120-Q1-E1-C2
angcgtccggtaatttccggtgcccttttgtacattaaggatgatttcgaagttgttaagcagagcagtttcttacaggaaactattgtaagtatggctttagttggtgccatgattggtgctgcagctggaggttggatcaatgactactacggtcgtaaaaaggcgactctttttgcagatgttgtctttgcagctggagctatcgttatggctgctgctcctgatccgtatgttttgatatcgggtcgtctcttggtcggtttangagttggtgttgcttctgtgactgctccggtttatatagcgcgaagcatctccatcggaagttaagaggtggacttgtgagcaccaacgtattgatgatcactggtggacagtttctttcatatcgcgttaa

SEQ ID NO: 9281 - DNA, 427 bp, Arabidopsis thaliana
  unsure at all n locations
  Clone ID: LIB24-119-Q1-E1-G12
aaccatangagatccctcaagaagtggaggataaaccacaganatcattacnatgagaagcancangaaaatcaagacctacttatccgctccattgttcaacacttgggattccaggggaaccgacctatcacagcatgtatcatttacaaatgtttactgcaatggaggtcatttgaagttgaacgaaccagtgtctttgatcgcattattcanacaataggccatgctattgagactcaagataacaacaatacattggcctattggttatccaatacctcgacactcctattactcctccagcgcacactcaaagctagtggtgcagctgggatggctccgcagcgccgccgttcatcttctgccactctatttggcaagntgagtcngagcttccgcgggggaacccccaggtgttaatctt

SEQ ID NO: 9282 - DNA, 410 bp, Arabidopsis thaliana
  unsure at all n locations
  Clone ID: LIB24-118-Q1-E1-A9
aagatttcatgactgctgttgaattctcaaagcaacatccttatggtaaagctgtggggttactcgatttgaagttcggttctattgaggcaaatgagaaatggctggttttgcctggaatggtatcttctttcatactcagtgatcttcttaagaaggaaggctttagtgcagccgcaaaagacacggtgaaagctaatggaataacagaggaaagtacggagattgatgttttgagtcaagaaaagctagaagaagaaacaatgatggatgtggatacgactacaccagttgctgtagcggccgagaagatcaacggtggtgctaggtgcttttcgaaggagctaaagtgggaacatgattgaagaaananggtggtcaactgttgtgggtngtggaggttgttggtg

SEQ ID NO: 9283 - DNA, 434 bp, Arabidopsis thaliana
  unsure at all n locations
  Clone ID: LIB24-118-Q1-E1-B1
cncgtccgagggagaaaaatcacacaaccaaagcgtttagaaaaaaacagcgataaaaccgaaacatcaagcanacaaaaaaaaaagagaagagaaattatttttttttgttttcgttttcaaaaacaaaatctttgaattttatggcaacccgtcttctccgaacaaactttatccggcgatcttaccgtttacccncttttagcccggtgggtcctcccaccgtgactgcntccaccgccgtcgtcccggagattctctcctttggacaacaagcaccggaaccanctcttcaccagccaaaacccaccgagcantctcacganggtctcgatntcnccggatcaangcccgtcttttcncctcnatcccaacctctgatcncnnccgttccaancgccgttgttgcatgcgggnggcgataggtcctaagg

SEQ ID NO: 9284 - DNA, 461 bp, Arabidopsis thaliana
  unsure at all n locations
  Clone ID: LIB24-118-Q1-E1-B10
gcgaacgtctacgccgnccggaaacggtcanaaattcccgggncgacccacgcgtccnattggctctgcgtacatactttgctggtgtcttctacagcaacttctccaacaaccaatcaactcgggccccatacttttgctgctcctccaaatcttagcaattttatgtctttcttctagtgattttcaagttaatgaatgggtcgagattactgcactctattacatgggaatggcaggtcactttgctcttggaaacagcaacactttagcaacaatcgatgttgctggtgcttttatcggaatctctagtcattctacaatactctctgggatcttgatgttcatgatcacctatgcatctcccatgctgttccttctanccctcgtcatggtacattggtggcaaatcttanaaaccaactcaanactnaaanaattatcaagctcaacnggggaaa

SEQ ID NO: 9285 - DNA, 392 bp, Arabidopsis thaliana
  unsure at all n locations
  Clone ID: LIB24-118-Q1-E1-B11
tgagcgaaaccgaagcaaccggcgttaccgatgattcggctccagcgattgagactgaaactgtttctgatgcgatggagcatacagcgatcggagtggttgaatcggtggaaggagccatagaaggagcagagaaatgggtgggtgatttgcaacggacggtgaaggaatcgaaggataccgcaatgcgttctgctcgttccctccgtgaaaattctacctctcagttccgctctatacaggatttcattccacatgctttgactcagtataagacctatgagaatgctttcttcagtaaagttacagacgaattgctatcaagcttagagctgaagtggcttccatgacttcgcttttgaanacagangaggattgcnttggagcaagag

SEQ ID NO: 9286 - DNA, 404 bp, Arabidopsis thaliana
  unsure at all n locations
  Clone ID: LIB24-118-Q1-E1-B12
ctttcaagtctgaaacttgaactctgtttctaatttacttcaaaagctatggcgtcgacttcaacatcatctttaatggcttctaaaactgtaatctccaaaacagctctgttttcttccttaccgggaatagtcagccggagttttttaacattcgcaccggcttctccttccgttaaaccccttaggataagatcttcaaatgttactaagttcgatgaagtaaccaacagtcttgacgaagacatggaccagattcgacggttacaaaacggttctgacgtgagaggagtcgcattggaaggagagaaaggtcgaacaagttgacctaacgcctgcagctgttgaagcaatcgcagagaagctttggagaaatgggttgcagcaaacggagaantaacgga

SEQ ID NO: 9287 - DNA, 412 bp, Arabidopsis thaliana
  Clone ID: LIB24-118-Q1-E1-B2
tattgtaagtgttagttggacgaaagtgacaaagagtaatcaattgggagtcaaaaccaaagatggattgtactacaagttcgttggatttcgagatcaggatgttccaagtctgtctagctttttccaaagttcttatggaaaaacaccggatgagaagcaattatcagttagtggtcgtaattggggagaggtggatttacacgggaatacactaacctttttggttggatcaaaacaagcttttgaagtatctttagctgatgtttcacagactcagcttcaagggaaaaatgatgttactttgggagtttcatgttgatgatactgctggtgctaatgagaaagactcgctgatggagattagttttcatattcctaattccaacactcagtttgttggtgatgaaaa

SEQ ID NO: 9288 - DNA, 438 bp, Arabidopsis thaliana
  unsure at all n locations
  Clone ID: LIB24-118-Q1-E1-B4
gtgnccgtccaaaaattcaangggtcgacncacgcgtccgntaagtnttatccttcatggaatgataattaccaagtatggagtaaaggaagagaattgcatcaggagaagttttttggtgttggttggaattacagattaatttgtggaatgtcgtcgtcttcttcggttttggagggaaagccgaagaaagatgataaggagaagagtgatggtgttgttgttaaggaagcttcttggatagatttgtatttaccagaagaagttagaggttatgctaagcttgctcgattggataaacccattggaacttggttgcttgcgtggccttgtatgtggtcgattgcgttggctgctgatcctggaagcccttccaagttttaantatatggctttatttggttgcgggagcattacttcttaagangtgctggttgt

SEQ ID NO: 9289 - DNA, 464 bp, Arabidopsis thaliana
  unsure at all n locations
  Clone ID: LIB24-118-Q1-E1-B5
ttcagccgccagtaacggtccaagaattcccgggtcgacccacgcgtccncggacgcgtgggcggacgcgtgggcggacgcgtgggtcttgtttggtctggtaggggactgcagatgaagtggttgattgttctcatggaaaacaactttgggaactttcaaaagaaaagtatgagcctttatgggtatctggaggaggacactgcaatctagaactctatccagagttcataaaacatctgaagaaatacgtaatttctatttccaagggaccaagaactggttcgaacaagactgcaacgacggatgcagccaaaaaacagagcaagcctgcagagaacgggcgtgctgatacgtttcaacttggctgttgccttccaagaagtttctagaaacagtgtagacagtcagctggagaaatctaagaagactagtaaacccgagaagtctcgtatgagcattga

SEQ ID NO: 9290 - DNA, 407 bp, Arabidopsis thaliana
  Clone ID: LIB24-118-Q1-E1-B7
cctgtcttcttgtcttgtccaaaatcggatttttaagagtacaagtgagtttattttgggggccgaaatctgtcctggaggatacagaagcaagatgaagttaatagatcgaagaatgaggttaacggagctgctcttacggtgctccatcagtgtcttcgctctcctcgcgcttattctagttgtgacagacactgaggtcaagcttatcttcactatcaagaagacggccaagtacacggacatgaaggcggttgtgttcttggtggtggctaatgggatagctgcggtttattctttgttgcaatcagttcgttgcgtggtgggtacgatgaaaggaaaggttttgtttaagtaagcctcttgcttgggcctttttctctggtgatcaggcgatggcgtacttg

SEQ ID NO: 9291 - DNA, 406 bp, Arabidopsis thaliana
  Clone ID: LIB24-118-Q1-E1-B8
gaatccattacttttactccaaaatcattaacaatggactcaggaagtgcagtggacatcatttcgacgctttcagacttcctgctcgtcctgatcatttcgaacctttccttcaaggaggctttgagcaccagtcgcctttccacccgctggagacacatatgtcgcgaaacgagaaacatctctttcagagaggacgagatcgtgacattcgctgatgattccgttgctcgctattaccaaagggctgcattagttgcctatatggttggttgggttaacaattttaccggtggagttgttgaaagcttcgagcttcgtctctctaattcgtatgcttttgaagaaggggtcaccacactgatcgaattcgctgtctccaagaatgtcaagcatctttttcttg

SEQ ID NO: 9292 - DNA, 468 bp, Arabidopsis thaliana
  unsure at all n locations
  Clone ID: LIB24-118-Q1-E1-C2
ctgttacgcttccagtgccgtccanaattcangggtcgacncacgcgtccgngcacgacgaagagccagatccttcgcaaccaagttggcagagtgattctctcgtggactgggaaccaaggtatgtggataaattcaatgcttttgctaacaagcctgatgttgctaaagtggaagtctacgcaaagggtttgaggagcctcttgaaatatatcaaggacaaatacggcaatcctgaaatcatgatcaccgagaatggatacggagaggatctaggtgagcaagacacaagccttgtagtggcgctgtcagatcagcacagaacatactatatccagaaacatctcttgagcttgcacgaagcaatttgcgatgataaagtaaacgttacagggtattttcattggtcattgatggacaattttgaatggcaagatggatacaaggcgaagatttgggctctactac

SEQ ID NO: 9293 - DNA, 409 bp, Arabidopsis thaliana
  Clone ID: LIB24-118-Q1-E1-C7
taaacttattcttgggctactttcaacctcaggaagggaaacctgcgctctgggagctggattctgattactatctccatgtttcagggattggagatgatattttcccagatatcggggtccagtccattgctaaacctatgagtggtattggagtcaatcttgcaccagtgccagctttcagagacgacttctcgcggaagaagctgacatcgtttgacaaactgatagagcagacatgcagttcaataaagaacgtgaggctttgtagtgagacagaccaaaggccaggtggcaacactggaagcactggtgtggctcctgatgcagctgagattcaactcaagagccccaattggctgtttggttcaagaaagcccgaagagagtagctctgccacaaaatctgg

SEQ ID NO: 9294 - DNA, 464 bp, Arabidopsis thaliana
  unsure at all n locations
  Clone ID: LIB24-118-Q1-E1-D10
ccaaacgtttacgccgcccaggaaccggtcaaagnattcccgggncgacccacgcgtccgcttccactgagctccgccgtgttcgctcctactctgatacctttgtcctctgtgactgaagacgttaaagcctcgccggagaagataaccggtgagaaggtagaggaagatgagaagaacaatccaggtgggacagctcaaacgagggattactacttggattcacgaaggagaagaagctttgatcgatcatcgagacatggtttgcttgaagttgatgaattgaaagctatttctaatgctaaggtatcacctgaaactgttggtttgtttcatggagcgaagttgcttgttactgagagggaacttagggattcgaattggtattctattaagaattacaaaccggagaacttggagttaggttccaaaggtgtttggttgtgttgccgctggtgaaggtn

SEQ ID NO: 9295 - DNA, 407 bp, Arabidopsis thaliana
  Clone ID: LIB24-118-Q1-E1-A8
acgcgtgggcggacgcgtgggggaaactagaatctattctctacttttgccagcgcatgactaatgccgctgtgatagccatgtcagagaactgtccagagcttactgtgtttaggctgtgcataatgggtcgacataggcctgaccatgtaacaggaaagcctatggacgagggatttggtgccattgttaaaaactgcaagaagctaactcgccttgcagtgtcgggattgctgacagatcaagcttttaggtatatgggtgagtatgggaaattggtccgtacgctttcagtagcttttgcagggggacagtgacatggctctgagacatgtcctagaaggttgccctagactgcagaaacttgagataagggacagtccctttggagatgttgcattacggtc

SEQ ID NO: 9296 - DNA, 414 bp, Arabidopsis thaliana
  unsure at all n locations
  Clone ID: LIB24-117-Q1-E1-G1
aaacncgtcgattttcaaaaccggagctcagagactgatctcggaaagtaaatcgcagccatggcggaaaaagctgtcactatcaggaccagaaacttcatgaccaacaggcttctcgccagaaagcaattcgttattgatgttcttcatcctggaagagccaatgtttcaaaggctgagcttaaggagaaattggcgaggatgtatgaggttaaggacccaaatgctatcttctgtttcaagttcagaactcactttggaggtggtaaatcttctggatatggtttgatctatgatactgtcgagaacgctaagaagtttgagcctaagtacagacttatcaggaatggacttgacaccaaagattgagaaatcaaaggaacagattnaagggaaggaagacnagggcgaaga

SEQ ID NO: 9297 - DNA, 411 bp, Arabidopsis thaliana
  unsure at all n locations
  Clone ID: LIB24-117-Q1-E1-G11
acatggaggagattcactaagaaagaaaggaaaaaaatctctttgtctttgcagatgcgacacgcaaaacgacgattctgatctcgcttgtctgatttcaaaaacaatgagaagatagttctgattatataacacacaaaccctacttcattccttcatcatcgtctccaatcattacccaaagatccgtctttttctttacttcatgtcgaagcaaacgtacaaagtgtgtttctgctttcgccggaggtttcgttacactgcatcggaggcaccgcgtgagatcaagaccattttcgaaaagtactcagagaatggagttatgaccgttgatcatctccacaggtttctgatcgatgttcaagaaaacaagataaagccacaagaggaagntgcacagtcaattattca

SEQ ID NO: 9298 - DNA, 457 bp, Arabidopsis thaliana
  unsure at all n locations
  Clone ID: LIB24-117-Q1-E1-G2
tccanaggtcgacccggccgtccgcagacgcactttgtgttcggagatggtctttacgacgccggaaacaaacagtttctctctcagaaccgagttgacgcaagctttcctccttatggagtcactgtaggacaagccaccggacggtggtccgatggttctatcgttcctgattatcttgctaaattcatgggaattcctaaaatctctccgattctcctaaccacggcggatttttctcacggagctaatttcgccatcgccgacgctaccgttcttggctctcctccggagacgatgactttgtcacaacaaagtgaagaaattctcggnaaacaaggaataagtggacaaatcaaacacgttctggaagctatctacntgatctacantgggntccggatgattacntgnagctangctaggagntaatncaaagtccatcaggatactccag

SEQ ID NO: 9299 - DNA, 426 bp, Arabidopsis thaliana
  unsure at all n locations
  Clone ID: LIB24-117-Q1-E1-G5
acgcgtccgattgcggctcagcaaaagttacctaaggaagcagaaactgcagtaaatggtgatgttgaacttggatgttccccgtcttttcgggatcccgagaagcagatatatggatgcgagcattacaagcgtaactgcaagcttcgagctgcttgttgtgatcagttgttcacttgtaggttttgccatgacaaagtaagcgaccactccatggatagaaaattggtgacggaaatgctctgtatgcggtgcctcaaggtgcaacctgttggtcccatctgcacaacaccttcatgcgacggattcccaatggcaaagcactattgcagtatttgcaaactttttgatgatgaaagggccgtttaccactgtccattccgcaacctttgcccggtccggggaaaggactaaggaaccnatttt

SEQ ID NO: 9300 - DNA, 450 bp, Arabidopsis thaliana
  unsure at all n locations
  Clone ID: LIB24-117-Q1-E1-G8
agcctcccgggncgacccacgcgtccgggattttcccgcttcagcgtctctcagtctctctctcggctttatccaaaggttccttcgtttactccgcttctatggaagaagcttgaannnnnnnnnnnnnnnnnnnnnnnnnnnnnnnnnnnnnnnnnnnnnngagaagcaacatggccctcggtggcttgatttcaaatcggaacttcggttccttcatcggctcaggcaatggttgtcagagacttggaaaaagtggtgcagaggtttccaagctttttccaaatgcattgttgtgccgtaatcatcaacctctgcaagctagtttacatcatgaatcgggacacatgagaagaagttttggatgtttccttcaaccaagaatggacagtgtaattaggtttaggaacagtatcaagatcaacangatctcgtgcttactacaaatca

SEQ ID NO: 9301 - DNA, 469 bp, Arabidopsis thaliana
  unsure at all n locations
  Clone ID: LIB24-117-Q1-E1-H11
tttgccgccccgtaccgcnccaaaaattcccnggtcnacccacgcgtccgnnggttggctgaggaagataaagaccgcagaacatggagtacgtctgacgataccagactatccatttgcaaatgatggtctaatattgtgggatgcaattaaagaatgggtgacagactatgtgaaacattactatcctgatgaagaactgatcacatcggacgaggaactccaaggatggtggagtgaagtgcggaacataggccacggagacaagaaagacgaaccttggtggcctgtcctcaaaacacaagatgacttgattggtgtggtaactacgattgcatgggtcacctcaagtcaccatgcagctgtaaactttgggacagtacgggtatggaggatactttcccaaccgnccaacgacaacaaggngtaagaatgcccaaccggaanattcgaccagattgaacccttt

SEQ ID NO: 9302 - DNA, 437 bp, Arabidopsis thaliana
  unsure at all n locations
  Clone ID: LIB24-117-Q1-E1-H2
tccnaaaccataccataaaaaacatgaaaatcctctcactttcacttctcttgctcttggccgctacggtctcggcatccgttccagggctcatcgaactcgtcgattcgaaaaccatctttgggaacgtagccgaactcttagagaaagagaaactttccatcaactacgccaactgcagaagctggcaccttggtgttgagacctctaacatcatagacttcgacacggtgcccgcaaattgcaaagactatgttgaagactacttgatcacttccaaacagtaccaatacgactccaaaaccgtgtgcaaagaggcttatttctatgccaaaggacttgccctaaagaacgacaccgtcaatgtttggatctttgacctagatgataccctccctctctagtattccctactacgcaaaaatatggatacggga

SEQ ID NO: 9303 - DNA, 468 bp, Arabidopsis thaliana
  unsure at all n locations
  Clone ID: LIB24-117-Q1-E1-H3
gtacggcctccaaaattccaaggtcgacccacncgtccncgaaaccnaaagaatccacaaaaatggagattctccgcaaattcaaaattctcgggagatccaagtctccgatctttgctttcanagtcaccgccggcctagctctaaccgccgtcactggcagcgccaccgccgtgtccatcttccgagactcaccttccaataaaatagcgacggctgtagaaggcgtcgtccgttcttctcgcgctatctactccatcactctcactgtcgctgattacaaatatactttgcgtagattaccagcaagattccgatgagtatcttcagagattaacagaggtgtacaattacatatcttacattcgtgtttaagttttggnttcatggaattgtagttatcaatggnattaggccgattttctggaanttgattaaattccaaaccggttaatngtcattggggga

SEQ ID NO: 9304 - DNA, 403 bp, Arabidopsis thaliana
  unsure at all n locations
  Clone ID: LIB24-117-Q1-E1-H5
gaaatttcctcttctcaaagaactcaaaatttgaagatgaaggacagagaggaatcatcatcgtcttcttcttcaatgacaacaaaaaaaactaatggaataatcaacaacggcgaacacgaacctcgagatatcaacatccgatcattctcttctgttccttcttctcctcgtaacgcttcttccaaatacgatttcgtcaaggtcaaagtatggcttggagacaacgcagatcactactatgttctgtctcgattcttagtctgtagaatgttaactgttactaagatcccaaatcatgaagctataaagatttctcttgaactcaagaagcttctaattgacaacagtcttcttgatgtctctcagtctgatttggaaaccaatttgtttaagccaaang

SEQ ID NO: 9305 - DNA, 451 bp, Arabidopsis thaliana
  unsure at all n locations
  Clone ID: LIB24-117-Q1-E1-H9
accggtcanaaattcccgggncgacccacgcgtccgatcatccccaaacacacacaaactaaaaaaaaggcaaaaccctagatccaagatcagacctaatctaatcgaaactcatagctgaaaaatgaagagagatcatcaccaattccaaggtcgattgtccaaccacgggacttcttcttcatcatcatcaatctctaaagataagatgatgatggtgaaaaaagaagaagacggtggaggtaacatggacgacgagcttctcgctgttttaggttacaaagttaggtcatcggagatggcggaggttgctttgaaactcgaacaattagagacgatgatgagtaatgttcaagaagatggtttatctcatctcgcgacggatactgttcattaaaatccgtccggagccttaatcctgggcttgataatatgcccctcctgaagctta

SEQ ID NO: 9306 - DNA, 420 bp, Arabidopsis thaliana
  unsure at all n locations
  Clone ID: LIB24-118-Q1-E1-A1
aaagttatggcgagccatttttgcttgcttctgatcttcactttcttcactctagtgtttccgtcaaacggatcttcactgtcttcttccaagcttttacctcgtttccctcgctacactttccagaaccgagaagccagaatccagcagttccggggagatcgaaacgagtatcgatacgagactaagttcttctcacaagcagctggaccacttcagcttcgccgatcttcccaaattctctcaacgctanctcatcaattccgatcactggcntggtgcttctgcgcttggacctatcntcctttactgcggnaacgaaggtgatattgaatggnttggctacaaactctggantcatttggggatatccgctcccaaagttcggtgccntgccgtgttttccccgngcaataaggt

SEQ ID NO: 9307 - DNA, 429 bp, Arabidopsis thaliana
  unsure at all n locations
  Clone ID: LIB24-118-Q1-E1-A11
cccgggncgacccacgcgtccgcccacgcgtccgcaaaatagtagaagaagaactttttttgatctccgattcttacctctgcaatcttcagattctagctgattcaaggatcttgtttgtgatagaaattggaggagatgggagcattcatgtcgaggttttggttcatgatgtttcctgcaaaagagtataagattgttgttgttggtttggataatgctggtaaaacgacgacgctttataaacttcatttgggtgaagttgttactactcatcctactgttggtagcaatgttgaagagcttgtctacaagaatattcgctttgaggtatgggatcttggtgggcaagataggctaagaacttcatgggcaacatactaacgtggaacacatgccntgaatggnggtaaaagatagcacagacag

SEQ ID NO: 9308 - DNA, 404 bp, Arabidopsis thaliana
  unsure at all n locations
  Clone ID: LIB24-118-Q1-E1-A5
gggcggacgcgtggggtgaaagtttcctcgtcgacgacttcttcatcgtcatcgtcatctccagatgaagaaagcgatctccagaatctcctcgaggaatcagattctcaaatcgaccaatttcgtatcagcgacgaggcggcagagcaacgacctaccttcgatgtggagagtctccgatcacgtttacgacggagttttaagctcaatctcactaagaaacagtccatttttatcttcctccctatcgtcatcatcctcatctacttatctaccgatttcagcaattacttctccgtcaaagttcctaattctgcgttccggtcaaatacattaacgggtcgggttcatgaatcggatcttcaagcactgtatcntctcaggaagcaagagagcgatctctt

SEQ ID NO: 9309 - DNA, 405 bp, Arabidopsis thaliana
  Clone ID: LIB24-118-Q1-E1-A6
atataggttgcagggccttatggactctctcctacaccagctagacgtgctttgttcatattgtaccagaccgcagttccatatatcgcagagagaattagcactcgagctgctacgcaagcagtcacctttgatgagtctgatgagttttttggtgatagtcatatccactcaccaagaatgatagatcttccatcttcatctcaagttgaaacttcaacttctgtagtatctaggttaaacgatagacttatgagatcgtggcaccgagctattcagcgatggcccgtggttcttcctgttgcccgcgaagtcttacaactggttttgcgtgccaatctgatgctcttctactttgaaggtttttattatcatatatcgaaacgtgcatccggggttcgttat

SEQ ID NO: 9310 - DNA, 402 bp, Arabidopsis thaliana
  unsure at all n locations
  Clone ID: LIB24-117-Q1-E1-F9
gggtctcactctccttcgccgcggaatcgtctctcggagccgcgaaaggactcttagggttaaagattcttccccaaatctccttctctcttcctcagctgatttcgactccgatcaattttctaggtgtttgaaggcatttgaaaggatgggagacaatggcaaagatgaaattatggtcgaggcatctcaatgcgctggtgctatggttgagataaagataaagacgttggattctcaaacgtacaccttacgtgtagataaatgtgtccctgttcccgcattgaaggagcaagttgcctcccgttactggtgtcgttacgggnacaacaacgccttgataaggttcgtgggaaaaagttatgaaaggatgantnaactcccaatcaagcccaatcaang

SEQ ID NO: 9311 - DNA, 450 bp, Arabidopsis thaliana
  unsure at all n locations
  Clone ID: LIB24-117-Q1-E1-D1
tcgacccgnccgtccgtttaatcnaagggagacttgcgtcgaggaaagcgagtgacctcgggatcgataaacagaacgggaagatagagtttgcacagctatatggtatgtcagatgcattgtccttcgggttaaagagagcagggttcaatgttagcaagtacatgccgtttggacccgtcgcaaccgctataccgtatcttctccgacgcgcttatgagaaccggggaatgatggccaccggagctcatgaccgtcaactcatgaggtaggttaacacccttgattagttctttaaccatatagtttagttaatagattttggatttggtttactaatgttggnattggttattgcaggatgggacttaagaaggagattaatccccgggattgcgnttaanagagaannttggagccnnttaattnaaatttgggaattgtgcntga

SEQ ID NO: 9312 - DNA, 390 bp, Arabidopsis thaliana
  unsure at all n locations
  Clone ID: LIB24-117-Q1-E1-D11
aaaaccctctcaaaaattccaaaacataatctcatttctcaagtttaacattttcgagcccctttagaacagtggagaaagatccacacagataaaaaaacgggtgagttttatatcaaatagacgaaaatgcccctgtcggcgacggcggatacaagcaagacggtgaagctggagaggtacaatagctacctccggaagattcacagcaccaaagttctcaacgcttcttctaaagttcttttccgagcaacgcttctcgtagctcttgtcctcgtcctcatcttcgccatcaactaccctccactctccgatagccgcgccgccgcagcacaccacctccaccgtcgtagcttcttatccaacgggactcctctcctcctnctcttc

SEQ ID NO: 9313 - DNA, 409 bp, Arabidopsis thaliana
  unsure at all n locations
  Clone ID: LIB24-117-Q1-E1-D12
gacgcgtgggttgtggtcgaatttttaaatgggaagtggaagagatagagacgaccctttatccttcaccangcaatccatctacggcgtcgtctccagtcactgtatctgactatctcgacaactttctcggcgaacccacttctcgctccggtagttttcaaagcgagagcttactcggtggaggcggtggagaaagcatcaacgacgctgattttggattcgctcgtcctgatttccgatcggaacaactagctggaaccgtacagttttacgagaggcatgtcttcttgtgctacaaaaagccatctgtttgggcccgcaaggatcgaggctgctganttcgatcgattgcctaggctactctctgccggctgtnccggncacnaaaggggtagcntgaagaagg

SEQ ID NO: 9314 - DNA, 431 bp, Arabidopsis thaliana
  unsure at all n locations
  Clone ID: LIB24-117-Q1-E1-D2
aaaaacatgaaaatcctctcactttcacttctcttgctcttggccgctacggtctcggcatccgttccagggctcatcgaactcgtcgattcgaaaaccatctttgggaacgtagccgaactcttagagaaagagaaactttccatcaactacgccaactgcagaagctggcaccttggtgttgagacctctaacatcatagacttcgacacggtgcccgcaaattgcaaagactatgttgaagactacttgatcacttccaaacagtaccaatacgactccaaaaccgtgtgcaaagaggcttatttctatgccaaaggacttgccctaaagaacgacaccgtcaatgtttggatctttgacctagatgataacctcctctctagtaatncctactacgccaaaatattggttacggggaacaagagaag

SEQ ID NO: 9315 - DNA, 426 bp, Arabidopsis thaliana
  unsure at all n locations
  Clone ID: LIB24-117-Q1-E1-D4
gtcttctctaaccctctaaattctctttgngtcgggatcactggaaagaaatgtataatctcactttctctccatcattgtcctcntctttgctctcttttacacaacaaactcctgcagccatagtgtcctcttctcctccggatttagtacttcaacaaaaactccggtttgtcgtggaaacctcaccggaccgatgggcttatgtcattttttggcaaaagatgtttgatgatcaatcggaccggtcttacttggtttgggttgatggtcatttctgtggaaacaagaacaacagnttcccaaggaaaatgttcatttttctttgcctcttatgttatctaatcaaaatatccaaaatttatttaaatcaacttcctaaaaaaattctattaaggaaatnataaaatttncctaacccttgat

SEQ ID NO: 9316 - DNA, 465 bp, Arabidopsis thaliana
  unsure at all n locations
  Clone ID: LIB24-117-Q1-E1-D7
gccgntcggtaccggtcacagaattcccgggncgacccacgcgtccggcaatgtttattatgagctanttccacaagaagtcattgttagtaaagaaatgggaagccgtgcaatatgtatacaacgtgtggcaccaccgtgttttgaagcctcgcaagtgaacaagatcaaaacagttggttcctttttggtgaatactangagtaagagaagaagaagcactggtgtgaaatgtagcagcatagctgacnacatcggaggtgacttggtgaagccggacatcggacaatggcttcaagacgtggaagaacacaaggcaatcgccatttacgctcctcangagggtggttacgaangtcgttatcttaaccgtctcaaaatgcagggctactactttcttgacatctctgcccgtggccttggtgancctgaanactanccctccccagaactaccntgtttgcc

SEQ ID NO: 9317 - DNA, 400 bp, Arabidopsis thaliana
  unsure at all n locations
  Clone ID: LIB24-117-Q1-E1-E11
ttgttggaagcttttctcaattggcttcgtagcctcttcttcaagcaagaaatggagctttctttgataggacttcaaaatgcaggaaagacatcacttgtaaatgttgttgcaactggtggatacagtgaagacatgattcctacggtcgggtttaacatgaggaaagtaacaaanggaaatgttacaatcaaactatgggatcttggtggtcaaccangattccgcagcatgtgggaacgttactgtcncgctgtttctgccattgtgtatgtagttgatgctgcagatcctgacaacctaagtgtgtcgaaaagtgaactccatgatttgttgaacaagacttcgcttaatggtancccncttctcgttcctgggaacaagaatgaacaaacctgga

SEQ ID NO: 9318 - DNA, 196 bp, Arabidopsis thaliana
  unsure at all n locations
  Clone ID: LIB24-117-Q1-E1-E4
tttacgccgntctgtacgcctcanaaattccaaaggtcgacccacccgtccaattaccttgcttcgtggttatttacaaagttttagaatctctccctataatattaaaaagttagaagtacnnnnnnnnnnnnnnnnnnnnnnnnnnnnnnnnnnnnnnnnnnnnnnnnnnnnnnnnnnnnnnnnnnnnnnnngg

SEQ ID NO: 9319 - DNA, 477 bp, Arabidopsis thaliana
  unsure at all n locations
  Clone ID: LIB24-117-Q1-E1-E5
cttctacgcgntcngtaccggtcananaattcccgggtcgacccacgcgtccngaagataatctctatgggatctgtattggagagaggcaaagacaagactcaagaaacctctatgttccaccagcattgccttcttcagcagctgaaacgaaagaaccatcagatttggagacctcaacgaggtttgcctgagaaatctgtttcggttctacggaattggatgttccaaaacttccttcacccttacccgaaagattcggagaaacatcttctagctatacgaagtggcttgacaagaagtcaggtatcaaactggtttataaatgcgcgggttaggctatggaagccgatgatagaagagatgtatgcggaaatgaacaagaggaagctcaataacagtcacattcaacccaacggaccaactcctcgaatggcaaaatccgntaatgaataanccaagccattgcataantaa

SEQ ID NO: 9320 - DNA, 459 bp, Arabidopsis thaliana
  unsure at all n locations
  Clone ID: LIB24-117-Q1-E1-E6
aacggtcanaaattcccgggncgacccacgcgtccggatctagacacataagctactcagatatggaagtggttgctgttgggtcaatgaagacgcagagacaggagacatgggcttgctctgtcactgagtcttttctcctcctcgtcggaaagaatctggcttgtcttctccttgtggcagaatcattactgataggtttggttgctgttgaccagaggttgtctgtcaaggagggttacaaaagaggaagccgtattgaggaaaacaaagatgctagtgacagtgacgatgacgacgatgatgaagacgctgatgaggacgacnnnnnnnnnnnnnnnnnnnnnnnnnnnnnnnnnnnnnnnnnnnnnnnnnnnnnnnnnnnnnnnnnnnnnnnnnnnnnnnnnnntcctgtgaccaatgggtggangangaaancatatgaanatgacgaatgat

SEQ ID NO: 9321 - DNA, 389 bp, Arabidopsis thaliana
  Clone ID: LIB24-117-Q1-E1-E9
catcattggatgttctctactgttcttgaccccaatgttcaaatttataccacagtgtgctttagcagcaatagttatctctgctgttagtggtttggtggactatgaaggggcaatctttctgtggcgtgtggacaagagagattttactctttggaccatcactagcaccaccactttgttctttggaatagagattggggtcctcattggtgttggtttttcacttgcatttgttatacacgagtctgcaaaccctcatatagctgtcttggggcgtcttccagggaccactgtgtacagaaacatgaaacagtatccagaggcatacacttacaacgggattgtgattgttcgaatcgatgctcccatttaatttgccaacataa

SEQ ID NO: 9322 - DNA, 408 bp, Arabidopsis thaliana
  Clone ID: LIB24-117-Q1-E1-F10
acgcgtccgcggacgcgtgggtttacatctgacgactagaaaagtaggtagattatgaatctttctgggtttgtagtgagtttataggaaattcctttgtctagtgttccaaaatttgagtagatcttgaacaactttgcaaatcttgttgatcgatatgtttgggaattgaaaatttactagattttgaatttctgaggttttgtgtaagcagttgaatgaagcagtaggtggttgagtcatgtttggtctgtgatgtcctgtcacacgcatcacatgaaccttggctttggatttaacggccgttgttaagtattaggctaattattaacatggcttttgttcattggtaagttaaatttcacagagtaaagagattttgatacattgggacccaaagtgcaattt

SEQ ID NO: 9323 - DNA, 487 bp, Arabidopsis thaliana
  unsure at all n locations
  Clone ID: LIB24-117-Q1-E1-F3
naacgtttacgccgctcgtacgcctccaaaattcccaaggtcgacccacgcgtccgataatttcctcttcatatttcaagaaaactttaatctttttttgtgtgtagaattctatatttctggtaactaaatggcgagcgagggagttgtagttgtcggaggggagagagaaggggctgagatcgtgtacggggcggaggaatgttacaagcaatcattggagcttctagaggagctagggtttccaaaaggagtcatgcctttgaagaatcttgttgagtgtggaagagttagagccactggttacgtttggatgaagcaagacactccttacgagcatttcttcgaagccaccaacactcgtgtctcctacggtctcgaagtcaccgcctatgtcgacaagtgttgtatgaagaagatgacaggagttaagagttagcaanatgtttttggggggtaccgattcttggaaataattatggnggag

SEQ ID NO: 9324 - DNA, 472 bp, Arabidopsis thaliana
  unsure at all n locations
  Clone ID: LIB24-117-Q1-E1-F7
gcagntccgaaacggtcacaagantcccgggncgacccacgcgtccaattctttatacgtataataacatcccttgtgatcaaacaagtaaaccattcaaaanatgaaaggaagaattttgattttgagtttgctcataatgagtctggtcatggcacaagttcaagtagaagcaaagatctgctgcccttccaaccaagctagaaatggctatagtgtatgccgtataaggttttccaagggaaggtgtatgcaagtgagtggatgccaaaactctgatacatgccctcgaggttgggtaaacgccattctcgaaaactcagctgatgctaccaatgagcactgcaagttagggtgtgaaacttctgtgtgtggtgccatgaacactctccanaactctgatgcaagtgaaattgtgaatggaacgtccggaccatntngccangggangtccnattttccggtccaaaga

SEQ ID NO: 9325 - DNA, 461 bp, Arabidopsis thaliana
  unsure at all n locations
  Clone ID: LIB24-117-Q1-E1-F8
gaagcggtcanaaattcccgggccgacccacgcgtccntgtttgcanggcnttgaaacgcantctcganagccgcggacttctcatcctcgtctagttcttcctcatccatttcctgatcttcctcttccnccatgttattataattgtganactcttcaatcttttcanactcacntatcannnnnnnnnnnnnnnnnnnnnnnnnnnnnnnnnnaatcagctctctcatcacaaggtcttctggcttcaattccaacaaatcatatttcanttatcaaanaacattaaaccaatcanattttgacaaggaaaagcaaagtttgtaccttttctgttccttgtggactttcctctanangctcntcttcctcagttgaagntgacncatgagtttgttgaacattnacaangtcccatcttgtggcggtttcaacgcantgactgggantctgtttttgg

SEQ ID NO: 9326 - DNA, 409 bp, Arabidopsis thaliana
  unsure at all n locations
  Clone ID: LIB24-117-Q1-E1-C9
aatggctcttaacgtgagcaaggttgttcccaatagtccaattttagttaagagtgttaatgcttcaagatctcgangagttctgttggcgtatgttcatcatcctttagctgctaataagggttcatctattgaagagttaaagcaaggtctttgttgtacaaagactgtcacttttgttagttctcgganatgttctacattgtgctttgttggaaagtctcaagacactgaaacnaattcccaagttgtacaaaaagaaggtgagaancaagtgatgccgaggaggaaaagtagtaactcaagccaacttttggtggaatatgtgtctaatgatgctaagtttgtgaatgaaagaacncnntaatgacttttgtcctccaancncgtgggtagtaatnagactttg

SEQ ID NO: 9327 - DNA, 449 bp, Arabidopsis thaliana
  unsure at all n locations
  Clone ID: LIB24-116-Q1-E1-A1
acgcgtccggaaaggagaaagcttcttctcatttgccagggacatgactattagatcaacanaagcaatgatacagccagctttggtaactgaaggtcgtgatacttggaggtcaaagcttctatgggtttcacgggtttttcctatgcctcttgtgggtcttttcctaatcggggctttttgtgctgactttggagatcagacctcagactatccagaattagaagcactttcacggcttgactttggagctgctatgaaggttttccttgctaagagattgacatccgagctaacactagagacatcagatatagaggaaaaatctgtcatcattggtgagagaaaccgagcagctacggaagctttaagaagagcaatanagcaaggacacaagagaattggattctatatggcggangccacatgcccganctgggaagacaact

SEQ ID NO: 9328 - DNA, 465 bp, Arabidopsis thaliana
  unsure at all n locations
  Clone ID: LIB24-116-Q1-E1-A11
acgcgtccgcccacgcgtccgtgataagagaaattttagagtctctctgcttcaacaagatctacatcgaccaggagattagaaagaatcatgggttctaagcataacccaccagggaataacagatcgagaagtacactatctctactcgttgtggttggtttatgttgtttcttctatcttcttggagcatggcaaaagagtgggtttggtaaaggagatagcatagctatggagattacaaagcaagcgcagtgtactgacattgtcactgatcttgattttgaacctcatcacaacacagtgaagatcccacataaagctgatcccaaacctgtttctttcaaaccgtgtgatgtgaagctcaaggattacacgccttgtcaagagcaagaccgagctatgaagttcccgagagagaacatgatttacaagagaagagacantggtcctccctgataatga

SEQ ID NO: 9329 - DNA, 480 bp, Arabidopsis thaliana
  unsure at all n locations
  Clone ID: LIB24-116-Q1-E1-A5
cctncgaaaagtccaaagttcccgggtcnacccacgcgtccgagaagaagaaaaaaaatcatggagatgaccgaagcttccaaacagacaacagcagaaggatcagcaaatccagaaccagaccaaatcttgagtccgagaagatcgttggagctaaaacaaaagaaatggtggatctctgtttctttatgtattttcttagtcttgctcggagattctctagtcatgcttctcttgaacttcttctatgttcaagacaatcgagaagatagtgaccaagatctacaataccgaggaacatggttgcaagctctggtccaaaacgctgcgtttccactactcattcctctgtttttcattttcccttcaccaaaacaaaaccaagaaaccaccaatactcgtttcctctcttttcgtctcatcttactttacatctctcttgggtgttcttgttgctgctcacagcaaattgtttgcact

SEQ ID NO: 9330 - DNA, 443 bp, Arabidopsis thaliana
  Clone ID: LIB24-116-Q1-E1-A6
acgcgtccgctacgatatttttcgagaatatgacgactttttctgttccgattgataacggagattctatgaagatcgcagaagaagaatcacaaagaacactgtacccatatgttactggaacttcaattgttgcaatcaagtacaaagatggggttttgatggcttctgatatgggaggttcatatggatcaaccttaagatacaagaacatcgagagagtgaaggctattggtaagcattctcttcttggtgccagcggagaaatcagcgactttcaggagattctccgttatcttgatgagctcaccctgaatgataacatgtgggatgatggtaactctttgggaccaaaagagattcacaactatctgacccgtgtgatgtacaaccgtcgcaacaagtttaaccctctgtggaacactctcgtccttggaggcgtc

SEQ ID NO: 9331 - DNA, 491 bp, Arabidopsis thaliana
  unsure at all n locations
  Clone ID: LIB24-116-Q1-E1-A8
aaactgttccgcctgccggtacnggtccgaaaattcccgggtcgacccacgcgtccgcggacgcgtgggcggacgcgtgggtaaaaacctaaaaaaaaaaccccaacacacacacatggattctcaggaccactgcagcaactctccaggaggaggtaagaaccatgtctgtactaaatgtggttggagttattcaaatccacatcctagtgctaaaaaccgtcgtgctcacaagaaaatctgtggaaccatcaaaggatttgagatctttgactctgaaatgaagaaagagaatcttgatttgccggaagaacactctttggatgatgagcaaaaaccaccaaccccaagtccaacagttgtcgaaaaatctgctccaacagttgtcgaaaaagctgctaatgagagaattggggatgtttctgaagaggatgtgtttactgatgctgtttgtgagttttcgagatctgattctttcaaggaagagacag

SEQ ID NO: 9332 - DNA, 474 bp, Arabidopsis thaliana
  unsure at all n locations
  Clone ID: LIB24-116-Q1-E1-A9
gggcccgatgatcncggaagggcccngncgacccacgnaanccgcagaaacaagtctggtggtccttcttaccctcgacctatgtatggacctccatcaacatctccttctccgtcatctaaccatcctatgtacggttaccctaagatcggtcaacaaaccggtcccggcccacagtttttctctccgccggagagaaactcttcgtttcaacataacacttctccttcatctggaataggaatcagagtgaatttgaagcctgagtatcggattactccgccgcctcagttgttgcctcgagtaggagatattcatcggagtagttttcaagttcgatttcggattagagaggaaagttctcgcggaggcagagaaagataatccagattggagtaaatttgggagtgagaatccaccggctaagtttcatgaaccatcaccttcttcagtgggtcaaatgcanggtgtaga

SEQ ID NO: 9333 - DNA, 436 bp, Arabidopsis thaliana
  unsure at all n locations
  Clone ID: LIB24-116-Q1-E1-B10
gggctcgattctccaattccaaaccctaacattttgattagtccttctgggtttccacagccttgagagattcggaaccaatgatgatgcgtgctgttataaggagagctgccagtaatggctcttctccttcgttattcgcaaaatcactgcagtcttctcgtgttgctgcatcttcccctagcttgctatcaggttcagaaacaggggcatatctgcatcgtggaaatcatgctcatagctttcataaccttgctttgccagggaactcgggcatctcgaggtcggcgagtttagtttcttcaaccctgcaaagatgggtcaggcctttttcagctgaaactggagatacngtggaagcagttgtgcctcatattnggggaaatcanttactgatggcacgttgggcacctttctgaagaanactgggtgagag

SEQ ID NO: 9334 - DNA, 491 bp, Arabidopsis thaliana
  Clone ID: LIB24-116-Q1-E1-B3
tgttaccctccgtagccgtccgaaattccagggtcgacccacgcgtccggatagattcatctttcaatctttttttatcttaaaacaaaactttgtgtgaagaagaaagatgggagatagaatcaaagttcaagagaatatgtgtgttttgtggaagtagtgctggtaataaagtcagttacaaagatgctgctatcgaactcggaaccgaactggtatcgagaaatatcgatcttgtctatggtggagggagcattggtttaatgggtttgatttctcaagctgttttcaatggaggtcgccatgtcattgggttcgtttaaacctctctttttttttttttcttaaaatttcaatgttctccagtaattaacaaaaaatggataattttgccatacgtgtagtatttgtgacgattactttttaaccaactttttttgtcctgttactgtcctcaaggttatccccaaagacactaatgccaagagaag

SEQ ID NO: 9335 - DNA, 493 bp, Arabidopsis thaliana
  unsure at all n locations
  Clone ID: LIB24-116-Q1-E1-B4
ctgnttacgcctgcccgtagccgtccgaaaattccngggtcgacccacgcgtccgtattcctgatcttttgagtgttaagactcgggagcttttcttgaaaaataaagctgctgagctcgatagagaaatgggattgattcgaactcaggaagaaaccggaaggcatgtgagaatgttgactcatgagattagaagcactttagatagacatactattttaaagactacacttgttgagcttggtangacattagctttggaggagtgtgcattgtggatgcctactagaactgggttagagctacagctttcttatacacttcgtcatcaacatcccgtggagtatacggttcctattcaattaccggtgattaaccaagtgtttggtactaagtanggctgtaaaaatatctcctaattctcctgtggctaagttgagacctgtttctgggaaatatatgctaagggaagtgggtcnctgtgaagggttcc

SEQ ID NO: 9336 - DNA, 445 bp, Arabidopsis thaliana
  unsure at all n locations
  Clone ID: LIB24-116-Q1-E1-B5
acgcgtccgaaagaatggcttctgtaccatgttccttcaagctctctgctcatcgtagatcttcttccaaggtaatcatcttctctctatctccttcaatctgtgtctctgtatagttcacttatgctgagtcaactcgttctctcttggtatcgatcaaaacttagtcaaatcgttccttccattttctttcagtttgattccactttaatggcgtcataatcatctcttaaatcaaacaatgactccactatctcgtttccgatctcttgttacataaagttttctgtagcattgagattgtccttttcggaattgcttttatttgcgcagcttgatgggaaacaacaaacagtgtantagtttagtanaangnactganagataaaacgaagagtcaagttcctaagtccattacttgcattaacccgcttanagatatcgc

SEQ ID NO: 9337 - DNA, 431 bp, Arabidopsis thaliana
  unsure at all n locations
  Clone ID: LIB24-116-Q1-E1-B6
actcttgtctgaatcttcctcaaatctactcatgtanacctccctatctcgatctaaatttccgccaaactttttttaatcccaaagattctttaaacagaatcatcatcaancatgaaagagatcaagaagacgatgacgaagcagatgacggcaagacgtgacgacacgccgttacacacggcggttagagaaggcaaaacggaccttcttttggagatgatcggagaacacgacggcgtggagctgaaagagttgttggccgagcaaaaccagtccggtgaaacggctttgtacgttgcggctgagtacggttacaccgacatggttaagattctgatgaaacactccgactctgtcttagccggaaccaaagccaagaacggcttcgatgcctttcacatcgccgccaaaaacggaaatctacaggt

SEQ ID NO: 9338 - DNA, 478 bp, Arabidopsis thaliana
  unsure at all n locations
  Clone ID: LIB24-116-Q1-E1-C1
agccgtccgnaattccagggtcgacccacgcgtccgcccacgcgtccgctcttcgatggaaaccaattcacgggcgaaattccagagaccctcagtctcgttaaaacgttgacggtgttacgccttgataggaacaaactcattggagatattccttcatatcttaacaatctcacaaatcttaacgaactgtacttggccaacaacagatttactggtactcttccaaatttaaccagcttgaccagtctctacacattggatgtgagcaataacactttggatttctcacccattccatcatggatctcttcattaccctccctatcaacattaangatggaagggatccaacttaatggtccaataccaatctcatttttcagccctcctcagttgcagactgttatcttaaagcgaaataatatagtggaaagcttaaactttggtacagacgttagcagccagtttggagttt

SEQ ID NO: 9339 - DNA, 430 bp, Arabidopsis thaliana
  unsure at all n locations
  Clone ID: LIB24-116-Q1-E1-C3
ttccactctctgggagacagaaaaacctcataatctcaaaaattgttcactgtgtttatcttccttctaaagttctaagaagcttcgattcttaattctgtttatcgatttgaattccttgtttctatttcccaaccgttagctgattgtgctacatccatttttctggtgattgatgcaacntctggagctcgattcttcgttctagtanttgattattcgaancagaattggtgtgatgaatgccaatgacgatgggganggttnaccttanccaatcactgatcnaaagaccggggagacganantcnatanggttgagagtcggncagacaancatattgancaacagaaaantaatgganttaccatggatgtgagaaatgggagttcaagtggactgcaaattccaatgtcgcaacaaacaacn

SEQ ID NO: 9340 - DNA, 511 bp, Arabidopsis thaliana
  unsure at all n locations
  Clone ID: LIB24-115-Q1-E1-H9
ctgtttccctgnccgtaccgntccggaaattcccgaggtcgncccacgcgtccggtttgtttcctcctctcttaaagcttagcccttctcaggtcattgttcttcaatggcttcgagcaacacgactactggggttgataatacgtttagaaagaagtttgatgtggaagagtttaaggagcgtgctcgtgaacgcgaaaagaaggaatcggatcggtctaaatctcggtccaaaggtcctcctgtgcaaagagcccctttgaagcatagagattatcatgtagacctagaatctcgtctgggcaagacacaggtcgttacaccggtagcgcctctaagtcagcaggctggttatttctgtcgcgtttgtgattgtgttgttaaagattcggcaaactacttggatcacataaatgggaaaaaacatcaaagggcattgggggatgtctatgcgggtgggagagatcgtcacttgaacaagtccaagaacggttcgaggttttaaagaaac

SEQ ID NO: 9341 - DNA, 507 bp, Arabidopsis thaliana
  unsure at all n locations
  Clone ID: LIB24-115-Q1-E1-F7
tacgntccgacattccgggtcgncccacgcgtccgaaaacatgaaaatcctctcactttcacttctcttgctcttggccgctacggtctcggcatccgttccagggctcatcgaactcgtcgattcgaaaaccatctttgggaacgtagccgaactcttagagaaagagaaactttccatcaactacgccaactgcagaagctggcaccttggtgttgagacctctaacatcatagacttcgacacggtgcccgcaaattgcaaagactatgttgaagactacttgatcacttccaaacagtaccaatacgactccaaaaccgtgtgcaaagaggcttatttctatgccaaaggacttgccctaaagaacgacaccgtcaatgtttgggatctttgacctagatgataccctcctctctagtantccctactacgcaaaatatggatacggaacagagaanacganccngggggcttactggttgtngttaaggaacggancatcaa

SEQ ID NO: 9342 - DNA, 503 bp, Arabidopsis thaliana
  unsure at all n locations
  Clone ID: LIB24-115-Q1-E1-G1
cgtaggngtccggaattccanggtcgacccacgcgtccgctctctctcagtcgaaaacaatggcgtcttcttcagcgacgctctctctctgctctactttctctgctcattgcaatgtcaattctcgccgttctagcactatcctctgttctctctctaaaccttcgcttaatttggctaaacctctgactggatttctttctccttccactgcgtcgacgtctcgaaccgcattcaccgtcgctccgaaattcgcggaatcagtcgtcgaagctgaaccggagactaccgatatcgaagctgtggtggtttccgatgtttcggaggttactgaggaaaaagctaaacgagaagagattttcgctgttattatggttggtggacgccaatacataatgtttccagggagatatctctacactcaaangntaaaagatgcaaatgttgatgancaagattggtcccaaaaaaatgttgcctgnttgggacaaaagacacacacn

SEQ ID NO: 9343 - DNA, 516 bp, Arabidopsis thaliana
  unsure at all n locations
  Clone ID: LIB24-115-Q1-E1-G11
cggaattccgangtcgacccaacgcngtccgnccaangcgtncgcgggcncntgggcgaagaacgcntttttgcntttcgtccttcnnnnnnnnnnnnnnnnnnnnnnnnnnnnnnnnnnnnnnnnnnnnnnnnnnnnnnnnnnnnnnnnnnnnnnnnnnnnnnnnnnnnnnnnnnnnnnnnnnnnnnnnnnnnnnnnnnnnnnaacaacttcaattttccttggttgggaaagaaagattcgattacccgggtgactcattcttaagtggatgacaagtataatgtctggatggcnnnnnnnnnnnnnnnnnnnnnnnnnnnnnnnnnnnnnnnnnnnnnnnntatggattttaatgccggagttcccatgtcttctctttcacctttgatgaatcaagatgcaatgtggcaaatgaatttgagttcaagatgaaacaatggaaactgggttcttancctgaaacgaccaaggagaacctgattggttcctaatacataaagaactgggccttgt

SEQ ID NO: 9344 - DNA, 437 bp, Arabidopsis thaliana
  unsure at all n locations
  Clone ID: LIB24-115-Q1-E1-G12
ccggaaggtnatccaccagtttgcccaaacagggatcataaatgatttaggtctctctgttgcacaatactccatgtttggttcaatcatgacttttggaggaatgattggtgccatcttcagcgggaaagttgcagatctcatgggtcgaaaagggactatgtggtttgctcaaattttctgcatcttcggttgggttgcantagcattagcaaaagactccatgtggcntgatattggaagactatccacaggatttgcagttgngtttattaagctatgtgataccagtttacattgcanaaataacaccaaancatgttcgaggagcgtttgtatttgctaaatcanctgatgcaganttgtggattgtcttnattccacngtcattggaaatttgttnantggnntaacttggccctaaaccggtcccaatt

SEQ ID NO: 9345 - DNA, 466 bp, Arabidopsis thaliana
  unsure at all n locations
  Clone ID: LIB24-115-Q1-E1-G4
acgcgtccgngcgaaatcggaaaagttaacgacggagatggctacagaggcaccaacgcaatcttacagcgagcaatggtattgggacgatcgttacaagaatgaatctgaaccgtttgattggtaccagaagtattcacctttagctcctctcatcaatctctatgttcctcaacgtaatcaacgagtcctccgtcattggctgtggaaactcagcgtttagcgaaggaatggtggatgatggatacgaaagatgtagtcagtattgatatatcatcagtggtgattgatancatgantaagaaatactccgattgtcctcaactcaaatanttgaanaagggtgtncgtgatatgaaancaattgaagatgctcctttgaagccggtatcgataaagggaccttaaacnccaattttgggtngggagtaattcnangggaaaatcaccacaaagncttaaaaag

SEQ ID NO: 9346 - DNA, 465 bp, Arabidopsis thaliana
  unsure at all n locations
  Clone ID: LIB24-115-Q1-E1-G9
acgcgtccggatnacttggtgcactttgattttatggatccccctgctcccgaaacactgatgcgagccttagaagttttgaattacttgggagcactggatgatgatggtaacttgacaaagacaggtgagatcatgagtgagttccccttggatccacagatggcaaagatgctcatagtcagtcctgaattcaactgctcaaacgagattctctcagtttcagctatgctatcagtaccgaattgctttattcggcctagagaggctcaaaaagcagcagatgaagctaaagctaggtttggacacattgagggagatcacctcacattgttgaatgtctaccacgctttcaagcaaaacaatgaggatccaaattggtgctatgaaaacttcatcaacaatagagcgatgaaatctgcagacaatgttagacagcagctagtccggataatgtcaagattc

SEQ ID NO: 9347 - DNA, 462 bp, Arabidopsis thaliana
  unsure at all n locations
  Clone ID: LIB24-115-Q1-E1-H1
acgcgtccgatcatcccctattactgcttttgttnnnnnnnnnnnnnnnnnnnnnnnnnnnnnnngtcagctcaggcgaagaacaggtatgatttgtttgtaattagatcaggggtttaggtctttccattactttttaatgttttttctgttactgtctccgcgatctgattttacgacaatagagtttcgggttttgtcccattccagtttgaaaataaaggtccgtcttttaagtttgctggatcgataaacctgtgaagattgagtctagtcgatttattggatgatccattcttcatcgtttttttcttgcttcgaagttctgtataaccaagatttgtctgtgtgcgaatgtcattacctagccgtgtaccgagaactagggtttccgagtcaatttgcccctttnggtaaaaccgggtccaataacgaatcaccgggataaggnttaaattggga

SEQ ID NO: 9348 - DNA, 472 bp, Arabidopsis thaliana
  unsure at all n locations
  Clone ID: LIB24-115-Q1-E1-H10
ttcccggggcgntccgctcagctttataannaatcgtctccgtcttcctcgctcagcttcaacaaccagagccgacttgagattgagaatcaacgtaatcgatactctcgcaaagtctcatcctttctcagcannaaacantangaaatggttgaaaggcatggagagttttgatttgctgcttaagatatatcatgtcgnagtgcgttgacggtatcaagcatttatgcacctctgttttagggtgttttgatcttgatttgtataaacaatctggtggccttggagatcctgaattgcttgcaagagacactgtttttagtgtgagtgaaatagaanctctttatgagctttttaagaaaatcagcaagtgccgtgattgatgatgggctangtnacnaggnanagtttcagttggntttgtttaaggcnnntnagnaagcccagttgttttgcagatcgggttttcgat

SEQ ID NO: 9349 - DNA, 549 bp, Arabidopsis thaliana
  unsure at all n locations
  Clone ID: LIB24-115-Q1-E1-H2
gttgcctncctaggcctccggaattccaaggtcgacccacgcgtccgggcaacttttgtggttagtcatataagaacaaccgcgttacaaacttctctcgtctttcctggaaatttctgtccacaaatattagtctttaattttcgaaacttctctcaggcgaattcaagtttcatagttttggtctaagtttttgtccaccgatctatctctttagttgaaacttatcagaatggctcgtccacaagaccctccacgtggtttcttcccttttggaaaccccttcaaaaatctatcttcgaagaactcggtactctcctcaaagcttctcccactccctggaacaanttttgagacaacttaagcaaccttctaataagtaaagccttggtccctaaagggaaaagaagcgaataaccctgaacnggtccaatgggatgaaacaaagctaatgggaatcccctttgngaanaacacataaangggaaccaagaacccttaanaaaccggttntganncttccggggancaaaattggggangggaaaa

SEQ ID NO: 9350 - DNA, 535 bp, Arabidopsis thaliana
  unsure at all n locations
  Clone ID: LIB24-115-Q1-E1-H3
antgttgccttgccgtagcntccggaattccaaggtcgacccacgcgtccgcggtgattgacgtttgttccatgtagatctccggtatctccatggagacaccgtcgctggctccatcgttactctctctgattcagattctctctcgcattcgaacgagtacgatctcttcagctcccggaaccgagaaatcgccggtgatgattgctcttccaccgacgctctgatctcctgatcgttcgtcgtatcggcagcgattgtgttccaattgctccgcgacggtgtgatttcgccgcggatgatgatcgcgttattctcttcatcatcgagactcggacgaattcgaggagccattaacggaacgaacggcgacatangcgttaaaactccggcggatgcgaaaatcgccgtacggnataacnggacaattaagggtgagatnggngncaatcatcgatgcaatcaaaggngnaaaagcatnggaancataaacgggaaatgttccgtaaaaaaacaccttcttcgaaattccaaa

SEQ ID NO: 9351 - DNA, 527 bp, Arabidopsis thaliana
  unsure at all n locations
  Clone ID: LIB24-115-Q1-E1-H4
actggttgcgtnccgtagcncgnaggaattcgaaggtcgacgcacgcgtccgcgtctctctctctcgggtcaaaattagggtttcgtttcactatccaagagtgtatacaaaggttgttgtggagcttttatcagatcacaggaataagatggaggtatttggaaaatctcccatggttgttacatctgccaatgttatttacttgtctgcaattctgggtcgcgattgcgatggacacaaatgtgattggaaatgtgagaatgaaactgtttgtgggaatatgtatcgctgcaaactaactggactaactcatgtctgcgacaagaactgtaaccaagcggattctctatgataaccatagctccttgtgccgaaccaatgggaaggattttccctctctncgtccgtcnaggacaagcggttaaaggtgttcggaggaanctttaccccgctgaaaatcanccttctgaaaacggttcctttaaccttcnncnccnnaangccaaattccaggctttcccnttcc

SEQ ID NO: 9352 - DNA, 514 bp, Arabidopsis thaliana
  unsure at all n locations
  Clone ID: LIB24-115-Q1-E1-H7
ttnccctggccgtacaagtccggaaatcccgggtcgacccacgcgtccgcggacgcgtgggctgattctggcttgccatcccgcgtagagtcgctgatgcgaaagtctaacagtgaattcagtgtggttatatcgcagatgaatggacaagactatgcatctcgatcgcacgtttttaccgttggaaagacgaggataaagctgtctcgaggatggatcacaaaggcgagagaattatattcgacatccatgcagctctgtggagttagaggcaatattaaggctcctaccaaggcagtgttctggcaaccaagaaagagtctaactttcatactaacctttgagtcagaacacgaacgtaacgcagccatagcccttgctcgaaaatacgctttcgattgcagtgttacactgcttgggtccagatgattaagtgaagaagacaatgtcattaacgaaccanctgataatttttcccctgacnccnggntttcctggtccgtgtgtttgtgtn

SEQ ID NO: 9353 - DNA, 536 bp, Arabidopsis thaliana
  unsure at all n locations
  Clone ID: LIB24-115-Q1-E1-F4
gtnagcgttccctaggccgcnggaattccaaggtcgacncacgcgtcaggattcatcgatgttaacgtcgtccattcttcttctttgatcccttcnttgatctctcacatttccgattccaatttagggtttcctcncttttnacatttcnagggtttttcttgntccctttgtaccggagatggtgaattgaaaggaaaaataanacgcttttgagancntatatttgaggtngtttccncatgtatagcattctatttaccattgtggacagcttttacggaaatctttcatatgttgtagttgactttgtggaagagtccataccacttttatcttctcaactcatgaatctattggattctcggtccttttttttgggtcaaagtctcttcgttggtanctttaacacacttttggtgccgacaaggttnantnttggggcttgtccggcctggatcccggttttttaaggaatcctttggggaaaaanattcggaanannaaaaanaaaaactggggccgntttttaaaaa

SEQ ID NO: 9354 - DNA, 460 bp, Arabidopsis thaliana
  unsure at all n locations
  Clone ID: LIB24-115-Q1-E1-C3
gggtgangtttgcagatattcaaacaactcaatcctcattccctttgtttcgcctctctggatttcgaagagctgagagattanggtttctcgattttcgagattagagtctaatccccaccaccagcatagctgatatcctggaggagagaatgacggattcgggtctaatgatgccggcggagattgctggaattctaaccacggcgattacgagttggtgggatgatgttaatgagtcaactcagtggcaagatgggatctttttcgctctttgtggtgcttatgctcttgtttccgccgttgctcttgttcaactgataaggattcaaaatganagtgcctgaataagggtngactactcagaaagngttcaaccctaagaactttgtcctcaaanggatccctgcnggntcnggtttggatttcanatgcaaataattcctngttcaatcccaag

SEQ ID NO: 9355 - DNA, 527 bp, Arabidopsis thaliana
  unsure at all n locations
  Clone ID: LIB24-115-Q1-E1-C5
ctggttcccctggccgtaccgagtccgnaaattcccgggtcgacccacgcgtccgcccacgcgtccgatcatggagtatttacctgggggtgacatcatgacactactcatgagagaagacattctttctgaagatgttgcccgtttttatattgctgagagcattcttgccatccattcaattcatcaacacaactatgttcacagggacatcaaacctgataatttgatactagacaaaagtgggcatttgaagctttcagattttggtttatgtaagccacttgatgacaagtattcttcattgctattagaagacgatgaaatgttgtctcaggattcagagaaccagtcaggaaaatcagacgctgacaaagcaccctggcaaatgcctaaagagcagttactgcagtggaaacgcaatcgccgtgcattgggcttattcaaccgttggaactcttgattacatggctccagaagtactcctaaaagaaaggatatggaatgggaatggtgattggtggtcn

SEQ ID NO: 9356 - DNA, 502 bp, Arabidopsis thaliana
  unsure at all n locations
  Clone ID: LIB24-115-Q1-E1-C8
acgcgtccgatttgggaactcgtgcgcggctgtggcagaggccaaacccacccgtgtactccatccgtcggatccaccaaaccaannnnnnnnnnnnnnnnnnnnnnnnnnnnnnnnnnnnnnnnnnnnnnnnnnnnnnnnnnnnnnnnnnnnnnnnnnnnnnnnnnnnnnnnnntgggcattttagggtttctcaaatttttgacgctttctcttaaaagggttgacgaaataaccctttaagggaaaaaacaaaggttgaggaagaccaccaangtgaaaaaaganagaagaattcgaacaacagcagcaacaaagaataaaagttacgaaatttttcctcctttggaanccttggttccncttcntcctcttcctccaaatttttttcaattaaaagattctgccttttgggggttcaaanttcgtccntcccttttccaatttggcgccnttaaanaanganaantncccaaaaacccaaaactttttttggggggcc

SEQ ID NO: 9357 - DNA, 436 bp, Arabidopsis thaliana
  unsure at all n locations
  Clone ID: LIB24-115-Q1-E1-D12
tgngtttttttttgttcttctctattagtccttcttcacctcttgcttgagtggtgagaaaaaangaagatggaaatgggtcgtcgagatttgatgagacgtggaacaaccaatcgattttccaataaacaacaatctggatctgggttttctacaaaatctaagaaaggaatgctgaagaaacttggttttgctgatgagaaactgaaacaagagatgagctacgatactcttccttctccagatttagaaaacgaggtttctaagaagaaatctaagcttccaaaaaagaatttgaaagacactaatggtgtggatcatgcctctgtaccacggaagcttcgttcagccatgaagaagcggaatcttgaatctgtttctaagctatcctctgtttcaaagagacttaaccggtttaaaaccggaactgaatcct

SEQ ID NO: 9358 - DNA, 272 bp, Arabidopsis thaliana
  Clone ID: LIB24-115-Q1-E1-D6
acgcgtccgcgcctttgtgttcaatgggatgttccggggatgacagatgccacgactcgtcctcattcggtttttaaaataaacatttgccttctgcttgctttggtgtcaatgctctgtttttttctcttgacgttagaccttatactctgttttcgttcgctgtaatattaaagacgcattttgagttgtatctattatacatgttgaagtctcttcatactgcattgttgcttatcttatatcacattcttttaaaaaaaaaaaaaaaa

SEQ ID NO: 9359 - DNA, 508 bp, Arabidopsis thaliana
  Clone ID: LIB24-115-Q1-E1-D9
aactgttccctgccgtaccggcccggaattcccgggtcgacccacgcgtccggttcttcaaagcagcaacaaccacaagctcctatgtctttgaagatcatagattcatgtctcagactaagtgtggttcctctcagtgttgcaaccatctggttaactgtcactaaccacgaatccaacccggactacggcaatttagagtacaactccatcatgggtctcaagtatatggttggtgtgagtgccatatctgctatttatgctctgctctctactgtttcttcatgggtcacatgtttagtctccaaagcttggctcttctttattcctgaccaggttttagcttatgtgatgacaacatcagtagcaggagcaacagagatagtgtatctacttaacaaaggagacaaaatagtgacatggagtgaaatgtgttcttcttatccacattattgttcaaaactcacaattgctttgggactcatgtccttggtcctttccttttcct

SEQ ID NO: 9360 - DNA, 527 bp, Arabidopsis thaliana
  unsure at all n locations
  Clone ID: LIB24-115-Q1-E1-E1
aactggttcccttgccgtagcntccggaattccaaggcttctacagacatcaatttctctcgagataaactaaatcttcgctgaaaaaatgtcgggtcgtggaaagggaggaaaaggtttgggtaagggaggagccaagcgtcacaggaaggttctgagagacaacatccaaggaatcaccaagcctgcgattcgaagattggctcgtagaggtggagtcaagcgtatcagtggtctcatctacgaggagactcgtggcgtcctcaagatctttctcgagaacgtgattcgtgatgctgtcacttacaccgagcacgctaggaggaagactgtgaccgccatggatgttgtctacgctctcaagaggcaaggaaggactctttacggattcggtggttaattaanagtttttcagattcgcgtttgtgttttccgggtttcccacttaaacgtccgcgttttactttggtantgggntttggcgtttaataatttgccggtaaccntcctgtaaagttgtaantacc

SEQ ID NO: 9361 - DNA, 466 bp, Arabidopsis thaliana
  unsure at all n locations
  Clone ID: LIB24-115-Q1-E1-E2
acgcgtccgggaactcacgagtaaacacgaagtaaaaatgataaagagacgattttacaagcttgagcatggtgataaagacagtggatccgattcatcgtgcttctcttctgactctgatcctgagacggaagaatcagaacaatctgaagaagaagactctgttgcagaagtttccgaggacggnnnnnnnnnnnnnnnnnnnnnnnnnnnnnnnnnnnnnnnnnnnnnnnnnnnnnnnnnnnnnnnnnnnnnnnnnnnnnnnnnnnnnnnnnnnnggacattggagaagatgtcaatgaatcnttttttagaagaancanccgaagaaagaagaagagaactatantccccggttgtagatacaatccaaatccggttataaaatgccgatattgtccaaaccgnttgtttgcctttaatgngaacacaatgcaaggcccatgtttcaaccaaagaangcatg

SEQ ID NO: 9362 - DNA, 521 bp, Arabidopsis thaliana
  unsure at all n locations
  Clone ID: LIB24-115-Q1-E1-E3
aactggttcccttgcctagcctccggaattccanggtcgacccacgcgtccgcttnttttcgagattcatctgtaanancctaactagcgccatagccaaggaagctttcctcagatcgtctctccgaaattttccggttaatcgtcagttaaggggaaaattaggctatggcgatgttaggtgcacagcaagttccagcagcagcttgtactccaagatatggttgggaatgcttttgtgccccagtattatcacatattgcatcaatcacctgagcatgttcacagattttaccaagagattagcaagttaggtcgtcctgaanagaatggtttaatgagcatcacttctaccttgcaagctattgacaagaagataatggcgcttggttacggtgtaatcagtgcagagatagctactgtggacacacaagaatctcatggaaggtggttataatgtactggtgactggtattgacngggaaaagacantttccaggaggacctttatcaanacctcc

SEQ ID NO: 9363 - DNA, 515 bp, Arabidopsis thaliana
  unsure at all n locations
  Clone ID: LIB24-115-Q1-E1-E7
tgtntcccctggcccgtaccggtccgaaaattcccgggtcgacccacgcgtccgcggacgcgtgggtgaattttgacgaacactataaaatattatgggctaatcatggtgatgaaatcagcattcagtactctggtactcctgcacttaaaggagatttcgttaggtatgggcatcggactgcccatggtgtccttaaagatggttggagctccctcagacgctattacctgaataactttgctgatggaactaagcaggatgcaattgatctcttgcaagggcactacatagttgctgtgagccgagacatggctcctgtacctcaaaagggaagccttgangctgtagccaacttcccagtggcattgttcgtggttctgatgagttttctggtttgcaacatgncnccaaaacaaactgggaatgnttaanancntaancnantggtcctcccnatggtgntgaacgggaatttccntgggcatggctgcactggtanggccaatggcaag

SEQ ID NO: 9364 - DNA, 530 bp, Arabidopsis thaliana
  unsure at all n locations
  Clone ID: LIB24-115-Q1-E1-E8
ttcccctggccgtancagtccggaaatcccgggtcgacccacgcgtccgcgacgagacttactttcgccgcaaaatttgttctccggtaccggatatttacgtatctgttctcaaattttaccattcccaccactaaaaccctagattaaaagcttcaattaccggaaaaagtctctacttaagagatttatctgtttgttgtcttaaatcacaggaagagaatggattttcttaaggcaacgattatagttgccctaatttgcaatttcgcctcactggcgtcttctgttcctttcatagttctgcatggaattggggataaatgcagtaatgcaggagtgacacaattcacagagcttttaagcgattggtctgggttctcaaggataatgcntggagattgggaaatggctcaagggactcaagggctaagcctcnccctgntnaaanatccattttttgtgnaaaaagggnaaantttncccaagnctttagggngggttancacatttggggggctttccaangg

SEQ ID NO: 9365 - DNA, 465 bp, Arabidopsis thaliana
  Clone ID: LIB24-115-Q1-E1-E9
acgcgtccggtcaagttattaaaggatgggatattggtattaagacgatgaagaaaggtgaaaacgctgttttcactatacctgcggagctagcatatggggaatctggttccccgccaactattcctgcgaatgctacgcttcagtttgatgtggagttgcttaaatgggacagtgtgaaggatatatgtaaagatggtggtgtgtttaagaagattcttgctgttggagagaagtgggagaatccaaaggaccttgatgaagttcttgttaagtttgaggcgaaacttgaggatggtactgttgttgggaaatctgatggtgtggagttcactgttaaagatggtcatttctgccctgcacttactaaggctgtgaaaactatgaaaaagggtgaaaagtccttctgacagttaaaccacaatatggttttggggaaaaaggcaaaccaacctcctgctggtg

SEQ ID NO: 9366 - DNA, 494 bp, Arabidopsis thaliana
  unsure at all n locations
  Clone ID: LIB24-115-Q1-E1-F2
antggttccctttccgtaggcctccggaattcccaggtcgacccacgcgtccgcggacgcgtccgcccacgcgtccgcagattcgccggtggttaacagattgtcggttactcctgttcctaggacaccggctcgtgatggttataattggagaaaatatggacagaagcaggttaagagtcccaagggctcacggagttactacaggtgtacatacactgaatgttgtgctaaaaaaattgaatgctccaatgattcaggcaatgtggtanagattgttaacaaaggtttacatactcatgaacctccccggaagactagcttctccccgagagagattagngttacaacagctatccggcctgtttcagaggatgatacagtagtagaagantatcaanttgttcctancnggtcaaattcgtcnggcttccactaaagaatacatccggtgaattncaaaaaactccttggaccgggaaaagacnccggtt

SEQ ID NO: 9367 - DNA, 522 bp, Arabidopsis thaliana
  unsure at all n locations
  Clone ID: LIB24-115-Q1-E1-C2
acgcgtccgcttcacgcccgatttcttttttccccagaaaaaggcttcacttccgttcgttgttcttcatcggtctgcgccgcctcgcacatcgtttcacctttctcagaatctctcttcccgtcgattagtttcctcagaggttgcgatttgttgaaaaccttgatttagactatgaagtctcttaatgatcttcctgcgcccaaatcaaccactaccacgtattatgatcattctaatgatgcttggttcaaaaacccgagtcactgaatccgagacggtgaaatcctccaagtatcaaaattaaaagtgggtggcctggctaactgaatccgtcaaagggttaacgttccgaaagaatccaanaanggattttggcnaaagggtgggtgctttcccggggaattaaccttccccaagttacccncctncttaanggggtaaagaataaaatccaattaaaccctggaggnttaanaaanccccccggttangggncgaaggggccaagggnaaacttgg

SEQ ID NO: 9368 - DNA, 469 bp, Arabidopsis thaliana
  unsure at all n locations
  Clone ID: LIB24-114-Q1-E1-C2
acgcgtccgtagagatatcgtttatctcgcaagaaactctcatcaactaaagctaattatttaatgtttgtttggtgatatggctgatcagcagcgaggccacaacacctcagattctcgccggaaatctctagccggaaaaagaacctcacagcaaactccgacgtcatcacttagttccggcggagtatccatggcagctgcaacgacggggacagggacggcttcgccttgtggggcttgcaagttcttgagaaggaagtgtgtgagtggatgcattttcgctccacattttgggtcagaccaaggagcggctangttcgcggcggttcataaggttttcggagccagcaacgtgtcgaaactgttgcatcatattccggtgaaccgtcgtcatgatgcggtggttacgatctcatacgangctcaagctaagctcctccgatcctgtctatggctgcgttccaaa

SEQ ID NO: 9369 - DNA, 451 bp, Arabidopsis thaliana
  Clone ID: LIB24-114-Q1-E1-C3
ttgtgagagagaagagatctaaaaaaatccacaattttgttcaaatcttgggagttaaatgctgaattttaggccttgttgcttagatttatggcttaaagtttcaaacttttcattgggatatggtacaaatcttgtagttaaacactgaattgtgtccctcgtgggcgttgttgctttgatttatggccaaaagtttcaaacttgggatatggtacaatcttgtaagttatacactgcattgtctctcttgggtgttgttgttgctttgatttatggcttaaagtttcaaaactttttcctggagatgggtcaatcttgttgttgaaaagttgaaacactgaattgtctctcctgtgcgtgttgttgcctagatttaagggctaaaagtttcaaactttcctcacttcagaacctcctgaaatgggaaactaagggtttgtggttttgg

SEQ ID NO: 9370 - DNA, 454 bp, Arabidopsis thaliana
  unsure at all n locations
  Clone ID: LIB24-114-Q1-E1-C9
acgcgtccgcatagctctgtctcggttaaagcatttgatgatgatacatttgatttctataccggtgacatatttgctgctacttatgctatttcgtcgagtgaaggcgaagagagcgatggggattatgctttgaatgtggttaccgaaactactgcacagaagctaggaaagtttccaagaggtcgcaaaaagcacagaatcagatatgggattaatttggggcttcttgcttttttgtcactgctgcttctactgatggactcttttgcttggaagattgttagactacctttgcctccatatttcttaagcatgcccttcttcacatcggcgattctagttaccttagctgggttatatttttgttccgcttctagacagactgagaagtgcatgaagccaantaaggacattagggccaatttcacataancgcaaaacaacaatcccg

SEQ ID NO: 9371 - DNA, 480 bp, Arabidopsis thaliana
  Clone ID: LIB24-114-Q1-E1-D12
ccgtaccggtccgaaaattcccgggtccacccacgcgtccgccggaggcaaaaatcgtctctcgcttgagctgcgaagatgcaagcagtaaaaagatccaggagacatgttgaagaagagccaacaatggtagaacctaaaaccaagtacgatcgtcagctcaggatttggggggaggtaggtcaagcggccttggaagaagcgagtatctgtttactcaattgtggccctactggttccgaggctttgaagaatctcgtacttggtggtgttggtagcatcaccgttgttgatggatctaaggttcaatttggtgaccttgggaacaatttcatggtcgatgcgaagagtgttggccaatcaaaagccaaatctgtttgtgcgtttctccaagagcttaatgattctgttaacgccaagtttattgaggagaatccaagacacgttgattactactaacccatctttcttctctcaatt

SEQ ID NO: 9372 - DNA, 515 bp, Arabidopsis thaliana
  unsure at all n locations
  Clone ID: LIB24-114-Q1-E1-D3
cctacggctccggaaatcccaggtcgacccacgcgtccgcttnattccttcttttgctctgatcaaagtcttctccttcccttctctctctctttcctcctctgcacatttctgggttcttctcttcttatgctctgtttcttttaaggacacagaagaaacagtacagagttgagattttcttaaacaaaagtgaaaagagaagaaacaagtgacagctcaaacggacaaaaaccactcttgggtctttcttgcttctgattctttctcttctctaatagaagaaaacatctagaagctaaaaaaatgtcggaaggagtagaagcgatagtaagcaaatgacaacggaacagatnangtaaacgggnaaccgttaccgggaaaagataacgaaagaacacgacgggctccaaccggttctaacctaagcaatttcctatgggcaacgggtggctcctgtctgggacgcttggtttcaacctgcgcatctaaccaagntggctcaaagtgttatt

SEQ ID NO: 9373 - DNA, 507 bp, Arabidopsis thaliana
  unsure at all n locations
  Clone ID: LIB24-114-Q1-E1-D5
antggttccctggccgtacagtccggaattcccgggtcgacccacgcgtccgctcattgcctcgccgagagagaaggagacgccatggaaaggnnnnnnnnnnnnnnnnnnnnnnnnnnnnnnnnnnnnnnnnnnnnnnnnnnnnnnnnnnnnnnnnnnnnnnnnnnnnnnnnnngctcatcgggtctgagctttgtctcgactcaccggcccgagtcacgccgagtcagctcaatttcctgcaacagttcccagattccgtcactgtatacgcctataggatctaacacaactaacaattccttcaatgggtctcccaaatcggatgaatcgaaacctaatcccggatttctcacacgggatcgcgacgtcggcttctgagcagcgaaagacgtatctactggaaccgttatactaatctctgcagtagctgtgcttttgcttaacccgcttcttgcaccacctgctttcgctagctttcaaactgcagctaaatccggttggcta

SEQ ID NO: 9374 - DNA, 470 bp, Arabidopsis thaliana
  unsure at all n locations
  Clone ID: LIB24-114-Q1-E1-D7
acgcgtccggcaacaatggccaaaagctctttcttcaacaagcatttgcttctctctcttctcattcttctccaaagctgtctactctcttcttcttcaagtaccgattcagaaactctcttgaacttcaaactcaccgcagattccaccggaaaactaaactcatggaacacaacaacaaacccatgccaatggaccggagtctcctgcaaccgcaacagagtcacacgactcgtactcgaagacatcaatctcaccgggtcaatctcatcactaacctcactcacatcactcagagttctcaagtctgaaacataacaatctctctggtccaatcccaaacctctcgaacctcacagctttaaagcttctctttttatcaaacaaccanntctccggtaacttccccaattcaatcacttcactcactcgtctctaccgttcntgattctctcctttcaacaacttct

SEQ ID NO: 9375 - DNA, 461 bp, Arabidopsis thaliana
  unsure at all n locations
  Clone ID: LIB24-114-Q1-E1-D8
acgcgtccgaacaaagtatgagccgaagaactccatcaaatcaaatctcactcatcaaactttaacatttaactatcacaatatgttttcttttcttatcttcttgttggaggcttttcaggtggttattgctaccgtggtctccatagtcttcttagtgttcgcgggtctaacactggtaggttcagccacggcattaaccataacaacaccgctttttattatattcagtccgattcttgtaccagccacgatagccactgctgtcataaccacaggattcaccacgggtggcgcactcggagcgatggccgttgctctcatcagacgtaggatgggagctaagccgactgcggaaggaacttcgtcagcccaacctcttctcaaattgccagtttatggtggatatggaggattttggggaagaaagaaattttccggaacantccggaaataaaaca

SEQ ID NO: 9376 - DNA, 501 bp, Arabidopsis thaliana
  unsure at all n locations
  Clone ID: LIB24-114-Q1-E1-D9
tttacgccggcccggnaccggtccgaaaattcccgggtcnacccacgcgtccgcggacgcgtgggcgctactacatctatgagctgttgaaggctttggacttctgccactcacaaggaataatgcacagagatgtcaagccacacaatgtcatgatcgaccatgagctgcgcaaacttcgcctaatagattggggtctcgctgagttttatcatcctggaaaagagtacaacgtccgtgtggcctcaagatacttcaaaggtcccgaacttctagttgatttacaggactatgactattccttggacatgtggagcctcggttgcatgtttgctgggatgatattccgcaaggaacctttcttctatggccatgacaaccaggatcagctcgtcaaaattgccaaggtactccggaactgatgaattgaatgcatatcctgaataanntancanttagaacttgatactcaactanaaggcacttgttgggaagacataa

SEQ ID NO: 9377 - DNA, 498 bp, Arabidopsis thaliana
  unsure at all n locations
  Clone ID: LIB24-114-Q1-E1-E1
ctacggctccggaaatcccangtcgacccacgcgtccgctaattatcttcaactaaaaaaccaaaattgacttcagattcgccttcttcttctcttgcaacgtttcaatttcatgtgccttcgaccttagattccaattttgaattcgaatttctggggtttcgattgagctcttctcgcttttttctanggttttgtcgcatatgctgcgantgtgagtggaaatttgggggaagaagaagaaggaagatgcatataaaggagatatgcttggagggttttaaatcatacgcgacgaggacggtggtttctggtttcgatccacatttcaacgcgataacnggtctgaatggttcgggaaaatccaacatcctcgattccatctgtttcgttctgggtatcaccaatcttcagcaanttcgagctgctaatcttcaggaactcgtctataagcaaggccaagctgggattactaagggcgactgtctccggttacct

SEQ ID NO: 9378 - DNA, 501 bp, Arabidopsis thaliana
  unsure at all n locations
  Clone ID: LIB24-114-Q1-E1-E11
aagcttacgcctgccggaaccggtccgaaaattcccgggtcgacccacgcgtccgcccacgcgtccgctctttttggagattttaacttcagtttttgtctaattagggttttaatttaaattggagggaaattttagatgcagtgacgtagtttttgggtaaattttcgtcggattctgaattgtctccggcgacatggcttctaatctccccatgagccctcaattggagcagatccatggcgaaatccgtgaccatttccgagccctcgcgaatggtttccagaggttggataagattaaggattcaactagacaaagcanacaacttgaagaacttactgacaagatgagagagtgtaaaagattggtcaaagagttcgaccgtgaactcaaggatgaaggaactagaaattctcctgaagtaaataagcaaattgaacgatgaagaaacaatccaatgatnaaaggacccaaatcctacgttgcccnaagaaaaac

SEQ ID NO: 9379 - DNA, 439 bp, Arabidopsis thaliana
  unsure at all n locations
  Clone ID: LIB24-114-Q1-E1-E2
gggttttgatttgttttgtaactgtttctctttctctggagctttcttcttcttcttcaataatcgatttaggtttttcaaagctaagtgtttgtgttgtgataatgactagtagcgaggaagtagttgaagtgacggtggttaaagcacctgaagctggcggaggaaagttatcacgtcggaagattcggaagaaagacgccggtgttgatggtttggtgaagtgggagagatttctcccgaaaatcgcgcttagagttttgctcgttgaagctgatgattctactaagacagattatcgctgctcttctcaggaaatgtagttacagagttgctgcagtacctgatggcttaaaagcttgggagatgctaaaaggaaagcctgaaagtgttgaattgatataacaganggttgatcaacntcaatatctggataatg

SEQ ID NO: 9380 - DNA, 489 bp, Arabidopsis thaliana
  Clone ID: LIB24-114-Q1-E1-E6
agtccggaaattcccgggtcgacccacgcgtccgtgcagatttaagcgataatacgagatcccaaggggctcacaagcctttctacgcttaatctgtaactatgccgctcagactcgagatcaagagaaaattagcgcaaaggtctgagagagttaaatctgtggatcttcatcctacagaaccatggattcttgcaagtttgtattctggaaccttgtgtatttggaactaccagacgcaggtgatggcaaaatcctttgaggtgactgaattaccagttcggtcagccaagtttgtagcacgaaagcaatgggttgtcgcaggagctgatgatatgtatatccgtgtatacaattacaacaccatggacaaggttaaagtgtttgaggctcattcagactacattaggtgtgtggctgttcatccaacccttccatatgtgctgtcatcttctgatgatatgctcataaagctttgggactgggaaa

SEQ ID NO: 9381 - DNA, 448 bp, Arabidopsis thaliana
  unsure at all n locations
  Clone ID: LIB24-114-Q1-E1-C10
acgcgtccgccttttacttcctttttcagattctaagcaaacaaattgtgtcactaagcagccatcatggctagagtgatcttgtggtttcttgtttcctcgtatctttgtctcatcggtcatatgattgccgaggctgcaagagaaggtgcctccatgaggaaggaagcacactccagtgggattggaagagaaagtaagctcatgaggaatgaaaaacactccactgagattggaagagaaagtgcgtccatgaggaataaagcacgctcgagtgagattgggaagagagagtaagctcatgaggaatgaagcacactccagtgagattggaaagagtatccgacacgtaaccggatttaagggtgaactcacagctggtggctacggcggtggaggcccgggatatggtggtggtggatacggtccaagttggccggcngtggtg

SEQ ID NO: 9382 - DNA, 510 bp, Arabidopsis thaliana
  unsure at all n locations
  Clone ID: LIB24-113-Q1-E1-G4
ctgttaagctggccgcatgcntgtgaaagtcccgggtcgacccacgcgtccgcccacgcgtccgcggacgcgtgggcgcaactttcgtcagtttttgtgtgttttcttctacacatagacactttgctcaancaaacacactctctgttctgtttttctcaaacttgtttaagttcgatgactatggaagtgtcgaaaaagaaaggtggagattttcagcaatgtcacgaattgattcccggtttaccttccgaactagctttggagtgtttggtcagagttccgttccaattccaatccgccatgagatccgtttgccgttcttggcgtaacttactctccgactcttcttttatccaagaacggcgganatgcggcaaaacagagcttctcctctgcctcgttcanccgctaaagccgccaattccagcgtctaaatcggttgacgaagacattaatgggttgacgagaaanantcagangatgatcacacccgcgcgtttctggncc

SEQ ID NO: 9383 - DNA, 503 bp, Arabidopsis thaliana
  unsure at all n locations
  Clone ID: LIB24-113-Q1-E1-G7
aactgttcccctgccggtacaggtccgaaattcccgggtcgacncacgcgtccgcccacgcgtccgctctgtatctctctgtgtctctcttccccgttagtcttcgtcgtgacctttttgtagtattaagcaatgaagattaagacgttatcaagatcggttgatgaatacactcgagaaagaagtcaggatcttcagagggtctttcacaacttcgacccaagtcttcgacctatggagaaggccgtggaataccagagagctcttacagctgccaaattagaaaagatatttgcaaggccgtttgttggagcaatggatggtcatcgtgatggagtctcatgtatggcgaagaacccaaattacctcaaaggaatcttctctgcttctatggatggagatattcgcctttgggatatctcttcaaggcgtacagtttgccaattccctggtcatcaaggtgctgtgcgtggtcctactgcatcaaccgatggaaatgtatt

SEQ ID NO: 9384 - DNA, 472 bp, Arabidopsis thaliana
  unsure at all n locations
  Clone ID: LIB24-113-Q1-E1-H12
ccgnacgttcccagggtctccgnngcctcnccaattccagtttccgccgccgaagctaaatttcttcaggcttcatagaataagaccgaacatggcgagacgtaaccgtggggtgacaaggcgcgaaaggccgaacctactgatcacggggactcctggtaccggcaaatcgacgacggcttctgctctagccgaagccacgaatctccggtatatttgcatcggagatctggtcaaagagaaagaattctaccatggctgggacaatgagctcgagtgtcacttcatcaacgaagactcggtgattgatgaacttgacgatgctatgataagaaggagggaacattgtggactaacatggctgtgacttctttcctcancgatggtttgatngccttgtccatgcctccaaccgagaactccgtttttgtatgaacgtttaacgaataagggttattcaaggaaccaaanc

SEQ ID NO: 9385 - DNA, 501 bp, Arabidopsis thaliana
  unsure at all n locations
  Clone ID: LIB24-113-Q1-E1-H2
ccgcagcctcngaaggtccagggtcnacccacncgtccgcccacgcgtccgcggacgcgtgggcaacaattcacacaatttctcgtttttttttgtttatcatcaaaagttttaatctaaattacgtatcaaattccgagcaagatgactattcttgttgaacattttgttcctgattcaagagtggatgaaaagaaagtgatagaggagagggataatgaattggtgttggatggaggttttgtggttccaaaatcaanggaaactgatgcattcgatgctcctgatatgaatttcttgggccattccttcagggattatgagaatggtgaaagcganagacaacaaggtgttgaagaattttacaggatgcaacacattcaccaagacctatgactttgtgaagaanatgaggaaagaatatgggaaaacttaaccaagatggaaatgagtatatgggaatgttgtgaantantgacaatgttgttgatgaaagcgatc

SEQ ID NO: 9386 - DNA, 512 bp, Arabidopsis thaliana
  unsure at all n locations
  Clone ID: LIB24-113-Q1-E1-H3
ntgttacgcctgcccggtagcggtccgnaaattcccgggtcgacccacgcgtccgctccgttcgaaatcgcatccatcgccgtcgtcgtcggtgacgaaaaccaccgcgtaaaaccgtttcctaaatcagatgttcaatcttagaagtatctcttagaagctctcttgtatgaaaaaatgggactgttaagcataatccggaagatcaagaagaaagagaaggagatgcgtattcttatggttggacttgataattctgggaagacgacgattgttctgaaaataaacggagaagacacaagtgtgattagtccaactcttggattcaacatcaaaaccattatctaccaaaagtatacgctaaatatatgggatgttggtgggcaaaagactataagatcgtattggaggaattactttgagcagactgatggtttggtttgggtggttgatagttctgatcttaggangttagatgattgcaagatggaacttgacaatctccttgaaaa

SEQ ID NO: 9387 - DNA, 405 bp, Arabidopsis thaliana
  unsure at all n locations
  Clone ID: LIB24-113-Q1-E1-H4
actctctacctcangggaagcgccgtantgaaaaggttcgctgatgtatcatcgattcacctaaaaatgccaaatattcattttctaccagtaaatctttcaacgaaggaaaacccttcaatggtgaagtttaaagatgatgtgtacctgccaaccgatgaacctcaaggatctatagaagcaatcctaagccgtataacctcgaaactatgaagttttaagacaatacatcatacatggnaatatcaaacacaatttcacangttctgcaacttttggcgtttggctcgtttatnaaataacaanttaaatgaanttgtgttaagncaacttttggcttttggtgcaagaatnataccggtaacgggcaaacagtttcnacnacaaaaaatgtagcttacatan

SEQ ID NO: 9388 - DNA, 487 bp, Arabidopsis thaliana
  unsure at all n locations
  Clone ID: LIB24-113-Q1-E1-H6
agtcnaaaggcccgggtccaccangcgtccgaaaggagacagctttctctctctgtctctctctaaaagttctgggtttagaaagagatctttcttatatgttgaatttgtgatcagaggtgagagagatgggaggttgcgtgtcaacgcctaagagctgtgtaggaggtaaaataaggtcaagcaaaaggagaaagactcggacaagacgaaagattcagaagaagagagttgtttcttcttctcgcttatctgacggatctttcgataataatcccactttcagagcaagtgttgatgaagcatggtttgattccaatctcgcctttgaaaccgattgtgatgatgactttcatagtgttcaggaagatacgttgtcagtgaacggatgtgagcgtatctcagtatcgagtatgtcatctgttaaagactctaaccttggtggttccgctcggaantctccaagcgatgtcatctcacaatcaaa

SEQ ID NO: 9389 - DNA, 492 bp, Arabidopsis thaliana
  unsure at all n locations
  Clone ID: LIB24-114-Q1-E1-A1
acgcgtccgggaaagccgccatggatccagcaggagcatcggtggccagcgcaatcngaggaganngagagaaattcncggtggggaatatttattcagtgaaggtgatcaccggagatgagttcagagggatcgtcatggcttacgaccccatccccaacttcgtcttttttgaaagaaggtacaaaacctanacctgggcatttgaagaacactcggatggtgaatgcgaattttattacagggctttcgtatttaggcaaaactgaagatccacttgattcagacaacttttccgttgatcttaatgggctccgagctaaagaggcacntgctatcaaggcaagcngtaancagatgcctaaangaatgggaattggtgttnccgctgaaggtcaagancatccttcgacgccgttgtccnaanacgccntcctggttgcaaatgggaaaaactccagacaattcctgggtgatgaaaanaaggtaccc

SEQ ID NO: 9390 - DNA, 478 bp, Arabidopsis thaliana
  unsure at all n locations
  Clone ID: LIB24-114-Q1-E1-A10
nacggtccacaattcccgggnccacccacgcgtccgcacattttgtagtttagttttatcctcaacaaccatcttcttcgttatattccttgagataacaacaaagcatcgttcttcacctttaccnnnnnnnnnnnnnnnnnnnnnnnnnnnnnnnnnnnnnnnntttataggatcaatcgatcaaggaaccaccagcaccagattcatcatttacgaccacgatgctcgtcctgttgcttctcatcaagtcgagttcactcagttctatcccgaagctggatgggtggaacacgatccaatggagatactggaaagtgtgaaagtgtgcattgcaaaggctctcgacaaagccactgccgatggacacaacgtcgacggtggcttgaaggccattgggcttacagatcagagagagactactgttgtttggagcaaatccactgggcttcctctccacaaaggctattgtctggat

SEQ ID NO: 9391 - DNA, 478 bp, Arabidopsis thaliana
  unsure at all n locations
  Clone ID: LIB24-114-Q1-E1-A12
gtaccggtccaaaattcccgggnccacccacgcgtccgtntgttttcaccagagagactgctccggaaatttttgagagtgcaatcaagaaacagttgttgttgtttgtaaccaaaaatgaatctgaaaaggttcttacggaatttcaagaagcagcgaaatcattcaaaggaaagctcatctttgtatctgtggatctggataatgaggattatgggaagccagtcgctgaatactttggtgtgtctggaaatggtcctaaacttattggctacacagggaatgaagaccctaaaaaatactttttcgatggcgagatccagtcagataaaattaagatatttggggaggatttcctgaacgacaagttaaagcctttctataagtcagaccccattcctgaaaagaacgatgaagatgtgaaaatagtggttggagaataactttgatgaaaattgtcctggcgaatccaaagatg

SEQ ID NO: 9392 - DNA, 511 bp, Arabidopsis thaliana
  unsure at all n locations
  Clone ID: LIB24-114-Q1-E1-A8
aactgtttcccctggncctaccnagtccggaattcccgggtcgacccacgcgtccggttnagttcttatcgatgaagcttgaagcagtcaactcaagaatgaaccctggtatcgaggtttttccacccaaagagtttggtcagcaagcgtttgagaatccggagatacagttcgggtcgcagtctacgagggaatacagtagaggagcatcaccagagtggttgcacatgcagataggatcaggtggtttcgaaagaacgtcttgataaagaaacaacacttggtcatcatcttactacaaataagatctaaaagctctaatatcccgagaagaaaaagcatacatacatataaatctcattctcattataggtttaaatatatggatgtgaatatacacatcatattgttgttctgaagaaagcaaaatanaaaagaagatatagttagtttcgacatcaagaaaaaacaanctggggaagggtttaaagtagaagaaactcttgtaaaa

SEQ ID NO: 9393 - DNA, 506 bp, Arabidopsis thaliana
  unsure at all n locations
  Clone ID: LIB24-114-Q1-E1-B5
tccggaattcccgggtcgacccacgcgtccgattgtgatgatgttagatatcagattggatgagtgagcatagagttcatgagatctctgaaggagatgttgcgattcggcttgatttgattgctaaagttggtggtttgggagaagcagagaatgtttttcgaaactattcctatggagaggaggaactaccanctctacggtgctctcttgaactgctatgcgagcaagaaggtgttgcacaangctgagcaagtgtttcaggagatgaaagagcttggnttccttaaaggntgtcttccctacaatgtgatgctgaatctctatgtccgggactgggaaatacacaatggntgagaangctgctgcgcnaaatggangatgannactgtgaagcccagacatccttcacagtnaacacgccggttgcatgccttaatccggttgtatctgatgttacangggaatgganaaagtttccttaatgccnttgttgaaggctgaac

SEQ ID NO: 9394 - DNA, 496 bp, Arabidopsis thaliana
  unsure at all n locations
  Clone ID: LIB24-114-Q1-E1-B9
gncttacgcctgcccgaaccggtccgaaaattcccgggtcnacccacgcgtccgcttggacaaaatccacaagattggaatgaagtatattgtgatcaatgatcctggtattggtgtcaacgctagctacggtacatttcagagagccatggctgctgatgtgtttattaagtatgaaggaaagccattcttggctcaagtgtggcctggtccggtttacttccctgatttccttaacccgaagacggtttcttggtggggtgatgaaatcaaacggttccatgatttagtccctattgatggtttatggattgacatgaacgaggtgtcgaacttttgttctggtttatgcacaatccctgaaggaaagcagtgtccaagtggggaaggtcctggttgggtttgttgcttggactgcaagaatataaccaagactagatgggatgatccnccttacaagattaatgccnacnggtgtctaacncccggttgggtt

SEQ ID NO: 9395 - DNA, 462 bp, Arabidopsis thaliana
  unsure at all n locations
  Clone ID: LIB24-113-Q1-E1-G3
cncgtccggaaaacgaaaggaaaaaatacaggaaatgggtggtttgaagtttcatgtacttatgtatccatggttcgcaacangccatatgaccccgttcctttttcttgccaacaaattggctgagaaaggtcatacggtcacttttttgattcccangaaagctctgaaacagttggaaaatcncaatctgtttccanacancattgtctttcgctctgtcaccgtccctcatgtggatggtctccccnttggcananagacagtctctgagatccccgtgacatcagctgatctcttgatgtctgctatggatctcacacgtgatcaagttgaangtgtggtccgagccgtggaaccngacctgatcttcnttgacttcgctcattggaatccanangtagctacagactttggccataacactgtaaagtacgtcgtggtatctgcaacgactaaaan

SEQ ID NO: 9396 - DNA, 485 bp, Arabidopsis thaliana
  unsure at all n locations
  Clone ID: LIB24-113-Q1-E1-E11
tacggccgaaatccggatcnacncacgcgtccgaactgtcacctctgcagtggattcgtcagcatttgcagtcttggctgtgatcccaaaaacttttaaaacagatgaatctaaggagaacatcttccgtggtagagatggtgccattcttttgtttaacggatcagatcccaagccggtatctatatggactgtgatgaaggctaggggaggatcaatctcatttttagaaggagataagtctcagcttcgccttgcatatgtaaatggaagccatgaatatgttgtctttgatcccaatagtgatgagtcacatgagcgtancgctgttgactacgatggtcttgctggtctgggaagagacaggagacgccgggtacacatccttatacgggcagttacctgattatgacaagaagagaatggaggatgttgagtcnttggggaacaccgtttgtatcatcagaaaagaccgtgggaaacaa

SEQ ID NO: 9397 - DNA, 513 bp, Arabidopsis thaliana
  unsure at all n locations
  Clone ID: LIB24-113-Q1-E1-E2
taactgttacccngcccgtaggcgtccgaaaattccagggtcgacccacgcgtccggaaaatatgagcgaagaactaagtcaaaagccatcatcagctcagtctctgtcactgagagagggcagaaataggtttccttttctgtccctgtcacagagagagggcagattttttccttctctatctctttcagagagagatggaagaaagttttcttttctcagtatgttctcttttctcatgccactgttggaggttattaanattattattgcttctgtggcctccgtaatcttcgtcggtttcgcctgtgtaaccctcgctggttctgccgcagcattagtcgtaagcaccccggttttcatcatatttaagtcctgttctcgtaccagctacgatagccacggttgtcttggcgacaggattcacggccggtggctctttttggagcnacagcacttggtctcatcaatgtggcntgttaaacgtaggatgggagtaaagccnaaggata

SEQ ID NO: 9398 - DNA, 507 bp, Arabidopsis thaliana
  unsure at all n locations
  Clone ID: LIB24-113-Q1-E1-E3
ctgttacgcctgcccgtagncgtccgaaaattcnngggtcgacccacgcgtccgcttccggtgaccangagcaagaagagaaaacagcattatcgccctcaaaacagaccagtgaagaagaagggatcttaccctttgaagccaggtgttcaaggttttttcatctcttgcgatggcggacgcgaattccaagctgctcaggaagctattaacgtcattgattcctttttcgaggagctaatacaagggactgactcgaaagtgaatcctggtttgtttggtaatccaataaacaaaaaagttacattttcgtatagcgaggatgaggatgaggaggaagatgagagtaataatggcgaggaagaggaaaacaaaggagatggggataaggcagtagtgagtgaangcggtaatgatctagtgaatgagaaagaaatagctagtgaaggagttaatgatcaagtgaatgagaaagaaatagcaagtgaagggtcatgtgaagtcaaa

SEQ ID NO: 9399 - DNA, 484 bp, Arabidopsis thaliana
  unsure at all n locations
  Clone ID: LIB24-113-Q1-E1-E6
ccgaaattcncgggtcgacncacncgtccgaaagccgcangaaggcancntggcggcggtttatacgctcanacaacctgnggtggtaagtgggagctcttcttggaaaactcgggtgtgtcanggatgcatgcgatccttangccagttancaacanggtccagtactatnacgccaccatttggacaatttcaaanattaagttgcctccaggcgtaccatgccatgtcgtggacgctaanactaacaatgtcnattgttgggctcattcgattctcatggatgtcaacaccggcgcccttanacctctacggctttccaccgatacatggtgctcatcnggaggtctgaccgtaaatggtacattggttcagcactggaggatacggatgaggagccacacaccgcgangtacctanccagctgtgaaaactgcaagtgggaagantaccctcaagcattggccgccaanagatggtacca

SEQ ID NO: 9400 - DNA, 501 bp, Arabidopsis thaliana
  unsure at all n locations
  Clone ID: LIB24-113-Q1-E1-F10
naactgttacgcctgccttaccggtccgaaattcncgggncgacccacgcgtccggttcaattcacgaatcgccaatgattggtctttgttattgaaaaatcgattctttgttctggtttggatctgagaaagtgtcgatatgagagttcgatctagagggtttaagagacaatgagtggaatgtcctttggacttgagagttatggcttactcaaaccttgagcttttgagtctgcattatcttcttcttgtttcttcacaatgctcacttctaattctaaagagaaggaaaggtctctctccttccntaatgttgctgggacttaggtccgtcgacgagttgctatgcttctacttctcagccttgcntttgttgtccttgtgttgggttcctacactatcaacaaaagagagcaatagtccaaatattcatcagagtattgagacaatggatttgggaagcaaacaaacaccgatnagtagagaaatgacttctttct

SEQ ID NO: 9401 - DNA, 461 bp, Arabidopsis thaliana
  unsure at all n locations
  Clone ID: LIB24-113-Q1-E1-F3
cgcgtccgattttctcgacgcgagctccggcaatgaaaagtttatcgatttctctaatccgtcggcttcatttccacaaaatcagaccaatcccactttcaatccaccttaatgctgcttcttcatcgtcttcgtcctcttctctgatctcgccagcacgcgaaatctccactagctgcagaagaaccaatgatctgatcaagcgtcagttctgggtcaatccatatcggaatttgaatacccatgtcgaggaacctccggagatttcgtcatctgataaagaaaaaatcgatctcgaagaagcgttcgagtcagcgaacaccactgatgaaatggtacgtttgttcaaggagatggagttatcattcgaagggaacgaattaggtttatctgctttgaaattagggctccatctcgatcgtgaaggtgaagattctgaaaangttctgtcttacgctgat

SEQ ID NO: 9402 - DNA, 467 bp, Arabidopsis thaliana
  unsure at all n locations
  Clone ID: LIB24-113-Q1-E1-F4
ccacncgtccgatcgattcgattccaaatcggaaggatgataacgtcntccctaacctcatctctgcaagctctcaagctttcgtctccgttcgcccatggctccactcctctctcatctctctctaagcccaattccttcccgaaccacagaatgcccgctttagttccggtcatcagagccatgaaaacgatgcangggcgcgtggtgtgcgcaaccagtgacaaagactgtggcggtggaagtggtgaggctggctccccaccncaagtannagaagcncgtnaggatgaanaataataccaanctcacgaccccgataatcaagttcaaggttggcgatgtggtcaagactgggaaaagagcagaancatcagtaaagactnaatcatttgtggngcttcctgtcatcncaangggctgccaaggaaaanccnaaaccggatganaagaactcccttgggctt

SEQ ID NO: 9403 - DNA, 502 bp, Arabidopsis thaliana
  unsure at all n locations
  Clone ID: LIB24-113-Q1-E1-F5
ccgccgtacggtccaaaattctcgggtcgactnanncgtcnggcttcatcattaccaaatcatcaacttanncgtttcnctcaaatttagggttttctcttttcncgaaagtcttgcggttttcngaatcatctctatctggtttgagggtttcgtttgatatctggagaaaggggtttctggaaacanggagttcataattcgcgatcttgatcnatcgatcttcatttatatatnaaagcgtgaatgagattatnatggagtcgaaaggtggtaaaangaagtccagcagtagtagttccttantttacgaagctcncctcggttacancattgaanacgttcgtccaaacggtggaatcaagaaattcaaatccttctgtctantcaaacaggctccaagaaggccatcctgagtaccaaccgttgcaaccgatcttcataatatagcttagngcctttctttacnttccaagtttaataacntttcctcccttcaaaa

SEQ ID NO: 9404 - DNA, 497 bp, Arabidopsis thaliana
  unsure at all n locations
  Clone ID: LIB24-113-Q1-E1-F6
ccagtaaaggtcctaaaattctcgggtcgantnanccntcnggtgtcnctgattttcacttggttaaagacctctancttcacggtcaaacatcataaaccttttgccgccgtcactaataggaattaactgatctcgtcaatggcngaggtggagganattgcgcacgangagcanaatatcgagaagagggagaagaagaaaggtaaacacganaagccgaagccatgggatgatgacccaaacatcgaccgttggacaatcgagaagtttgatccggcatggaaccccactggtatgactgaaaccagcacgttctcaacactctttcctcaatacananagaagtatcttcaggagtgttggcctagagttgaatctgctcttaaggagtacggtgtcgcctgcaagctcaacttggttgaaggttctatgactgtttcgacgacgangangacaagagatccatacatcaattgtcaaagctagggatttgn

SEQ ID NO: 9405 - DNA, 505 bp, Arabidopsis thaliana
  unsure at all n locations
  Clone ID: LIB24-113-Q1-E1-F7
aactgttccgcctgccggtanancgtccnaaattcncgggtcgacccacncgtccggtggcgtttgcgtggacattggtggctctgtgttgcgggtctcacacttcgcatattcttcattccttgggaattcacattgctcatgganggatttgggatttgctacacaactcttacgtgaaaggtggtttggccgttggagctttgttgggaccaggaagagaattgctgtttgatggcataaaagctttcgggaaaagatcacctaatatgaactcgttagttggattgggatccatggctgcattttccatcagtttgatctcactagttaatccagaactggagtgggatgcttccttcttcgatgaaccggtcatgctgcttggctttgtgctccttggtcgttctttggaanaaagagcaaagcttcaaagcatctaccgatatgaatgaactaattgtcactcatctccactcaatcaagacttgtgattacttcatca

SEQ ID NO: 9406 - DNA, 424 bp, Arabidopsis thaliana
  unsure at all n locations
  Clone ID: LIB24-113-Q1-E1-F8
ttgactgagtcaacgggtanaggagcttctanggntacngtngangaaagtcngnaatacggtaccgctgggaaattgtcggcaactatggaanggaggattgttgatccggttactggtcagattcttggaccgaaacaaaccggtgagctttggctcaagggtccttccataatgaaaggttatttcagcaatgaggaagctacgatttcgactcttgattctgaacngatggttaanaactggagatctttgctatatcgatgaagatggattcatattcgtggttgatcggttaaaggaactgatcaagtacaaggggttancangttgctccanctgaactagaagcntttgttcttactcatcctgaaatcactgatgctgcantgattccgtttccggacaaagaaattgggcaatt

SEQ ID NO: 9407 - DNA, 462 bp, Arabidopsis thaliana
  unsure at all n locations
  Clone ID: LIB24-113-Q1-E1-F9
gtccggtttaatacaaatggcggcnatngagganngtccaacgttttcctctgtggtaactccggcggcttttgagataggcagcctcccgacanccgagatancggtggatccggtggaaaatnattcaacagcaccgccaaaaccggtgagaatcacctgtccaacagtcgccggaacttatcccgtcgttttantcttccatggcttttatcttcgcaactactttctactctgacgttcttaaccacatcgcttcgcatggttacattcttgtagccccacacttgtgcaaattantgccgccgggatggcaangtggaatttggacgatgccgggaantgtgataaactggggcatccgaaaacctcatatctcacctatcaaacttcgntaaatgctaatggaaaatacacctcaatccgtggggcaaaagccgccgtgggaanacggctttgccg

SEQ ID NO: 9408 - DNA, 460 bp, Arabidopsis thaliana
  unsure at all n locations
  Clone ID: LIB24-113-Q1-E1-G11
acgcgtccggcaaagggaagacccaganagagcagagttgcttcttcttctccggagaaacagattgtgttcttagacgaaaagggttttgaggtgtcatggattccgggacgcagccanaagggttgcaggcagcacagccagcagggttgcaggcagcagggttgcaggcagcacagccagcagggttgcaggcagcacagccagcagggttgcaggcagcagggaagcggaagccgcctacgacgaccgaggatccaaatgatccacagcatataatccacgatttcctcacaatagtgaacaaattggagaangaagtggatcttccaaggcgctataaccaaggctagaacctatgatgctgangttgatggactgataactgctgaccaaccacagacgaatctgggaagagcaaaaagtgccctaatcccaatgctaaaccagaaaggccana

SEQ ID NO: 9409 - DNA, 327 bp, Arabidopsis thaliana
  unsure at all n locations
  Clone ID: LIB24-113-Q1-E1-D9
acgttagcctgcnctaccggccgaaattcccggancgacccacgcgtccgcggacgcgtgggggagatttcagggtccatgagattttaagggtatagatcagagggtanctttagttctgccattgatttaattgaattattgattttgtgtgttttggtgaattcattttgcttaacacgatatgaccactgtagtgttgttttgtgtcctctgtagctgaatctctctgtttgtttaagggaataagcttttgttctttgatgatgttatagtggtacactcttatatgtgatgtttctagttctaaaaaaaaaaaaaaaaagg

SEQ ID NO: 9410 - DNA, 515 bp, Arabidopsis thaliana
  unsure at all n locations
  Clone ID: LIB24-112-Q1-E1-A3
cgctggcctacgcccggaagtccgaaattcacgggtcgacccacgcgtccggaaagttacacntagtaccntnataannaacncancgggnantcnttctcccanaatgttcaaagttgctgtgacacttgttgtgtctatcggcatggttgtgtgtttcatagttgtggcaattcttgtggcattggtggcttcaagtccaacaggaggatggagtggtaggagtttaagtttacttgatccaacttatgcaagcaagtatattccaattattgcaagtgtcagtgaacatcaacctccaacttggccatcttatttcatggatatcaatgttttggctttcttggnccctgctggcatcattgcgtgcttttcgcctctatctgatgccagctcttttgtggtcctttacattgtaatgtctgtatacttttctggagttatggttcgtcctatgctcgtgccttgctccagcagcaaggatcatgtctgggaatgcgctctcccaaactttt

SEQ ID NO: 9411 - DNA, 447 bp, Arabidopsis thaliana
  unsure at all n locations
  Clone ID: LIB24-112-Q1-E1-A4
ncctctgtttctgattaccaaacgtcgtcaatacatttcttcaaattacgtctcttttantctttcgttactctcaacaaattttgatatctgattggtgttgattccaagtaagaaatgtcaaaactttaggtaaagtatggatatgggtttccatgagaatgagcaanatcaagaatttgcgaatcnaatggagattggatctgggcattacgggtgttcacattatagaagacgatgcangattagagcaccatgttgtgangagatttttgattgcagacattgccacaacgaagctaaggattctcttcatantgaacagcatcatanacatgagcttcntcgacatgaagtttcanaggtcatatgctcgctttgtgagacanaacaagacgtncaacacaactgctccaattgtggtgtatgtatggggaagtacttcng

SEQ ID NO: 9412 - DNA, 476 bp, Arabidopsis thaliana
  unsure at all n locations
  Clone ID: LIB24-112-Q1-E1-A7
acgcgtccgcctatttcctattatataatctctccgaccatcataatttgaccgttggagaacattactacttttcgcaaaagaagggaaaaaaaaagagagagataaagctctcttcgattcttttgcaatcttctctcctacggttgtttcaatctccgaccaaaccgtgctttcgaatagaacccagaaatggcatcgccacagagtaccaaaaccggtttgaatcttcccgcagggatgaaccagacttcgttgcgtttagaaacgttttcgagctcatttcgtgggatttcgagtttatcctcgccgtctaaatcgacttgcagcgacagattcataccgtgcagatcttcttcgagactccacgctttcgatctgcaggataaggaaccgactaccccggttaaagagggagggaatgaagcctattctanacttttgaaatcctgagcttttccggatctgattttgct

SEQ ID NO: 9413 - DNA, 454 bp, Arabidopsis thaliana
  unsure at all n locations
  Clone ID: LIB24-112-Q1-E1-A9
cacgggtcgaccacgcntccgnnaaggatttcaatggtaattctcagcaacgtctcgttgttctcctgctgcaacatctctcagaaaccatctctcttttctccgtcttctcgtagttctcattgtcccattcgttgctcacagtcacaggaagggaaagaagtggttaccagtcctttgagaagtgtggtttggtcattaggagaagaggtttcaaagagaagtctatttgcacttgtctctgcttctctcttctttgttgatcctgctcttgcttttaagggtggaggtccctatggtcaaggagtcaccaggggacaggacttatctggcaaagatttcagtgggccagactcttatcaggcaggacttcaaaacgtccatcttaagggaaagccaantttaaaggggngnaaaanttngtangnngcaaaccttccttttganggcaatt

SEQ ID NO: 9414 - DNA, 517 bp, Arabidopsis thaliana
  unsure at all n locations
  Clone ID: LIB24-112-Q1-E1-B1
tggtncgcatgggccgtggaaagtcccgantcgacccacgcgtccgagagaagtgtgatcttttcgccggaaaatggatcccaagattcagtaggaccaatctacacaaacaaatcatgcggatcactcattgacggtcaccaaaattgtatcaccaatggccggcctgacttagattttctctactggaaatggaaacctcatgactgtttgttaccacgttttgaccctagaagatttcttcaacttatgaggcataaatcttgggcatttattggtgactccatatctcgtaaccacgtcgaatcactgctttgtatgctctctacgattgaagaaccggttgaagtataccatgacatggagtacaaatcaaaacgttggcatttccctttacataaccttactgtatccaacatatggtcgccatttcttgttcaagccgctattttcgaagattctaacggtgtctcgaccgcttctgttcagctacatcttgatagactcgatgagacat

SEQ ID NO: 9415 - DNA, 438 bp, Arabidopsis thaliana
  unsure at all n locations
  Clone ID: LIB24-112-Q1-E1-B3
atcttcagcaaaactcgtctctcttgcactccaaaaagcaaccatgtctgcttttgtcggcaaatacgcagatgagctgataaagacggctaagtacattgccacaccgggaaagggcattttggcagcaagacgagagcacgggaactattgggaaacgattcgccagcatcaatgttgagaacattgagtccaaccgccaagctctccgtgagctcctcttcacgtcccctggcactttcccttgcctctccggtgttatcctcttcgaggaaaccctctancagaaaaccacggatggcaaacccttcgttgagctcctcatggaaaacggagttatccctggaatcaaagtggacaagggtgtggttgatctagcacgaaccantgggcgagacnactactcangggtctagattnacttgggtgcacgttgcc

SEQ ID NO: 9416 - DNA, 425 bp, Arabidopsis thaliana
  unsure at all n locations
  Clone ID: LIB24-112-Q1-E1-B9
ctatcatctgatccccaacccgaacttacgtctacatgtacctctcatagttgcggctggaagccttactctcattccaatgactttgctgccaacgcgttcctccttctcatcatcctcttctgttctttcatatgcgtcctctctctccacgctgctatccgttgttgcctccgtccagtcctccaacatgtccctaagcccgacccggaccttgaggccacccatccagacgctcccccgacacttgtctactccccgggcctaaacctagcaggcaatgaagcagagtgcatcatttgtttgtctgaattccaagacggtgacaccttacccgtgttggagagatgcaaacatggattccacgtttattgcatccanaagtgggtctcctcaacccattcttcttgtccaacttgccggan

SEQ ID NO: 9417 - DNA, 428 bp, Arabidopsis thaliana
  unsure at all n locations
  Clone ID: LIB24-112-Q1-E1-C11
cntctttatcncagtaatggtgacttcatcgacgatctcgatcggttcttgtttaaaagagcatcagaagatctacaaggaatggtgtcaacatcgccgattcagatggagatggtcgtgtttcgggtaacgatgctacaangttcttcncgatgtcanagctttcacgccagnaactcanacangtttgggcagttgcggnttcaaagcggcaaggatttctcggtttagcggaattcatcactgcgatgaagctcgtcncantggcacaagaaggacatgacattacttcagaccttcncaatggctcaattgacatgaagagtgtggaacttccagtgttggaagggactagaaaacgtnggtacagtaagnctccttcgtatctgattatcncattttgtttttcaatctttacatgaattggn

SEQ ID NO: 9418 - DNA, 515 bp, Arabidopsis thaliana
  unsure at all n locations
  Clone ID: LIB24-112-Q1-E1-C4
aactggttcgcctgncctacngctccggaantcccgangtcgacccacgcgtccgattagccctttcgttgcgacgctctctgcgaatccaactttcgtttcagctgtagtcgcgtggttctttgcgcaatcgagtaaaatggttatcaatttcttcattgagaggaaatgggattttcgtcttctctatgcttctggtgggatgccttcgtctcactcagctttatgtatggctttgacgacctctgtggcgctttgtcatggagttgcagattccttgtttcctgtttgtttagggtttagcttgattgtcatgtatgatgcaattggtgttagacgccatgccggtatgcaagctgaggttctgaacttgatcattanggacttgttcgaaggacatcccatcagtcaaagaaagcttaaggaactgcttggtcacactccttcgcaggttcttgctggagcattgggttggtattgtgattgcttgcttttgttgccaaggctatcccgtc

SEQ ID NO: 9419 - DNA, 465 bp, Arabidopsis thaliana
  unsure at all n locations
  Clone ID: LIB24-112-Q1-E1-C6
acgcgtccgatcnccattaaaccttcttccctctaacccaatcaaatttgcggctctttcttttatcttctcgcctcggttttagcaaaccctttagttatcttcttcctcaagcaatttttcttttggattagattggtgttttcttttggtttgtgtggtgatgatgagaaggcaacgagatgaacaacaatctagggttttctacgatctatcatctcttgttttgaatcttctccgttctcctcctatgccgatttctttacctgatcatttccccgatccgcccgctagaattcgtcctcccttttcttcgcatcgtttttcgtcntcttcgccttctttggctcatatttctccgtctggattcgcgtcgttgctgcttggnanatctgtggcncttaaggcantgtggatcggtgactttccttcatcgggtttctcttgatgcctgggntcatgcgc

SEQ ID NO: 9420 - DNA, 508 bp, Arabidopsis thaliana
  Clone ID: LIB24-112-Q1-E1-C7
cctctgccgtacaagtccggaattcccgggtcgacccacgcgtccgcccacgcgtccgcggacgcgtgggttcttcgacatgaccttttgttcttcttctcttttctctctctcttaaacccaatttgagattgttcgatttcgatctacgagattcttacaagaacataagcagcttcggttttttgggattatcttatttggtcggatgatgatcttctcgatgtctgtgctaggctttgggaattagatatatttggggttaagctcgagtctctccggttttgagtttacttgagtttgttagtatttatggctgaggtgggaaaagttctggctagtgatatggagttagaccattcaaatgagactaaagcagtggatgatgttgttgccactactgataaagcggaggtcataccagtggctgtaactagaactgaaaccgttgttgaaagtttgggaatctactgactgtaaggagcttgaaaaacttgttccacatacg

SEQ ID NO: 9421 - DNA, 418 bp, Arabidopsis thaliana
  unsure at all n locations
  Clone ID: LIB24-112-Q1-E1-C9
ggcttaaggcttggtgtaagaagatgttaaaaagtaaattcggtggtaaaaaaggcaagtccgggggtggaaaaagtaaatttggaggtaaaggcggtaagtccgaaggtgaagaaggtatgtcgtctggggatgaaggtatgtctggaagtgaaggaggtatgtccggaggtgaaggaggtaaatccaaaagtggaaaaggtaaactcaaagctaaactcgaaaagaaaaaaggtatgtccggagggtccgagagtgaagaaggtatgtctggaagtgaaggangtatgtctggtggtggaggaagtaaatccaaaagtaaaaaaagtaaacccaaagctaaattgggaaaagaaaaaangtatttccggaagcattccagaaatttaanaaagtattccgggaaattaaaggaagt

SEQ ID NO: 9422 - DNA, 479 bp, Arabidopsis thaliana
  unsure at all n locations
  Clone ID: LIB24-112-Q1-E1-D1
acgcgtccgcccacgcgtccgcggacgcgtgggaagaaaataatataaacacacacatacaagaactgaagaatgagcagacccggagattggaactgcaggtcatgcagccatctcaacttccagcgccgtgactcttgccagcgatgcggtgactctcgttccggccccggtggagttggtggcttagactttggtaatttcggtggcagagccatgtctgctttcggattcaccaccggctccgacgttcgtcccggtgattggtactgcaccgtgggaaactgcgggacacacaacttcgccagtcgctccacctgcttcaaatgcggcactttcaaggacgagaccggcgctggaggcggaggtggtggcatcggcggtccggccatgtttgacgccgacattatgcggtctagagtccccggtaacggtggtcgctctanctggnaatcccggcgactggatttgcactaagg

SEQ ID NO: 9423 - DNA, 545 bp, Arabidopsis thaliana
  unsure at all n locations
  Clone ID: LIB24-112-Q1-E1-A10
gtggnggggggatgggtggnngggnggggngggtgggtgnggnggnggggngnngnaatnttnaactgctagccggcccgtacggtcaaanattcccgggtcgacccacgcgtccgnaggtaacggtgttaacggtggtttcttcacctctgctggttccttcttccgcaacaatggctttgctggtaccggaaatggcggatacggtaacgaaaacggtggtttccgacggaagaagagttttggtcaagggaaacgaaggatgaatgctcgaacaagcatggctcagcgagaagatgttatccgtagaaccgtctacgtctctgatctcgatcaacaggtcactgaagagcagcttgctggtttgtttgtgagctgtggacaggttgttgactgtcgcatatgcggtgacccaaactcggtccttcggtttgcattcatanagttcactgatgaananggtgcgatgactgctctaaatttaccggggacnangttggaatcaacccngttaaaanttttacaatccaaanaagctataacaa

SEQ ID NO: 9424 - DNA, 489 bp, Arabidopsis thaliana
  unsure at all n locations
  Clone ID: LIB24-111-Q1-E1-E9
tccggaattcccgggcntcctcaacatgacatcaaagaacattcacaagacattccagtctcattcatgtttttctcctgctttctctcgttttctcagggaatatactacaaacagtaacgtctcttggcatcaattacggacaagttgggaacaatttgccttcaccggataaagtcattaacctcttgagatctttaaggatcacagaaacaagaatttacgacactaaccctcaaatccttagtgcctttgcaaattcaaacatcgagatcatcgtcaccatcgaaaatcangttttaccattactacaagatcctcaacaagctacccaatgggtagattctcacattaaaccctatgttccggccactagggattaacgggaattatggtcgggaaacgagcttttcaccgacgaaggactcctagtttaataaggatacatgatgccggcgatnatcaacatccacaaaagccttggtcaaa

SEQ ID NO: 9425 - DNA, 465 bp, Arabidopsis thaliana
  unsure at all n locations
  Clone ID: LIB24-111-Q1-E1-F1
acgcgtccgcacaagagagagatagagagagaaaaagctctgctttctacattatttacgattatacactttccaacatggcggcctctgtagataatcgccaatacgctcgtctcgagccaggtttgaacggcgtggttcgttcttacaaacctcccgttccaaggccggtccgattcccctaaggcgcaccagaaccaaaccaccaaccaaaccgtgttcttgaaaccagccaaggttcatgacgatgacgaagacgtgtcgagcgaagacgaagaacgaagacacacaacaagcaacgccgtgtactacaaggagatgataagaaaatccaacgccgagcttgaaccgtccgttttggacccgagggacgaatacacggctgatagctggatcgaacgtaacccttccatggtacgtctcacaagggaaacatcccttcaactccgaggcgcctcttaancg

SEQ ID NO: 9426 - DNA, 488 bp, Arabidopsis thaliana
  unsure at all n locations
  Clone ID: LIB24-111-Q1-E1-F11
tanaagtccggaaattcccgggtcgacccacgcgtccgagttggcagactacattgttgcatctccgcatggactccgaaggaaaaatgcatacccttcagaaatcgtggaagcactagctactcatgtatctgattccctacatagcagagaagtcgcggctgtatatataccatgtatcgatgaggaagttgttgagttagatactctttacatttcatcaaaccggcattacttggatagtattgctgaaaggctcggattgaaagatggcaaccaagtgatgatatccaggatgtttggcaaagcttcctgtggctctgagtgtagattgtactctgagattccaaagaagtacttggataattcatcaagatgcctctggtacttcaaatgaagactcatctcatattgtaaaatctcggaatgcacgagcaagttacatttgtggtcaagatattcacggggatgcaatcctggatctgttg

SEQ ID NO: 9427 - DNA, 503 bp, Arabidopsis thaliana
  unsure at all n locations
  Clone ID: LIB24-111-Q1-E1-F12
gctccgcctggntcgtagaaagtccgacattcccgggtngccccacgcgtccggaaagattcccaccgaacaatgttcttctaatgcttgctggagctggacttttatggatgggatggtccggttttaacggtggtgctccttacgcggccaacttaacctcctctatcgccgtgttaaacaccaacctctcggccgccacaagcctccttgtatggactacacttgatgtcatcttctttggcaaaccttctgtcatcggagcaattcaaggcatggttactggcttagccggcgtcactcccggagcaggtttcagtcatcttcttttcaagttttttgtttactctaagtctctaagtttatttatgattaaggttgaattatgtggaaacttattaatattgcattgttaatttattatactgacaaataagatatctattgcaggtttgatccaaacatgggcagctataataattggagtagtctcaggaacagct

SEQ ID NO: 9428 - DNA, 488 bp, Arabidopsis thaliana
  unsure at all n locations
  Clone ID: LIB24-111-Q1-E1-F2
tagcctccggaattccangtcgacccangcgtccgaaanagttggacgccagaaaacaacaactagaggacctctctaggcgatatgaagaattagaggcaaaatcaaaagcagatatgaaagttcttgtcaaagaggtcaaatctctgaggcgttctcatgtggaattagaaaaagagctaacccactctttgacagataaaactaatgccgagaaactcctccaagaggaaagaaaactactagagaacacagttgcggctagaaagaagctgcttagtgactgcagaattctccacgaccggcttaaagagtacaacttaaatttgtcaatggatggaaacggtaactttgtcgacgactcaactacaatatcagacgttttgcgtttactgtcaatatctgatgatcaaattgaggaaggctcaactactttctgggtttgacgaaaatgctgctgctgaagacatcgataaaactctcagcca

SEQ ID NO: 9429 - DNA, 463 bp, Arabidopsis thaliana
  unsure at all n locations
  Clone ID: LIB24-111-Q1-E1-F5
acgcgtccgggtgaattaatccgacaatgtgcttaccgaattcatgccctgaattcatatcttaatgcagataatcaggtttcagttgatattaaaaagaaactaggagaaccattgagaagaatgagtttggagtccggcaaagcgatgaaagaaatgtcaatttcgttaaagaaaatgactaaaccatcttcttctgatcttcatgtccaaaacgcaaaatctgcctgtaaatcactcaccaacttacttaattcaggcatcttgaaagaagttgagcctctagaattggtctcccttctgaccgcgatctccttgctcatcgatattataaaacctaacaagagaaaatcttggaatccctacatgaactagcaaccgctgcaaaatttaaagaacaagattgaacatcctttgttttcccgagaaaccaanaagccaaaagccttgttagtgtccgatt

SEQ ID NO: 9430 - DNA, 483 bp, Arabidopsis thaliana
  unsure at all n locations
  Clone ID: LIB24-111-Q1-E1-F6
taccgatccgganattcccgcggtcgncccacgcgtccgaataatctccctgaagcgatcaatgcccactttagagatgtcgaaagaagcatttatgatgactcaagcttagacactcgttcagactacaatgttgtggaagataacaatcacgttcgtggtagcgagactaggccagttaacgagtctaggccagtccctggcgcacttccatctatactctcggctgctcgggcttttagaccgtctttgcttctagatcccaattacagacggaatatccttaggcagctcagtggctctgctctctctggaagtccttctccatcatctcacactggagaagtcactgggttccctgctcactctacctggggaaatgatcacactcgtcctcctggacttggagcggttggagacggttatgctaggcattcaccaagctatggatcccaggtccatggtgggacacatagggatgct

SEQ ID NO: 9431 - DNA, 478 bp, Arabidopsis thaliana
  unsure at all n locations
  Clone ID: LIB24-111-Q1-E1-G10
aggnccgggtggccccacgcntccgcccacgcgtccgcggacgcgtggggcggaatacactaaagctataagattagcatttgagctttgtangcctcacaaagtttttgagctcttcagtggtctctgcaggaaaagagattcagacgancagatagtgaaagctcttcanggacttgaaaaagaagagttccgtctactttttgaatatgtccgagaatggaacacaaaaccaaagctatgccacattgctcagtttgttctttanaaaaccttcaacanacttcctcccacagaaattgttcangtaaaaggaattggggaactcctggaagggttaatcccatatagtcagagacatttcagtagaattgacagatttgtaagaagcagtttcttgttagactacacacttggtgagatgtctgtgatcgattcaagagactgttgagacagatatcctaaggacgagaangaa

SEQ ID NO: 9432 - DNA, 460 bp, Arabidopsis thaliana
  unsure at all n locations
  Clone ID: LIB24-111-Q1-E1-G11
acgcgtccgataatcttctgctaaaatcgcgaaagagatatcttacgaatctccacaagtgcgaatttcgaacggagctacgattccatggcgaccaacggagagaaggtcacggctacggtggtgaatggcggagggctatctactggtgaaaaccctaagaaaattgtagacctcaacactacggagttagatcgtactgacgacattctcgacggagaagtcaagggattttcagattctggtgaaaagaaggaagaaaccgactctaatggtattggatcgacggctggtgttgattctggggatatctctccggtcgatgatatccanaagaagattcgacgtgctgaaaagtttggtgtttcggtgaaattgaccgaagaggagaagcgcaattctcgtgctgagaggtttggtactgtagctgcagcagtggtgaatggctcagagggaacga

SEQ ID NO: 9433 - DNA, 484 bp, Arabidopsis thaliana
  unsure at all n locations
  Clone ID: LIB24-111-Q1-E1-G4
ncgcaggaattccaaggtcgacccacgcgtccggattaaaccaagtagagagcatcaattttgttttgttagaaaattaagttttagttaatatttattcccatgaaaatgtccgctactactaaagaaagaatcgtaacagacggatcacaaacagtcacagatccgagccctgttttgagtttacgagaagaatattaaaattctcatctttaaccattttatccgatcatgaatgtgagagacgagggaaaaactacggcggagaaacacggcggaggagaggagaataaatcaccggagaacaaatggcgatttaattctcctctagctcaagtgagcttaatgggattcgtttgtttctgttgtccaggaatgttcaacgctctctccggcatgggaggcggtggtcaagtagattcaaccgctgctaacaacgctaacaacgccgtttacaccgctttcaacgttttcgggcttttaa

SEQ ID NO: 9434 - DNA, 466 bp, Arabidopsis thaliana
  unsure at all n locations
  Clone ID: LIB24-111-Q1-E1-G6
tcccgggtngacccacgcgtccgttcagaccagaacttattgactctgttatcaaaccaatgcttgacttcttacgtgaaactggttcaagacttatgatcaatgtctatcctttctttgcttatgaaggaaactctgacgtcattcctttanattatgctttgcttagagagaatccagnaatggttgattctggtaatggtttgagatactttaatcncttcgacgctcaaatcgacgccgttttcgcatcaatgtcggctttaaagtacgatgatatcgaaatcattgtcacggaaactggttggccgtcgaaaggagatgagaatgaagtcggagctactctagctaacgcagcttcttacaacggnaacttaatccgtcggatcttgacacgtggaggtacaccgttacgtcccaaagcagatntaacnggcnatcctttcgctctgttcaacgagaacaa

SEQ ID NO: 9435 - DNA, 451 bp, Arabidopsis thaliana
  unsure at all n locations
  Clone ID: LIB24-111-Q1-E1-H2
aannnnnnnnnnnnnnnnnnnnnnnnnnnnnnnnnnnnnnnnnnnnnnnnnnnnnnnnnnnnnnnnnnnnnnnnnnnnnnnnnnnnngtgtccattttattaggcatgttggtgatctttgtttcaccaatggtgttcgcagatgatttgacaccaatcccagagggcaaaccccaagtggtgcagtggttcaatacccacgttggtccattggctcaacgtaaaggcttagatcctgctctcgtagctgctgaggctgctccacgtatcatcaacgtgaatccaaagggaggtgaattcaaaacactaacagacgcaataaagagcgttccccgcangggaacacaaagcggggtgattatanaaatgggctcatggtngagtncagaggagaaaggtcactatccgacnaggaacaaaacccttcaattacnattgatgggacaaccca

SEQ ID NO: 9436 - DNA, 502 bp, Arabidopsis thaliana
  unsure at all n locations
  Clone ID: LIB24-111-Q1-E1-H5
tgtttgccctggnccgtaccgntccggaaattcccgggtcgacccacgcgtccgggcggtttcaccagcttcaatcaaacacaactcttatgggtatggccgcttcgtttcctcttcaggagtctctaatttctctatccatcgtcggagacgccactcgtcgttttctatctctcaagctccttcacaaatcaactcaggagcttgcaatgcaagtcaaatagttgatctttttccagcggtttcacctgaaatcgttgttcgtgaagcacggttagaggactgttgggaggtggcagagactcattgcagctctttcttcccgggatattcgttcccgcttgatgttgttctaagagtagataggttaatggcaatggtgatgggattttctattccacctgggtgccagaggacttgtttagtgggctgtgataggtagttcagtagatgaaaccatctgctttggaagtgatgatttcaaaattgggagcttttgatg

SEQ ID NO: 9437 - DNA, 500 bp, Arabidopsis thaliana
  unsure at all n locations
  Clone ID: LIB24-111-Q1-E1-E6
tttcccctggnccgtaccgagtccggaaattcccgcggtcgacccacgcgtccgcccacgcgtccgcggacgcgtgggcggcgagagaagaatccgatgacggaggaggaatctgatgggctaattgcggcgaggcggatccaacgattgtctttacacctatctccctccttgacgccgtcgccgtcgttaccgttggtgcagacggagacgtgttcggcgaggtcgaagaagctggatgtcaacggcgaagctttgtcgctgtatatgagaggaaaacatatagatatacaagagaaaattttcgactttttcaattcccgacccgatttgcagacgccgatcgagatctccaaggatgatcatcgggaattgtgtatgaatcagcttatagggcttgttagagaagctggggtaaggccgtttangtatgttgctgatgatcctgagaagtatttcgcaatcatggaagctgttggaagtgttgatatgtcccttgg

SEQ ID NO: 9438 - DNA, 501 bp, Arabidopsis thaliana
  unsure at all n locations
  Clone ID: LIB24-111-Q1-E1-C2
antggttcccttgccgtagccgtccggaatccnggtcgacccacgcgtccgtcaaaaacgagccagcctcttcttccttcgtctactagatcagatccaaagcttcctcttccagctatggctgcttcagtacactgtaccttgatgtccgtcgtatgcaacaacaagaatcactctgctcggccgaaacttccaaactcgtctttgttacctggattcgatgttgttgttcaagctgctgctactcgattcaagaaggaaacaacaaccacaagagccactttgacgtttgatccaccaaccactaattctgagagagctaagcagagaaaacacaccattgatccttcttctcctgattttcaaccaattccatcttttgaagaatgctttcctaagagcactaaagaacacaaggaagttgtccatgaagaatctggtcatgttcttaaagttccctttcgtcgtgttcatttgtctggtggtgagccagcttttgat

SEQ ID NO: 9439 - DNA, 492 bp, Arabidopsis thaliana
  unsure at all n locations
  Clone ID: LIB24-111-Q1-E1-C3
ctaggcctccggaaattccaaggtcgacccacgcgtccggctcttatcnctttctctcatgggctcaccacaagcaaccaaattgtctcttataatccgatctcaaaggttggcttgttgggagcactgagacatcaaacatggtttcttctttctttcactcttaaaaaaaccaatttagccctaaaaacctccttttagtttaatcccaaaagttcctcaaatctcttctattctctctctctctccattaaaacccttcacaagcaaaaagctttgagctttaaatgagtttaaggtcctgcaaaaactgggtttttcctcgtgtacttgttcatcttatctcctctgcataaacttcattgaagaaaaagtcttttttattttgttgatctcttttaattaagatccttttgggttttaatttattaatctccaagaaaaaaaatgggatatgaagaagccatgaaatgatagagagaagaaagagaa

SEQ ID NO: 9440 - DNA, 456 bp, Arabidopsis thaliana
  unsure at all n locations
  Clone ID: LIB24-111-Q1-E1-C6
acgcgtccgaatctacacacaattaacaaagctcaatctctctcttctcttactctctacctctgtagctgatagggtcagcttcgtcggcgctatttctgccggatttcacggacgatttgagatctgttcttccttcttcttttttcctctcctgatctgattcaactctaatctgcttcagtctctgtgttacgaactgattccgttcagtgaaaaaaaatgttgagcgtttcaagcttctgcagtttaatgggagactgaggagtcatttgagtgaaacgtttgggaactttggaaacagatggagtgtcgtttgggagttgaagaaggtattaactaaggaaagctcaaaggcatttacaccggataagtttagagacgataaacgcgggttatcttactccgatttccaccgcgaagatnacgaaaaaagttgaagatgtatgtcctaaa

SEQ ID NO: 9441 - DNA, 500 bp, Arabidopsis thaliana
  unsure at all n locations
  Clone ID: LIB24-111-Q1-E1-C7
tgnttcccctggccgtaccgantccggaaattcccgggtcgacccacgcgtccgctgctctagtttccaaggatgttgcacaaaaggatattgagattctcttgagacgagtgaaaactgctacagctttattgacttacctgaaatctaaagcgacaactgtggctgctgccgatttggccaatctttcacttgaaactgaccagctccaagatacaatagacgaacatgatgggacttatgtcactgagatgcttcagcatgtagagaccgttacaggcgtcatggagtctctggctaggcgtgcttttatcgccgaatcagaagccgctatcgagaaaggaaaggttgtgctaagccaagaggaaattcaaagaaaggttggccaactcgagaacatgtccgtgaagttagaggacatggaaaagtttgctcttgggaccagtagtattctctgtgaaatgcggcagagggttgatgatttggttgaagagacctct

SEQ ID NO: 9442 - DNA, 296 bp, Arabidopsis thaliana
  unsure at all n locations
  Clone ID: LIB24-111-Q1-E1-C9
aaatgtnaangcatatttgagacgagggactgctagagaatcacttgtacggtacaaggaagctgctgcagatttcaggcacgcattggtccttgaaccacagaacaagacggcaaaggttgctgagaagagactccgaaaacacatatgagttaaaaaggattattactcgatttctcttgttcaccaatctatcttttcacttatctaaaaccctaaaaaggaaaggttttgctccggtttcaacanactaataatttagtggttttgtgacnaaannaaaaanaaaaaaaagg

SEQ ID NO: 9443 - DNA, 467 bp, Arabidopsis thaliana
  Clone ID: LIB24-111-Q1-E1-D1
acgcgtccgcccacgcgtccgcaaaggagaatagtgattattgaaggatgcaaagatttttatattcagctctaatgaagaacggacaggagttgcagtcttctacccaagtttcacatgagtcccaaggtgaacagaaagttaatttatcagtagaagctccaatacaagattctggttctgtatctgcctcaagtaatgacggtaggaaagtgtcaagacaagatattgaacttgtccaaaatttgatagaaagatgtctccaagttgtacatgagcagagatgaggtcgtaaaagacactcttgacccgtgcaagggattgaccctgggttttacaacattagtatggcaaaaactggaagaagaaaacgcagagtttttcaaggcatattacatcagactgaaactgaagaagcaaatagttgtattcaatcatttgcttgagcatcagtatcacctcacgaa

SEQ ID NO: 9444 - DNA, 459 bp, Arabidopsis thaliana
  unsure at all n locations
  Clone ID: LIB24-111-Q1-E1-D11
acgcgtccggtttttaaaaatgggttttcttcttttgtaacgaaaaaatgtgtcaaactttgaattgaccattttttttttataaggattcgatgaagaaattgagaagctattactcaaatgtgagannnnnnnnnnnnnnnnnnnnnnnnnnnnnnnnnnnnnnnnnnnnnnnnnnnnnngagaggaaatggatatttttccctctattgattggttcaatcttcgctttgttcttactcttcctcacaacaaccctaacttcaccaaccggaggagtccgatttctcccttttacccgacccgttttgttaaccggatctggttcatcagctttcgttgaatccaaaatcaaacctcaacaaatctcatcactcccgtcgccaccgcgttttgcttacttgatttctggatccgccggcgacgggaaatctctccggcgaactcttttgggctctt

SEQ ID NO: 9445 - DNA, 500 bp, Arabidopsis thaliana
  unsure at all n locations
  Clone ID: LIB24-111-Q1-E1-D4
aacggttcccttgccgtagccgtccggaatccanggtcgacccacgcgtccgcggacgcgtgggcttctggttctctctctcggtaactttctgagctgaagaaccctaattcttatcttcaccggattccgggtatagggctttgtaaagttgttgaatttacaaagaaagatatgctgggtttgtctgggttttgtagaagaatctgtgttgttgctttgagattaaagtccgaacaatgttgggtttgattcatgtccttgatgagctcgtcaatggtcttatgccactgcttatcattcagtagtcaaaacccagatcctgaatcatcatcatcttctcttcttcgttataagccttgtgattcgatttcgttgtggggtaagagaaggaagaagctttggagatttgttcccagtgcggagaagaataacagtcatacgggtaataataataagaggagaagaagctggtggcagangtttttctttgatgatga

SEQ ID NO: 9446 - DNA, 508 bp, Arabidopsis thaliana
  unsure at all n locations
  Clone ID: LIB24-111-Q1-E1-E1
gaactggttcccttgccctagccgtccggaattccanggtcgacccacgcgtccggtcagagcggcggctactactaagtttcaagtttttgaaattttgaanaaatgggtgagaatcagtgtgctcaatgatggtcttaagagtatgtacaatgcagagaagagaggaaagaggcaggttatgatcaggccttcttctaaagttatcatcaagttccttatcgtcatgcaaaagcacggttacattggcgagtttgagtatgttgatgaccacaggtctggtaagattgttgttgagcttaatggaaggctgaacaagtgtggagttatcagtcctcgtttcgatgtcggtgttaangagattgaaggatggactgctcgtctacttccttccagacagtttggtttcattgttctgacgacctcagcggggaatcatggatcatgaaagaaactaggagaaagaacgttggtggcaaagttcttggggttctttactgaagcaagg

SEQ ID NO: 9447 - DNA, 441 bp, Arabidopsis thaliana
  unsure at all n locations
  Clone ID: LIB24-111-Q1-E1-E11
gggcggacgcgtgggcgtggatactccttcaccacaactgctgaacgtgaaattgttagagacatgaaagagaagctctcttacattgctctagacttcgagcaagagctagagacttccaaaacaagctcgtccgttgagaaaagcttcgagcttcctgatggacaagtgataaccattggagcagagaggttccggtgtccggaagttctgttccagccgtcaatgatcggaatggaaaatccaggaatccatgaaaccacatataactctatcatgaaatgtgatgtggatattaggaaagacttgtatggtaacattgtgctaagtggtggaaccacaatgtttggagggattggtgatagaatgagcaaagagattacggctttggctccaagtagtatgaagattaaggtcgtggctccaccggagangaagtac

SEQ ID NO: 9448 - DNA, 459 bp, Arabidopsis thaliana
  unsure at all n locations
  Clone ID: LIB24-111-Q1-E1-E2
acgcgtccgctgnatttccatatctatttaaaattatgattaaacttgagaatcaactaaaatcatcatcatacatgttttgtaggtgatagcaagagaagcaagagagttcaagattggaggatcagtgttttactatgcattgatagtgatcacaggaataatatggcaaggtttcttcttaggagccatagggattgtgttttgtgcatcatcactagcttctggtgttctgataagtgttctgcttccggtgactgaagttttcgccgtcgtttgtttccgggagaagtttcaggcaagagaaaggtgtctctctacttctttctctttgggggatttgtctcttacttctacggcgagtttaaatccggcaagaaagttgttgataaacctcaaccgccggagacagaactgcccaatcctcccggtaatgattaagttgcctaaattccataa

SEQ ID NO: 9449 - DNA, 457 bp, Arabidopsis thaliana
  unsure at all n locations
  Clone ID: LIB24-111-Q1-E1-E4
acgcgtccgatactcttgggaactatctcaattgcaattttcaacgctctttttggcttgagctcaaatttttggatggcaattggcacaaggtttcttcttgggagtttcaactgtttgcttggaacaatgaaggcctatgcatcagaaatatttcgtgatgaatatcaagctaccgcaatgtcagctgttagtactgcttggggcattggactgatcattggccctgctcttggtggttttttagctcagccggcagacaaatatccaaatgtgttctcccaagaatctctttttggcagattccggtatgcattgccttgctttacganttcaacttttgccttgcttgtgacantactaagccgcttcatcccggagacactgcacaatcataagctggacagcttatcacatgatgattcatacgatatacttgaagctgcatcccatgaat

SEQ ID NO: 9450 - DNA, 468 bp, Arabidopsis thaliana
  Clone ID: LIB24-111-Q1-E1-E5
acgcgtccggccaaagctgccattgccatttctgtctctgaagtcactcagtcgcctgaaattctcgagttatcggagaaaatcaaagagaagatgaaggaagcagatatccacgatcttgaaggcaaaatggatcttaagattagagctcttgagttagtcgaagagatgaggaccaagagagctgaccaacaggcggtgttgctgttggaagccttcaacaaagatagagcatccttgccacagcccgttccagctcaaccaccatcttccgaattacctccaccggatcctcgcactcaagaaatgataaatgagaaactgaagaaggcagaagatcttgggtgaacaagggaatggttgatgaagcccaagaaagccctggaaagaaggctgaagctcttaagaaagctttacaagttagacgagaacctccaagcaagattcaacgaagtacaccgctgttga

SEQ ID NO: 9451 - DNA, 483 bp, Arabidopsis thaliana
  unsure at all n locations
  Clone ID: LIB24-111-Q1-E1-C10
agaagtccganattcccgggtngacccacgcgtccgtttngattctctcaaaaaatcccataactttcccaacgaaaaatgttccgatcaatgattgntcgatctgcttccccantgnagcagggtcttctccgcagaggattcgcctctgnatctgttcccgatcgcaaagtcgtcatcctcggtgccgccggtgggatcggccanccantttctcttctcatgaagcttaaccctctcgtcacttctctctccctctatgatatcgccaacactcncggcgttgctgctgacgtcggtcacatcaacacccgatctcaggtttctgggtacntgggtgatgatgatttggggaaagctctataangcgctgacctcgncattattccagctggtgtcccaangaatcctggcatgacccgtgatgatcttttcaacatcaatgctggcattgtcaagaacctcagcatcnccatcgccaat

SEQ ID NO: 9452 - DNA, 447 bp, Arabidopsis thaliana
  unsure at all n locations
  Clone ID: LIB24-110-Q1-E1-A3
cccgggtcccanccagaacgtccgaatcacnccttctaacattggngaccagcancgcgtgctactcacgtgggatccttcccccaagtgtctcttctcaacgatcctctacattggtctctcctccttcctacnccacatcctccagcttcaagcgtctaaaatcgagctcaatcttcggggattcactacgattagcaccaaaatcgcaacttaaagccacaaaagctaagagcaatggtgcttcaactgtgaccaaatgtgaaattggccaaagcttggaagagtttttggcacaagcaactcctgacaagggattgagaactttgctgatgtgtatgggagaagcattgagaacaatagcttttaaagttagaacagcttcttgcggtggnacannntgtgttaattcctttggtgatgaacaaactcgcctgttggataagn

SEQ ID NO: 9453 - DNA, 436 bp, Arabidopsis thaliana
  unsure at all n locations
  Clone ID: LIB24-110-Q1-E1-A5
tccgnccacgcgtccgaccgtcgccggagctctgcttgccggagattttcgattaccagctgtatcgtctctaatacccagaaagacttcttcttcattgtcatgccttagcaacagagatttatcgtctccttataattgctgttggcgactatccagaggcaaaattttgacttctctcagtaactcacggaaatttgctgtgggaaaggaagcagaagatgggtttctatcgaatgtgagcgaagatactgatgagatgttcgacgacttgttcaacaaatatgggaaggttgtttttagaagcactgatgttaagtctccaacagctgaggttgacgatgatgcagagagtttagcatttgctgttgaattggctaaaagttgcgagtgatgttgaaagctgggagatantaaaggcctccttgtcaaanct

SEQ ID NO: 9454 - DNA, 453 bp, Arabidopsis thaliana
  unsure at all n locations
  Clone ID: LIB24-110-Q1-E1-A7
cgggtcnacccacgcgtccgacgctgtgtacgatgttgatgtgacgattacaaggtgangattcagccgcagctggaggtgactccgattaccaaatacgggtcggatcctcagctcgtagtgggtaggcaaatcgccgtgaataaggtttacatttgctatggattgaaaggaggaaacattagggttctcaatatcaacacagcattgaggtctctgttccgtggccattcacagagagtgacggatatggctttctttgccgaggatgttgatatgttggccagtgttagcctagatggaaaagtttttgtgtggaaaatttctgaagggtctgagggagaggatcagccccaaataactgggaagatagtacttgctcttcagatactangagaggaagacaccaaacatccacgcgttttgttgggcactgccacaaaacangaaatt

SEQ ID NO: 9455 - DNA, 508 bp, Arabidopsis thaliana
  unsure at all n locations
  Clone ID: LIB24-110-Q1-E1-A9
tgcctggncctaccggtccgatatcccgggtangncccacgcgtccggcnaaagggtgtttaagtcgtgccggttacgacaacggaaagaaagctccgggacgttgttcgccgtacatccccggttatggacagcattgtcaggatgggcggtctggatacgaagcttatcangtcatntcangncttactcttgtcgcatgcttacgcggttgacncattcagnaactgngaacantgttctggnngtaaacttggcctcggnnaatcnctccaatngccntaccctccgtgctttatccaccaaacntaacggcggtctccgttccataaccgtcgntctaacggcgaaagatgttaccgtcgaaagattctgtatgagccggtgccgggactcacggatcctccggttcgaatcccccgtcgcgcagcttaacgggcgcggcttacgtatgggtccgggaactccgagacgcagttgcccttggataattgcgcgtggccgtttt

SEQ ID NO: 9456 - DNA, 434 bp, Arabidopsis thaliana
  Clone ID: LIB24-110-Q1-E1-B1
taaaaccctagaaactcacttcctcagtttctccaactctgtacttcgtatcatcaagcgaaaccctaaaagaagcaatctttagtctcttctcttctttattttttctggggagaaagaaatttcacttttttttatccgatttctgcttcatctgggttttggatttttgcgatcgattttgagaaattagcaaacaatgtcgggttctggaggagtttcaatcgcacgtacagcgatccgtggtgagaatcggttttataatccacctccgatgcgtaggatgcagcaagaggcccaattgcagcaacagattagggagaagcaacgtcgtgatgatgaagatgaggttttgatggataaggaaaggagaaaaggctgctactgttgctccgaggactactaaggaaaaggtcctgggtgtgtccggaaaa

SEQ ID NO: 9457 - DNA, 448 bp, Arabidopsis thaliana
  unsure at all n locations
  Clone ID: LIB24-110-Q1-E1-B4
ccacncgtccgcacacgcgtccggggttctcgggttgactacgaagctcctggtcgctggtgtacaacgatggcctacagtgctgatggaactaggctattttcttgtgggacgagtaaagatggggaatcgttcatagttgagtggaatgaaagcgaaggagctgtgaagagaacttatcaaggattccacaagcgttcccttggtgttgtccagtttgatactactaaaaaccgttatctcgctgcgggtgacgacttctccattaagttctgggatatggacaccatacagcttttgactgccattgatgctgatggaggtctccaggcaagtccacggatnagatttaacaaggaangctctctcttggctgtttccgcaaaatgacaatatgattaangttatggcaaaactcaagattggtccaaaggctattgcacacaag

SEQ ID NO: 9458 - DNA, 407 bp, Arabidopsis thaliana
  unsure at all n locations
  Clone ID: LIB24-110-Q1-E1-B5
ttgtactccatactcatggaagcttcgatttcgtttctggggtcaacaaaacccaatatttccttgtttaacccttcttcaaacgtccttcctcgtagagatttccctcttcctgctttgaaattgaagaaagtttcagtgctgcctcgaatcttgcaccagaaacgactcatcagagctcagtgctctgatggattcaaaccagaggaagacgatgggtttgtcctagaagacgttcctcacttgaccaaatttctccctgatttaccgtcatatccaaatccattgaaagaaagccaagcatatgccattgttaagcgaacttttgtcagttccgaagatgtggttgcgcaaaatattgtagtccaagaagggaagtaagncgagggagtacactttangcgaac

SEQ ID NO: 9459 - DNA, 427 bp, Arabidopsis thaliana
  Clone ID: LIB24-110-Q1-E1-B6
ccttcatctcttagagccttttaaaagtaaccaacgccatgaatatcttccaagactggcctgagcctatagtccgtgtccaatccttatctgaaagcaacctcggagccataccaaatcgctacgtcaagcctctatctcagcgtccaaacataacccctcacaacaaacacaaccctcagaccaccaccatccccatcattgacttaggtcgcctatacacggacgacctaactctacaagccaaaacgcttgatgaaatctcaaaggcttgtagagaattgggatttttccaagtggtgaaccacgggatgagtcctcagctcatggaccaagctaaagcaacatggagagaattctttaatctccccatggaactcaaaaatatgcatgctaattcgccgaaaaacttacgaaggatatggga

SEQ ID NO: 9460 - DNA, 449 bp, Arabidopsis thaliana
  unsure at all n locations
  Clone ID: LIB24-110-Q1-E1-B7
cgggtcnacccacgcgtccgnaaatatctacagatgtcatgtttcatttggaattcaatacgtaatcaacacctaatcgcttgatcgatgttaaattcgagactttccagcagaaaatggagaatgagacagaattgagggttgttcatcaggaagaacaacaacgcgaagaaggagaagatgaatcacagccacaaaacccaccaccagccttacgacgtcgtttcgtgatatatctttacgttggatattttcttgcaagatggagtgccagaacatgggaattctctgttgcattgtatatgatccacttgtggccaaactctctgcttctcgctgccatttatggtgctatagaatctggttctactgcaatctttggtcccattgtggggcaatgggtcgagggaatggactacgttaaagntcctaagactccgggctcccgg

SEQ ID NO: 9461 - DNA, 502 bp, Arabidopsis thaliana
  unsure at all n locations
  Clone ID: LIB24-110-Q1-E1-B9
actggtttgcntgggtctcgcctgggngtaacggtcgggangacccacgcgtccgcttttgtctaaaaatggcgatgctaggtttttacgtaacgttcattttctttcttgtatgcctatttacttatttcttcctccaaaagaaacctcaaggtcagcctattctcaagaactggccgttcctcaggatgcttccaggaatgctccaccanatccctcgtatctacgactggaccgtcgaggtgcttgaggcgaccaatctaactttttatttcaaagggccatggcttagtggaacggacatgttgttcaccgccgntccaaggaatattcatcacatactaagctcanactttgggaattaccctaaaggacctgagttcaagaagatctttgatgttttggganaaggaatcttaaccgttgattttgagttgtgggaggagatgaggaagtcanatcangccctantcnacaatcaagatttcatcgagctctcagt

SEQ ID NO: 9462 - DNA, 455 bp, Arabidopsis thaliana
  unsure at all n locations
  Clone ID: LIB24-110-Q1-E1-C1
gtcnacccgacccgtccgancttctaagatctctccgggcaatggcaattccgttgcctcttacctcttgctccccaatctcaacttcttcgtctatttcccgaacctccttcgtccctcttacacttcgcaatcgtactttcttctccaaccagaattacagtaggcgtgtacttatcagctgctcttcttctttgtcctcagacaatggttcatctccagactccatgaacggaaacgggaacgggaacgggagtagcttaaacgggcaatcatctttcccacgactgccttcctttgatggaacatccaaaccaccgcttaaatggagaagggttttactcaaaggtcagtgggagaagctcttgctggagacgaggagcaaaatatcgacccaaaggttactatgggcgattgcaagggaaagttcagcanttgactccacttggcattga

SEQ ID NO: 9463 - DNA, 471 bp, Arabidopsis thaliana
  unsure at all n locations
  Clone ID: LIB24-110-Q1-E1-C10
ccggaaatcccggancgacccacgcgtccgccgtcgtctttcttctacctccgaccgcttcatctcttcagttcaactgcgaaagttcctttttgtcccnnnnnnnnnnnnnnnnnnnnnnnnnnnnnnnnnnnnnnnnnnnnnnnnnnnnnnnnnnnnnnnnnnnnnnnnnnnnnnnnnnnnnnnnnnnnnnnnnnnnnnnnnnnnnnnnnnnnnnnnnnnnnnnnnntgcagaatcaaagtctgggagctgttgatgaaggtgttaagattaaaaagaagctcgaagattttaactgggaccattcctttgttaaggaattgcctggtgatcctagaaccgatgttatctcgcgtgaggtattacatgcttgctattcaaaagtttccccatcagtagaagtggatgatcctcagcttgtagcatggtctgtctctgttgcagagctattagatttggatcctaaagaa

SEQ ID NO: 9464 - DNA, 481 bp, Arabidopsis thaliana
  unsure at all n locations
  Clone ID: LIB24-110-Q1-E1-C2
cgtaggcctccaaaattccaanggtcnacccacccgtccgnaactagatctctcttctcctctgctcgttcaatgttataacgatctcgagtatcacaaaagaacaagatgtctattcgaagaatctaccgatgtctgaattctttaatcaaaagatcttgtgctcaatctctatgatcatacgccccatttcacactttgtttcacctctcagtttttttttttgtgtttttttgtccctctttgtttcacttgagaacaaccccctttgaactcgatcaagaaagctaagtttgaagaatcaagaatggtgcggacaccgtgttgcaaagctgaactagggttaaagaaaggagcttggactcccgaggaagatcagaagcttctctcttaccttaaccgccacgggtgaagggtggatggcgaaactctcccccgaaaaaagctgggactcaaggagatgcggcaaaagcctggcaga

SEQ ID NO: 9465 - DNA, 462 bp, Arabidopsis thaliana
  unsure at all n locations
  Clone ID: LIB24-110-Q1-E1-C3
atcanaggtccacccacccgtccgantcctcnaaaggtttattttgctctgaacaagcctaaaggatatatttgttcttccggagagaaagagatcaaatctgctattagtttgtttgacgaagtacttgtcctcttgggataaaaggaatccggggactcccaaacctcgcctttttactgttggtcgtcttgatgttgccacaacgggattgatagttgttacaaatgatggagatttcgcacagaaactttcacatccttcatctagtttaccgaaagaatatattaccacggttgtcggtgatatacacaaacgacacttaatggctatcagtgaaggcacaatggtgggaaggagtccactgtgtcccagattcagttgaagttgatgccaaaagcagcatgatataccaagagcaaggctgcgtatanttggttcaccaaaggaagaaatnatgga

SEQ ID NO: 9466 - DNA, 437 bp, Arabidopsis thaliana
  unsure at all n locations
  Clone ID: LIB24-110-Q1-E1-A1
ccatttcctcttccgttttccacggggaagacacttcccttctcttctttatcttctctcaaattcttcagttccttctcgaaatcattgatcttgatttgagctttagagaagagaagaacaaaattcataagagaacatagaataagtagtgagatctaatcctcttcccatgtttttgtctataaagtagcaattagaacttcaatcttcaatttcatttccattaacattgtttcccattcacaaagttgacttttttttctttggttttagcttcagttcaagattcttcagttgggtgtactaaagttttgaaatttctttgtttaaacattaaaaagtttatgttttgatcgttangtgtgctgcttcattgggtccaatgatgatgaatgtgttggttaanaacccngtatccngttcaaaggtcgatc

SEQ ID NO: 9467 - DNA, 481 bp, Arabidopsis thaliana
  unsure at all n locations
  Clone ID: LIB24-109-Q1-E1-F12
cgcctgnccgtaaaggtccganattcccgggtcgncccacgcgtccggttngtctttcttgtaagcagccaactacaaccgaagagatatatgatacaatagctcatattgatttggctacagagtcttccccgagcttgagttcctctgttcagtctccatatcctgttatttgtagtcatttggatgacatatataaaatgattctggacaagttggctaagctggatgatctcttaccggtggttcttaagaaatgcttgggcacaaatggaacatgtccaatctctgtgttcaactattcccttttggtgaacttcaagacaaagctaagtagccactctgctcccaagcaaaatgggcataagaacttcaagcagcaattcactcggaaggcctcgcgagagctttttgttaagaagttttcctgcaaggctcccgtttatcataactgtagaatatacgctaatgatggacggtt

SEQ ID NO: 9468 - DNA, 499 bp, Arabidopsis thaliana
  unsure at all n locations
  Clone ID: LIB24-109-Q1-E1-F4
cggtccggaaaaaccgggtcgacccacgcgtccgctcatctctggctatcttagagggatttttgattgagattttaaaattttctgagttggattagttggttggtaaagagatggatccggatacggtgaantcgaccctctcgaatctggcattcgggaatgtattggcggcagctgctagagattataaaaaggaagttcttgcaaatgaaaaggcacaaggatcaagacctgtcaacgaggaagttgatcttgacgaattgatggatgatccaagagctanaaaagttgcacgcanataggattgcagcactcacganagaagtggaaaaagagagaagcattcaaaagacaaggacatggtgaataccgagaagttancgaaagcgacttcttgggagaagtcacaangagtgaaaaaattatatgtcacttctancacaaggagttctatcgctgcaagataatggacaaagcantttaaagacccttgctc

SEQ ID NO: 9469 - DNA, 516 bp, Arabidopsis thaliana
  unsure at all n locations
  Clone ID: LIB24-109-Q1-E1-F6
ctgtctttctggngggtctagnggtcaaaanattcncgggtcgacccacgcgtccggtcacaagtaccttcatatggaacttgatcctccgtttacaatctctgagctgagctcaaacgcaatttatctcacagaagattttactcccaagctggttgatttcgaatgctggaagacaattcttgcaagatcagaaaagaatttgagaaatattagtagccagggttcgatatgtgtactcccaagacggaatggagagccgatatcttgatgtgtcgggtaatatctatgcattcgggattcttttgctggaaattgtcagtggaagacctccttattgcaaagacnaaggattcttaattgaatgggcaaaggagttccttgaagcaccaagaggcaatgtcgggattggtggatncagagctgaaacattttaaccaagaagatcttgagacggtatgcgaagtggctatccaatgcttgaaccggggacccaaccatcaacaacaacnatca

SEQ ID NO: 9470 - DNA, 433 bp, Arabidopsis thaliana
  Clone ID: LIB24-109-Q1-E1-F9
gggctcacttctgcacgatatgtggcaagggtttcaagagagacgcgaatttgaggatgcatatgagagggcatggagatgagtacaaaacagcagctgctctggcgaaaccgaacaaagaatccgtacccgggtctgagccgatgctgatcaagaggtactcgtgcccattccttggttgcaaacgtaacaaggagcacaaaaagttccagcctttgaaaacgattctatgcgtgaagaatcactataaacgcacccactgcgataaaagcttcacttgcagccggtgccataccaagaaattctctgtcattgcagatcttaaaacccacgagaagcactgcgggaaaaacaagtggctttgttcctgtggtacaacattttcaaggaaagacaagttgtttgggtcacatagctctgttccaagggacac

SEQ ID NO: 9471 - DNA, 468 bp, Arabidopsis thaliana
  unsure at all n locations
  Clone ID: LIB24-109-Q1-E1-G4
cgtccgaaaagcgtcactaggaagctgcgactatttgactgactctgatttcacgcgactccttgtgagattctccgattgcttcgcctgagtttctgggttaactctccacgccgtcactttgatctttgcttttccgatctttagggtttttgtttagggaattgtcgaagactctgctctaacatgtctggaagaaaagaaacggttttagatttggccaantttgtagataanggtgtgcaagttaagctcactggtggtanacaagtgactggaactcttaaangctatgaccaattgcttaatcttgttcttgatgaagcaatcgagttcgttcgagatcatgatgatcctttgaagactacggatnagacaagacgccttgggtttgattgtttgccgtggaacancggtgatgcttgtctcaccaaccgatggcaccgaagaaatcccctaacccgtttc

SEQ ID NO: 9472 - DNA, 507 bp, Arabidopsis thaliana
  unsure at all n locations
  Clone ID: LIB24-109-Q1-E1-G5
cttttccgcncctaccggtcaaaattcccgggtcgacccacgcgtccgctgaattgattgctaagatcatatgtcatggtgctcaggactatactagagctacacttaggacttcctttcttgcttcttgtgtttcatcttgccatagccggactgtgagtcttgctgatactgtaactgttatggctcaaaggttgcacgagcgtctccaagagtgtaacggtgatgaggtcctcaaagcagaagctggtgctaaagttcaaaagtttactgaatgggcactcaaatgtataggttttcactcccgatgccagggccctagagataaagctaaccaagactcagctgctgagatccaactccagctttctgctttcaagatgttcttagatcttgcaggaaaccatctatcaggaaaggatttcacagaancctttgatgcagcttgcttcccgcttacgctgttctctacctccgtttaatcctggctgggcttctggaatttca

SEQ ID NO: 9473 - DNA, 466 bp, Arabidopsis thaliana
  unsure at all n locations
  Clone ID: LIB24-109-Q1-E1-G6
acgcgtccggcaaattgtatgttcgtggaacagtcntcggttacaagaggtactttcaattttcagtctttcnctgtatgttcttaagatttttcagagttcaatgttgcgtttatggttgganattgtaatgtttagtttcattantcntaagttatttggatttgaatattcanctatcgttttggatatcancataatgatctcgataaaagtttgtaactttgccacaactgatagatttcaatgataatgctctcagatttgtaatcttattccatggtttctgatttatggntgtgcanagtgatgcatttttgctantgcttccttnaagattagcttntanncagttggntgatagtttgattgcttacagaaagcggattaaagatggattactaaccactaagtaatgtttcaggtccaagtcgaancactaccctaacacttctctcgtccagan

SEQ ID NO: 9474 - DNA, 446 bp, Arabidopsis thaliana
  Clone ID: LIB24-109-Q1-E1-G9
acgcgtccgcttattttcgatatgtttaggggaaaaatatttgtgttatcattattttctatttacgtcctctcatcagcggctgaaaaaaatacatcattttctgcgctttttgcttttggtgattcagtcttagatacgggaaacaataattttcttcttactcttctcaaaggaaattattggccatatggtttgagttttgactataaatttccgacgggaagattcggaaatggaagagttttcaccgatatagttgccgaaggtttacagatcaaaagacttgtaccagcttatagcaagattcgtcgcatcagttctgaagaccttaagactggcgtttgttttgcatcaggtggttcaggaattgacgatcttacatcccgaacactgaagagttttatcggcaggtgaccaagtaaaagactttaaagactatttga

SEQ ID NO: 9475 - DNA, 446 bp, Arabidopsis thaliana
  unsure at all n locations
  Clone ID: LIB24-109-Q1-E1-H11
acgcgtccgcccacgcgtccgagtgaaggagccatttgatttgcctcctcttggagatggcttgggtccagttgtgcagacaaagaatggagggttcttgcgatcaatgaatcccttactgttcaggaactctaaagctggaggcagcttgatcatgcaagtgtcaactccagtggtggtgcctgctgagatgggctctggtatcatggagatacttcaaaaactagccactgctggaattgagaagctctcgatgcaggcaaataaagtaatgcctttggacgatataacagggaaaaccatggaagaggtgtcgtgggaaacttcacctacaattgacattgggggacagggatcatgtatcagagcgtgaatctggtgatgcatctggttttgtgaggggangtgaaagacgaacatcatttgcagctaagccaaaaaagttt

SEQ ID NO: 9476 - DNA, 510 bp, Arabidopsis thaliana
  unsure at all n locations
  Clone ID: LIB24-109-Q1-E1-H4
ttngcggccgtaccggtcangaattcgcnggaccnncgcgtccgcaaaatcctgattgataccaaaggatcatcaaatgacataactggganggaacaaattgtgganacaatgaaaagtgaaggtgttgagcttgaccttcgtgcacgagctctcattgcaagacactatgcatcagctgggcttaaagagaaggctgagaaagtgctgaaagagatggaaggtgaaagcttggaggaaaatcggcatatgtgcaaggatttgctttccgtctatggctatctccagagggaggatgaagtgcgcanagtttggaatgatctgtgaagaaaacccccgttataacnaggtccttgctgcaatcttggcttttggaaagatcnataaagtcaaagatgcagaggcggtttttgagaaagtgttgaangatgtcccatagagtttcttctaatgtttactccgttctcttgaaggtttacgtggatcacaagatggtctcagaagggtaan

SEQ ID NO: 9477 - DNA, 452 bp, Arabidopsis thaliana
  unsure at all n locations
  Clone ID: LIB24-109-Q1-E1-H5
aaaagctggtttttatgacattggtattggagctgggctggagtccatgacaactaatccaaggggatggaaaggatcagtcaacccaaatgtgaagaagtttgaacaagctcacaattgccttcttccaatgggtattacttcagaaaatgtagcacaccggtttaatgtttcaagggaggagcaggatcaagctgctgttgattctcacagaaaggctgcttctgctactgcttccggaaagtttaaggatgagataacccctgtaaaaaccaagattgttgacccaaagacaggtgatgagaaacccataacagtttctgtggatgatgggattcgacctaacacaaccctttccggacttgcaaagctgaagccagtgtttaaggaanacggaaccacaactgctgggaattctaaccaattaagtgacggtgctgganctgttctcc

SEQ ID NO: 9478 - DNA, 513 bp, Arabidopsis thaliana
  unsure at all n locations
  Clone ID: LIB24-109-Q1-E1-H6
gttcgcgcngcccgggtcgtnaagaaatcgcgggtcgacccacgcgtccgcttaagtgaaactgtagntgaagctcttagattgctggatatgtcacctgatacttatttctcacttcangctgaataaagaatgacggcacaccaatcagcagctcactgcctcctcccttcccaccttgcaacttgagaacagcgcttacacnatatgcatgtcttttgagttctccanagaagtctgctttagttgcgttggctgctcatgcatctgatcctaccgaagcagaacgattaaaacaccttgcttcacctgctggaaaggatgaatattcaaagtgggtagtacagagtcaangaagtctacttgaggtgatggccgagtttccttcagccaagccaccacttggtgtcttcttcgctggagttgccccaaggttgcagcctaagttctattcganatcatcatcgnccaagattgctgaaactagaantcacgtcacatgtgcactggggt

SEQ ID NO: 9479 - DNA, 405 bp, Arabidopsis thaliana
  unsure at all n locations
  Clone ID: LIB24-109-Q1-E1-H9
tgccccatttgctttgagtttctgtttgaatcacggaacgatgtgacggttttaccatgtggacacacaattcatcagaagtgcttggaggaaatgagagatcattaccaatatgcgtgcccactttgctcaaaatctgtatgcgacatgtcaaaagtgtgggagaantttgacatggagattgcggctacaccaatgccagaaccataccagaacagaatggttcagattctctgcaacgactgtgggaagaaagcagaggtacagtaccatgtggtggctcagaaatgcccaaactgcaaatcatacaacactcgccaaaccaagaggctgaagctttttttgaagttgatttgctatcaaatgcaattaagagcttttcacttgattcaatagtgtcattgg

SEQ ID NO: 9480 - DNA, 448 bp, Arabidopsis thaliana
  Clone ID: LIB24-109-Q1-E1-F11
acgcgtccgcgacaacgaagggcgaagaatctcgctccctcaatttcgcattgccatcgattttcttagaggttaaaatggttgaacagactcagcaccccacgattcttcagaaggtttctggccaactcttgagctcgagtgtttctcaggacattcgtggttatgcttcggcttccaaaaggcctgctacataccagaaacatgcagcttacggaaactactccaatgctgcatttcaatatcctcttgtggctgcatctcagattgcaactactacttctcctgtgtttgtccaagctccaaggagagaagggatttactaactttgctattgatttcatgatgggtggtgtttctgctgctgtgtcaaagactgctgctgctcccattgagcgtgtcaagcttttgattcaaaaccaaggatgagatgcttaaggctggaagg

SEQ ID NO: 9481 - DNA, 468 bp, Arabidopsis thaliana
  unsure at all n locations
  Clone ID: LIB24-109-Q1-E1-B6
acgcgtccgacttttactttttatttctcctctctggatcttcctcttcaaagctcaaggccattagggtttatctgagctccaaaatcaccctaattctagtgtatttctcagcaagcaagcttcttctttttttgtcctgggtaactgtgattgttgcaggatcttgtgtagaaacagatcacaagaagatgaatgataactcggtggtgcggctttgattatcttcagagattttagattctgtatccactctgttgcgatggggtcgtttgcaggcgcttgtgagattgtggaaagagaangatgatgaagtaagattgccaaaacattccgggagatatggnaaatcggttatgggatcatcaaagtaaggattgggtggaaccttagcaacganagtatcatggttctcttgagtatgacattgataatgccttttcagtccaattccgttaaancatctac

SEQ ID NO: 9482 - DNA, 467 bp, Arabidopsis thaliana
  unsure at all n locations
  Clone ID: LIB24-109-Q1-E1-C5
cacgcgtccgnccacgcgtccgttaaagagagcaaattaattttgttttgaataaaaatttcaatttcattatggaatataattatattagcatctacaatatgggtagcttgaaataagtgttatatgttttgttgattttgaactcattaaatttgtttttcttttgttataatttatatgaattcatgtggtgtaaaataatttattaataaatatataattaaagtttcaattagcatgtcaatatgacatattacatttttactttcacaataaataatatctactcaagatttggttttttaatcgacaaaattgatatattggtaagtcctgattttcaaaatcaactgacgacctttatgttattgaaaaaactaaaatgatctcctaacttctaaattacacactttcattgtttcacatcatcatcatcatctaattgtttgagagaaatgcaagat

SEQ ID NO: 9483 - DNA, 529 bp, Arabidopsis thaliana
  unsure at all n locations
  Clone ID: LIB24-109-Q1-E1-D1
ggtgaggngaactgtctccctggcagtcccggtccgnatgataccggggtngnccccacgcgtccgcggaanacgtgggtttctttctctcgttctcatctttctctctaagagattttgtaggtgacaatcaaaagtttgacaaaatggtgaagtttacagctgatgagcttcgaaggattatggactacaaacacaacatccgtaatatgtctgttantgctcatgtcgaccacgggaaatccactcttactgattctttggttgctgctgctggtatcattgcccaagaggttgctggtgatgttcgtangactgataccagagctgatgaggctgaacgtggtatcactatcaagtccactggtatttctctctactacgagatgactgatgaatccttgaagagtttcactggagccagagacggnaacgagtacctcatcaaatcttantgattcacctggggcacgttgacttttcttctgaggttacngcngctctccgtattaactgatggtgctccttg

SEQ ID NO: 9484 - DNA, 498 bp, Arabidopsis thaliana
  unsure at all n locations
  Clone ID: LIB24-109-Q1-E1-D10
gaaactgtctccctgnccgtaanggtccggaaattcccgggtcgacccacgcgtccgcaancatgccatgagatcgagattgccgccggcagcggcgacaacaacgacgccttattcggtaaatatgagctcggaaagcttctcggatgcggcgcattcgccaaagtcttccacgcacgtgatcgtcgtaccggccaaagcgtcgccgtgaaaatcctcaacaagaaaaaactcctcacaaatccagctctagccaacaacatcaaacgcgagatctcaatcatgagaagattatctcatccaaacatcgtcaagctccacgaagtaatggcgacaaaatcaaagatcttcttcgcaatggagtttgttaaaggaggagaactattcaacaaaatctcaaaacatggacgtcttagcgaagattcaagccggagatatttccaagcaactgatctccgccgttggttattgccacgctcgcggtgtttaccaccgcga

SEQ ID NO: 9485 - DNA, 460 bp, Arabidopsis thaliana
  unsure at all n locations
  Clone ID: LIB24-109-Q1-E1-D11
acgcgtccggctnatccccgtcgatatgagagccggtgcccacaagcaagaggcccaccttgccctcaacgtaacccctttctcnctctctctctttacgaacanncaaaactgaaaacactttatgtttggtttttccaattatctgacaatgatctttgttttgtttcagcccttcggtcaaattcctgctctcgaggacggtgatttgacgcttttcggtcagtttacttttgctttgatcaatgatttgacttttttagatttacaagaaacatcattacgccttagtcactttgtattgggataacgatttatcctganatgacaagactgtgatgattagttttgttgctgaaaagtttttggntggtaataatatttgcagaagtcaaagagcnatcacacagtanctangcngagggaatacaagtgagnaaagggtgaaaaagcttatctc

SEQ ID NO: 9486 - DNA, 446 bp, Arabidopsis thaliana
  unsure at all n locations
  Clone ID: LIB24-109-Q1-E1-D12
cctggntctaaaggtccgataatcccgagggtngncccacgcntccgacaatcttcaaagtggttccgttagtgacaggatatgtctctgagatccaaaccttgagcttgaagttgaaaggctttgtngaaaaggacattcccactgcttgcttaaagataataatcgaacaacgggcatgaatttcgacccggagcaggtattccagagctgtacgatgcatccctatcggttgaatccggtcttcccttcttcagaaaaattatatggaaatggcggaagactttgttcgtctggatcagcatgagtttgttcattacggaattgcttttcacgttggtttgttgtanacctcttagcatcccaagaacacaacctanagacagatcgccttcaaacccaactggagtctggaggtacattatgatgtacangtactgttggcg

SEQ ID NO: 9487 - DNA, 468 bp, Arabidopsis thaliana
  unsure at all n locations
  Clone ID: LIB24-109-Q1-E1-D3
cacgcgtccggaaaangcggaagctgagggtcatgaatcggaacctataggtttgaaatgggcacatccgattccgtttcctgagactggttgtgttctagttgctacagagaagctagatggttatagaacatttgcgagaactgttgtgcttcttcttagagcaggtactagacacccacaagaagggccgtttggtgttgttatcaaccgtccacttcataaaaacatcaancatatgaaatcaacgaaaaccgagctcgctactacgttttctgaatgttctttgtactttggtggtcctcttgaagcaagcatgtttttgttgaaaactggtgataaaaccaagatacctgggtttgaagaagtcatgccggggcttaactttggtactcgaaatagtttggatgaagctgcagtgcttgtaaagaanggagttcttaagccacaagagtttagattccttgt

SEQ ID NO: 9488 - DNA, 470 bp, Arabidopsis thaliana
  unsure at all n locations
  Clone ID: LIB24-109-Q1-E1-D6
tccgaanaacgaatctgacatctcggagaaganatatggcgacagagtcatcggaatcggaagaagaaggaaagattagtggaggaaactataagctaatcatagacgacgatctaagagagatgggtaaaancgcagcttggagcgttagctcttgtaagcccggcaatggcgtcaccactctcngcgacgacnatctcgagacttattggcaatcagatgggttacaaccacatttgattaacattcaattccagaagaaagtgaaactgcangttagtggttttgtacgttgactttaagcttgatgagagctatanaccaagtaaaatctctattccganctgggtgatggttttcaaaanttaaagggagattangagtgtgggagcttgtnaaaccaactggttgggtttgcttatctttgtccggaaccgatncacngggaaaacttttgtcaatanatttat

SEQ ID NO: 9489 - DNA, 501 bp, Arabidopsis thaliana
  unsure at all n locations
  Clone ID: LIB24-109-Q1-E1-D7
cggnctagggtcaaagattcccgggtcgacccacgcgtccgcggacgcgtgggcggacgcgtgggttgagaaacctcctctccccaaaaacgacgtagtttcacatttctcgacttcttgaatggagtttnnnnnnnnnnnnnnnnnnnnnnnnnnnnnnnnnnnnnnnnnnnnnnnnnnnnnnnnnnnnnnnnnnnnnnnnnnnnccgtttacgactctcctcctctctctcgtgttctccccaaagcctcgacagaaagtcatgaaaccaccggaactacttccacaggcggtggcggaggattcatggttgttcacggcggtggagggagcaggtttaggttccgtgagtgtctcaagaaccaagcggtgaacataggaggacacgcggtcgatggttgtggtgagtttatgccaagctggaatcgaaggtaccatcgacgctctaaaatgcgccgcttgtggctgtcaccgtaacttccancgcaaggaattacctt

SEQ ID NO: 9490 - DNA, 505 bp, Arabidopsis thaliana
  unsure at all n locations
  Clone ID: LIB24-109-Q1-E1-D8
cttctgnggtctagggtcaaanattcncgggtcgacccacgcgtccggtcaccttttcttctcagctacttcaggcggagaaacantttccgtggtttagtgttgaggacgatcactgtttgtnattcgatggcgaggaagaagatcagagaatatgactccaagagacttctcaaggagcatttgaagcgtcttgctaatattgacctgcanattcgctctgctcangtgacagaatctacggatttcactgagttaaccaaccaggagtcatggctatcgtccacaaagctagttgtgaaaccggatatgctatttgggaaacgcgggaaaagtggtttggtagctcnaaagctggatcttgctgaagttgcanactttgtcaaagcccgcctcggcactgangtcgagatggagggatgtaaagcacctatcantacattcattgtnggagccttttgtgcctcatgatnaagaatactaactctctanagtatctgataga

SEQ ID NO: 9491 - DNA, 493 bp, Arabidopsis thaliana
  unsure at all n locations
  Clone ID: LIB24-109-Q1-E1-E10
caaactgttcgcctgnccgtaaaggtccggaaattcccgggtcgacccacgcgtccgcaantacttcagatatacccattcatcctcatatgagcaggctcagagagcatttcaggctgcacaagctatccatgatttgaatggtgtagcaagtgtccttatacacaatccttaccatattgagtcgctcataactatggcggattactttaagtttgtaggtgagaatgatatggctgcagattccattggaaaatgcttgtacggtttggagcgtgcgtggcatcctatgttcactccgttccagggtaactgccggttggagtttaaccacgatgaaaacaagctgttcttcaagacgcttttcactcacatgagaaacatggacaggcgtggctgtcataggtcagcgttggaggtctgcaaactcttgctttccttggacacgaagtaatcctgtgggcgctttgttttgtgtggactactttgcttt

SEQ ID NO: 9492 - DNA, 435 bp, Arabidopsis thaliana
  Clone ID: LIB24-109-Q1-E1-E11
acaccgattttttcactcctctttttttcacaatgctcggtgttcaaaggattttccaggagcacatcatccgcagaggccggtggtgtattaggagggtctactcgtggttttttaacttgttgatgcagtcttattggaacgagattgaggattgcaaggtgaagatatttgataaactgagtgaaaaagctgaaaaggttttggagattggtattggcacaggtcctaatatgagatactacgctgctcgcaatagtaacgttactctatatgggttggatccaaatcccaaaatgaagaaatacgcacgcaaatccgctaccaaagcaggattgaaacctaaaaactttagattcaagcaaggagtaggagaagctataccattaaaagataactctgtggatgcagttgttgcaacactggttctatgtt

SEQ ID NO: 9493 - DNA, 504 bp, Arabidopsis thaliana
  unsure at all n locations
  Clone ID: LIB24-109-Q1-E1-E4
tcttctgganccgggtccganaaaccgggtngnccacgcgtccgganaggagtgatgagtttgagcaagacgatggtggtggtggtattacaggtgatgatattgttgggacaagagattggtaaagtgtcgtcgactctatacaaagttggggacttggacgcttggggcatcccaattgatgctaaagtctattccaaatggcccaaatctcactctttcaagatcggtgactccctcttgttcttgtacccaccaagcgaagactcactgattcaagtgacgccctccaatttcaagagctgcaacaccaaagacccaatcttgtacatgaacgacggcaactctctcttcaacctcacccaaaacggaaccctatacttcacaagtgcaaaccccggccactgtaccaagtaccanaagctcctaatctccgtcggcacctactccgccgaaacagaggcttgtctccgtcttctgccgccgacgctccctcttaacaaa

SEQ ID NO: 9494 - DNA, 482 bp, Arabidopsis thaliana
  unsure at all n locations
  Clone ID: LIB24-109-Q1-E1-B5
tcccgggtcgncccacgcgtccgaaaacaagtggacgtttttgccggatatggcgcgggaacgagacgagtgcaaagcggtattccatgctggcagattccacgtcatcggtggatatgccactgaggaacaggggcagtttagtaaaacagccgaatcgttcgatgtgtctacgtgggagtggggtccacttacggaggacttcctcgacgacaccggcgataccgttagccctccgacctgcgtcgccggtggggatttgtacgcgtgctggggtggcgatgtgatgatgtttctaaatgacaagtggcaaaaggtgggccaaatccctgctgatgtgtacaatgttacttacgtagcggtgaagcccgggatgctgattgtgatnggnaacgggaaggcgttggctggatacggtgaagccaccgtagggtatatatgttatttaagtagctcacnatgggtaaaaattgggaacacac

SEQ ID NO: 9495 - DNA, 411 bp, Arabidopsis thaliana
  unsure at all n locations
  Clone ID: LIB24-106-Q1-E1-F11
aaaacaagagaagcgtttggattcgacgtttgccttatccgnnnnnnnnnnnnnnnnnnnnnnnnnnnnnnnnnnnnnnnnnnnnnnnnnnnnnnnnnnnnnnnnnnnnnnnnnnnnnnacaatggcgcagatggttgcgatgcccgtagcgcactcgctctcactcatttgcaattgggcaaaatcnantcctctctctcgcaacactcttgccctcccagcttcaaanactcccaataagcagagtctaagcatcagatgtgctcgtgttggtggagtggagattccggctaataaganaattgagtantctcttcaggtacattcatgggattggtcgaantagggctcgtcaggatncntgntgatcttcagatggagaanaagattactanagacatggctgaggg

SEQ ID NO: 9496 - DNA, 433 bp, Arabidopsis thaliana
  Clone ID: LIB24-106-Q1-E1-F12
acgcgtccggtcataccttcctttgagaaggcatgcaaggccatgtttgaccaaatagactcagccttccagaaaggtattgctgagcatacaaatgcagcccagcaacggtttgactctggacactcccagcttgctcatactctaaaggaatcaattacttctgcgtcgtcagttgctcaagccttaagtcgtgagttagccgagacccaaaggaatctcttagctctcgcagctgctggagcaaattctggtgggtctaattccttggttactcaactaagtggcggacctttgggtgctcttcttgaaaaggttgaagcacctatggacccaacaacagaactatcgaggttgatatctgaacggaagtacgaagaatctttcacttcggccctacagagaagcgatgtctctatagtatcatggcttt

SEQ ID NO: 9497 - DNA, 417 bp, Arabidopsis thaliana
  unsure at all n locations
  Clone ID: LIB24-106-Q1-E1-F8
acgcgtgggtttaaagatagggatgagctgaagaaggcggtggactggtgttccattagagggcagcaaaagtgtgtagtacaagagattgagaaggacgagtatacgtttaaatgcatcagatggaaatgcaattggtcgcgtcgggcagattgaatagaagaacatggacttgttaagataactaagtgtagttggtccacatacttgttgttctattaagccggaaaacttcaacttgtaatttgcagcagaagagattgagtgtctgatcatgaatttgcatccttcggtggcgcgttttgggcgtttccacagtccattgaagggtttcaacactgtagacctctgatcatagtggattcaaaagacttgaacggcaagtaccctatgaaattgatgatttcctcangactc

SEQ ID NO: 9498 - DNA, 437 bp, Arabidopsis thaliana
  Clone ID: LIB24-106-Q1-E1-F9
acgcgtccgaaaaaaaatgaggaagagctgaaagattcgcgacgaagcaaaacgacagtgttatctatcgccgccttgttgttctgtttaacaagtgtagaggaaccaaagttgaaaactttgaacttcccattgattttaatgttaattactgatcattcgaatctgaaattgaagcatatgagtgcttaatctgtgagtgttagaagaagtagaagaagatgcagagggttagggtttcatctcaaagagcagttgtgcataagcttggtgattctcagatgacattatctcccaaatttagagtagctgcatcgatacaatcgacattgttcgatagatcatcggaattaagaactgtctcttagaggagagcccttgattcccggtttaccagacgatgttgcgcttaactgtcttttacgggttccagttca

SEQ ID NO: 9499 - DNA, 415 bp, Arabidopsis thaliana
  unsure at all n locations
  Clone ID: LIB24-106-Q1-E1-G10
ggggggaaatctgaaacttgctttgatcatcaagagccctagagacgacgttgagttccnactcganaancacanncagccggcgaaatttggagatgaagcttacgattcctttgtcgattccgatctctgggacttaccgtcaacagatttacaggctctggaagacggagtgaggtccggatttagtatttctatacttgactcatgctcggaggaggttgatttgatnaatttcgacttcgaatccacactgattctgctgctggagaatttagggattgatattancgatgtaggagantgganattcgtcaggtctgtagaagancctgantttggacctgactcntgtgtccntacttgttttatctccgggaagctcttaaatacagatnaaagtttacaagacaac

SEQ ID NO: 9500 - DNA, 440 bp, Arabidopsis thaliana
  Clone ID: LIB24-106-Q1-E1-G12
acgcgtccgccatcaacaacgagagacgacgccttgctatcgccgctcgatctcaccgactatcacgccggaagattcgtaagagacctcctgatagagatatgtcctccatagtttcaatcccggagcttcctcgccggcgggattctgaggaaagcctgcttttagattctcgaatcagtgtagctgaaggagatacatcgaatacagatgtagaaggagacagagatactacttctagtattagaacacagcctccccctcgtaaaggaagaaatcttagtaagcagcagaatcaaattctacggtgttgaattatcaccaagataatgttgctgtagcaatggtgtattttgttcaaggtgttttaggactcgctaaggctcgctgttagtttctatttaaaaagatgacttgcatcttgatcctgctgagctgtt

SEQ ID NO: 9501 - DNA, 431 bp, Arabidopsis thaliana
  unsure at all n locations
  Clone ID: LIB24-106-Q1-E1-G4
ccggtcanagaattcccgggncnacncacgcatctgntnatcttacaagaaagttgtacgggacgcatcagggtcctatgtgatatacgcaccagttgatataatagctatgaacgttgtcctgagtggtggtgatccggattatgtcgctttgttaccatccggattcgctattttgccggatggctctgctannnnnnnnnnnnnnnnnnnnnnnnnnnnnnnnnnnnnnnnnnnnnnnnnnnnnnnnnnnnnnnataatcttgaagtggttactactactgggagttgtggcggttcactactcacagttgcgtttcanatacttgttgactctgttcctaccgctaaactctctctcggttcagttgctacagtcaanagtctgatnaaatgcactgtcgagcggattaaagccggtctggcctgng

SEQ ID NO: 9502 - DNA, 416 bp, Arabidopsis thaliana
  unsure at all n locations
  Clone ID: LIB24-106-Q1-E1-G6
acgcgtgggaatggcgtcacgtttatgtcttctccttctcgttgcgtgtatcgccggagcatttgccggagacgtcatcgaactcaatcgatctcagagggagttcnattatttcgctctatctcttcaatggcctgnaacctattgccgtggaactcgccattgttgctccaaaaacgcttgctgcagangctccgatgctccaactcaattcacanttcangggttatggcctgactataacgatggttcgtggacttcatgttgttatcgatctggactttanaganaaggagatttcaacggttgatggatgngtcttgagaagtactggnctactctcagttgtggttctccatcatcatgcaatggtgggaaagggtcattttgggggccancatgtgggagaaacatgg

SEQ ID NO: 9503 - DNA, 420 bp, Arabidopsis thaliana
  unsure at all n locations
  Clone ID: LIB24-106-Q1-E1-G8
taaaaatcaaaaaggaagagaaaataaaaaagtattcaagatatttaaatgatatgagaagtttaagtgacgtanaagatgttgaaggagaccttgataaattaatgaatggcgttattaagaagaagctcaagattattcccaacgacctcatatggggaaacaattcggatgatgtgtttacagcaatggaggctgcttttatgaaacccgtaattgaagacgtcgatgagcttcttgccacgggggtagatgtgaccatctataatggacaacttgatgttatctgttcaacaagtggaactgaagcatgggttcacaaactcaggtgggaggggctagaagaattcaagaaaatggaaagagagccattattctgcgaaagtgacagagcaacaagangctttaccaaatcataca

SEQ ID NO: 9504 - DNA, 417 bp, Arabidopsis thaliana
  unsure at all n locations
  Clone ID: LIB24-106-Q1-E1-H10
agaactggagtaatggcccaattcaagaatagttttgtcgctgcaacgccatcaantccacaaaaccaagcttatccaaacaagagaccatccctaatgggctttgtctcaggtggtactattggtggagacatgggtanaactcagagtcaagctcccccagtagcacctactcaaaacgcctcatcacacaactccagccagaatcactcacagagttctgagaatcggcctagaganaggaagagaagatctggttgggataattgagtgagccacgttttgcatgatgatagtggnagtgtttttgcacaacantgtcatgaatgttgtntaatttgttttatcctttcccgtttcagccnttgaatanctaaattttccaagagnnnnngaaaaaaaaaggngggccgctct

SEQ ID NO: 9505 - DNA, 415 bp, Arabidopsis thaliana
  unsure at all n locations
  Clone ID: LIB24-106-Q1-E1-H11
catcttctcttccattcaaatctcacattccctcttcacaacaacagcttcgtattcgctcatcttcttcgctttctggcattgttcgtctactcgaggatttcaattttggtcatnnnnnnnnnnnnnnnnnnnnnnnnnnnnnnnnnnnnnnnnnnnnnnnnnnnnnnnnnnnnnnnnnnnnnnnnnnnnaccggcggttcgtatttccgacgggaatctaatcatcaaaaaccggacgattctaaccggtgtaccaagataatgtcatcacgacgtcagcatcggaaagctggaccggtagaaggagtcttcgtcgganctgtatttaacaaggaanagagtaaacacatcgtacccgatcggtacgcttcgcaattcccggtttaagtcttgtttccggtttaagctctgg

SEQ ID NO: 9506 - DNA, 366 bp, Arabidopsis thaliana
  unsure at all n locations
  Clone ID: LIB24-107-Q1-E1-A10
acgcgtccgcggacgcgtgggttcccaaggatccgcattgttgaagttccgggcaagagtcaactcanatcctcatgggactcttgcgaattggaatgtttctggtattaatgatctctgctattggtcaggggttacttgtgttgacggtaaagtgcanattctggatcttagcggatattctttggaaggaacgttagctcctgagcttagccaattgagtgacttaagatctctaatactctctcggaaccatttctccggtggaattccaaaggagtatgggagtttcgaaaacttggaagtcctgngatttganagagaatgatttgaagcggacaaattccacctgagctaagcaaangg

SEQ ID NO: 9507 - DNA, 386 bp, Arabidopsis thaliana
  Clone ID: LIB24-107-Q1-E1-A12
ttcaaataaagatggatgattatgaaacccctcttttgtccaaggactcatcatcatcatcatctgtgattacttcatctttgaaatggatattgaaagttgtaatgtctatgatttttgtgacttgggttgtttttcttatgatgatgtaccctgaacaactcggtgatgatttcctcacatttgtctcctccaagactttcctaggcaccacaggaaccatgttcttgattttcagttgtccgattcttgtcatctctgtcttagcttctctctatctcattatctccggggaagacaaggtcttcactaagaagaagatatcgaaattcccgaagtttaggctatggacattccctgttcttgtggatggaccatttggagtt

SEQ ID NO: 9508 - DNA, 435 bp, Arabidopsis thaliana
  unsure at all n locations
  Clone ID: LIB24-107-Q1-E1-A3
cacgcntcaactctcaggtaancnaactgagtcgagatttggtgacgtgatgaatcatttggtgataatctctgtgttcttgagctcagtattgttgttatatagaggagaatctggaatcacaagtagttttattcgatctgaatggcctgcggttgatataccacttgatcatcatgttttcaaagtcccaaaaggatataatgcaccacaacaagtacacataactcaaggtgattatgatggtaaagctgttatcatctcttgggttacacctgatgaacctggttctagccaagtacattacggtgcggttcacgggaaatatgagtttgttgctcaanggacttaccataactacacgttttacaagtatnagtctgggctttatncatcactgccttgtcctcctgancnttgagcatggataacaaa

SEQ ID NO: 9509 - DNA, 473 bp, Arabidopsis thaliana
  unsure at all n locations
  Clone ID: LIB24-107-Q1-E1-A4
tagctgccagggccnggtcnanaatnccgggccgaccacgcgtccgacgtaatatataanacattactaattattacaagaaacantcagaaacatcatggaggagcaaagcaagaacaagatcagtgaagaagaaaaacaactccatgggagaccaaatcgaccaaagggaggattaattaccatgcccttcatcttcgcgaacganatatgtgaaaaattagcggtggtggggtttcacgcaaacatgataagttacttaacaacacagcttcaccttcccttaaccaaagcagccaacactctcacaaacttcgccgggacatcgagtcttactcctctccttggtgcctttatcgccgactctttcgccggnccgattttggaccatcacttttgcttccatcatctaccaaatcggggatgncgttgcttacgatatcggcantaataccaacgctaanggcaccacc

SEQ ID NO: 9510 - DNA, 428 bp, Arabidopsis thaliana
  unsure at all n locations
  Clone ID: LIB24-106-Q1-E1-E3
agctggaccggtagaaggagtcttcgtcggagctgtatttaacaaggaagagagtaaacacatcgtaccgatcggtacgcttcgcaattcccggtttatgtcttgtttccggtttaagctctggtggatggcccanagaatgggagaaatgggccgagatattccctacgagacgcagttcttattggtcganagcaacgatgggtcccaccttgagtctgacggagctaacggcgtccagtgtaaccagaaagtttacaccgttttcntgccgttaatcgaangatctttccgttcggtgtctccaaggaaacgtnaaccaatgacgttgagctccngtttgggagantgggtgacntggacaccaaaancgtcgtcnttttactcactctctggtatattcacncccggtatgagattcngttttc

SEQ ID NO: 9511 - DNA, 420 bp, Arabidopsis thaliana
  unsure at all n locations
  Clone ID: LIB24-106-Q1-E1-B5
acgcgtgggcggacgcgtgggcggacgcgtgggaagcgatcatgtgaaaacaaggcagacgttgtatcacaagatgagaaagaaagcggcttgcgagcaaccttaaatttgggtcatacctttggccatgccatagaaactggctttggttatggagagtggctccatggagaagctgttgcagctggcacggtaatggcagtggacatgtcatatcgtcttggttggatcgatgaatcgattgttaagagagtgaacaagatcctagtacgggcgaaattgcctacaactccgccagagagcatgaccngtcngcatgttcaagtccataatggcagtggacaanaaaagtggcagatggactgctgangctgattcctctcaaaaaggccgctggggaaactgcntgttcactgggaa

SEQ ID NO: 9512 - DNA, 414 bp, Arabidopsis thaliana
  Clone ID: LIB24-106-Q1-E1-B6
tccaaattatttctaagctaagaaaatctttaaaaataacaaagcttctaaaataataatccgacctaccggattcaaaccattgatctgaagatcatctataaaccagtccttgatctataaactaaaataagggaagaaaaaaacaagagagagaaatagagaatgaagtcttttgcggctaaggtagaagagggagttaaaggaatagacggaaagccgtcggtaggtccggtgtaccggaatcttctgtcggaaaaaggttttcctccgattgattctgagatcaccactgcttgggacattttcagtaaatcagtggagaaattccctgacaataatatgcttggatggcgtcgaattgttgatgagaaggttggaccatatatgtggaaaacgtacaaggaagtatac

SEQ ID NO: 9513 - DNA, 418 bp, Arabidopsis thaliana
  unsure at all n locations
  Clone ID: LIB24-106-Q1-E1-B7
acgcgtccgcttcattgacggtaggagtcaccacttttggcggcgattccttgttctctattttttttgcacaagcaacatttagcttctgcaaactccagttcatctctcaaccctcatatcgccctgttttctcgctctagtaccgcgagctcggacgaaccaggaagcaatccgttaatctagaagcggtgttgagaagatgacgattacatcaaatatctctgtacagaacgataacctcgttgttcaagggaagactatccttaccaaaatccctgacaacattatcctaactccggttaccggtaatggattcgtttccggttcatttataggcgcgacgtttgaacaaagcaagagtcttcatgtgttccccatcggtgtantggagggtcttcggttcangtgctgtttc

SEQ ID NO: 9514 - DNA, 435 bp, Arabidopsis thaliana
  Clone ID: LIB24-106-Q1-E1-C10
acgcgtccgcaattctcttcgaagatcgttttgatccaagagagaattctctgagagattgagaggggaagagaaattcttcgatccatagagagataattctctttgaacatcgatccatagagagatatgcaaaccatctcgaaagcttcttctgccacctccttttttcgatgttctaggaagctatcaagccagccatgtgtgagacagcttaacataagaaagagtcttgtgtgcagagtgatgaagctggtctcttcacctcttaggactttgcgtggtgctggtaaatctatccgagtttcaaagttctgcagtgtctccaatgtctcctcattgcaaattgaactggtgccttgccttaaggataactatgcttatatcttgcatgacgaggatactggtacaagttggggtggttgacccttctga

SEQ ID NO: 9515 - DNA, 407 bp, Arabidopsis thaliana
  unsure at all n locations
  Clone ID: LIB24-106-Q1-E1-C12
tgcttttgttcccttttctcgtctctgcagcttccttgttgtcaacttctggaagcctttgattgattgcaacttctatctccattctcctgctcatttaatattccaattaatagtcaatctcgtcgaatcttcaattttttaaagcttttggtcaaatcaaatgtaatgcaaagacagaccaaaacctcctcttcntcctcttaaagacttcctcncctacaaaatctccaattanntccaacctccccgccaaagacctttcntcaacaatcccaantttccgttcntgnttncngantgaaaaccagatattgnataagccaagggnnngccaaccgggaaagctaaccggatttgncganattcntcaaatcctttccatggaatgtgcttcaaantgtttt

SEQ ID NO: 9516 - DNA, 462 bp, Arabidopsis thaliana
  unsure at all n locations
  Clone ID: LIB24-106-Q1-E1-C3
cntgtacgcccaagaattcccaagtcgacccangcgtccgcttgcaatgtgtagaatgtgtgctgttaatctctttagggtctttcctccgaattatcggtctagttctggtggcgaaaacgatgatgatgaaccgatgtttgaccctgcttggcctcatttgcagattgtgtatgatttgttgcttaagtttatcacttctccgtgtcttgatgctaaagtgggcaaaaaagtatttagatcatgctttcattgtgaggttgcttgacttgtttgattcggaggatccnataagaacgggagtgttttnnnnacgattctgcantcgggtatatgggaagttcatggttcatatggccatttgtacncaagtccatgaagnaatatattctanccggttnggtgtntgagacaccagaaagcanangcggnatncnctnagcttntggaagattttcgggg

SEQ ID NO: 9517 - DNA, 431 bp, Arabidopsis thaliana
  unsure at all n locations
  Clone ID: LIB24-106-Q1-E1-C5
acgcgtccgcttcgtgcacgagctctcattgcaagacactatgcatcagctgggcttaaagagaaggctgagaaagtgctgaaagagatggaaggtgaaagcttggaggaaaatcggcatatgtgcaaggatttgctttccgtctatggctatctccagagggaggatgaagtgcgcagagtttggaagatctgtgaagaaaacccccgttataacgaggtccttgctgcaatcttggcttttggaaagatcgataaagtcaaagatgcagaggcggtttttgagaaggtgttgaagatgtcccatagagtttcttctaatgtttactccgttctcttgagggtttacgtggatcacaagatggtctcagagggtaaggatcttgttaagcagatgtcangacagcgggtgcaatattggggccttaacat

SEQ ID NO: 9518 - DNA, 416 bp, Arabidopsis thaliana
  unsure at all n locations
  Clone ID: LIB24-106-Q1-E1-D10
agatcggagctaaaaagccatctctcgccggaaaatttctcagttttcttattaccttagccacagacaacaagacgacanaggaatctaatcttagccccctttcctctctgtctctctctanatctctgtcnttaggctttgagatatcttcaacacgaagctttttgcttcttttttttatctctttaaaaaattccaagccagatggttcgaatccaatagtagcttcaaaggtcatggatttagtcaggggtttgtgngaggaaacntagaaggaagattttggtgacgaccaacttgtttgggangtgggtatttgntctananncnatagaantcccataactcngtaagctcgctgatttggaaacgangagcttgctaatgngccgtgaaaacgacgaagatnatca

SEQ ID NO: 9519 - DNA, 442 bp, Arabidopsis thaliana
  unsure at all n locations
  Clone ID: LIB24-106-Q1-E1-D11
acgcgtccgagcagctcagctttcgtcttctccgtcaatccaataaaaaaatcagcaaccgttgtttgtttttaagctttttttacaaaagacgtacacgtctctctctctcactccctctttaagatcagaagctcatttcttcgatacgatcaaccattagagatgggttcggcgaacaacgagtacgagtttctgagtgagattgggctgacttctcacaacttgggatcttacgttgctgggcaaatggcaagccaacggacntcttgtttcaanctctcaatcctgctaacaatcaagccaattgctcaagttgtggaagcctctctagaggattacgaagcagggtttgaaaagccttgcnaaggaaagcagctaaaaattagggatgcaaggttaangggctncctaaagaagnaggtgataatcngtcaagaca

SEQ ID NO: 9520 - DNA, 432 bp, Arabidopsis thaliana
  Clone ID: LIB24-106-Q1-E1-D12
acgcgtccgtaaatgctcaaatgttgagacattgcatatagtgaaaactccagaatgttcaaactttggtctgatttatgtagctgagagatgtaagctgctgaggaagcttcatattgatggttggaggactaataggataggtgatgaaggtttactttctgtagccaaacactgtttaaacttgcaagaacttgtgctgattggtgttaatgcaacacatatgagtttagcagccattgcttcaaactgtgagaaactcgaacggttagcactttgcggaagtggaacaataggcgatacagagattgcttgcatcgctaggaaatgtggagcattgaggaaattctgtattaaaggatgtcctgtttcggatcgagggattgaggcgctcgctgttggttgtcctaatctggttaaattgaaggtgaa

SEQ ID NO: 9521 - DNA, 410 bp, Arabidopsis thaliana
  unsure at all n locations
  Clone ID: LIB24-106-Q1-E1-D2
cccaanaattcccaaggtcgacccacgccgtccgagcgggggatttattcaaccgatgagtttcgtatgttcnccgttcaaagatccgcccatgttctcgaagcatattcccatgactgggactgaatgtccatttgcacacccaggtgagaatgcaaggagaagagacccgaggaagtttcactatacgtgtgttccatgcccggattttaagaaaggatcctgtaagcaaggtgatatgtgtgaatatgctcatggggtttttgaatgctggctacaccctgctcagtacagaacacgattgtgcaaggacggaatgggttgcaaccgaagggtttgcttctttgctcacgcaaatgaggagttgcgtcccttgtacccttccacagggatctggattgccatctccn

SEQ ID NO: 9522 - DNA, 423 bp, Arabidopsis thaliana
  unsure at all n locations
  Clone ID: LIB24-106-Q1-E1-D3
agcgctaaaattatctccgagcattctcaagttgggtgattcggtacggattactgatttgggagagaaaaaccctagattggaattagattctgggttcttgggctaaaggtttcttcatctccttcgaatcatccttttagggagcaagacgatgagtagaaaccctttcctggatcctactcttcaagaaattcttcaagtgattaaacccacacgagcagatagggatacgaggatcacagtcattgatcagttgcgtgacgtcttacaatccgtagaatgtttaagaggtgctactgttcaaccatttggatcctttgtgtcaaatctcttcacacgatggggagacttagatatctctgttgacttantcagcggttcctccatcctgttcactggaaaagaancagaaacaaacct

SEQ ID NO: 9523 - DNA, 401 bp, Arabidopsis thaliana
  unsure at all n locations
  Clone ID: LIB24-106-Q1-E1-D4
ttttccatttcctcgacaaactcctttttttctctcacttttctcgaattcttttttttttttttctctcaacgaaacataaatcctctgttttggtttaagagatggagatagaagcaagcagacaacaaaccaccgtaccggtttcagtcggcggtgggaattttccggttggtgggttaagtccgttgagtgaagctatatggagagagaaagctccaacggagtttgtcggagacgtgtcagcgaggcttacgtggcaagatctgacggtgatggtgactatgggagatggtgagactcaaaatgttcttgaaggtcttaccggttacgctgaaccggggatctctcacggctctcaatgggcccttccggctcccgggaaaatctaactatgcncg

SEQ ID NO: 9524 - DNA, 412 bp, Arabidopsis thaliana
  Clone ID: LIB24-106-Q1-E1-D8
acatcatcaatggaggaagtagcgagagaagaagtagagatcgacaaggatctgcggaggaaaataaagaagacggtgaagaagatcttggaaagttcgaacttgtacaagataacagagattaaggcgcgagaagaagcttcacttaaattggatcttgatctgtctcaagatccttacaaggtaatcgtgaaagaagaagttgaaaatttcctcgaagaagcagtaaagttgatcggcaataaacttgcgatgcttcccaagagaatagagtcgacgagtatttaagatattattaatctaaaagtatgtcgatccaaaattggatagttttaatgtaatttcctcaaagattgtctctgtttgtttttttaatagtgtttctggttcatggaagctaatgtttttgtcc

SEQ ID NO: 9525 - DNA, 380 bp, Arabidopsis thaliana
  unsure at all n locations
  Clone ID: LIB24-106-Q1-E1-E10
aggacagctttttagggaactgtttgaagaagaactatatatatggctcatacataaagtgactgaagagggtaaaggtccaaacatattggatgaagatggacagggtattttacactttgttgcagcgcttgggtatgactgggccattaaaccggtgttagcaacanggagttaacattaactccgttatgccaatggctggtctgcccttcattgggctgccgtttaatggcanggaaagaaactgtccccgtgcctgtcccctccaagtnctgatgccggggcattaacggatncatctccanaacttccantggggtnaaacaacnactgatttggcttacncnaatggacncnggggaanttccggaattcct

SEQ ID NO: 9526 - DNA, 381 bp, Arabidopsis thaliana
  unsure at all n locations
  Clone ID: LIB24-106-Q1-E1-B4
acgcgtgggcggacgcgtgggcgagtacattcaccggaaaatggatgccggagctgaaattgatgtggttcggccggtggaggcagattcggcggcggaaattagtccggaacaagaccacgaaggaagatcggagccttcgtcgttgaaccaaggggagattttaaaaacacttgctacggtggagaaggattcgcaggcaatcgcggagagcttttcgtctctctttgtttccctccgatcaactctttctgaggctactgggtaactcgnttgatcacatggcttgctttgggagaggcagcgggacggcttcaggaaaatgctctagatgcaagccaccaaagggaaccggtacatcaactcttgcctcanattaaa

SEQ ID NO: 9527 - DNA, 407 bp, Arabidopsis thaliana
  unsure at all n locations
  Clone ID: LIB24-105-Q1-E1-E5
acgcgtccggcgacgtcaatgtcatcgatgaagaaggttctgaggctccgagactggtcgagagagcattcgatttgccggcggcggttgaccgtcgtggctccggtggttctccgtcggttcaagattttggtcaccatgctggttactanaaactccctaactcaaaagcagcaaggatgttctactttttcttcgagtcaaggacgaacaaagccgatccagtggtgatttggctaaccggtggaccaggttgcagtagtgaactggctctgttctacgagaacggaccgttcaccgtctctaacaactcatctctttcntggaacgaatttggttgggacaangcatcaaatctaatctacgtggaccanccnggtncgaactggtttcaagttaanacatcc

SEQ ID NO: 9528 - DNA, 410 bp, Arabidopsis thaliana
  unsure at all n locations
  Clone ID: LIB24-105-Q1-E1-E6
aaaagtcgaatatcccaaattcgatccgttttccggcgataatctccgatctagatccgatggcgaaagaaccagttcgtgtgctcgttactggagctgcangacaaatcggatatgctcttgtacctatgattgcaaggggtatcatgcttggtgctgaccaacctgttatcctccacatgttggatattcctccagctgctgaagctttgaacggtgttaagatggaattgatccatgcngctttcccccttcttaaaggtgttgttgccacaaactgatgccgttgagggatgtactggantcaatgttgctgntaanggttnggtggtttccccgatgaannnaaggtatgggaaaacgaaggatgtnaangtccaagaatgtttccaanctacaaagtctcaagg

SEQ ID NO: 9529 - DNA, 450 bp, Arabidopsis thaliana
  unsure at all n locations
  Clone ID: LIB24-105-Q1-E1-E7
acgcgtccgcccacgcgtccgttcttcttccaccagagacaattccatcatcatcatcaaatagacaaaggaagaattcaatttcccctttctttattggcgcgaagatctttcacagaatcaatcaccaacgaaaaatcgagaatggatgtttgcttgagctantcatataatatggatgatgagattgctaagttcatcagaagagtgaatccaccaagggttgtgatcgataacgaagtctgcaaagatgttactgtcattaaggtggatagtgcgaataaacatgggatacttctggaggttgttcaagttttgactgagcttaatctgactattaagaaagcttatatctcctctgaanggtggctgggttttatgggatgttttccantgttantgatcaanattgggaacaagagtttancggangaaaattggttccttgaa

SEQ ID NO: 9530 - DNA, 488 bp, Arabidopsis thaliana
  unsure at all n locations
  Clone ID: LIB24-105-Q1-E1-F10
ngaactgttacgccggcatttaccgggccaagaattcccggaatcgacccacgcgtccgagcagcttctcctcttctcagaaattagggttccgtctcaaattacgagcagatctcgtactctctgatgtctgaagatccggagtaccgttgcttcattggtgggcttgcttggacaacgtctgatcgtggtctcagagatgcctttgagaagtatggtcacctcgttgaggccaaggtggttcttgacaagttttctggtcgctcccgtggttttggattcatcactttcgatnagaaaaaagctatggatgaagctattgcagcantgaatggaatggatttggatgggcgaactatcactgttgataaagctcancctcatcagggtggtgcaggcagagataatgatggtgaccgtggtcgagaccgtggatatgatcgtgatcgcagtctccctctgggtgggcgaggtggtggagattgcnt

SEQ ID NO: 9531 - DNA, 381 bp, Arabidopsis thaliana
  unsure at all n locations
  Clone ID: LIB24-105-Q1-E1-F7
aaatctccagagccgttttctcttcttcttcttcctcctcgcgccgtctctgaaactccatcatcgtatcaatcaaattgcttcctcctccaaattgaaaaacaatggaattggattcggagaacaaattgttgaacacgggtttggttatagtggcgacacttgttatagccaaactcatcttctctttcttcacttctgattctaagaagaagcgtcttcctcctactcttaaagcttggcctcnattggttggaagtcttatcaaattcttgaaaggacctattantatgcttacgagaggaataccctaagcttggaagtgtgtttactgttaatcttgttcacaagnnagantacttttcttattggtcntgaagt

SEQ ID NO: 9532 - DNA, 425 bp, Arabidopsis thaliana
  unsure at all n locations
  Clone ID: LIB24-105-Q1-E1-G5
acgcgtccgcgacaagataacaaaacgctttcacacgatcggataaaatggcggagaagagctttaagtacatcatcctcggcggcggcgtctctgccggatacgcagctaaggagtttgccaatcaaggggttcaaccangagaattggctgttatctcgaaagaggcggtggctccatatgaacgccctgcacttancaaggggtatttgtttcctgaaggggctgctagacttccaggtttccattgctgtgttggtantggtggacnaaaaactgcttcctgaatcctacangcaganaggaattgagttgatacnaagcacaganntagtgaanagcctgatctctctgccancgagtcttgtcagtgcaacctggggatgtcttcanggtatcaananngctcataaantccaacctgg

SEQ ID NO: 9533 - DNA, 414 bp, Arabidopsis thaliana
  unsure at all n locations
  Clone ID: LIB24-105-Q1-E1-G8
agcgccgattctccttcaaaaacttttcctaagtcgtcactttttacgatggcagaaacgaagaagatgatcatccttaagagctccgacggtgaatccttcgagatcgaggaagccgtcgctgttaagtcccagacgattaagcacatgattgaggacgactgtgccgataacggaattccacttcccaatgtcaccggagccatcctcgccaaggttattgagtattgcaatgaagcacgttgaagccgctgctgaagctggtggagacaaggatttctatggttccgctgagaacgacgagcttaagaattgggacagcgaattcgtcaaagtcgatcagcctactctcttcgatctcatcttggctgcgaactatttgaanatcgggtggacttcttgaccntacgtgca

SEQ ID NO: 9534 - DNA, 440 bp, Arabidopsis thaliana
  unsure at all n locations
  Clone ID: LIB24-105-Q1-E1-H3
agaacataatacaaagagatatttaacgttttgaaatggaggctgttagattcgccgtcgccgtcgttcttgtattttgctacgttacgtcgtcnaatgctcagatgacttcaccaccgancggcggtgcaggaggagacgcacactcactgccgtgtattcagaaactgatgccgtgtcacccgtatcttcacttggcgactccgccgccggcgacgtgttgcatgccgttgaatganatcgtangccaaagacgccacgtgtcnctgcgctgtctttaacaacgttgatatgctcanatcgcttaacctcactaaagaaaacgcnctcgatctccccaaaggcttgtgggcgccaaaanngacnntgtcacanngcaaaaccangcgccgggtactaantccgncttnaanaanngccggggaagcccggaagactcc

SEQ ID NO: 9535 - DNA, 432 bp, Arabidopsis thaliana
  unsure at all n locations
  Clone ID: LIB24-106-Q1-E1-A1
taggataatggccgccgccatggttagttccgccggtgggttactggcaatgctcaacgaaccccatccttccttgaaacttcacgctctctcatatctcatcagattggttgaccaattttggcccgagatctccactagtgtcccaatcatagagagcttatacgaagatgaagagtttgatcagcatcaaagacagcttgctgccttgttggcctccaaggttttctattacttgggtgagcttaacgattccttgtcctatgcccttggagctggatccttgtttgatgtgtcagaggattctgattatattcatactcttctatccaaagcaatagatgagtatgctattctcagatcaaangcagtcgagtcaagttgaggtggtggaaaattgacccgagaattggtgggcaattgttngaaacc

SEQ ID NO: 9536 - DNA, 488 bp, Arabidopsis thaliana
  unsure at all n locations
  Clone ID: LIB24-106-Q1-E1-A10
cnaacttttacgccgccaggtaccggtcaaagaattcccgggtcgacccacgcgtccgcccacgcgtccgctgctgcgaaggagatcctacggcgaccagtggcggcaacaataaggctaaccgttccggcgggaggagcgaggccagccccaccggtaggtccggcgctaggtcagtacaggcttaacctgatggctttctgcaaagacttcaacgctaggactcaaaagtacaaaccagacactccgatggccgtgacgataacngcgttcaaggacaactctttcgaattcaccgtcaantctccgacggtgtcgtggtacatcaagaaagcaactggagtcgataaaggaagcacacgcccgggtcattgtcggtgacnacgctatccggtgaaacacgtgtacgagattgcgaaggtgaagcanncggatccgttttgtcaatatatgccgttgggaatccgatttgcaaaatncatcattgg

SEQ ID NO: 9537 - DNA, 399 bp, Arabidopsis thaliana
  unsure at all n locations
  Clone ID: LIB24-106-Q1-E1-A7
agctggaccggtagaaggagtcttcgtcggagctgtatttaacaaggaagagagtaaacacatcgtaccgatcggtacgcttcgcaattcccggtttatgtcttgtttccggtttaagctctggtggatggcccagagaatgggagaaatgggccgagatattccctacgagacgcagttcttattggtcgagagcaacgatgggtcccaccttgagtctgacggagctaacggcgtcgagtgtaaccaagaaagtttacaccgttttcttgccgttaatcgaaggatctttccgttcgtgtctccaaggaaacgttaacgatgangttgagctctgtttggagagtggtgacgtggacactaaacggtcgtcgtttactcactcnccggtataatcaa

SEQ ID NO: 9538 - DNA, 367 bp, Arabidopsis thaliana
  unsure at all n locations
  Clone ID: LIB24-106-Q1-E1-A8
gggttgatgtactgtggtcacaagaagaaccatcgaaggaacattttgggattcttagctcttgaagttattttggtggtggctatcattcttattacgctctttgcgcttaanggtgattttgttaagcaaacatttgttggtgtgatttgcgatgtcttcaacattgctatgtatggangctccttcattggncattattaaagtggtaaaaacanngagtgttgaatacatgccattcttgttgtcnttggtcctgtttcgttaatgctggaaatttggacnacntactcggctcatcttcaagatcgattactacgtcctcgcaagtaatgngattggnacctttttngcaactttcccagtt

SEQ ID NO: 9539 - DNA, 443 bp, Arabidopsis thaliana
  unsure at all n locations
  Clone ID: LIB24-106-Q1-E1-B10
acgcgtccgcactaaaattagtcgttaaacaaaaagcttgcgaagaagaagacgaagaanatggcggatttgattttgagttcctcctctgcacaatcctctctccttcacgtcagacctaatcactatctactcaatacctccactgcttcaccgatccgaagtgtcagattccaaaattccaacggttttcatcctctgggcgttcgcatctggtcaccgacgacttcctctcggtgcagtagttccctctgactccactaagacgatcaccagtagcgattactggctaactgcgttgattcgcggagtcaaagctgttgaagtcgagcctacgatngattacnnnnnnnnnnnnnnnnnnnnnnnnnnnnnnnnnnnnnnnnnnnnnnnnnnnnnnnnnnnngnaatgacgacnggacgggaaagacgattaaggagng

SEQ ID NO: 9540 - DNA, 450 bp, Arabidopsis thaliana
  unsure at all n locations
  Clone ID: LIB24-106-Q1-E1-B11
acgcgtccgagcagctcagctttcgtcttctccgtcaatccaataaaaaaatcagcaaccgttgtttgtttttaagctttttttacaaaagacgtacacgtctctctctctcactccctctttaagatcagaagctcatttcttcgatacgatcaaccattaagagatgggttcggcgaacaacgagtacgagtttctgagtgagattgggctgacttctcacaacttgggatcttacgttgctggcaaatggcaagccaacggacctcttgtttcaactctcaatcntgcnaacaagcagccaattgctcaagttgtgggaagcttctctagaggattacgangcaangttttgaaagcttgccanggaaancaagctnnnnatatggatgcaggttacgggctcctangaganggtgatatcgtcagacagattggggatgcactaag

SEQ ID NO: 9541 - DNA, 410 bp, Arabidopsis thaliana
  unsure at all n locations
  Clone ID: LIB24-106-Q1-E1-B12
gaaaaggcttcacgcccgatttcttttttccccagaaaaaggcttcacttccgttcgttgttcttcatcggtctgcgccgcctcgcacatcgtttcacctttctcagaatctctcttcccgtcgattagtttcctcaagagtgaatccaacccagatttttcagattttaatcggaattattcgggatctaatgctcgcgtcgagtttatcgctagaaaaccctaatttcggaggatctgtcacttttattatcagaagcttgttgttgtaattacggattangtatgtcctgatcgttattgttctttgtttgcaggttgcgatttgttgaaaaccttgatttagactatgaagtctctnaatgatcttcctgcgcccaantcaaccactaccacgtattatgatcatt

SEQ ID NO: 9542 - DNA, 404 bp, Arabidopsis thaliana
  unsure at all n locations
  Clone ID: LIB24-105-Q1-E1-D7
tgtattgcaatggatggttaccaaaatgccacttctctccttgttgctatgttgaacaacataatgtgatgtgttctaaaagcatgtgccttgatttcagatttaacatcagggaagcaagttcactccctctgccacaaatttgtatctttcttccacttatgttantgatggggctagattttggaagcgagtgcatgtgaattccataaagctcgggtttgaatcanatggtttgatacaaagtgggctgattgatatgtacaggaagtataggttggtgataaatgcaagagaaggtgttcagagctatggagggtcagacagttttaactgttgggaggctaatggtttcgaagtattatgcagaatggttttcgcattgaggacatcaaanctgagaa

SEQ ID NO: 9543 - DNA, 507 bp, Arabidopsis thaliana
  unsure at all n locations
  Clone ID: LIB24-103-Q1-E1-A4
tgcccgacccgngtccggaaattaacgggtcgacccacgcgtccgcataaaancagaattaaatttgtggtagatacttgtttttaaattcatatagctcaaaaaagttgtcatttttaatgttggttttctggtggcgatgctcttaattacccaattccgtacgatttatgatcataagtcaacttttgagatttgggtttgtgaaattttcctgaataaaattatgggtttagggtttttatgatcaatttcctgtaaagtagcgatttttttctcccggggattttggtgaggaacaggatagaaagtcntggttttgttctgtttattgtgtttgtttttgggttctgatcaatgaagaagatnattgggagtccnggaacaatgantgggttgatactgagactagggcaatgtgcaactgctgcnngcttccactgggtgttatggggttccctcttacgacttttccaattanaacngctttccggcttcttaancccc

SEQ ID NO: 9544 - DNA, 528 bp, Arabidopsis thaliana
  unsure at all n locations
  Clone ID: LIB24-103-Q1-E1-A7
gnttttgcccggcccgtagcggtancggaaattcccggggtcgacccacgcgtccgcccacgcgtccgaaaaaacatgaaaatcctctcactttcacttctcttgctcttggccgctacggtctcggcatccgttccagggctcatcgaactcgtcgattcgaaaaccatctttgggaacgtagccgaactcttagagaaagagaaactttccatcaactacgccaactgcagaaagctggcaccttggtgttgagacctctaacatcatagacttcnacacggtgcccgcaaattgcaaagactatgttgaagactacttgatcacttccaaacagtaccaatacgactccaaaancntgtgcanagaggcntanttctatgccaaaggacntgccctaaaagaacgacaccgtcaatgtttggatcnttgacctanatgataccctcctctctngtatcccnacgangcanaatntggggtacnggaacagagaagagcggacccggggggcgtactgggttgngg

SEQ ID NO: 9545 - DNA, 510 bp, Arabidopsis thaliana
  unsure at all n locations
  Clone ID: LIB24-103-Q1-E1-B3
ggttcgcttggcccgtaccggtccggaaattcacgggtcgacccacgcgtccgcccacgcgtccggatttccgatcattgctatgtcgtccggatttcttcgtcaaggccgtccggtttgtcaaccggcttcagcccgacatccatatgcctcttgtgatgtggtttgtcggttactttcccggaatcttctggctcctttagcagaattgtccggtgtcgccgtcctccatcggttggttcctctaccaacggtggttggctcttgtctagcttctccgtcgtccctctccggcggtttaggctancttttggccggatttcttttccggttttgttttangttctcgttttcnatagatccagtttgattttgctcctttgtgttcnaactctaaaagggctcaattccttgaacctccttngtttaaagggcctcaattngtttttcaagctaancaatttcantnatntacgaacaanntnacantttgtggattgggggtttncc

SEQ ID NO: 9546 - DNA, 506 bp, Arabidopsis thaliana
  unsure at all n locations
  Clone ID: LIB24-103-Q1-E1-B4
cnttggcccggccgggtccggaaatcacgggtcgacccacgcgtccgatcnatcggagattcggagtagagaaaaatgtcaggattcgtcgggattttggtatcggatccatggttacagaaccaattcacgcaagtggagcttcggagtttgaaatctcacttcacgagcatgaagagagagagcgggaagctaacagtatcagacctcgcgtcaaggatggggaaatcaaaagtagttggagatcagaatctaagcaacgaagaacgagcgactttgatccaaaattttcatccgaatttgaatgatgaagtcgatttcgagttttacttaaggatttatctgaatcttcaagcgcatgtaaacgcaataatcggaagcggtgttaaaaactcatctgcgtttcttaaagcagctacaacaactttgttgcatactattagtgattctgagaaatcttcttatgttgctcatatcaataattatctcnctggagatgagtttct

SEQ ID NO: 9547 - DNA, 434 bp, Arabidopsis thaliana
  unsure at all n locations
  Clone ID: LIB24-103-Q1-E1-B5
tttagtgatcgcagacaggactcctctggcacatttgaattgccacttgattttgttatagacaagtgtctactgcaggaaatacatcttcaatataactttgtcaagtaagctagctatcaagttgctcgaagaaggatttggcttgcaagaacatctgctagctctacgtagatatcatttcatggaactagcagactgggcagatgtatttgtagtgtcactttggcatncataaatggcttgttacanaggcagatanaanantnccagaantnnaagggttccaaaatnaacaaattcagagatcatcatgtgaacgagacatttgtanggacaggataatttttgtacaaanggacaaggcacattcatatcccacaaccaaaccatngggagntgcnttcctttngatttcccaaaggttgggtanc

SEQ ID NO: 9548 - DNA, 415 bp, Arabidopsis thaliana
  unsure at all n locations
  Clone ID: LIB24-103-Q1-E1-B7
cttcagatgatgaacctgcacccaagaaggccgttgctgctactaacggaactgttgcaaagaagtctaaggatgactcatcatcatctgatgatgattcttcagacgaggaagttgctgtcaccaagaagcccgcagctgctgctaaaaatggctctgtaaaggccaagaaagagagttcgtctgaagatgattcatcttctgaagacgaacctgcgaagaaacctgctgctaagattgccangccagctgctaaggattcttcatcctctgatgatgactcanatgaggattccgaggatganaaacctgctaccaanaangcagctcctgctgctgccaangctgcaagcagctcagattcatcaagatgaagattctgatgaaggnaagtgaagatgagaaanctgccaag

SEQ ID NO: 9549 - DNA, 514 bp, Arabidopsis thaliana
  unsure at all n locations
  Clone ID: LIB24-103-Q1-E1-C1
ggccctncccgggtccggaaatcaacggggtcgacccacgcgttccgagcaactcaaagtttacctcaancccctgtggaaaactatactgcataaaaancttactggggttttncngggataaagattccaantttcgaaaaaatgcagcttttagcaataaagataattcataggaagttttgaggctagatttgttctttcaatcctgaagtttctttctttttgtttgtctgaaatgaagcaagtgacagctttggttgctgtgaagaatgaattgaatgatccgtacaaagttcttganaattgggatgtgaattcagttgatccttgtanctgggagaatggttcttgcactgatngctaatgtcncttcactggatcttcctanccaaagcttgtctggtacattgtcccctaagaatcggnaacctcacctaattacaatcagtggggttgccaaaacaatgcnaatcacgggtccaattccgggaaaccaattgggaaggtnggg

SEQ ID NO: 9550 - DNA, 469 bp, Arabidopsis thaliana
  unsure at all n locations
  Clone ID: LIB24-103-Q1-E1-C2
acgcgtccgatttttttctcccagacccagttatcgagaagcttctctcgaatatgttttctgacgccggcggaggcgcaaatcgtcggcgtcgggacttagctcttccgatcaatttgctttggttacttcttatgcttttgtttacaacttctgtccgctactcgaaaactctgtttcaaccctctcgaatcatttctccttcaccggttttcaacggcggccaaaaaaccagctacggaggaagacgatgtggtccggcgtttgccctcctgttccancctcttctcgcaaattcttcgccaaaatctttcttttccagcgatgcaatccctcaatcagaagcttttatcatctctccgccttttatttacaagatctagatctgtttcaaccaccccaagagaatactcacaccggaattcgntgatggcaagaagatgtctccttgggacgtcagatgcgccat

SEQ ID NO: 9551 - DNA, 467 bp, Arabidopsis thaliana
  unsure at all n locations
  Clone ID: LIB24-103-Q1-E1-C6
acgcgtccggtgatgatccgtcnacganttcggtggcnantggntcttcnggtcangaaacagcgtctacctctgagtatggggcagggtcaagttctagctgtancnaanatttgactagagatanatggttnaagggaagcaagcagagtagagttattgctgctacagggatggtttcttctgtgattgcgaaggattacttgaagccaaaccctgtgcnaaaagagtttcctatganggnacggtctaaagagctctgtgggaacgggaaaanagctgcggatagagagaaagctgaacagttcttaagttcaatgcttggaagatgattgcgagcttagcatggctgttgttagagatgttttgtgtcaatgtggctatgatgtcgacatggctttgaatgtcttgcttgacatgtcttcttcancaactgatgattcattgagttggtaaatgtttcggca

SEQ ID NO: 9552 - DNA, 478 bp, Arabidopsis thaliana
  unsure at all n locations
  Clone ID: LIB24-103-Q1-E1-D5
acgcgtccgcaagtagtgaagtatcacgactttgatttatttctgtatatctaagatgcaggcggtatcagttgatgaaaccaaaaacacggtggtgctacgggcggagcacaagaatgaagaangccggaaatctgttgataagttcgaagtgaagacacgtaatccggagacgatcaagagcgttgagcggaagcttatggagaaaggtgttcaacggatggatcgtcatccttccgatgggattcctctcaggcgaccaccatcgaagtcaggtcacggcgggaagtacacgtgggaaggacctgatcggatggaggattacgagatgcagccggatccancggcgatggatgaaggagattctaattacgaanaagaacaagttaanaanagtggtgatgaccntggccgnttaancntgtgaaaaggagaagttnaaggtggctaaaggangctccggctggtgtttccaagg

SEQ ID NO: 9553 - DNA, 496 bp, Arabidopsis thaliana
  unsure at all n locations
  Clone ID: LIB24-103-Q1-E1-D8
taccggtaaganattcccgggtngacccacgcgtccgcaaaaaccatctcacaaactcatcaaacctctttctcatctcatcttcaagccatctccgatcatcatcagacaatggcagcagctatggcaacagcaaccaagtgcatgtctctaaacccatctcctcctaaactccaaaaccaaaccaaatccaaaccattcatctccctaccaancccaccaaaaccaaacgtctctctcgccgtcacaagcaccgccctagccggagccgtcttctcttccctcagctactctgagccagctttagccatccancagatcgctcagctccgctgcagcaaacgccagtngcgacaaccgtggcttagctcttctccttcccatngtcccaagccattgcatggggtcctttacaanatcctccagccagctattaagcaggtcaaacacgatgcgtgagaagtaaaggnatcgttgttgggtcgangtattggtg

SEQ ID NO: 9554 - DNA, 512 bp, Arabidopsis thaliana
  unsure at all n locations
  Clone ID: LIB24-103-Q1-E1-E6
gtttngccggccctaccggtancggaattcccgggtcgncccacgcgtccggtttgattgaaagagataaaaacttcatttgccagcaagattggcacaaaactcgagcagaggacatctgtaggagttgtgtcgtggtcgtctttggttaagagaagaagaaatgggttcaatgttcagtggaaaccgaatgagcaaggaagagatggaggtggtggtgaacaaggctaaagagatcgtctctgcttatcccgttgttgtcttcagcaagacatactgtggttattgccagagggtgaagcagttactgacgcagctaggagcaacttttaaagtacttgagctcgatgaaatgagtgatggaggtgagatccaatcagctttatcaagagtggactggacagaccacagttccaaacgtcttcatcaaaggaaaccacatcggtggatgcgatagagtgatggagaccaacaagcaaggcaagccttgtgcctctacntactgaagcctg

SEQ ID NO: 9555 - DNA, 419 bp, Arabidopsis thaliana
  unsure at all n locations
  Clone ID: LIB24-103-Q1-E1-E7
tgtagagcttctggaagaacagttagagaagcttcgtcatgaaatgatctcccctatagaaagtgatggttatgttctagctcttagcaaagagcttgaaacattgaagctggagaatctatctttgagaaacgatatagaaatgcttaagtcagaacttgacagtgttaaagataccggtgaacgtgtggttgtgttggaaaaggagtgctccggtttggaatcttctgtaaaggatttgggatcnaagttatcggtttctcaagaagatgtctcgcagntttctactcttaaaatcgaatgcactgatctaaggggcgaaaggtagagactctacagctgttggttagatagagctagcaaacaagcagggcaagcagttatagngttacaacaagaaccaaggtttaagaaataan

SEQ ID NO: 9556 - DNA, 496 bp, Arabidopsis thaliana
  unsure at all n locations
  Clone ID: LIB24-103-Q1-E1-A2
ggttccttggccctnccggtccggaattcacgggtcgacccacgcgtccgcggacgcgtgggttgaggttctctttctcgtttgtgtgatctgtctgacaagctagaagaatcgtagatcgtgatcggattgatttgataattatggtgaaggagacggagttttacgatgtcctcggcgttagccccaccgctacggaggctgagattaagaaagcttattacatcaaggcacgccaagtgcatccagataaaaaccctaatgatcctcaggctgctcataatttccaggtattgggagaggcctaccaagtgctaagtgatccagggcaacgtcaggcctatgacacatctgggaagtcagggatttcaactgagatcattgatcctgcggctatatttgctatgctttttgggagtgaactctttgaagaatacatagggcaacttgctatggcatcaatggcttcacttgatatccttcactgaaggggatn

SEQ ID NO: 9557 - DNA, 466 bp, Arabidopsis thaliana
  unsure at all n locations
  Clone ID: LIB24-102-Q1-E1-F1
ctccanaattccaaggtcgacccacncgtccgagtgagagagaacgtagngaggatctccgngtaagcgttgtaagctgtttctctcatgaagatgtaacgttcctggaggaacacgggaagagcatcggcgcaagtgtagaacattgttgacattgcgaatgcgaagaaccctaaccgctcttgaactccttttggtgaattatccaatcgccangaatacggtggctaagatgaatccggtgacgattacggtggctaatcgcattccgagtagctccggttgtcgtcgggagttgaggattgagcgtctggtgagagttttgatttcgattcagaacggattcgcgaatgcagggacgggtaacgttccgccaccgtggtttatgacnggnggaaccaccggcccccaccggnnactaagttttcctccggccntaaggctggcggaaaatcgcntccttcaa

SEQ ID NO: 9558 - DNA, 460 bp, Arabidopsis thaliana
  unsure at all n locations
  Clone ID: LIB24-102-Q1-E1-F12
aggtaccgntcaaagaattcccgggncgacccacgcgtccnttgtgcttcctctcgtcctcgtcgccgtcgtcagagagaaaacgattaaagctggtggtatggggagagataaagaagataaggacanagatggagttcggttgttccatggatganagctccggttgacgtcagcaatgtcgaaaactgcgctctcgatacnctcccttgccttaatcccaagttgaagaangcattggtgaanatgggcatancttcactatttccantgnaagttgcacgtttggcacngaaactatagagccaggtggttttgagagagacatctgtgttaactctccaacagggaagtgganagacnctttcntacgcnttaccaattgtgcanctcccttgnatctcatccttgngcgatgccttcgtganttaaggcgnattggccaacaacgtgatgtngg

SEQ ID NO: 9559 - DNA, 403 bp, Arabidopsis thaliana
  unsure at all n locations
  Clone ID: LIB24-102-Q1-E1-F7
nnnnnnnnnnnnnnnnnnnnnnnnnnnnnnnnnnnnnnnnnnatacgcagattccatccaatttagggttaggacttcccctaatttggaaacctagtcctgtttcctgatctgttttccggatcggacgagagacgaattaacgaaaatgggcgcgaattctattccgacggacgcaaccattgatcttgatgagcanatctcgcagctcatgcagtgcaagcctctctcggagcaacaggttagagcattatgcnagaaagccaaggagatcttaatggatgaagagcantgttcagcctgtganaagccctggtgacaatctgcggtgntattcatnggnnagttccatgatcttgcagnagcttttccgtatnnggggaaatgtgcctggatnccaatt

SEQ ID NO: 9560 - DNA, 410 bp, Arabidopsis thaliana
  unsure at all n locations
  Clone ID: LIB24-102-Q1-E1-G2
acgcgtccgaaaaagagtaacggtgaggtttggatctaatcgaatcaacgatggaggttgcttttccatcttcgccgccggtgaaatgcatcgccgatgaaagattaacagagatctccatggatttcaccaaattaggattcccatannaagatgaagaaattaaaaaattggagagatcgtggagtaagctcnnnnnnnnnnnnnnnnnnnnnnnnnnnnnnnnnnnnnnnnnnnnnnngttttcgtttgcttgtgtaaacggagaaggatctccaattaccgctgangaagcttttgaangatggtcagatccgtcctgtgtttccnctgnttaaccgtgatcttctcntcgaagtacgaaaaccnagagattncaangacgacaacgtttcggtcaccgngcgaga

SEQ ID NO: 9561 - DNA, 397 bp, Arabidopsis thaliana
  unsure at all n locations
  Clone ID: LIB24-102-Q1-E1-G4
gtangaaactgagtctctgcttaaaaatgtggagcaagatcaaccattatcaatgcaaagtgccctaattccatccaggaatgctttggtatcagttgaccttttaagccatcctgattctgatgttagggtttcagttgtctcttgcttaaccgagattgtgaggattactgccccagaaaccccttacagtgatgatctaatgaaggagatcttcaggttgacaatagaagctttcgagaaattagctgatgcctcctctcgggngttataagaaagccgagtttgttcttgataatgttgcaaaggtcaaatcgtgtttggtgatgttggacttggaatgctatgacctcatcctacaaatgtntcggaacttcttcaaaattcatnaagatct

SEQ ID NO: 9562 - DNA, 418 bp, Arabidopsis thaliana
  unsure at all n locations
  Clone ID: LIB24-102-Q1-E1-G5
acgcgtccggaagcatcttggagcaactcttgtgcttcctgacattagaggaagcaaacctggtgatgaaatgaaatttgaagatatctatgatgtggataaactcattaaaaccttggaaagtgtcgtcaaagttgtaagaaaattgccgagccacgtatctctaagagatattgccattgtcaaagttcctacccgagttgcagaagattacatcaaggaacatattgatcccatcttcaaatcaaaagggaacataagggttacaacctatttcccttctgtgaatttgaggaaatcttcgcaaggtgctgaaaccgaccctgtcncttgtttggcaatgtttggttccttgggcattgcaacctgcagtgaatgaattggtgaggtcgatgattcagccgtttgaaggacacat

SEQ ID NO: 9563 - DNA, 399 bp, Arabidopsis thaliana
  unsure at all n locations
  Clone ID: LIB24-102-Q1-E1-H11
tgactcctgctatttcaaaccccttcagggtttatagaatttttaggaatccgagagagaaaaattcagggaagctcatttccctttctcaattcctagacttggcaaaaacttacacttctctctccggtgttttgatcagtgtagagaatgcagcatacttgagagagaagcaagggcttgacgtggttcaagcggttctcgatacactcaccgaagctggttacagcaatggaacaaccacaacaaaggtcatgattcagtctacgaacagctcggttctagttgacttcaagaagcagagcaagtacgagactgtgtacaaaattgaagaaaccattggtaatattcgtgactcgggcatncgaagacataangaagttcgctaacgctgttgtc

SEQ ID NO: 9564 - DNA, 442 bp, Arabidopsis thaliana
  unsure at all n locations
  Clone ID: LIB24-102-Q1-E1-H12
aaattcccgggccgacccacgcgtccacccacgcgtccgcatccgtgtatacaattacaatacaatggacaaggtcaaagtatttgaggctcattcggattacattaggtgtgtagctgtccatccgacccttccatatgtgctgtcatcttctgatgatatgctcataaagctttgggactgggaaaacggttgggcttgtactcagatatttgagggacattcgcactatgtgatgcaagtggtatttaatccaaaagataccaacacttttgccagtgcttcgcttgatcgtaccataaagatatggaatcttggttccccagacccaaattttacactggatgctcatcagaaaggagtcaactgtgtagattatttcacagggggtgataaaccctatctaattaccggctctgatgatcatactgctaangtatgg

SEQ ID NO: 9565 - DNA, 469 bp, Arabidopsis thaliana
  unsure at all n locations
  Clone ID: LIB24-102-Q1-E1-H3
tacgcctccanaaattccanggtcnacccacgcgtccgcncacgcgtccgctcacttggcaccgttgcagagagagaaccaaacatggtaaacaaagacgaccggattagaccggttcatgaagccgacggtgaaccgctttttgagactaggagaagaaccggtagagtgattgcgtaccggtttttctcagcctcggttttcgtgtgtatctgtttgatttggttctacagaattggtgagattggtgataaccgtaccgttttagatcgattaatctggtttgttatgtttattgtggagatttggttcggtttatattgggtagtcacacaatcttcccggtggaatccggtttggcgatttcccttctccgatagactctctcggagatacggaagcgaccttccgangctcgacgtcntcgtttgcacggcggatccggtgaatgaaccnccgttgttggggg

SEQ ID NO: 9566 - DNA, 454 bp, Arabidopsis thaliana
  unsure at all n locations
  Clone ID: LIB24-102-Q1-E1-H4
tacggcctcangaattcccaaggtcnacccacgcgtccganagacgcgtgggttccattgagaatattcgtctcttctttctttcgttctcaattcccatcccatattccccatggcagcttctttttgcggcagccggagatacgatgttttcccgagcttcagtaaggtagatgtccgcaggtcattcctcgcgcatcttctcaaggagctcgaccgcagattaatcaatacgttcacagatcatggtatggagagaaacctcccaatcgacgctgaacttttatcggcgatagcagaatcgaggatctcaatagtcatcttctctaaaaactatgcttcttccacgtggtgcttagatgaattggttgaagatccacacgtgttataaggaattggctcaaatagtgggttccggttttctttaacgtacatccttcgcangttaaaaaac

SEQ ID NO: 9567 - DNA, 468 bp, Arabidopsis thaliana
  unsure at all n locations
  Clone ID: LIB24-102-Q1-E1-H5
cgccgnccgtgaacggtccanaaattcccgggtcnacccacncgtccgancacgcgtccgccggaagcgaaaccatccgctcagctcggtctctgatatccgctcgacacgcaggagaaagactcctgagaagctggggtgggggaacgggctgggcagtggaagacgctaaagacaagatctggaaacttctagaagaatacgaagtangaggagtaatatcagaggcttgtcgatgcatacgcgatctaggaatgccgttttttaaccacgaggtggttaagaaggctttggtaatggcaatggataagaagaacgatcggatgcttaatctcttgcaggagtgttttgctgaanggatcattactactaaccaaatgacaaaagggtttggtcgagtcaaagatagtcttgatgacttatctttggnatattccanatgcagaagagaaatttaactcgtaatgn

SEQ ID NO: 9568 - DNA, 458 bp, Arabidopsis thaliana
  unsure at all n locations
  Clone ID: LIB24-102-Q1-E1-H6
ggtcatnagtccccgggtccacccaancgtccgactacgttgtgtatctcatttccgaatacggaaagattctcagaaaactctacgaactgggtgcaagacgagttttggtaactggaactggtgcaatgggatgtgctcccgcggagctggctcagcatanccgcaatggcgantgctatggcgccctccaaacagcagccgctttgttcaatccgcaattagttgatttgatcgcatcagtcaatgctgaaattggtcaagacgtgtttgtagcagccaatgcctatcaaatgaacatggattatctatctaatcctgaacaatttgggtttgtgacatcnaaggtggcatgttgtggncaaggaccgtacaatggcatnggactatgcanaccantcgcgaanttgtgtcngaatanatacctanatgccgttttggggatgcgttttatccga

SEQ ID NO: 9569 - DNA, 456 bp, Arabidopsis thaliana
  unsure at all n locations
  Clone ID: LIB24-102-Q1-E1-H8
cgccccganacggtccaagacccccgggtcgacccaagcgtccgctttaaattatttgagcagccgcagcganaggaagttttcttcaactgcgacggagcgtgaagttcacgctccggcggtactacctaagaactgatccanctttgaaaagaaaaatgttgcctaagaatgctattgagaagatccaagcaaatgtgagcaagccttgcttctggaagtctctctctccangacaaacttggnaatctaaatccatgaggataattccggaagactttgtgagaagaacgcgtggtgcttttgngcacagagtggtgtttagtgttcgttgggaaaactcctggcaactctggctggagcgagagaagaacgagctgtttatgataagaagaagattgggnatgagtttgtggacgacaatcatttangtccaaatgaatatctgtncacaaa

SEQ ID NO: 9570 - DNA, 422 bp, Arabidopsis thaliana
  unsure at all n locations
  Clone ID: LIB24-102-Q1-E1-H9
acgcgtccngtttcgattcccacatttgaatcaaattcaatcgggatggagaattctgatattgacatggtaatcatacctgatactccagatagatcggtacaccatagagaggttaagagaaggccacattctccagtagcaccattaagatatcaaagagaggaataccgtaatcatcatcttcacggaagagccagaccagtccctgaaattggggacaaccgggaaagttctgatacacgaactgagagtggacatcgccctcgtgcttctgtaggcaatgctttgtttaggagaactgttgttgagaaggataaagggaaatccatctccactgatccatgtgcgcctcgtgtagagaaaaatccggttttaaatctgaatcagcgtaacggacatgttcatgttgctgcatcgag

SEQ ID NO: 9571 - DNA, 411 bp, Arabidopsis thaliana
  unsure at all n locations
  Clone ID: LIB24-102-Q1-E1-E8
acncgtccgcccacgcgtccgcccacgcgtccgcttttttgcactgatttgtgcttcgcttacacattgctagtagattccccgatctgggttttttcttattcgtgttcatcatacnaaagtttggtgcttttttgtgtttgtgtagatagagagagagatttaaggaaggaatcatggcagggggtggagctccagcanccaaagcagaccaaccanaaccacatcctcctaaanatcaacttcccaacatttcttantgcancancagtcctcctccttggcctgaagctattcttcttggnttccaacattaccttgtgatgcttgggacaacngtgctcatactactgntcttggtccccaggatgggacgtggntatnaanagaaggcaaangggatcaagaccg

SEQ ID NO: 9572 - DNA, 443 bp, Arabidopsis thaliana
  unsure at all n locations
  Clone ID: LIB24-101-Q1-E1-H4
cacgcgtccggatttgaggactctctgtcttttcttatttcggagaatgttctttttctagggttttgaaattctaagagattttctgaagaagaaaacaaaatgggtcctcttgtcgaagcgactgagttctcgaaagaacaagcactcaccgacgctgcagaaaatctccttaaacctcatttctcaactgatgcgactctcagtcttctcgaggtaatggagtctctgctcgccactgtcgagcaagatctttcttcatcagtacaaaaggccctacatccaccaatgagggctttggtatccgctgatcttttgagaaaccctgattctgatgttagggtttctgttgtctcttgcttgaccgaaattatgaggattactgctcctgangggcccttacaacgatgaggcaaatgaaggacatcntccaagtgacaata

SEQ ID NO: 9573 - DNA, 413 bp, Arabidopsis thaliana
  unsure at all n locations
  Clone ID: LIB24-102-Q1-E1-B10
gaagaaaaatggcgggattcaccatgagcttgaacttgcttctactagtagcaatggtagctacaaacatcctctcactctaccacctctcctccaccacaaatttcttccaatccaccgtcaaatcctcacaatcctctgttcccacagttcccgatcacctcctccgtcagctccacactatccgcgccgctattaaccacctcanaacncaccaacnaagacaagtcaanttcaanctcgacctcacgcgccgccgtctcctcctcctccntcctccanngcgcctaaangagcttttaatctactctaangctctcanctatagcttcaagcttgtcataactaccctggaccttcttcanggagtanntgaactacacncctttctctctttgtccttctgagnccga

SEQ ID NO: 9574 - DNA, 410 bp, Arabidopsis thaliana
  unsure at all n locations
  Clone ID: LIB24-102-Q1-E1-B11
cgtaccggtcanaaattcccgggccgacccacgcgtccaacgaaggtgaggaatgtgtaaacacactgcctccagtttgtgcagacaaagaacccgtttatgaaggtgagtcacttcttggnaaaagggttgagaaggatgttggtgattgttcttctgaagggagggctacggatgggctcacagcagaagaaggtgaactaatcaggaactttatgaagaatagtgcaagtcaattaaccttttgtggnctcnttcgcttgcaaaaaggcctcaaagaacntgaactctgtgtttttttccggaaacaatcatttcngcaccangttcaantatgaaggtganctttatcttttggctacanatcaaangttacctgaatcagcctggatttggtttgggaaanacta

SEQ ID NO: 9575 - DNA, 440 bp, Arabidopsis thaliana
  unsure at all n locations
  Clone ID: LIB24-102-Q1-E1-B4
ttgcactctttcaagttcacaaggtgaatctgatcttactttctggtccacctctaagcacttttaaatggagaagaaaggccagcatggtacatatgaatcaatgatgactcatcatccgatcctctgtatcattgctttatctgtacttttcatagcaatcgacccctttcacatgactccaatcgggggtcgtgagttcaaacccgtgaagcatgaggttgctccatataaggaagtcatgggaagctggcctanagacaaccttagtcgactggggtaatcatggggaaactgganttcgtggaccaagtctttggtccaagagtcattanagtttgataagtttaggtcgtgggnccatacanaaggttggctgagggaanagtggttagatgggntgggtgnangcnaatcngggtggggaaganaattttccg

SEQ ID NO: 9576 - DNA, 424 bp, Arabidopsis thaliana
  unsure at all n locations
  Clone ID: LIB24-102-Q1-E1-B8
acgcgtccgcccacgcgtccggccatatccgagcaacaacggcgttagcaaagcttctcgttgccagcgacaaccgcctctccgtcactctcatcgtcattccttcacgagtctccgacgacgcttcttcccccgtctacacgaactccgaagaccgtctccgctacatcctcctccccgcccgagatcaaactactgatctcgtatcttacatcgacagccagaaaccacaagtaagagccgtcgtgtccaaggtcgctggagatgtttcaacacgttcagacncacggctagctgggattgtcgtagacatgttctgcacgtccatgataganatcgccgatgagtttaactcncgggntatatcgtctacacgtgcaangcttcttancctcgggctacagttncacgttcaagtctcctt

SEQ ID NO: 9577 - DNA, 415 bp, Arabidopsis thaliana
  unsure at all n locations
  Clone ID: LIB24-102-Q1-E1-C11
ctgtcttgtctaaagaaaaaagagagaggaagaaatggagacttttgaggaaagctctgatttggatgttatacagaaacatctatttgaagacttgatgatccctgatggtttcattgaagattttgtctttgatgatactgcttttgtctccggactctggtctctagaaccctttaacccagttccgaaactggaacctagttcacctgttcttgatccagattcctatgtccaacagattctgcaaatggannnnnnnnnnnnnnnnnnnnnnnnnnnnnnnnnnnnnnntgaggttgagactgtctcaaaccggaaaaaancaaagaggtttgaaagaaacgagacattacagaggcgtgangaaggaggccatgggggaaatttgcagcagagattcgagatccggcaa

SEQ ID NO: 9578 - DNA, 398 bp, Arabidopsis thaliana
  unsure at all n locations
  Clone ID: LIB24-102-Q1-E1-C2
acgcgtgggtcctaatgttcgttctgctctgggttcgccattagccaaatctatttactccattgatggtgtatttcgaagttttctttgggtcagattttgtcactgtaactaagtcagatgatgtatcatgggatattctcaagcctgagatatttgcagcagtcatggntttctattcttctggncagcctttgtttctcgactcacaagctgctgcngccaaggatactgccatcagcgaggatgactctgaaacagtagcaatgatcanngaactcttagaannacgcatcagaccatcagttcangatgatgggtgngggacattgagtattgtgggtttgatccggaaagcgggtatactgaagcngacgatgcaaggagctttgtantgg

SEQ ID NO: 9579 - DNA, 439 bp, Arabidopsis thaliana
  unsure at all n locations
  Clone ID: LIB24-102-Q1-E1-D2
aacaaaaggaagctctctgttcaaatcaaaaagagagatcgtacgcaaaagtttccgatatggctcgctcgtttggagcaaacagcactgttgtgcttgcgatcatcttcttcggatgtttatttgcgttttccactgcaaaagaagaggctacgaagttaggatcagttattgggatagatcttggtaccacttactcttgtgttggtgtttacaagaatggtcatgttgaaattattgccaatgaccaangaaaccgtattacaccttcatgggttggttttantgactctgaaaggctcattggtgangctgctaangaatcaggcggctgttaatcctgaagaggactgtccttccgaacgttaaaganattgatcgggcggaanaattttgacggaccaaggacggntcaaaaaagggcagggaaacctngtac

SEQ ID NO: 9580 - DNA, 488 bp, Arabidopsis thaliana
  unsure at all n locations
  Clone ID: LIB24-102-Q1-E1-D3
cgtttacgccgntcgtacggcctccanaaattccaaggtcnacccacgcgtccgnnagacgcgtgggtacgaattctgtatcgcaaaaacatcaaatctcgaaattgagctccttttctggaactagggattgctttccgctccttgcgctaagtctacttggtttctgattcgtacaatttgatgaaatgcgagtgctcancgagattgcggagtcaccgttcgtgatttctcggctaagccctgattcgacggccaccggagggtttatcggcggatgggtcgggaagtgtcatgggtttcttcataacacggttttggttttagcatctattcnattcgtcgcttacttagcgtacgaggcgaagaagagcttgtccaagttgtctaatcggaagatcttacnttntgantgcctaagtanggtnttctttgggcttggttagcntgcctcaaatcttgctttggtgttgcccttcanggcatgg

SEQ ID NO: 9581 - DNA, 368 bp, Arabidopsis thaliana
  unsure at all n locations
  Clone ID: LIB24-102-Q1-E1-D6
tacatcgcctcatcctaaagattaccctgacgagttgctgtatttgatgagagatagacataatatctgcaatctcatccatcttcctgcacaatctggtaatagcagaatactagaacaaatgcgtagaggttacaccagagaagcttatttggatcttgttaaaaagattcggagtattataccagatgtggctataaccagcgactttataactggcttctgtggagaaactgaagaagagcatcaagaaaccctaagcttggtgagagcagttggatacgatatggcgtatatgtttgcatacagcatgagaganaagacacatgcncatcgcaactacacagacgacgtnccagaggatgtga

SEQ ID NO: 9582 - DNA, 455 bp, Arabidopsis thaliana
  unsure at all n locations
  Clone ID: LIB24-102-Q1-E1-E1
ttccaaggtcgacccncgcgtccggcaatggtnacgattctatcaactcctctctctccaagacttacatttctctgtgaaacaaaactgtcattatctcggagcaatcgctcggtatgttgttcattgagtgaagaaccanaagaccaatgcttgagtcggagaagtcttgtttatgttttanntgcttcgccgtgtttgttgttaccagcgttgtcttcatctgcgaagactaaatcaaagagtccttaggatgagagacggttactaggaacagaacaagaggatacagagagagaacantgctcctgacgagtttcctaactttgttagacaangttttganngttaaggtatnagcttctgataaatacatcaaaggctgnttctnggnctcatataancgggatttcaatgttgggcaaagtgantttcccaaaagatgggtcaacaan

SEQ ID NO: 9583 - DNA, 456 bp, Arabidopsis thaliana
  unsure at all n locations
  Clone ID: LIB24-102-Q1-E1-E2
attcccgggtcnacccacgcgtccgaagacttttctctctgtttattttttttagggttttcgtaagaacagagcaaaaaacatgtttggaagaggaccttcaaggaagagcgataacacaaagttctacgagatccttggtgttcctaagaccgcagcaccagaagatctcaagaaagcttataagaaagccgctatcaaaaaccatcctgataagggtggtgatcccgaaaagtttaaagagttagcacaggcttatgaagttttaagtgatcctgagaagcgtgagatctatgatcaatatggggaagatgcactcaaggaaggaatgggtggtggaggtggtggacacgatccatttgatatcttctcttccttctttgggtagtgggtggacacccattcggaagtcatagccggggaangangcagaaggcgtggtgaagatgtttgntc

SEQ ID NO: 9584 - DNA, 419 bp, Arabidopsis thaliana
  unsure at all n locations
  Clone ID: LIB24-102-Q1-E1-E4
taaaagatgagcgacggagacgacgctgctagacgccgtaccgcggcggtgactgattaccggaagaagctccttcatcacaaggagctcgaatcccgtgtccgaacagctagggagaatttaagagcagctaagaaggaattcaacaaaactgaggatgatttgaagtctcttcaaagcgttggccagattattggagaagtactacgtcctcttgataacgagcgattgattgttaaggcaagtagtggccctcgttatgtggtgggttgtcgtagcaaggtggacaaggaaaagcttacttctggaactcgagttgtcctgggatatgactacgctgacaattatgcgagcccttcctcgtgaagttgatcctgttgtttataacatgttgcatgaagatccaaggcaancattaa

SEQ ID NO: 9585 - DNA, 413 bp, Arabidopsis thaliana
  unsure at all n locations
  Clone ID: LIB24-102-Q1-E1-E7
acgcgtccgcgtcaatcgaaatcccaaagatcagcgatggtgactctaaacgcttcttctcctctcacgaccaagtcgttcctcccctaccgtcacgctcctcgccgtccaatctctttctcccctgtcttcgccgttcattcgactgaccccaagaaatctacccaatcagcctccgcttcggttaaatggagtctagagagttggaagtcgaagaaagctttgcaattgccggattatcctgatcagaaggatgttgattcggttctacagacgctttcttcttttcctcctatagttttcgctggtgaggctangaaactagaggataagcttggtcaagcggctatgggtcaagcctttatgcttcaaggtggtgattgtgctgaagagtttcaaaggaatttaacgcc

SEQ ID NO: 9586 - DNA, 467 bp, Arabidopsis thaliana
  unsure at all n locations
  Clone ID: LIB24-101-Q1-E1-G8
tncccgccaggtaccggtcaaagaattcccgggncgacccacgcgtccngcggctacctttttgtctgcctagagaatttgttcgtttctttcttttactctcttcagacaaaacccacgagatacagaaaaagaggacaagagagaatcgtccatggaagaagacactggtatcgacgaagctaagacatacacggtggagaagagcgagaaagtggagccggagaaggacggactgagtcaattcangagacgaggaaaaatcacttggtgcggatatggaatgatttacatgatgagactgtgcgagaaaccctaggcaaggatcaggttcaacgtgttcgagaaaattcctctgtgggaacnaaatgttgaangatgtannatnantgaatgagacggatagcgtcaaggaaactgtngtnagtgcgantgtggcnggttgangaattgagagaaaagtcngt

SEQ ID NO: 9587 - DNA, 492 bp, Arabidopsis thaliana
  unsure at all n locations
  Clone ID: LIB24-097-Q1-E1-D1
ctgtttgcctggncctaccggtnncganatcccgggtagacccacgcgtccgcacancttcagtttgaggctgcttgggcattgacaaacattgcttctgggacttcagagaatacaaaggtggtcattgaacatggtgctgttccgatttttgttcaactattggcttctcagagtgatgatgtccgtgagcaggctgtgtgggcattagggaatgttgctggtgattctccacggtgcagagatcttgtccttggtcaaggagctttgataccattactctctcagttgaatgagcatgctaaactctcgatgctgagaaatgctacttggaccctctctaatttctgcaggggcaagccacagcctccctttgaccaggtccgtccagcactcccagcccttgaacgcctgattcattcgactgatgangaagtgttaacggatgcatgttgggctctctcttacctttccgatggcacaaatgacaaa

SEQ ID NO: 9588 - DNA, 502 bp, Arabidopsis thaliana
  unsure at all n locations
  Clone ID: LIB24-097-Q1-E1-D12
ccactgttcgcctanccgtaccggtccggaaattcccggggtctcttcctatactcactgcttcgtcgtcgtcgtcgttgattcgtagctccggtgatgtgcgagaatgtatcgattttagagcgtcggagaaagtctcgaagtttcaatttcatgtaaccctaagcccctttgcctttcgtggtttctcaatatgtcgcgaatttgctgttcgtggagcttatgggattagattttgctcacgagaagatgtttccggtgttggaaatggaggaatcgtggcggaggaggagattgagctattgaacaagccgaatcctttaccaaaatcagaaaatgaggagagtggtaaagcagacgatgacgcgattctggagccgtttttgaaattctttaaaccgggaagaagaaggggaaggaattgaatcggaagtttcggatgagacggatagagtcagcgtagagtattaagattctaaaccaaggtgattttgtggttggt

SEQ ID NO: 9589 - DNA, 422 bp, Arabidopsis thaliana
  Clone ID: LIB24-097-Q1-E1-D5
acgcgtccggtcacattgccggttttatttgtgaagctattcagggagttggagggatcgtggaactagcaccgggatatttgtcagcggcttacgatactgttaagaaagctggtggattgttcattgcggatgaagttcagtctggtttcgcacgtactggtaacttttggggatttgaggcacacaatgttgtccctgacatagtaaccatggcaaagggaattgggaatgggtttcctttgggagctgttgtgacaactccagagatagcaggagtgttgactcgccgtagctacttcaatacatttggtggaaattctgtgtctactacagctggtctcgctgttctgaatgtgattgagaaagagaagcttcaggaaaatgctgcaatggttggattctatctgaaaagaaaaact

SEQ ID NO: 9590 - DNA, 423 bp, Arabidopsis thaliana
  Clone ID: LIB24-097-Q1-E1-D6
taaggctgcctagatcagattcagatggagagcacaagaatcttgttcagatttacggtccaaagatcaaatacgagcgtggatcttccgtggcattcaatatcagggatttgaaaagtggaatggttcatccagagatagtgcagaaactagctgaaagagaaggcatttctctaggaattggttacctaagtcacataaagatcatcgataatcgaagcgaagattcaagttcttggaaaccggtggatcgagaaggaagaaacaatgggttcataagagttgaggttgtcacagcttctcttgggttcttgacaaactttgaagatgtttacagattatggaatttcgtggccaagttcttgagtccaggttttgctaaacaggggacactcccaacagttattgaagaggatgattcgt

SEQ ID NO: 9591 - DNA, 489 bp, Arabidopsis thaliana
  unsure at all n locations
  Clone ID: LIB24-097-Q1-E1-D8
aagcctttcgcctggcccgnaacggtccggaattcccgggtcgacccacgcgtccgctgacggttacgctagatctcgcggtgttggtgcgtgcgtcgttacgttcaccgtcggtggattgagtgttctgaatgcgatcgccggtgcttacagtgagaatctgcctctgatttgcatcgtcggtggtccaaactccaacgattacggtaccaataggattcttcatcatacaattggtttacctgatttcactcaagagcttaggtgttttcaagctgttacttgttttcaagctgtgattaataacttagaagaggctcatgaacttatcgatactgcgatttcaactgctttgaaagaaagcaaacctgtttatatcagtatcagctgtaatttaccggcgattcctcttccgacgtttagtcgtcatcctgttccgttcatgcttccgatgaaggttagcaatcagattggtttagatgcggcggt

SEQ ID NO: 9592 - DNA, 454 bp, Arabidopsis thaliana
  Clone ID: LIB24-097-Q1-E1-E11
acgcgtccgattttatttttctttcttcttcttcaattattatgacactcccgtgttcctaatcttttctcttattcttctctttcttctcatcttacaaaatcttgcaaatcaattttaatgaagagagagcacaaccaccgtgaatcatccgccggagaaggtgggagttcatcaatgacgacggtgattaaagaagaagctgccggagttgacgagcttttggttgttttaggttacaaagttcgatcatccgacatggctgacgtggcacacaagcttgaacagttagagatggttcttggtgatggaatctcgaatctttctgatgaaactgttcattacaatccttctgatctctctggttgggtcgaaagcatgctctcggatcttgacccgacccggattcaagaaaagcctgactcagagtacgatcttagagctattcctgggc

SEQ ID NO: 9593 - DNA, 477 bp, Arabidopsis thaliana
  unsure at all n locations
  Clone ID: LIB24-097-Q1-E1-E2
taccggtgccgaaatcccgggtagacccacgcgtccgcggacgcgtgggccggaatttagagtctttattgagtttgatcgattttgggattataagtttcgcaaaattcatgttttttacattaagtctattcgatttcagctgtattgggaatttaagtttttctgtggcttgattctattgagacagttttgtagaagatcgtccagctccgcttgatgctacttctgatccaccgtctctcttcgacggaaccacaaggttgtacacaagctacgtttgcccatttgctcaacgagtttggatcactcgaaacttcaagggtttgcaagaaaagattaaacttgttcctttggatctgggaatangcctgcttggtacaaggagaaagtatatccaagagaacaaggtgccagcgcttgagcacaatggaaaaatcattggggaaagtccggatttgattaaataacctgata

SEQ ID NO: 9594 - DNA, 478 bp, Arabidopsis thaliana
  unsure at all n locations
  Clone ID: LIB24-097-Q1-E1-E3
gggtcgaactggactgcntgggtttacgggnccgatatcncgggaagncccacgcgtccgcccaagcgtccggnaatggggatgatgctcctactgtttataccgtctttctccctctccttgaaggccagttcagagctgttctgcaaggaaatgagaagaatgagattgagatttgttttgagagtggagataaggcggtggaaactagccagggaactcaccttgtttatgttcatgctggaaccaatccctttgaagttatcaganaatccgtaaaggctgtggagagacacatgcagacatttcatcatcgtgagaagaagaagcttccttctttcctagactggtttggctggtgcacatgggacgctttctacacatatgtgactgccgagggtgttgatnaaggccttaaaagtctttctgaaggaggtacccctccgaagtttctgatcatagaccatggttggcaaca

SEQ ID NO: 9595 - DNA, 446 bp, Arabidopsis thaliana
  Clone ID: LIB24-097-Q1-E1-E5
acgcgtccgaattagatggtgtcaaacagcaaatggagctctttttctcctctcgaccaatgataaaaccatcaagttttggaaggttcaagacaagaagatcaagaaaatctgtgatatgaattcagatccttcaagaactgtaggaaacggaaccgttgcaagctcgagcaattcaaacattacaaactcatgccttgtgaatggaggagtatctgaagtgaacaactccttatgtaatgacttctcattgccagcaggaggcatctcttcgctgcgattaccaagtggtaactagccatgagtcgagccctgtggctaagatgtcgaagagtatatgctcatgctcatgattatcatattaattcaatctcaaataacagcgacggcgaaacatttatttctgctgatgatttgcgaattaatctttggaatctggaaattag

SEQ ID NO: 9596 - DNA, 455 bp, Arabidopsis thaliana
  unsure at all n locations
  Clone ID: LIB24-097-Q1-E1-E9
acgcgtccggtcnagatgaatcattggatgagttaaaatcaatcattgcctcggagctttcagatcctggttggcctgcagctctagtcaatgatgttttgcttactttgcatgcccgctttaaggcaactccagatatggctgttattcttctcgaaattgccagaatatttgccaccaaagttccagggaaaattgacgctgatgtcttacagctgctatggaagacatgtcttgttggagctggtcctgacgggaaacacacagctctggaagcagtcacgatagtactcgatctaccacctccacaaccggggtccatggctggactgacatcaattgatagggtctctgcatcagatcctaagtcagctctggcgctgcagaaattggtgcaagcagcagtatggttccttggagaaaatgcaaactacgccgcatcaagaatatgcatg

SEQ ID NO: 9597 - DNA, 493 bp, Arabidopsis thaliana
  unsure at all n locations
  Clone ID: LIB24-097-Q1-E1-F2
ntggttgcctggccttacggtgccgaatcccgggtagacccacgcgtccgcggacgcgtgggcggacgcgtggggcgtggaagagaccaggacaactccgatttcggtttagaacgtgagctaggtcccgatcaaaacctcgatccgaaacctactacgacggatctagctcttaacgacgaagaagtttcgaaaccagttggatctggtttagaaacgacttcgttttggtctctatatgatgatctctacacagatactattcccgctcctcctcccgaagattcaatcgacgatcaagaagaagaaatcgaaacgagtgagatcagacctggacgaagatcttccggtaaggaaacgaaggaagatttgtcgatctctaggatctcatttagcttccggtggctggaaccttagccgtgaacaaggcaacaagcttctcgcgagtagattccgangtgattgtctctacatttgcaattggcctgggtgt

SEQ ID NO: 9598 - DNA, 402 bp, Arabidopsis thaliana
  Clone ID: LIB24-097-Q1-E1-F5
cagctataaagataaacttccagagcttggtgaaggagcagcaaccctagttttcaatccctaaaggtgaagtttttgttcttctttttctttgattctactcttttttcgtcacaatagcgcagtagcgatctgggttggcgtttttattgacggattttggtgggtttgggttcgtgttagattttactttcacagattcaggtatgtatttgatcttatttagctttggtaatactcaaaccaactagtatttgatcttaattaggtgacgttgatattttgtgtgttgtgggtcaatcatccactctaggttgatctgcgtctatgtttagtcctaattttgaagaatcattctaattgctgatgtttatttatgacaattttatgtcttacttcgaa

SEQ ID NO: 9599 - DNA, 501 bp, Arabidopsis thaliana
  unsure at all n locations
  Clone ID: LIB24-097-Q1-E1-F7
tggaaacngctttcgcctgggcccgtaacggtccggaattcccgggtcgacccacgcgtccgctcaagctagacgagaagctcaaatccggctacaaagctacaacaactgggaaattcactgaggctctccgtctcttcctttctatcctgcacaccatccctctagtggtagtcgagacaagaagagaagtggatgaggtcaaggaattaatcgttatcgttaaagaatatgtccttggtcttcaaatggagctcaagaggagagagatgaaagatgatccggtgaggcagcaagagctcgctgcttacttcactcactgcaacctccaaacacctcacttacggcttgcgctgcttagtgcaatgggtgtctgctacaaggcaaagaacctcgccactgcttctaatttcgccagaagactgttggaaacaagcccagttgatagccaagccaagatggctagacaagttgtgcaaagccgctgaacgtaacatgacc

SEQ ID NO: 9600 - DNA, 460 bp, Arabidopsis thaliana
  Clone ID: LIB24-097-Q1-E1-C9
acgcgtccgggagaaagaaaaaaatctgggtttttgggagctgattaggttttgttccttcaatctctgggaattttcgctatgcactcagattcaggcgaagcgaccgctgatggcgataaagcttctacagaaaacagcaaaaaacggaagcttaagactcctatgcaagttatggcgcttgagaatttctacaatgagcataagtatccgactgaagaaatgaagggcaagttagcagaggaagttggattaactgagaagcaagtttcaggttggttctgccatagaaggttaaaagacaaacgtcatgtaaaagaagatgggaatgccattgggagccaagatcggtcaagcgttgttcttcaggatcgtgggaagtgggcttcgacaggattcatgtgggtagtacaaagcaaacgggattaattggaaccccaagcctagggaagttgaaaag

SEQ ID NO: 9601 - DNA, 500 bp, Arabidopsis thaliana
  unsure at all n locations
  Clone ID: LIB24-097-Q1-E1-A2
aactgtttcgcctggccntaccggtgcccganatcccgggangacccacgcgtccggaaatggatgctgacctgactttggagaatgatccgtctaagggcagcaaaacacanggaaggtccagcctacgctggtggactggtcttggagccaaagagaggcttatatgacaaatangtcttgcttctggatttcaatagtctttacccttctattatacaggaatanaatatctgttttacgactataccacgatcagaagatggagttcctcntttaccttcgagtcagacacctgnaattcttccaaagttgatggaacatttggtcagtataaggaaaagcgtcaaattaangatgannaangaaacangtctcaagtactgggagcttgacattcnacagcaggcattgaagctcacagccaatagtatgtatggctgtctggggttttctaattcaagattctatgctaagcctttagcagagctcanaacact

SEQ ID NO: 9602 - DNA, 428 bp, Arabidopsis thaliana
  Clone ID: LIB24-097-Q1-E1-A4
tgtctttgatcagtagtgggattttgtaatcaggatctgcaagattgtcatcatcatcagttaaatctgtatcaacccaagatgtccaatctacctcgctctctgtatcttcatcgtacgagagctctttcttgctttgcatgtcattcactttatcaactaatcttagcaagatttgatggtttagtacttcatagtccctgcatttttagacaagagaggatatatgttcaattgttcatcattttctgagtttgttttggttaatcaaaacattatagtatattttggttatacctgtatgacaaagcagcatgtagaagctgagctgaagcaagaagagcaaataaagacctgataaggtttatcatccatgcttggcgttctgtatcattcacgtatcgtaaactcgccacttctaatgccag

SEQ ID NO: 9603 - DNA, 456 bp, Arabidopsis thaliana
  Clone ID: LIB24-097-Q1-E1-B10
acgcgtccgaagtaatagaaaatggatcagttcaaaggtgagcctcgtctacccaagttcgccgtccccaagcgctacgatctccgcctcaatcccgatctcatcgcctgcaccttcactggaactgtagccatcgatctcgacatagtcgccgatactcgtttcatcgttctcaacgcagctgatctctccgtcaacgatgcctccgtttccttcactcctccttcctcctctaaggcgcttgcagctccaaaagttgtcttgtttgaggaggatgagattctcgtgcttgagtttggtgagattcttccccatggagtgggagttctgaaacttggtttcaatggagtactaaatgacaaaatgaagggattctacagaagtacttatgaacataacggtgagaagaagaatatggcaagttacccagtttgaaccagctgatgctaggagatg

SEQ ID NO: 9604 - DNA, 500 bp, Arabidopsis thaliana
  unsure at all n locations
  Clone ID: LIB24-097-Q1-E1-B12
ccactgttccctanccgtaccggtccggaaattcccgggtcgacccacgcgtccgcggacgcgtgggcggacncgtgggcggacgcgtgggcggacgcgtggggaaaaagagagtcaagtacttcattgttgatgcattcgctgaatctgccttcaaagggaatccagctgctgtttgctttctagaagacgataacgagagagacgacgcgtggcttcagtctcttgccancgagttcaatatctccgagacttgtttcctcactccgatcatcggagacttgcctcgcttccgtctccgttggttcactccagtcgctgaggtttccgtgttttcttttggttttggaattcggaattgttcggttgacttgttatcattgacttgatagatcctganaactagaacttgtactcattcactggctcttgtgaatctctctttgctttgctgttattgtgcaagtgggatttgtgtgggcatgcaacnttagcatctg

SEQ ID NO: 9605 - DNA, 482 bp, Arabidopsis thaliana
  unsure at all n locations
  Clone ID: LIB24-097-Q1-E1-B7
tcgcctggccgnaacggtccggaattcccgggtcgacccacgcgtccgcacgagagaagtatgcaaatctatcaaaatctggaaagcagcctgatgttttacacattcacaactggcaaactgcaatagttggaccgttgttttgggatgtttttgttaatcagggacttgaaggtactagaatactcttgacatgccaagactttgacaagggtcttgtacctcctgaaaaattggagctatgtgggctcgatccagctgaacttcaccgtcttgatcgcttacaagataacacaaatccacattttgttaatattttgaagggcggtgttgtctactccaacaaagttgtaataatgtcatcctcacatagctcaatccctggtctcgaaccaactttagctatccacaaggacaagttgttttttgctccctttggaatggacaactcaatggagaaagacttgtgttgtgaccttcac

SEQ ID NO: 9606 - DNA, 487 bp, Arabidopsis thaliana
  Clone ID: LIB24-097-Q1-E1-B8
aaggcttcgcctggccgtaacggtccggaattcccgggtcgacccacgcgtccgcggacgcgtgggcggacgcgtgggcggacgcgtgggcggacgcgtgggcggacgcgtgggaaagtttatgtcaatctagcttacaacaacttgagtggaccaatcccacaaaccggtgctttggtgaacagaggaccaactgcattcttggggaatccaagactctgtggccctccattgaaggatccttgtttgccagatacggatagttcttcaacttctcacccttttgtaccggataacaacgagcaaggtggaggagggtcaaagaaaggagaaggtttaagtaaaactgctattgttgcaattgtggtttgtgatttcattggaatctgcattgtgggatttctcttctcttgttgttacttgaagatttgtgcacgtcgtaatagtgtggatgaggaaggctatgtgttggagaaagaagggaaag

SEQ ID NO: 9607 - DNA, 455 bp, Arabidopsis thaliana
  unsure at all n locations
  Clone ID: LIB24-097-Q1-E1-B9
acgcgtccggaaatattcatcgcaattcgtatcggtttaaagtaaaaaagcaatgggaggtggtaaagacaagcatcatgatgagcaagagaaaggatttcatggttttccaggaggtggacattacccacctgctcaaggaggttaccctcctcaaggttacccaccacaacaagggtatcctccagctggaggctacccacctgccggatatcctcctggtgcttaccctgctgcgcccggtggttatcctcctgcacctggaggttaccctcctgctggctatcctgcacctggagctcaccattcaggacattctggtggtggactcggaggcatgatagcaggtgcagctggtgcagccgcagcagcttatggagctcaccatgttggtcacgcctctcacaacccttacgggcatgctgtangacatggagggtatggccatgcccctg

SEQ ID NO: 9608 - DNA, 480 bp, Arabidopsis thaliana
  unsure at all n locations
  Clone ID: LIB24-097-Q1-E1-C1
ttcgggtgccganattcccgggtagacccacgcgtccgacaagataaagcaggaaaggccctctctttgttcaagggagtacttgattacacagaattcaatgatgtggacatggtcatagaggcagtgattgaaaacattcaattgaaacaaaacatattcaaagaaatcgaaaaggtttgttcaccccactgcattttggcgagtaatacatctactatcgacctcgatgtaattggtgaaaagactaactcaaaagatcgcattgttggcgcacatttcttcagtccggcccatctgatgccccttctcgagattgttcgttcaaagaatacttctgctcaggtgattctggatctcatggcggttggaaaggccataaagaaagttcccgtggtggttggaaactgcataggctttgcagtgaataggacattctttccttattcacaagctgcacatatgttggccaatctangt

SEQ ID NO: 9609 - DNA, 459 bp, Arabidopsis thaliana
  Clone ID: LIB24-097-Q1-E1-C11
acgcgtccggaaaatctgaagcaagagaaagagagatttgaaaaggagtgggaaatattggatgagaagcaagcagtatacaataaagagcggataagaatatctgaagaaaaagaaaagttcgagaggtttcaactactggaaggagaaagattgaagaaagaagagagtgctttgagggtgcagataatgcaggaactggatgacattagactgcagagagaatcatttgaagccaatatggaacatgaacgatcagcgttacaggaaaaagtcaaacttgagcaatctaaggtgattgacgatcttgaaatgatgagaaggaatcttgaaattgaacttcaggaaagaaaagaacaagacgagaaagatctactagacagaatggctcagttcgaggacaaaagaatggcaagagcttagtgatatcaatcaccagaagcaggctttgaacaggga

SEQ ID NO: 9610 - DNA, 454 bp, Arabidopsis thaliana
  unsure at all n locations
  Clone ID: LIB24-097-Q1-E1-C12
acgcgtccggtttatgtccatgcccatcatcgccgatttctctttcattgtgttctccgagattcaatcttcttaacacaacaagcaggagactaggtttgtctagaaactgtagaactctgcgaatcagttgttcatcttcatctactgtcactgaccaaactcaacaatcgtcttttaatgatgctgagttgaaactcattgacgctttgatcggaattcaaggccgtggcaaatctgcttctcctaaacagctcaatgatgttgaatctgctgtgaaagttcttgaaggtttagaaggcattcaaaatcctacagattctgacctaatcgaaggtcgttggcgattgatgttcaccacaagacctggaactgcatctccaatccaaagaacatttacaggagttgatgtgttcactgtgtttcaagatgtatacttgaaggnaacaaacga

SEQ ID NO: 9611 - DNA, 192 bp, Arabidopsis thaliana
  unsure at all n locations
  Clone ID: LIB24-097-Q1-E1-C2
ganatcccgggtagacccacgcgtccgcggangcgtgggaaataatgtttggcttaataaactttgatgtttatgttcattgcatcaatttttctctttttgaatttgtgacagtgatgtgtttacttttgatacaactttgtgtttgatcgtttnnnnnnnnnnnnnnnnnnnnnnnnnnnnnnnnnnngg

SEQ ID NO: 9612 - DNA, 426 bp, Arabidopsis thaliana
  unsure at all n locations
  Clone ID: LIB24-097-Q1-E1-C5
gggttgatttcnaaaatctcgctgatttcactttgantggaaacaaagcnatttttgacggtcaagggtccctcgcttggaaggccanngactgcgccanaaccggcaaatgcaactctctccctatcaacatccgattcactggtctaacatactcaaagattaacagtantacatcaacaaacagcangcttttccacatgaacatccttaactgcaagaacataactcttacggatatcggtattgatgcacctccggagagtctcannaccgatggtatccacatcggaaggtccaatggantcaacttaattggggcaaagattaaaaccggagatgactgcgtttccattgganatggtaccgaaaatctcattgttganaacgtataatgtggaccaggacacggaatttccantggaa

SEQ ID NO: 9613 - DNA, 443 bp, Arabidopsis thaliana
  Clone ID: LIB24-097-Q1-E1-C6
acgcgtccgcccacgcgtccgggaaaacaaaggatcttccatgggcgatcgctgagaagatccgcaagaacaaaaacatcaaattccttgaaatcaggaatcttattcgatagtctatttgagcccttgatctggtaagctctgtctgatcttctaaagtttcgctttttaacttttggggaaatcatccacctttgtatcaagtttctggcaatttcttctctgtagttagaatcattcaataagccctttaatctcttcgacgcagctagtgttgaattacatctgggttttgtctactttgtgtcaaaaccatgcttttatgtttgattttcgcgaagtatgatttaggttcgattttaagtgaaagaaagacttaacagttgtagttaactgaaactatgcgatatctgattacgttggtgttatgattttattggaag

SEQ ID NO: 9614 - DNA, 441 bp, Arabidopsis thaliana
  Clone ID: LIB24-097-Q1-E1-C7
acgcgtccgaattcaccttctctctctctcctcctcatctcaccgccggcgttacgccggatctccggtgacttttgttgagcttttttgttgattcatgattcgatatagagaaaaaagaatttcctatttcaagctctttgttcttagatttatctttttgtttgttcttatggataaaggattaggttgggggattaaaagagtagtttttgtttggttgtgagattacttgactttgttaaggggataaattaggcgactttgtagggacactgtaccgaaaaaccctagttctgatttatccatggaagtatcatagcacttactattgtcggctttacttcttctacttttgtataatccttttttttttcttaggttctgtgattagatattttttttgtgtgggtttagttgttaatctgatcatggatttga

SEQ ID NO: 9615 - DNA, 455 bp, Arabidopsis thaliana
  unsure at all n locations
  Clone ID: LIB24-097-Q1-E1-A12
acgcgtccggaaaaaccagagaagagagagagataacaacaatggtttcttcgcttcttatgtcatttgctccggccaccgtgagggtttacgccacaagcacaaagggaggttcaggcggcccaaaggaggagaagaatcccatcgactttgttcttgggtttatgacaaaacaagatcagttctatgagactaatccacttctaaagaaggtggatgagaaagaaggcaccaccaccggaggccgaggaaccgttcgcggtggtaaaaactcagctccgacgcctgtgccgaagaagagcgagggtggatttggtggcttaggaagcctcttcaagaaatanaagaaaaaaatgtatagtantttgcattattcatgcctctgttttcattctctacaattcttcggatttcacntatatgtaaagctaccctttcntaatcctatttgacat

SEQ ID NO: 9616 - DNA, 433 bp, Arabidopsis thaliana
  unsure at all n locations
  Clone ID: LIB24-096-Q1-E1-E2
ggtccanaattcccgggaccacccacgcgtccgcatttgtttcacaagaccactttagtaagtggcaccacaacatcgagagttactgaatcaggaaaagcaattcgcacatcatctcctgctcggcaagaaaacaatgcaagtggatcaagtagttctaacagttctagtagtgactcaggatcttgctctaagtgatactgacagtgacagctcttcaggacgtggatcagataatggtaattaggccaacaagtcgaaagtcttttagctttagagtcagaaccgtcatgctgtttgatctctttcaatagcacagttagattgattacactaagtcgataactcttcccaaaaggattgattcctgtattgcgatttttttactgtcagaaaaatgaaaccatttaatgtttcctcccccngcttttgg

SEQ ID NO: 9617 - DNA, 465 bp, Arabidopsis thaliana
  unsure at all n locations
  Clone ID: LIB24-096-Q1-E1-F2
gtttacccnccgttaccgggcaaaattcccgggacgacccacgcgtccgnccacgcgtccggttgggtaaggacaggcctgcttgtaaactggaaatggtgaaagctggagttatcgactgcgtacttgatattctccacgaagctccagattttctatgtgctgcgttttcagaactgcttcgaatcctcacaaataatgctactattgccaagggacaatctgctgcgaaagtggtggagccacttttccatttgctgacgaggttggagtttggagctgatggacagcacagtgctctgcaagttctggtaaatatcttagaacatccacaatgccgcgctgattatacacttacaccgcaccaagtaattgagcctttaattccgctactggaatctccatccccagcagtccaacagttggcagctgagcttctatctcatcttctctacgaggagcatc

SEQ ID NO: 9618 - DNA, 464 bp, Arabidopsis thaliana
  unsure at all n locations
  Clone ID: LIB24-096-Q1-E1-F3
aacgtttacgccgcccgttaccggtgccaanaattcccgggaacgacccacgcgtccggagagagtgtggtttgattgaggaaagacgacgacgagaacgccggagaattaggattttgattttattttttactctttgtttgttttaatgctaatgggtttttaaaagggttatcgaaaaaatgagtgagtttgtgttgaggttgtctctgtaaagtgttaatggtggtgattttcggaagttagggttttctcggatctgaagagatcaaatcaagattcgaaatttagcattgttgtttgaaatggagtcgagttatgtggtgtttatcttactttcactgatcttacttccgaatcattcactgtggcttgcttctgctaatttggaaggtgatgctttgcatactttgagggttactcnagttgatccaaacaatgtcttgcagagctgggatcctacg

SEQ ID NO: 9619 - DNA, 406 bp, Arabidopsis thaliana
  Clone ID: LIB24-096-Q1-E1-F6
agattcatggcggaagcttgcggagtgagaaggatgaagctgggaagccaaggccttgaggtatctgcgcaaggccttggttgcatgggcctctccgctttctacggtgctcccaagccggaaaatgaagccatcgctctcatccaccacgctattcactccggcgttactctccttgacacctccgatatctacggccctgagaccaatgaagttctcctcggaaaggctctcaaggatggggtgagagaaaaaagtggaacttgcgaccaaatttggaatcagttatgcagaggggaaaagagaggtcagaggagatcctgaatatgtaagggctgcttgtgaggcaagtttaaagaggctagatattgcctgcatcgatctctattatcagcatcgtgtcgat

SEQ ID NO: 9620 - DNA, 460 bp, Arabidopsis thaliana
  unsure at all n locations
  Clone ID: LIB24-096-Q1-E1-G11
agcnggccttacgccgccaataccggtcnaagnattcccgggtcgacncacgcgtccgaaaaaaaatggagaacgaaagctcagagagtagaaacagagctcgtcttgccattatggagcttgctaacatgattagcgttcccatgtctctcaatgccgccgtgcgactaggcattgccgacgccatttggaacggcggagccaattctcctctctctgccgccganatcctccctcgcctccacctaccatctcacactaccattggtggcgaccccgagaatcttcagcgtatacttcggatgctcaccagctacggtgtcntctccgaacaccttgttggatccattgagaggaaatactctcttacggangtcngaaaaactcttgtaaccgactccgggggcctctcttacgctgcctacgtcctccancatcaccaaggtttaagactcatttt

SEQ ID NO: 9621 - DNA, 474 bp, Arabidopsis thaliana
  Clone ID: LIB24-096-Q1-E1-G2
aactttacccgcccgttaccgggccaaaattcccgggaacgacccacgcgtccgcttcttctagggcttccacgcgactacgcctgccaaaatcattctacaggaagcatgaagccagtcttctgtgggaactttgagtatgatgcgcgcgaaggtgacctggaacgactattcaggaaatacggcaaggttgagagggttgatatgaaagctggatgtgtttgataatcttgggacgcctatactcacacctggccatgaatggaccatagggaaatccatctcttatccctcaaaatcagtcactttccatccgcattaagcactgccatcttaattgcatttcattcctcatcactttgcacacttggacatgcctctgcaatggaagaaggctctctattttcattcatatccccgtctgacttccacattttcagttgttccttgacatattaattccataatgcaagg

SEQ ID NO: 9622 - DNA, 460 bp, Arabidopsis thaliana
  unsure at all n locations
  Clone ID: LIB24-096-Q1-E1-G3
gttacccgnccgttaccgggccanaattcccgggacgacccacgcgtccgnccacgcgtccgagcttggccacttgcaagaagcagctcgtgaaatgaggtatgagatgatttcgaatgtgtgttttcgacaacagattgaggtcttgcttatagcgcatcatgcanatgaccaggctgagttattcattctcaggttatctcgtagtagcggtgtacttggtcttgcgggtacagcttttgcttccgagattttctccagaaatctgcagttagatgcaaaacatatgaagaaccaatctattcgcttagtgcgtccgctactagatttatggaaagaagacatgtacaagatatgtcaatggggtanacaagattgggttgaagatccaactaatcgtagtcagttgtttgttcggaataggattcgaacatcaataggaaatctaaaatcaggtagc

SEQ ID NO: 9623 - DNA, 390 bp, Arabidopsis thaliana
  Clone ID: LIB24-096-Q1-E1-G6
tcatggatgcagcagaagctggtcagatcatcgaaagttgttgcccggttctttgtggcattgcatgcaagaaaggaagtcaatgtggatttaaagaaagaagctgagtactttggtgatattgtcatagtaccgtacatggatcattatgaccttgttgtgctcaagacagttgccatctgcgaatatggggtgaacacagtggcggcaaagtacgttatgaaatgtgacgatgatacatttgtgcgtgtggatgctgtgatccaggaagcagaaaaggttaagggaagagagagcctttatattggaaacattaattttaaccataagccattgcgtaccgggaaatgggctgtgacattcgaggaatggccagaagagtattatcct

SEQ ID NO: 9624 - DNA, 400 bp, Arabidopsis thaliana
  unsure at all n locations
  Clone ID: LIB24-096-Q1-E1-G7
acgcgtccggcaacaacaccaataagctcgggtacatgtacttccggtttatctcagcagctgaagccacagcttaagaattcttctagttcaaagttatgtcaagtcgaaggatgtcataagggagcaagaggcgcatctggtcgttgcatttcccatggtggtggacgtagatgccagaaacatggttgccacaaaggtgccgaaggtcgaactgtgtactgtaaagcccatggaggtggtcgtcgatgtgagtttctcggatgcaccaaaagtgcagaaggccgtactgacttctgtatagcccatggaggtggtcgaaggtgcagccatgaagattgcacacgagctgctagaggaagatcaggactctgtatcangcacggtggaggaaagagat

SEQ ID NO: 9625 - DNA, 406 bp, Arabidopsis thaliana
  Clone ID: LIB24-096-Q1-E1-G8
caagtccacgacgaaacttttcatcgatcttcaaattccagaaaaaactcgatgaatcttcaagctgtttcttgtagcttcggattcctttcgagtccacttggtgtcactcccagaacttcgtttcgtcgcttcgtaatccgagcgaaaacggaaccgtcggagaaatcagtagagattatgaggaaattctccgagcaatatgctcgtcgctctgggacttacttctgtgttgataaaggagttacttcagtcgttattaagggtttggctgagcataaagattcatatggtgcaccgctttgcccttgcagacactatgatgataaagctgctgaggttggacaaggcttttggaattgtccgtgtgttccaatgagagagaggaaggagtgccattgtatgc

SEQ ID NO: 9626 - DNA, 412 bp, Arabidopsis thaliana
  unsure at all n locations
  Clone ID: LIB24-096-Q1-E1-G9
acgcgtccgcccacgcgtccgagaatttcaaacaaagtttcaaactttgctcaccaacttttatttatttattttggtggtagaaaacagactttgatggctttgtaggaatactagatgtgtagatctaaagattataaccattttctgtgttcttgttctttcagaacataacctcatgtctttttgtctctctgttcactagctctctgtttccatggactccacacgatcttcttcntacagatttatttcatacacatacactganacacatgtgtgnntacgtaagtgtttatgtgtgcttangnaaacncnttttggattcaggaaactantccgttngtatttttgngattctgngtaaatttangnccacntcttaggccntgggtgacctttnacagtgggg

SEQ ID NO: 9627 - DNA, 396 bp, Arabidopsis thaliana
  Clone ID: LIB24-096-Q1-E1-H1
tctttctctttcaaatctcttcgccgtcggactcaattatccgttaacccgacccgttaaaaaaccttcaaagtggctccgattttgatttcaaacactaaaatatttatttacctaaaaacatgagttcactacaatgacccgtaccgaaccaaaccggagccggagctccaattccgattccgataagaattccggtaacgtcggcggaggtagaaccaccgggatgagggttattgttccgttacaaggtgtggtacaaggtcgtggtgggtttattcttaggctctgtgattccttgtgctttcttctactttcttcaattttacctaaaacgaaatcgtaaaaacgacgaatcagataattccgggtgaacaaaactcctcaagcttcttc

SEQ ID NO: 9628 - DNA, 455 bp, Arabidopsis thaliana
  unsure at all n locations
  Clone ID: LIB24-097-Q1-E1-A1
acgcgtccgaaaagtgaagttgaccttttgtctaaaattggccaccggaacctagtgaagcttcttggttatgttgacaaaggagacgagcgacttatcataactgagtatgtcagaaatggtacactccgcgatcacttggacggtgctcgtggaactaaacttaatttcaatcaaaggttggagattgttattgatgtctgccatggcttaacctatctccattcttatgcagaaagacagataattcaccgtgacataaaatcgtcgaacattctactcacagatagcatgagagccaaagtagcagacttcggctttgcgagaggcggtcctactgactcgaaccaagactcacattttaactcaagtgaaaggaaccgttggttatctcgatcctgagtacatgaaaacttatcatctcactgctaaaagcgatgtttactcgttcngga

SEQ ID NO: 9629 - DNA, 457 bp, Arabidopsis thaliana
  Clone ID: LIB24-097-Q1-E1-A10
acgcgtccgggtaactggaggaacaggtttcattgcttcttacatcatcaaatcacttctcgaactcggacacaccgttcgaacaactgtccgaaacccacgtgatgaagaaaaggttggatttttatgggaatttcaaggagcaaaacagaggctaaagattctccaagctgatctaacggtagaaggaagttttgatgaagcagtgaatggtgttgatggagtattccacactgcttctcctgttcttgttccacaggatcataacattcaggagactttggttgatcctattataaagggtacaacaaatgtgatgagctcttgtgccaagtctaaagccacattgaaaaggattgttcttacgtcttcttgctcttcgatacgctaccgtttcgatgcaactgaagcttctcctctcaatgagtctcattggaagtgatcctgaatattgcaa

SEQ ID NO: 9630 - DNA, 422 bp, Arabidopsis thaliana
  unsure at all n locations
  Clone ID: LIB24-096-Q1-E1-E10
taccggtcanaaattcccgggtcganccacgcgtccncttcttctagggcttccacgcgactacgcctgccaaaatcattctacaggaagcatgaanccagtcttctgtgggaactttgagtatgatgcgcgcgaaggtgacctggaacgactattcaggaaatacggcaaggttgagagggttgatatgaaagctggatgtgtttgataatcttgggacgcctatactcacacctgngccatgaatggaccatagggaaatccatctcttatccctcaaaatcagtcactttccatccgcattancactgcnatcttaattgcatntcattnctcatnactttgcacacttggacatgnctcctgcaatggaagaangctctctattttcattcatatccccgtctgaccttcnacatttt

SEQ ID NO: 9631 - DNA, 422 bp, Arabidopsis thaliana
  unsure at all n locations
  Clone ID: LIB24-094-Q1-E1-G8
tgatgagacagagagctgcagaagtcgctggaacctcgggttgattaatttttgtaaatactaatttcatttaggatctaagcagaagtggaaatgtaatcttcttccgaaagttaagaagataaaagaaactggtgtttatgatctccacttgaagaaggtgaagaaaaagtgaataacagcagctagtgaagacatgaaacagccatataacgatttaatttagatggattcctatttaacagtcgcaagtcgtggagtgatgatgatgaataacttgagtgacttgaagagtttctcagcttaagtgccaattgaagcagaagaatcgtcgtagatgctaacttatgctgtgtgtaaggtcgcgaaaaggaaagaaatgagattccagactcctcgattagttcaatgggcttgatccn

SEQ ID NO: 9632 - DNA, 409 bp, Arabidopsis thaliana
  Clone ID: LIB24-094-Q1-E1-G9
cttttcaagaatcatccagaagagctacagtcacataaatatgctatcatacagaaactcagggaacgcattagtgatgatgataagctagtgagagatgttttttatcaactatttgatattgacatctttcctctttgtaaagaggataaccagggccttatggtgtcacttttgatgccatacatatttagcgctatggctcattcagctattgatgttcgtttgatggctttcaaatttttccaccttgttgtgggagttctacccgcctaccttttccttggatgctgaaaagattctcgaaaactacaaggatattatacagaaaaatcatttttatgtggaagataaaagcaagctaaaggtggctctttctgggttgtcacattgcctctcggttttgcca

SEQ ID NO: 9633 - DNA, 407 bp, Arabidopsis thaliana
  unsure at all n locations
  Clone ID: LIB24-094-Q1-E1-H10
caagtcactcttcanggatctgaagtttttcttgagccgtgaggttccaaganagtccctgcaattggtgattactgcttttggtgggatggtgtcttgggaaggagaaggtgcacctttcaaggaggatgatgagagtattacacatcatatcatcgataagccaagcgctggccatttgtacctttctagggtatatgtgcaaccacagtggatctatgactgtgtgaatgctcgcataatcttgccaactgaaaagtacttggtcggaagaattccaccgccacacttgtcaccatttgtggacaatgaagcagaaggatacgttcctgattatgccgaaaccatcaaaagactacaggcancaagcangaaacgaagtgcttccattgccaggtngttgggaa

SEQ ID NO: 9634 - DNA, 445 bp, Arabidopsis thaliana
  unsure at all n locations
  Clone ID: LIB24-094-Q1-E1-H12
acgcgtcnnnnnnnnnnnnnnnnnnnnnnnnnnnnnnnnnnnnnnnnnnnnnnnnnnnnntggcaagagttcaactattgttatgcttcaccattctatttgcatctgtgacccttcttgacctaagtatcagcacacctgaaatttaagccatctttgcctcaaatcgaagatccaaagacggtgaaggatgtagagccttacaccgttaaagtagtaatggtctttgtggccgacctcgagaaggaatgtcccaagacaaacaagttcaaggccttctttgagaaacttaaaggattcnccaagtatgtttgcccaataaagaaggattgggcaagtnagattacgaacgggacatgaaaggcaaaacccggggggtatcntcaaanggcaanacctccttttgcnaattgggaaagaatttagggaaggaaattccaagaag

SEQ ID NO: 9635 - DNA, 410 bp, Arabidopsis thaliana
  unsure at all n locations
  Clone ID: LIB24-094-Q1-E1-H3
acgcgtccgctttctcgatctttgagatttctttcaaaggaagaaaaaaaaaaaaaactcgcgatgtccgccgaatcagctatgccaaattcctaagggacaggttgatctactacgattttattgactggtctggtgttgaatgtcttaaccaaagctcaagtcactctttgcccaatgctctcaagcagggatatagagaagatgaaggtttaaacttagagagtgatgctgatgaacaacttctcatctatattccttttaaccaagttatcaaactacattcctttgctatcaaaggccctgaagaggaaggtcctaaaactgtaaagtttttctcaaacaaagagcacatgtgcttcaagcaatgtcaatgattttcctccaagcgacaccgctnaaactaactg

SEQ ID NO: 9636 - DNA, 432 bp, Arabidopsis thaliana
  Clone ID: LIB24-094-Q1-E1-H5
acgcgtccgtgtcgttgtgtttggttatagcttgtatggtaacatcatggatcttcttacaccgatggggacaaagaaacaagagtggtccaaagacttggcctttggttggagcagcgatcgaacagttaactaattttgatcgaatgcatgattggctcgttgagtatctttataactcaagaacagtagtggttccaatgccattcactacttatacatacatagctgatcccatcaacgttgaatatgtcctgaaaacaaacttctccaattaccccaagggagagacttatcattcttatatggaagtattgttgggagatgggattttcaattctgatggagagctttggaggaaacagagaaaaaccgcgagtttcgaatttgcttccaagaatcttagagattttagtactggtaagtgtttta

SEQ ID NO: 9637 - DNA, 433 bp, Arabidopsis thaliana
  unsure at all n locations
  Clone ID: LIB24-094-Q1-E1-H6
acgcgtccggcttgctcaactccttacaacgccaaagggttgatgaaagccgcaataagaagcgagaaccctgtgattctgttcgaacacgtgctgctttacaatctcaaggagaaaatcccggatgaagattacgtctgtaaccttgaagaagctgagatggtcagacctggcgagcacattaccatcctcacttactcgcgaatgaggtaccatgtgatgcaggcagcaaaaactctggtgaacaaagggtatgaccccgaggttatcgacatcaggtcactgaaaccgttcgaccttcacacaattggaaactcggtgaagaaaacacatcgggttttgatcgtggaggagtgtatgagaaccggtgggattggggcaagtcttacagctgccatcaacgaagaactttcatgactactanattctccgg

SEQ ID NO: 9638 - DNA, 410 bp, Arabidopsis thaliana
  unsure at all n locations
  Clone ID: LIB24-094-Q1-E1-H9
aaatttaccttgcacttttgatctgtgttctcagtagattattcgtaccaccatggtcggcggggaagttaaaattcttcgcgggtacgaactccgtctcatccggtgcaccgtctctttgccactatcagatcctcctctcgatgaatcccaacccggaacccatccacacgactctcttataaagtcccttttgtcttcaatcgaggctgggaactatcttgaagctttagcctccgaagctactaatctaatactcggagagtacgagttcgacccggttgattccgccgagcgagtttactccgagnttctcaacaaagtcgaatcgttcgtgttgaacgattcttcggatgaaatcgataaggntcggngttcttttctgtgatgtgcttagcaatcgcgggtgc

SEQ ID NO: 9639 - DNA, 407 bp, Arabidopsis thaliana
  Clone ID: LIB24-095-Q1-E1-A10
ttgtttcttttcctcaattggatcgaaaaaacccctaactttgacatggaaggagagattcaagactgggaaatacttcagagctcgagatctaccacggaagatgacaattcgaggagcttggaggagattgatgatggcacgcaaggtatgattaggtttgatcatttctctcttgagaaccagagtggtttgtctcgtttggaggcaaacgatgaagatgggtctgttcaatcgggtagtccaggatggatcgaacctagctccgatgttccttatggtccgaagcattttaagtgagttatggtctgattcaagcagtgatcggcttgatgatcaaaggttagtggatgatgatgtgaataacgagatgggtataagaagagaaacgaagtggggtatgttga

SEQ ID NO: 9640 - DNA, 459 bp, Arabidopsis thaliana
  unsure at all n locations
  Clone ID: LIB24-095-Q1-E1-A11
ttacgcctgncctttaccgggccaaaattcccggancgacccacgcgtccgtgtctatccattcatttttttttttcatttcttcctccnnnnnnnnnnnnnnnnnnnnnnnnnnnnnnnnnnnnnnnnnnnnnnnnnnnnnnnnnttctggaatagtcatcatcttctctgtttctaggctttgtttatttgtctctaaagtttctggattcaacttctgaagaagatagtagtagtccacaagaaggatcttctttaccagaaagttgatttggtcaagagccaaggaagatgggttacatgtgtgacttctgtggtgaacaaagatctatggtgtactgtcgatncgatgcagcttgtttgtgtctctcctgtgaccgggagtgttcattccgctaatgcattgtccaaacgacattctcggacacttgtctgcgaagagatgcaatgntcaaccc

SEQ ID NO: 9641 - DNA, 429 bp, Arabidopsis thaliana
  unsure at all n locations
  Clone ID: LIB24-095-Q1-E1-A12
gttacgccgcctntaccgagnccannnttcccgganacgacccacgngcccggttggggtgcattaatctttcaatcaaaggtcatgctgagtgcgtcaaatttatgagatcgttcaatgttcccctactgctcttgggtggtggtggttacactatccgcaatgttgcccgttgctggtgctacgagactggagttgcacttggagttgaagttgaagacaagatgccggagcatgaatattatgaatactttggtccagactatacacttcacgttgctccaagtaacatggggaaataagaattctcgtcagatgcttgaagagattcgcaatgaccttctccacaatctctctaagcttcagcatgctccaagtgtaccatttcaaggaaaagaccacctggntacagagactccccganggttg

SEQ ID NO: 9642 - DNA, 486 bp, Arabidopsis thaliana
  unsure at all n locations
  Clone ID: LIB24-095-Q1-E1-B1
acgcgtccgcttattgttatcctgattcttctgctcggttctcgccggagagaagacacggagaagagggttttcgaaaaggaggatgagaggttccaataacaccgatctatttgaccctaagacggagatggattccaatttctctcgccatggttcttcctccgaaggtgattttggtttcgctttcaatgacagtaacttctccgatcgtttgctccggatcgagatcttgggtgggccttcggattctaggtctgatgctgaaggatgtacgagtattgccgattgggctcgtcatcgcangangagaagagaggacaacaagaaggacaatggtgttgcgatttcagacattgtggcatgtgctgaagaacagattttaaccgataacaaccaacctgatatgggatgaagctcccgggtggngaataaaaccttgangaanaaaagnaaaggcaattggtttaaaaaggcttttcaagg

SEQ ID NO: 9643 - DNA, 460 bp, Arabidopsis thaliana
  unsure at all n locations
  Clone ID: LIB24-095-Q1-E1-B10
tntaccgggcccaaaattcccggaacgacccacgcgcccgnaaaagtgatcacagaggccagagttgagagtttgacaccgtcatcaatggcagaaccggaggtgattcactcatggtctgcaccaagatctctcagcaccagcctcatgtactccttngctcagagacttgacactgaagttgtcgacgagccgttgtatgcatcatttcttaaagctacaggttttgatagggcatacagagacnaagttctctccaagatggagtgcaatggagagaaagttgtgaaagatgtcatananggatcaggatcnaagaantacccggnattgtaagcatatctcgaaggcancgggttttccngtttgccaagtnaaactgatgagtagnagggnaangcatttcanaattaataccganatccctctttaacaatagtggccttcctttngagaaggg

SEQ ID NO: 9644 - DNA, 470 bp, Arabidopsis thaliana
  unsure at all n locations
  Clone ID: LIB24-095-Q1-E1-B11
ttacgccgncctttaccggnccannaattcccggancgacccacgcgtccgnccacgcgtccgattgactcaggacgatggtccgaatccagtggtgccaattgcctacaaggaagagttccgcgagactatggattacttccgtgcgatttacttttccgacgagcgatctcctcgcgcactacgactcacggaagaaaccctcctcttaaactccggcaactacacagtgtggcatttcaggcgcctagtactcgaggcccttaatcacgacttgtttgaagaactcgagttcatcgaacgcattgctgaggataactctaagaactaccaactgtggcatcatcggcgatgggttgcaagagaaactgggtcctgatgttgcanggagaagaacttgantttaccccgtagagtactttcacntgntgccaaaacattnatcaagccntgggtcacatagggcagtg

SEQ ID NO: 9645 - DNA, 418 bp, Arabidopsis thaliana
  Clone ID: LIB24-094-Q1-E1-G7
ttcatcttcttcctctctctcacgcagctgctttgattaactcttcaggtccagcttaagagttttgtgaagatggtcttagtgctatacgagacagcggcggggtttgccctctttaaagttaaagatgaaggaaagatggctaacgtcgaggatttgtgtaaagagttcgacactccagactcagcacgaaagatggttaagctaaaagcttttgagaagtttgacaatacatctgaagctctcgaagctgtggctaaattgctggagggagctccaagcaaaggtctgcgcaagtttttgaaagctaattgtcaaggtgaaaccttggctgtggctgattcaaagcttgggaatgttatcaaggagaaactgaaaattgattgcattcacaacaatgctgttatggagcttctac

SEQ ID NO: 9646 - DNA, 411 bp, Arabidopsis thaliana
  unsure at all n locations
  Clone ID: LIB24-094-Q1-E1-E6
acgcgtccgtttttttctttctgagaaaaatgaaccgcaagaatccgagtggagtggtgccattcgctgttctccaatccaaatacgccaaatcttcccaaaaataaataaacctttccttttctttctcttcactctgttcccatatctacagtgactcttctcnctctgtatattantcttccttcacaatctcgctctctttactgggtcttcttcagcttcngagtcttctcctctctctctatctctcaagtgggctttgctttgctgtttttgtcntccttcgacgactcacttttgcagattcncataaattcttcaaagctttgagtcngttttcaagattcgagggtcggttttatatatgcttcanatctcttacccaagatcaggtatggagactcctgn

SEQ ID NO: 9647 - DNA, 416 bp, Arabidopsis thaliana
  Clone ID: LIB24-094-Q1-E1-E7
agtttcactctcaacatttcattctctctctctctctcaacaattagatctgtttcgataatcacgaggtttccctcacttcctttccattgctaaaccaggatttgcctcctgcatttggaaatggacgcttctatgattaccaattccaaatccattacttctccaccctctttagccttagggaagtcaggaggaggaggagttatcagaagttcactatgtaacttaatgatgccaagcaaagttaacttccctagacaaagaactcaaactctaaaggttagccagaagaaactcaagagagctactagtggtggtcttggtgttacatgcagtggtggtgataagattctcgtagcgaatcgaggtgaaattgcagttcgtgttatcagaactgctcatgaaatggggat

SEQ ID NO: 9648 - DNA, 409 bp, Arabidopsis thaliana
  unsure at all n locations
  Clone ID: LIB24-094-Q1-E1-E9
acccttcaaancatttccttantctttcttcttcatcnacaacaatggctggagttgcctttggntcctttgatgattcattcagcttggcttctctaagagcttacctcgctgagttcatctccactttactctttgttttcgctggtgttggctctgccattgcctacgcaaagntgacgtcngacgctgctcttgatacacngggactagtggccatcgcggtttgtcanggttttgctctcttcgtggncgttgcaatcgganncaanatctccggtggcnatgtgaacccagccgtcacttttggncttgctgtcggtggncaaatcacagtcatcaacggagttttctacgggatngctcagcttcncggctcnaancgccgcttgtttcctccttaaatact

SEQ ID NO: 9649 - DNA, 411 bp, Arabidopsis thaliana
  Clone ID: LIB24-094-Q1-E1-F10
aaggcttttggtttgcaggtttcagctgctggttatgaccgccaaggtgtggctgaccacgcaagtaacctggctaccaaaattaggaataatctcaccaattctatgaaggcacttggtgttgacatattgacagggtttggcgctgttctgggcccacaaaaggttaaatatggtgacaatattatcaccggaaaagatataatcatcgcaactggatctgtaccgttcgtcccgaaaggaattgaagttgatggaaagactgttatcacaagtgatcatgcattgaaattggagtccgttcctgactggattgcgatagtaggaagtggttatatcggtcttgagttcagtgatgtttacacggcccttggaagtgaggtaacttttattgaggcactggatcaacta

SEQ ID NO: 9650 - DNA, 411 bp, Arabidopsis thaliana
  Clone ID: LIB24-094-Q1-E1-F11
gagaaagatcctaatgatggcgaccgcaagcgagagttcttcatctaagagatggcttccacttgaatctaacccagatgttatgaatcagtatctctggggacttggtcttgcccctgatgaagcagagtgcaatgatgtgtatgggttagacgatgaacttctagagatggttccaaagcctgttcttgctgttctcttcctttacccaatcaccaaaaagagtgaagaagagagaatcgagcaagacaaggaaattaaggaaaaggtgcatagcgataaagtttactttatgaaacaaactgttggtaatgcttgtggaaccattggtcttcttcatgctattgggaatattacctctgaaatcaaactctccgacggatcgttcttggatagattcttcaaatccac

SEQ ID NO: 9651 - DNA, 414 bp, Arabidopsis thaliana
  unsure at all n locations
  Clone ID: LIB24-094-Q1-E1-F12
aaggcttttggtttgcaggtttcagctgctggttatgaccgccaaggtgtggctgaccacgcaagtaacctggctaccaaaattaggaataatctcaccaattctatgaaggcacttggtgttgacatattgacagggtttggcgctgttctgggcccacaaaaggttaaatatggtgacaatattatcaccggaaaagatataatcatcgcaactggatctgtaccgttcgtcccgaaaggaattgaagttgatggaaagactgttatcacaagtgatcatgcattgaaattgggagtccgttcctgactggattgcgataagtaggaagtggttatatcggtcttgagttcagtgatgtttacacggcccttggaagtgaggtaacttttattgaggcactggatnaactaa

SEQ ID NO: 9652 - DNA, 420 bp, Arabidopsis thaliana
  unsure at all n locations
  Clone ID: LIB24-094-Q1-E1-F4
gggcaaccatttagatttgaggactctctgtcttttcttatttcggagaatgttctttttctagggttttgaaattctaagagattttctgaagaagaaaacaaaatgggtcctcttgtcgaagcgactgagttctcgaaagaacaagcactcaccgacgctgcagaaaatctccttaaacctcatttctcaactgatgcgactctcagtcttctcgaggtaatggagtctctgctcgccactgtcgagcaagatctttcttcatcagtacaaaaggccctacatccaccaatgagggctttggtatccgctgatcttttgagaaaccctgattctgatgttagggtttctgttgtctcttgcttgaccgaaattatgaggattactgctcctgaagccccttacaacgatnaagcaaaa

SEQ ID NO: 9653 - DNA, 410 bp, Arabidopsis thaliana
  Clone ID: LIB24-094-Q1-E1-F9
gaattgtttcttcttctccaaacacgtgttcttcaaattcgctcatattattctcgattcccacaaacagaaaaagaagatactaaaaattataaaatcccgataatagaatcatgaaattgtttccgtttatgggtgttttaattgcgtctaatcggaatctcttgccgttatcgtctgcttatcagggtaatcaaagaggcactactgatttcatggatcattgtgattgaagttttgagagttggtgaatcagcaagcttctgttacagagccttagcaacagaaagcaaacagaaaatggtcaaaactcgtgctcagcgtatcaagcggatgagtgttgtagatgcactttgcatccggtctcagatctcggtcaaatctgcccggtattgtaagacagttagtaa

SEQ ID NO: 9654 - DNA, 420 bp, Arabidopsis thaliana
  unsure at all n locations
  Clone ID: LIB24-094-Q1-E1-G1
gggcgnnnnnnnnnnnnnnnnnnnnnnnnnnnnnnnnnnnnnnnnnnnnnnnnnnnncgtagggttggtgtttcgtacggattttctcggtcaatcttagtttctccggcgagagattgcttttcaggaatcatcatggtgagaaagagaagaacggatgctccatctgaaggaggtgaaggctctgggtctcgtgaagctggtccagtctcaggtggtggacgtggttcacagcgaggtggtttccagcagggaggaggacaacaccaaggtggaaggggttatactcctcaacctcaacagggaggtcgtggtggtcgtggatatgggcaaccaccacaacagcaacaacagtatggaggaccacaagagtaccaaggaagaggaagangangacctcctcatcaaggaggtccaang

SEQ ID NO: 9655 - DNA, 408 bp, Arabidopsis thaliana
  unsure at all n locations
  Clone ID: LIB24-094-Q1-E1-G10
tgtctcacccgagcttcctctccagctagggtttgtttgtttgattgaagaaagaaaacaagaatggtgtatttcaatttcaataggattaagacgaagaagactctaattggatttggattgggacagatcctctcgcttctctcgacttctcttagctttacatcgtctgagatcgctagaaaagattttagctttttttttttttcaaaccatcccatttttaaacattctcatgaacttacaaaatttgaaatctttatagggattaatgctccaacatcacagtcgtttctgggttatgtgttactggcaatcgtctatggagtatgagaatgagcattgaaggtttcattagtaattttctaacgaatgcaaaacatttgtaagccaagtgggatcacnaac

SEQ ID NO: 9656 - DNA, 404 bp, Arabidopsis thaliana
  Clone ID: LIB24-094-Q1-E1-G12
tcttcttcagctcaaaaagccatctcaaaggtatattttgaatcaaaaacaatggcagggactaatgattcttgtcctttggtaaagaacattcttcttctagactctgaaggaaagcgtgtggctgtcaagtattactccgatgattgggcaactaatgcttccaagttagcttttgaaaaatatgtcttctcgaaaacctccaagaccaatgctcgcacagaagctgagatcacactgttggagagtaatattgttgtctataagtttgcccaggacctgcatttctttgttactggaggtgaaaatgaaaacgagctcgtcttatcatctgttcttcaaggcttttttgatgctgttgcgttacttctgaggaacaatgttgaaaagatggaagcccttga

SEQ ID NO: 9657 - DNA, 488 bp, Arabidopsis thaliana
  unsure at all n locations
  Clone ID: LIB24-094-Q1-E1-G2
ctgnttacgcctgcttgtaccgggnccgnaattcccgggtcgacccacgcgtccgcccacgcgtccgcatagaaataatggctcagggacaccaaggcttatgctttgggtttatcttcttactatgcttcttcagctctacttttgcactcaggattcttaaggacctccctatgatggagccattaaagctanatctgaaccatgaaatgatgcctgggatggntatgctacagccanatcatgangtccaacctgagcacacggtcaatcctggccatacactccagtccatgtccggtgtatcatnaacatccagagcacacggttaagcctggccatacactccagtccatgtccggtgcattagaacatcctgaagcacaaggaaaagcctgaccataaactccagtctatgttgggagaagcatcctgagcacanggaaaagcctgaccataanctccanctccatgtttgggagaaatcc

SEQ ID NO: 9658 - DNA, 419 bp, Arabidopsis thaliana
  unsure at all n locations
  Clone ID: LIB24-094-Q1-E1-G3
gggtggtgaggctaaagattcatcagctcccaatgcatatggagatgatgttgaggcagaggcaaacgcatattttcatcaaatgttttctagtcatttgagtgttgacgcaatggttcaaatgctttcccgatacaaggaatctttggttccaagggaaaaattaatttttgaatgcatgattgctaatctgtttgaagaatatcggtttttccccaagtatcctgagagacagctgaaaatagcctccatactctttggttctgttataaaacaccagcttataagttcgctcactctggggatggccctgcgtctagtgttggattccttgcgtaaacctgcagattcaaaaatgtttctgtttggaagcaaaactctggaacantttgtgaatcntccgggtgaattgccncaaa

SEQ ID NO: 9659 - DNA, 437 bp, Arabidopsis thaliana
  unsure at all n locations
  Clone ID: LIB24-094-Q1-E1-G4
acgcgtccgccattgtgggttcttaaatggcaagagctacaaaagagagtcctttttgttactgtcattactgatctcaacacttgtcatcctacttggtttcatccgggggtgaataggtgctattgcccgtctcaagaagtggcgaaaagggcgttgtttgatgggcttgatgagtctcaagtccgtgtctttggtttacctgtgaggccatcttttgcacgagcggttttggtgaaggatgatctaagaaaggagcttgagatggatcaagatcttcgtgcggttctactgatgggaggaggggaaggtatgggtcctgtgaaagaaacagctaaagctcttgaggaatttttgtatgataaagagaacaggaagcctattgggcaaatggttgttatctgtggacgtaacaagaaattggcatccgcattana

SEQ ID NO: 9660 - DNA, 420 bp, Arabidopsis thaliana
  unsure at all n locations
  Clone ID: LIB24-094-Q1-E1-E5
gaagcatagtggcaaacccgtaaatacataataccaatgacgaccaaagattgcggnaaccacggcggcggcggaggaggaggaaccgccagtcgaatctgcggagnnnnnnnnnnnnnnnnnnnnnnnnnnnnnnnnnnnnnnnnnnnnnnnnnnnnnnnnnnncaaccgacanaaccaagattcatcctccaagacgccaccgtctacgcctttaatctctcgcagcctaacctcctcacctcaaactttcagatcacgatcgcttcacgtaaccgaaactcaagaatcgggaatctactacgaccgtcttcacgtctacgctacttaccgggaaccaacanatcactctacgtacagcaattcctccgacgtaccaaggccatanagaagacaacgtttggtctcctttcgtttatg

SEQ ID NO: 9661 - DNA, 419 bp, Arabidopsis thaliana
  Clone ID: LIB24-094-Q1-E1-G5
gaagctcttcttcttcctcttcctccacctccagcgaccagcccccatctccctcacctccctttgtcgtcaaacctcctgagaagaagcagaggctcccatctgcatacaaccgcttcatgagggatgagatccaacgcatcaaaagtgccaatccggaaataccacaccgtgaagctttcagtgctgctgccaaaaattgggctaagtacatacccaactctcctacttccattacttccggaggccacaacatgatccatggcttgggattcggtgagaagaagtgaacaaaactcaggggaaaagaagcctaaaaataacaaacgcatgcacgtgtgcgagtggctgcgtcgtttttctcatcttgtgttgttcttctgtgtaattttcttatgtatgtcatgttgcagaaaatg

SEQ ID NO: 9662 - DNA, 416 bp, Arabidopsis thaliana
  Clone ID: LIB24-094-Q1-E1-A7
attcttcattgacggtaggagtcaccacttttggcggcgattccttgttctctatttttttttgcacaagcaacatttagcttctgcaaactccagttcatctctcaaccctcatatcgccgtgttttctcgctctagtaccgcgagctcggacgaaccaggaagcaatccgttaatctagaagcggtgttgagaagatgacgattacatcaaatatctctgtacagaacgataacctcgttgttcaagggaagactatccttaccaaaatccctgacaacattatcctaactccggttaccggtaatggattcgtttccggttcatttataggcgcgacgtttgaacaaagcaagagtcttcatgtgttccccatcggtgtattggagggtcctcggttcatgtgctgtttcccg

SEQ ID NO: 9663 - DNA, 414 bp, Arabidopsis thaliana
  Clone ID: LIB24-094-Q1-E1-B11
acgcgtccgcggacgcgtgggtccgagcatctggcttctctgtcgcatcttctcttccctttcccccaccgacaattctattcatctccgatcaaaaactattcctttctgatcacaatgcatgctctcaaggacaaagtctcacaaaaactctctaatctcttcgccgattctccaagccaatctgcttctcctcgttattccaactccgattctccaaaggctaggttgaattcaagtgtaggcaaatcattgtcttcgtatttctcatttgttgttcctcaatctgggaacgaggaggattctgagttatgtccacctctacccattagaacagagagctatgagtgtattgagaattgcaaatctgctaatgggcaagctaaagctgggaacctttatctcaattgggtg

SEQ ID NO: 9664 - DNA, 487 bp, Arabidopsis thaliana
  unsure at all n locations
  Clone ID: LIB24-094-Q1-E1-B3
aactgttacgcctgcctgtaccggcccanaattcccgnagtcgacccacgcntccggaaaagggtgcctctatcacgccgagtgaatccaaatttaagaagttgatagatgaatgcaattttctaatcacagaagaagagaaagatttggttcaaccggtgccttcgactttgccttcaagtgtgacagcaccaccagtatctgaacttgatgtcacccctacagccaagtacaggcacgagtactaccaaaagccagaggaagttgtggtaactgtttttgcaaaaggaatacccaagcagaatgttaacatcgactttggtgaacaaattctgagtgttgtgattgaggttcctggagaggatgcgtattatctccaaccgagattgtttggaaagataataccagataagtgcaaatatgaaagtattgtcgaccaaaattgagatctgtccttgcaaaaagccgatataatcacatnggcctc

SEQ ID NO: 9665 - DNA, 409 bp, Arabidopsis thaliana
  Clone ID: LIB24-094-Q1-E1-B6
ttctttctcagattaatcgctgagaagaagcaaccacctggagacggcggagatggcagggtacagagtggaagatgactacgattacctcttcaaagttgttcttataggcgattctggagttggcaaatccaatctcctttccagattcactaaaaacgagttcaatctagagtctaaatccaccattggcgtcgaattcgccactcgtaccttaaaagtcgatggcaaagtcgttaaagctcagatttgggacactgctggtcaggagaggtaccgtgccatcactagtgcatattaccgtggagccgtgggtgcactcctagtatatgatgtaactcgccgtgcaacatttgagaacgtagatcggtggttaaaggagctcaagaaccacacaagattcaaacat

SEQ ID NO: 9666 - DNA, 421 bp, Arabidopsis thaliana
  unsure at all n locations
  Clone ID: LIB24-094-Q1-E1-B7
atacaaagagttaggtgtggagaaatctggtaaaaattctgagggtgactcttggtgggaaacttggcaagaagtccttcatcaagatgagtggagtaatctagcaaggattgaaaggagtgcacaaaagcaagcaaaatcaggaactgaaaatgctggttggtacgagaaatggtgggagaagtacgatgctaaagggtggacagagaaaggagcacataagtatggtagacttaatgagcagtcatggtgggagaagtggggggagcattatgatggaagaggatctgttctcaaatggacagacaagtgggctgagacagagttggggaccaaatggggaagacaagtgggaagagaaatttttcaagtgggattgggttcacgtcanggggagacatggcatgtttcacctaacaac

SEQ ID NO: 9667 - DNA, 420 bp, Arabidopsis thaliana
  unsure at all n locations
  Clone ID: LIB24-094-Q1-E1-B9
cgccctgcggtacagctacctaagaggtccaggtggtcggtttaggaatccttatgatctcgggtgcagaagaaactgctagtggaattctgcctcttcttgtatgactgttaagacggcgacagaaaagaagaggcagaattcnactagcagaaaggataaagccctgcggtacagctacctaagaggtccaggtggtcggtttaggaatccttatgatctcgggtgcagaagaaactgctcggacttcttagtaaaaggttataacgaagatattgagtgtcatgaagaagacgcaacacatagancaagagggtattagcatgatgcagatgcagcgggaatccaaatcttcaaaatgggcaatgggcatgttgctatcgatgtttaaccccgacacaataattcagtcancacatg

SEQ ID NO: 9668 - DNA, 412 bp, Arabidopsis thaliana
  Clone ID: LIB24-094-Q1-E1-C10
acgcgtccgcaagttttctgttccactcatcttgtctcttccatccactgtcatttcattgacaaagaaagagcctctgaaggttaaagttagcactgtactgggttcgaaggcaccagctcttagtgtgaagcttacacaagctctaagttctaagtcagtggattcatctgtaattaataaccaggagcttaagtttgacgctgacagtgcaacgtacttcctggactcctttcccaagaactttgacattggaaaatatacttttgtatttaagattgtgctggatgaatcagcacatgagaaagtatacataactgaagctcaaacaaaagtgcctatagctgccacaggagctattagcattgaaaatgcagaaattgctgtacttgacagtgacattggaagcgtt

SEQ ID NO: 9669 - DNA, 480 bp, Arabidopsis thaliana
  unsure at all n locations
  Clone ID: LIB24-094-Q1-E1-C3
ctgttacgcctgccttgtaccggnccagaattcccgggtcgacccacgcgtccgctcacccactctcctcggaaaccacagcgacggacggacggacggacgataaaacttttgcctctaatttgctcctacaaatctggaatcagccggagcgaatctcgaagcttatgatctcgacttgctgaagaggctgggaatggctggtaaagaggagactgatgtatctgcacaagggtctttaaccagggaggccactgagatatggaggagtgagttggaatctcgccggtttcaggtagatagtttagaagctgaacttgtggatgtcaaggcttaccttgagtttggctcagaagaagatgccagaaaggagttaggagttctttcgggtagggtcagatcgactgcaactatgttgcgttatttgagatnaaaagctagagtcttggccattcctgatgatctancaaatgtgtcatg

SEQ ID NO: 9670 - DNA, 439 bp, Arabidopsis thaliana
  Clone ID: LIB24-094-Q1-E1-D1
acgcgtccgcagaatccaaaaatgggtcgtgtccgaaaatcagatttcggttccattgttcttgttctgtgttgtgtcctaaatagcttactctgtaatggaggcatcaccagtagatatgtcagaaaattagaagcaaccgttgatatgcctcttgatagcgatgtttttcgtgttccttgtggctacaatgctcctcaacaggtgcatataacacaaggagatgtagaaggaaaggcagtgatagtatcatgggtgacacaagaagcaaaaggatctaacaaagtcatttactggaaagagaatagcaccaaaaagcacaaagctcatggcaaaaccaatacttacaagttctacaattatacttctggttttatccatcattgccctatcagaaacttaagaagtatgacaccaagtactattaagtgttagggtg

SEQ ID NO: 9671 - DNA, 413 bp, Arabidopsis thaliana
  unsure at all n locations
  Clone ID: LIB24-094-Q1-E1-D12
acatttacacacatcaatggcgtctctgcaactctgcgacggttatcttctcttcaagccctctgtttctcctcgattcctctctcaacgcatttctcatcgcctannnnnnnnnnnnnnnnnnnnnnnnnnnnnnnnnnnnnnnnnnnnnnnnnnnnnnnnnnnnnnnnnnntcagtcggcgggagcttctgtaccaatcggcagctgtatcactctcgctttcttccattgttggaccagcgagagctgatgaacagttatccgaatgggaaagagtgtttctcccaatcgatcccggtgttgttcttctcgacattgctttcgtccccgacgaacctagccgagggtttttacttggaacgagacagactttgttaggagactaaagatggtgggaagcacttggaatcc

SEQ ID NO: 9672 - DNA, 426 bp, Arabidopsis thaliana
  Clone ID: LIB24-094-Q1-E1-E1
ctcgaaccatcgagtctcgaacccagagaggactttcctcagtgagtcctccgttccttagcttctcttccagatccaaactctcaccaaactttctcacaacacacacacaattcgattcgatccacactcttaaaatcccaaagatctctctgattttgaaattcgattcttccccagatcaacttgtgaatttttccacaattttggttcatgattttgatttcgtgaaggacttatggattcacacccttccctaatgggaaggtccattaccaattcgaaccgatcgagcttaagatcttggtcgtccttcttcgtcttcttcatcttctccttcaccgttaaccaaatcgatctccgatgcaagtaagtcaaagtctctcttcgatccttaacaatccacacgggaggtaagtctgggtg

SEQ ID NO: 9673 - DNA, 417 bp, Arabidopsis thaliana
  unsure at all n locations
  Clone ID: LIB24-094-Q1-E1-E12
acgcgtccgctttgattcncgttccaataatacttcctccancatctcncctcctctcgtgtagatctaagaaacagagaaaacaagagagatagaatgngaangggagttctaaatcctgacaggagatcgtcagatagtggcanatganttgcaggaaactgggtttagtccagaaagagagaaagtcaagaacaagaattttgaagaatgatgaacnaggaagaagatgaatnngtggagaacatatttganagtaaanaagtaccttcttggnagaagcagttgactgtgagggcttttgtggtgagctttatgctaagcatcttgtttagtttcattgttaggaagcttaacctcacaacgggaatcatcccttcgcncaatgtcncngctggtcttttgggtttcttcttt

SEQ ID NO: 9674 - DNA, 484 bp, Arabidopsis thaliana
  unsure at all n locations
  Clone ID: LIB24-094-Q1-E1-E2
ttacgcctgcntgtaccggnccggaattcccgggtcgacccacgcgtccgcccacgcgtccgcttttgtgcaagctgcgtggactcgaagatcacgaggtgaagcagcgaaaagacccaacaggaagtcatggaaacagagaacggacatgtacatgaggcctttccttctgaatgtgttcttctccaggaaattcatacacgctaaagtgatgcataggccaacaagcaaagtcatttcagttgccaccacaaatgctagagatataaggactaatataccgtctcttgttgataacgaagcgtgtagactcatcggtaagctcatagctgagcgttcaatggaagcagacgtctatgctgtctcttatgagccaagaaagggagaaagaattgaagggaagctagggattgtaatcngatactattaaaggaacatggcattaattttgttcccttgattcaatctcctccttanaataaaa

SEQ ID NO: 9675 - DNA, 428 bp, Arabidopsis thaliana
  Clone ID: LIB24-094-Q1-E1-E4
aaagggtgcctctatcacgccgagtgaatccaaatttaagaagttgatagatgaatgcaattttctaatcacagaagaagagaaagatttggttcaaccggtgccttcgactttgccttcaagtgtgacagcaccaccagtatctgaacttgatgtcacccctacagccaagtacaggcacgagtactaccaaaagccagaggaagttgtggtaactgtttttgcaaaaggaatacccaagcagaatgttaacatcgactttggtgaacaaattctgagtgttgtgattgaggttcctggagaggatgcgtattatctccaaccgagattgtttggaaagataataccaagataagtgcaaatatgaagtattgtcgaccaaaattgagatctggtcttgcaaaagccgatataatcacatgggcctc

SEQ ID NO: 9676 - DNA, 414 bp, Arabidopsis thaliana
  unsure at all n locations
  Clone ID: LIB24-094-Q1-E1-A11
gtttcaatctttttgcaatgaattgcccagccatgannnnnnnnnnnnnnnnnnnnnnnnnnnnnnnnnnnnnnnnnnnnnnnnnnnnnnnnnnnnnnnnnncacaattgagtaacgattcacaaagatctgttgttatgcactgcacaagattaccctttgaagcatttgctgctacttcatcaaaccggcttcttgggaaacattcattgcctttgagagcagctttggttacttcgaaccctttaaacatttcatcttcctcagttatctctgatgccatttcatcttcctctgttatcactgatgatgccaaaattggtgtcttgttattaaaccttggaggtcctgagactttagatgatgtacaaccctttttggtttaacctcctcgccgaccggacantatacggg

SEQ ID NO: 9677 - DNA, 500 bp, Arabidopsis thaliana
  unsure at all n locations
  Clone ID: LIB24-092-Q1-E1-E1
gaactgtntacccggccgtacttgtccagncctcccgggtcgaaacacgcgtccgcggacgcggggtcgnncacgcgtccgcccacgcgtccgcccacgcgtccgctttttgtttttggcatacangaaaagaaaatggcgtctcatgctgttacaagcggacaaaaaccacacntagtttgcatacctttcccggctcaaggccacatcaatccgatgctcaaagtggntaaactcctctatgccagaggcttccatgttaccttcgtcaacactaactacaaccataaccgtctcatccggtcacgtggtcccaactcccttgatgggcttccttcgtttcggttcgagtccatccctgacggtctaccngaggaaaacaaggacgtcatgcangatgtccctancctttgtgagtccaccatgaaaaactgtcnanctcctttcaaagggagcntctccggggggattnncaacacaaaggatgttcctcccggtan

SEQ ID NO: 9678 - DNA, 453 bp, Arabidopsis thaliana
  unsure at all n locations
  Clone ID: LIB24-092-Q1-E1-E10
taccggtccanaatcccgggnccacccacgcgtccgaagaaaaacaaaaatggcggttctttgctcgtcttcgacggtgatactctcttcttcttccgtgaaatcctccggaagtgagagaaagtctccgtttttagggttctctttaacggctatctcgaagccgtcggtacgagtcggcatttatgcgaattcgaaaagaggattgcaagtgaagtgtgaagctgagccgacgacgacgacttctcttgttccggcgaatcaacgatggatgttcgacgaagaagaagctaatggncctgacatctggaacacgacatggtatccaaaagcttcagaccatgtgaacacggacaagncctggtttgtgggtgatgcaactgacaaaattcttggnagattggcatcgacaatttgcnaaatcacatccntggggaaanaatcctggccccg

SEQ ID NO: 9679 - DNA, 437 bp, Arabidopsis thaliana
  unsure at all n locations
  Clone ID: LIB24-092-Q1-E1-E5
acgcgtccgngttttcgttgttgtgaggaattttgctccgatgtcggcggagagttgtttcggaagctcgggtgatcaaagcagcagcaaaggagtggctactcatggtggtagctatgttcagtataatgtctatggcaatctcttcgaagtttctagaaagtatgttcctcctcttcgtcctatcggtagaggcgcttatggaattgtctgtgctgctacaaactcagagactgganaggaggtagctatcaagaagattggtaatgcttttgacaatattatcgatgctaaaaggactttgagagagattaagcttctcaagcatatggatcatgaaaatgtgattgctgtaaaggatataataaaaccaccgcagagagagaacttcaatgatgtttacattgtttatgagcttatggacactgatctccacc

SEQ ID NO: 9680 - DNA, 421 bp, Arabidopsis thaliana
  Clone ID: LIB24-092-Q1-E1-E7
gggcggacgcgtgggtctctctcttcctcatttctgcgcaagaatctaaaccaaatctctcatcctctcttctatgtcccaaaacaggaacataactactactactaccatgtcttgactctgttgagaatcttaaatcctacctaacctccaatgggtaagaagagcggttcttcttcttcttggctcactgccgtgaaacgagctttccgatctcccaccaagaaagaacacaacaacaatgctcatggtaatgaagtcgacgaagatgaagacaagaagaaagagaagagacgttggttatttagaaaatctacgaatcatgactctccggtgaagacctccggcgtcggaaaagacgctccggcgcagaaatccacagaaacaacgacgatcatcaacccaaccgttttatcctctg

SEQ ID NO: 9681 - DNA, 418 bp, Arabidopsis thaliana
  unsure at all n locations
  Clone ID: LIB24-092-Q1-E1-E9
acgcgtccgcggacgcgtggggccagtgaaagtacctgaacctaccgtggntgaaactattcagatccttaagggtctgcgagagcgatatgaaattcaccacaagcttcgttacacagacgaatctttagtagcagctgcacagttgtcataccagtatataagtgatcgtttccttcctgacaaggcaattgacttgattgatgaagctggttctcgggttcgacttcgtcatgcacaggtccctgaggaagctagggagcttganaaggagcttaggcagataacaaaggagaagaatgaagctgtccgtggccaggactttgataaggctgggacacttcgggataganaaattgaactcanagctgangtatctgcantccaagccnaaangcaaaggagatnagcaaagcac

SEQ ID NO: 9682 - DNA, 516 bp, Arabidopsis thaliana
  unsure at all n locations
  Clone ID: LIB24-092-Q1-E1-F10
tctcgccggnacgtaccggtccanaattcccgggtccacccacgcgtccggaaaccatcaatgacgacaatggcgacacaaggcgcttggctacgaatgacctcatcagccaagtccatgaccaagtcaaccgtgacttcaaaaagagcttggnttcntcacctccnagctcagctgcttaanaatctcannttcncccantatnttcatcaaacgtatctcccttccttcgttccccgggattcagccaatcgtcgcacgtagaatctgcccttttactgggaagaaagcaaacagagcaaacaaagtttcattctctaaccacaagaccaagaagttgcaattcgtcaacttacaatacaagagagtttggtgggaanctgggcaaacgttttgtcaaacttcgtttatcaactaaggntttgaagaccattgagaaagaagggactcnacgctngttgccnaagaaagncgggaatngnntnttcgccaaagaaatagctatggatgatncgc

SEQ ID NO: 9683 - DNA, 467 bp, Arabidopsis thaliana
  unsure at all n locations
  Clone ID: LIB24-092-Q1-E1-F12
acgcgtccgattctcctcacctacagttgttcaaggatcactgacttctggaaatttgagagcactgctactaactggtgattttttcctcggagcagtggttgcttgcacgttgaccaaacttgttcttaggttagaagaggttcagtcttctaaaactgaagtaaataagacagtcacacaggctttgttgatcatggtttctatgttgcaacttgggcaatctcctgtttctccacaccctattgataatgattcgtatgagaggattgtgttgtgcataaaattgctttgccataggaatgatgagatgaaaaagatatggttagaatcctgccgccaaagttttgtcaagatgatttctgaaaaacagcttanagagatngaggaactgaaaggcgaagaccccaaaacaacgcaatgcccaaacctggatgatncaaaattggacttcttccaanctaaaa

SEQ ID NO: 9684 - DNA, 453 bp, Arabidopsis thaliana
  unsure at all n locations
  Clone ID: LIB24-092-Q1-E1-F4
cacgcgtccggttcgccttcctccgtgactcaccggatttatcttcctctccaattctggagatatccgtgtgggattcatcgacgggaatcgaaaccagccaattccttggtggaatttgcttcgacgtgtcagagattccgctccgagacccgccggatagtccattagcgccgcaatggtaccgtctcgaaggtggtggagctcacaacagtgatctaatgcttgccacgtggacaggaactcaagcagacgantcattccccgacgcgtggaaaactgatacagccggaaacgtgaccgcacgagcgaaggtttacatgtcgtcgaagctgtggtatctacgcgctaccgtgatagaagcacaagacttgttaccgcctcagttaacggcgtttaangaagcgtcatttcagttaagaagctcagttnggttcccaaagttcaaaaaan

SEQ ID NO: 9685 - DNA, 429 bp, Arabidopsis thaliana
  unsure at all n locations
  Clone ID: LIB24-092-Q1-E1-G1
aacacaacacaaacacaagatcaacgagaaaccaaacaacaacagcgaccatcgagagaatccactaagaaaacaaaatagattaaaaaggggtttctcaaagtttctcatcatatccattaaagtagcctcctttttgctttctccgtctctctctcttttgtccaatcaaaaagagtttgtgattcttctttatcgtctccttggagagatatgaatggcgatgagcttcctttcgagagtggtttcgaggtttacgctaagggaactcataagtcagagtttgactcgaatttgcttgatcctcgttctgatcctatttgggatgctataagaagaagaagctaaacttgaggcagagaaagagcctattttgagtagcttcntgtatgctggtatcttagcacatgattgtttagagcaagcttt

SEQ ID NO: 9686 - DNA, 417 bp, Arabidopsis thaliana
  unsure at all n locations
  Clone ID: LIB24-092-Q1-E1-G10
acgcgtccggntaagccttctcactgattaactcaatcattcatccgtctctgcaaacaaaggaagaagaatcaagatggctctggaaatctgtgtgaaagctgctgttggtgctcctgatcatctcggcgactgtccgttcagccaacgggctcttctcacactcgaggagaagagtcttacctacaaaatccanctgattaacctcncaganaanccccantggttcttggacattagtcctcaagggaaagtaccagtgcttaagatcgacgacaagtgggtgactgattccgacgtcatcgttgggtatactcgaggagaagtatcctgatccaacactcntttttccggctgaaattgcctcnggttgggattcaacaattttgggnaccttttgggaaaatccttgaagng

SEQ ID NO: 9687 - DNA, 498 bp, Arabidopsis thaliana
  unsure at all n locations
  Clone ID: LIB24-092-Q1-E1-G3
gaactgtttacgccggcccgtaccgttccagagctcccgggtcgacacacgcgtccgagatcagatagagatagagagacagaggnnnnnnnnnnnnnnnnnnnnnnnnnnnnnnnnnnnnnnnnnnnnnnnnnnnnnnnnnnnnnnnnnnnnnnnnnnnnnncccgtntcgcttccttctccaccgtctccttccttcacgcgccgccgtcgatcctaatgtctctttctacgaaggcacagtctggcacgaccgtctccgtcctgtccgccactctttccgttattccgttcgttacgcactctttgacctcgacaaagctattaacacaccgccggatcatttctccgccgacgaagctcgccgtgtttctcgtaccaccgggccaatatttctattgacaataccaccaagcgttggatangaacaaaacccattgagttatactantgcnatgacttggaagggtcaagtaagcgcttaagtaaatgcattgc

SEQ ID NO: 9688 - DNA, 438 bp, Arabidopsis thaliana
  unsure at all n locations
  Clone ID: LIB24-092-Q1-E1-G6
acgcgtccgcgtagttgttgatacatcaaatatccatgtagaaacagaggaggtacgactctgtaatttagattggtctcaagaatttcgactcgtgagtgttgagttcggttgagtcaatcttagttcgtataaattcatatttctaagtgtttgtgtctcaactgaaattccttagagaagccaagagtgatctgttcgctccatcgccttagagaagccaagagtgatctgttcgctccatcgttcacttttgtctttaagcgtatgttgctagaccagacataacagcatggggacacttccaaaccacaaattatggatatttaggccaaccatggcatccgtttcaattaaggaaacattangaggcaacagcaagctgacatgggtgatttcgtggctggacagcggcaatgacaattgacaaagacatgt

SEQ ID NO: 9689 - DNA, 426 bp, Arabidopsis thaliana
  Clone ID: LIB24-092-Q1-E1-G8
ggattatatcttggttataccttagtagaaaccacaattggagtgatggtgcaatgctttgactgggaaatcgaaggagataaagtcaacatgcaagaaggttccggattaagatttttcttggatttggctcatccccttaagtgcactcctattcctcgaatcataaatcatgaaccttctaatacgcagattccaaattcgtgagttcaagacttcacttaatttacaaatatataactgtgaaggttcaaggatcgttattacacccctatggtatatacattatttttgcattcgttgatgttgttgaatgcactttccctaaactgttgtatttcattatgttcatattattgttaagttatttatgtaaatcgcatagatatttgggtgaattggtgtactatcatatatagtaaattt

SEQ ID NO: 9690 - DNA, 523 bp, Arabidopsis thaliana
  unsure at all n locations
  Clone ID: LIB24-092-Q1-E1-H12
gtttngcnggccgtaccggtccaaaattcccgggtcnacccacgcgtccgngatgaagctctttgttcatctctctatcttcttctccatcctcttcatcactctcccatcttcttacagctgcaccgaaaatgacaagaatgccctccttcaaatcaagaaagcacttggcaatcctccccttctatcctcctggaacccccgaaccgactgttgtaccggctggaccggcgtcgaatgcactaaccgtcgcgttaccggtctcagcgttacctccggcgaagtctccggtcagatctcgtaccagatcggcgacctcgttgacctccgtacactagatttcagctacctgnnnnnnnnnnnnnnnnnnnnnnnnnnnnnnnnnnnnnnnnnnnnnnnnnnnnnnnnnnnnnnnactttgaagcacactaatcctcctccgggtcccgaattcctggattacnatcaagcgaagctcaaagaagcctcaaggttcttgggacctttcttttaaccaaattta

SEQ ID NO: 9691 - DNA, 428 bp, Arabidopsis thaliana
  unsure at all n locations
  Clone ID: LIB24-092-Q1-E1-D9
tcttcctnnnnnnnnnnnnnnnnnnnnnnnnnnnnnnnnnnnnnnnnnnnnnnnnnnnnnntggcangagttcaactattgttatgcttcaccattcnattngcatctgtgacccttcttgacctattatcagcncacctgaaatttaagccatctttgcctcaaatcgaagatccaaagacggtgaaggatgtagagccttacaccgttaaagtagtaatggtctttgtggccgacctcganaaggaatgtcccatngacaaacaagttcaaggccttctttgaagaaacttanaggattcnccaagtatgtttgcccaacancgaangattggccaattagattacnaccgggacntganggcanagccgggggtatcttcaaggcnatatctncttttgcgantggcncgattaggggaggaaat

SEQ ID NO: 9692 - DNA, 494 bp, Arabidopsis thaliana
  unsure at all n locations
  Clone ID: LIB24-092-Q1-E1-A4
gnacgttagcctgccgtacttgtccancctcccgggtcgaaacacgcgtccgctcttacaaggagcgaaagagaaacactttccgacttgggtaaggaaaaagagtttgatgggttgttgtcaatccttgttttccggcgataacccacttgggaaagatggagttcagccgcaaccactatctcaaaacaatcacggcnnnnnnnnnnnnnnnnnnnnnnnnnnnnnnnnnnnnnnnnnnnnnnnnnnnnnnnnnnnnnnnnnnnnnnnnatcccatctttctctgagttctctttcgctgaccttaaagcagctacaaacaactttagctcagacaacatcgtatcagaaagtggtgagaaagccccaaatcttgtctacaaaggccgacttcagaaccgtcgttggatcgctgtcaagaagtttactaagatggcttggcctgagcctaaacaatttgcggaagaagcatggggtgtggggaaattgaggc

SEQ ID NO: 9693 - DNA, 447 bp, Arabidopsis thaliana
  unsure at all n locations
  Clone ID: LIB24-092-Q1-E1-A5
aaaaatcccgggtcnacccacgcgtccgnncacgcgtccgccgtcttcatcttcttcctctctctcacgcagctgctttgattaactcttcaggtccagcttaagagttttgtgaagatggtcttagtgctatacgagacagcggcggggtttgccctctttaaagttaaagatgaaggaaagatggctaacgtcgaggatttgtgtaaagagttcgacactccagactcagcacgaaagatggttaagctaaaagcttttgagaagtttgacaatacatctgaagctctcgaagctgtggctaaattgctggagggagctccaagcaaaaggtctgcgcaagtttttgaaagctaattgtcaagggtgaaaacccttgggctgtggctgattcaaagcttggggaatgttatcaanggngaaaactgaaaattgattggattcaan

SEQ ID NO: 9694 - DNA, 386 bp, Arabidopsis thaliana
  unsure at all n locations
  Clone ID: LIB24-092-Q1-E1-B6
gggcnnnnnnnnnnnnnnnnnnnnnnnnnnnnnnnnnnnnnnnnnnnnnnnnnnnnnnnnnnnnnnnnnnnnnnnnnnnnnnnnnnnnnnnnnnnnnnnnnnnncctcgctctctctcaagctctcctagctcgtgcaatctctcancatggttctgaccaacgtggatctttancagctttctctggactcaaatcnaccggttcacgcgcctcagcttcgtctcgtcgacgtatcgctcaatccatgaccaaaaaccgatctctccgtcctcttgttcgcgctgcaagctgttgagactgttgagctaaccanngattcgtcgattgtggacaaatcggtcanntcgattaggtttttggctatcggatngcggtggagaaggc

SEQ ID NO: 9695 - DNA, 458 bp, Arabidopsis thaliana
  unsure at all n locations
  Clone ID: LIB24-092-Q1-E1-B9
ccaagtncccgggtccacccanncgtccgnagacgaagcacaatgggtcaaggaccttccggcggattgaatcggcaaggagatcggaaaccagatggtggagagaagaaggagaagaagttcgaaccagccgcaccacctgctcgtgtagggaggaagcaacggaagcagaaaggacctgaagcggcggcgagattgccgacggtgactccttctactaaatgtaagcttcgattgctgaaattggagcgaatcaaggactatttgcttatggaggaagagttcgtagcgaatcaggagagattgaaacctcaggaagagaaagctgaggaagatagatctaaagttgatgatcttcgtggtacacctatgagtgttggcaatcttgaagagcttattgatgagaatcacgccattgtttcctcttccggtttggtcctgagtactacgttgggcat

SEQ ID NO: 9696 - DNA, 491 bp, Arabidopsis thaliana
  unsure at all n locations
  Clone ID: LIB24-092-Q1-E1-C1
tgttaccctgccngtacttgtccnngcctcccgggtcgaaacacgcgtccgcggacgcgtgggcaacagtttgactggtagtatacctgagacgataggaaattgcactgccttccaggttttggacttgtcctacaatcagctaactggtgagatcccttttgacatcggcttcctgcaagttgcaacattatcattgcaaggcaatcaactctctgggaagattccatcagtgattggtctcatgcaagcccttgcagtcttagatctaagtggcaacttgttgagtggatctattcctccgattctcggaaatcttactttcaccgagaaattgtatttgcacagtaacaagctgactggttcaattccacctgagcttggaaacatgtcaaaactccattacctggaactcaatgataatcatctcacgggtcatataccaccagagcttgggaaagcttactgactgtttgatctgaatgtggcca

SEQ ID NO: 9697 - DNA, 492 bp, Arabidopsis thaliana
  unsure at all n locations
  Clone ID: LIB24-092-Q1-E1-C4
gnaactgttaccctgcccgtacttgtccaaacntcccgggtcgaancacgcgtccggataccttcgccggagaagaagctctcgttctctctatcgtcggagaagctctcgttctctgcttccctgctctgtacagatctcgagccgcatttcgtggatctgtcaaaatcgcgttaaaacctactcgcttctctctaaccctagggtttttgaatttttttcgggacgagggagaaatcaatgtctgtgaagctttgaggaagctatatggttacacctttggttctggttagtcttcgttttgatcggcggagagtgttcgccgaggcttggtgtctccgttattgactaatggtggtttttgatttgagataagagatgcggaactttgcgatgcttctgctgttaattcttcttcttcactctctcgcctcgtttcctatatgctttgctcggttatttccgatgagtttgccatttacccgatnaaag

SEQ ID NO: 9698 - DNA, 77 bp, Arabidopsis thaliana
  unsure at all n locations
  Clone ID: LIB24-092-Q1-E1-C8
tctctcaatgaaacatgaaattcatggncatcancaangcaatgacttnnnnnnnnnnnnnnnnnnnnnnnnnnngg

SEQ ID NO: 9699 - DNA, 496 bp, Arabidopsis thaliana
  unsure at all n locations
  Clone ID: LIB24-092-Q1-E1-D1
ggactgttaccctgccggtacttgtccaaacctcccggggtcgaancacgcgtccggttccgtaatcattttctcttgttgttcctgatcgcgtagctcaagcganaaaaatggcgtcgtttgatgaancaccaccaggaaacgccaaggccggtgagaagatcttcangaccaagtgtgctcagtgtcacaccgtcgaagcangcgccggtcacaaacaaggacccaatctaaacggtctatttggaagacaatctggtacaactgctggttactcttactctgctgctaacaagaacaaagctgtggaatgggaagagaaggcttgtacgattacttgctcaaccccaaagaagtacataccaggtancaagatggtgttccctgngctaaaagaaaccgcaagaccgtgctgatctcaaccgcctacttgaaagaatctactgcgccctaaagtnaatctgaatggggggattgattccgagttgttaagtcn

SEQ ID NO: 9700 - DNA, 483 bp, Arabidopsis thaliana
  unsure at all n locations
  Clone ID: LIB24-092-Q1-E1-D11
naactgttcacgcctgccggtaacggtccnaaaattcccgggtcgacccacgcgtccggagacgtcgtcgtcttctagcttctgattaagtctgataaattatgcccctaaatctgtaattctccaaggattcggattcgatcgatgaaagcttctcaaattttggcggctgcagcggcgagggttggaccggcgttaaggaagcaagtattaaccttaacggacgaagctgcttctagggttcatcatctcttgcaacagcgtcaaaaaccttttctccgattaggcgttaaggctcgtggctgcaacggcttgtcgtacactctcaattacgccgatgagaaaggtaaatttgacgagttggtagaagagaaaggtgtgaggatccttgttgaaccaaaggccttaatgcatgtgattggaacaaagatggattttgtagatgataaactcagatnagagtttgtgttaacaatcctaact

SEQ ID NO: 9701 - DNA, 429 bp, Arabidopsis thaliana
  unsure at all n locations
  Clone ID: LIB24-092-Q1-E1-D4
cttcttgctacttctaatggctttacatcttctgagctcgccagaaaaggaattaatgttccaacatcacaatgctttctgaattatgtgttactggcaatcgtctatggaagtatcatgctgtatcgaagatccgacattaaggcgaaatggtattactatttcctccttgcttttgttgatgtggaggccaattttctcgtggtgaaggcttaccaatacacttcattgacaagtgtcatgctactggattgctgggcgatcccttgcgttttggtcttgacttggttttaccttaagacaaaatacagattgatgaagatcagtgggtgtttttatctgtattgttggtgtttttaanggtagtcctctcaagacgtccatgcaggggatcgagctgggaggaagtaatcctgttaaaggagattt

SEQ ID NO: 9702 - DNA, 441 bp, Arabidopsis thaliana
  unsure at all n locations
  Clone ID: LIB24-092-Q1-E1-D5
acgcgtccgcttggagatgccgaagccattttccgttccatcaagtctcttagccagagtgatggaagatggcgctacagctccaacaatcccgaatcaagcacttttgctgctggcttagcctatgaaacgcttgctggagtgatttcattagcaccttcagagtttgatccatctttgatccagtcggtgaagacgggtatcctgaagctttctgacagtatccaaaaatatgatgatgggacattttattttgatgagaagtctgttgatgcaagtcaaggcccgatctcaacaactgcatcagttattagagggctcacgtcatttgcagcttcagaatccacaggattgaaccttccaggtgataagataattggccggggccaaattctttcnngggtgttggaattcctggtgatcccaaggacttcttcaacc

SEQ ID NO: 9703 - DNA, 490 bp, Arabidopsis thaliana
  unsure at all n locations
  Clone ID: LIB24-092-Q1-E1-D7
nggcccaacttttaccagggccggtaccggtccaanaattcccgggtcgacccacgcgtccgtgcaattcttcagtttccgtttctctcctgagaaatttattgacttcaaaaaccctaaaaagacttgtgattgttcgtttctctaactcgaatgttgatcgtacgacggtgagtgatcgtagtacaatgacgaagaaatcacagccgcagattccgcctccattgtcccgtcgcggcggcgtcgtgtggctgggatggaaactcgtaatcgctttctccgtcgcgctttgccttcttgctcttcttcgaatccaactacagtacaattccttcacgacattgtcgtttccactctccgtcgcgagatctcagacaccgcttcacaaatactccggtgatcgtcccaagctcgctttccttttcttagctcgccgtgatctccacttgattttatgtgggatagattcttcaagggagtggatcatggc

SEQ ID NO: 9704 - DNA, 482 bp, Arabidopsis thaliana
  unsure at all n locations
  Clone ID: LIB24-092-Q1-E1-D8
ccaacttaccagnccggtaccggtcaaaattcccgggtcgacccacgcgtccggcattttgtacatccctgggatgggtcctcttaacaatgaagatgttacaaacccgaaaacaaagaacattcgtctctacgtgaagcgtgtgtttatctctgacgattttgatggagagcttttcccgagatatctgagctttgtgaagggagttgtggactctgatgatcttcctcttaatgtttctcgtgaaattctccaagaaagcagaattgtaagaatcatgagaaagaggctcattagaaaaacctttgacatgatacaagaaatctctgagagtgaaaacanngaggattacaagaaattctgggagaactttggtagattccttaaattgggttgtattgaagacaccggtaaccacaagcgtatcacaccgctacttagattcttcagttccaagaatgaagaggaattgacaagcttgg

SEQ ID NO: 9705 - DNA, 492 bp, Arabidopsis thaliana
  unsure at all n locations
  Clone ID: LIB24-092-Q1-E1-A2
gttacgcctgccggtacctgtccaanctcccgggtcgaancacgcgtccgagaaaagttccaaggcgggacattgacagttacatggagctacttgagagaatcaatgaacacttatttgtctcagccaaatcccgttacagcgcgttgggaaggtgaagatcatctaagagatcctaaattccaactagatgctttccggtatcgaacatcgcgattgctacaaaatgtggcagcgagattgcagaagcattcaaagactcttggtggtttcggggcatggaacagatgcttgaatcatcttttaacgcttgcagaatctcacattgaaacagtcattcttgccaagttcatcgaagctgttaaaaactgcccggacccaagtgcaaaagctgctctgaaactagcatgtgatctttacgcattggaccgaatctggaaagatataggaacgtaccgtaacgtggattatgtggcgcctaacaaagctaag

SEQ ID NO: 9706 - DNA, 455 bp, Arabidopsis thaliana
  unsure at all n locations
  Clone ID: LIB24-091-Q1-E1-G5
acgcgtccgnngacgcgtggggttttataaagagttactttggcaaaatggaaaatccggcgaagagagtgttgatgacatccaacggcgacgaggtgtcccgaaacatcgctttccatctagccaaacacggttgcaagttggtaatgatgggaaatgagggttccctaaggagcattgtanacaagattagagattccattgagggagccttccctgccgatgttatagcactcgacatggaatctgactctgaagttgcttttcatgccgctgtccaaaaggcatgggaactttccggccatttcgatgcttttctcaactcttatacctaccaaggaaaggtgcaggacattcttcaagtctctcaagatgagttccacangaatcacaaagatnaatctcaccgctccatggtttctcttgaangctgtaaccacaangatgaaggacca

SEQ ID NO: 9707 - DNA, 456 bp, Arabidopsis thaliana
  unsure at all n locations
  Clone ID: LIB24-091-Q1-E1-G6
acgcgtccgaaaacttttaagagatggcagctccgattcgattctttgaactgaacactggtgccaagttaccttgcgtcggtctaggaacctacgcaatggtcgcgacagcgatcgaacaggcgattaagattggttacaggcatatcgactgtgcttcgatttacggaaacgagaaagagattggtggtgtgttgaagaagctgataggtgatggttttgtgaagcgtgaggagttatttatcacttccaaactctggagcaatgatcatttacctgaagatgtgcctaaggcactggaaaaaacgttacaggacttacagattgactatgttgatttatatctgatacattggcctgcgagcttgaagaaggaatcactaatgccaacacctgagatgctcacaaaacctgatataactancacatgggaaagcaatgggaaccccnctatga

SEQ ID NO: 9708 - DNA, 453 bp, Arabidopsis thaliana
  Clone ID: LIB24-091-Q1-E1-G7
acgcgtccgctctcttatgtctacttcccagaaaaatttctgcttttgaaattcaagatgtactcgtcgtcgtcctcttcttctatttttcttcaatttccaccggcgagaataaccaccgcgtctccatttatactccgccgtagcaggaagcgaggagctcgttttaaacgacagagtcggaatttagttcttgtgaattcgtcaattttccctccgcctttcgatggcagcgttcctctcgattcctccttagctccatctctcgccggaatcgcttccggcttagccgtttatttatcgtcgaggttttttggaaagtctttggagaagattagtgataaaatcgttgatgatgttgttgttggggaatggattcttttcaccactccgacgccgtttaacagatttgttcttcttcgttgttctttgctctcccttgatgaagaaccc

SEQ ID NO: 9709 - DNA, 507 bp, Arabidopsis thaliana
  unsure at all n locations
  Clone ID: LIB24-091-Q1-E1-H1
cgaatgtaccctgcccgtantgtccgnacctcccgggtcnaaacacgcgtcngcnttgatctttcattaattcttctcaagatcttcaanagtctacaagggaagatcaaagtaattaaataagctgaagtaanaggaagtgatgttttctcttatgtctggactatggagttacatgtttagcaagactgagtttaatgtgcttattcttggtatcgacaaagctgggaagacgacatttttggagaaactgaagacgatatactcaatctcggaaggtcttcctcatgatcgaattgttcctactgtggggcttaatattggncgcattgaagtctccaatgctaaaattgtgttctgggatctggggaggtcagcctggtttgcggnctatttgggagaaatactatgaagaagcacacgcgttgatatatttgattgatgcagcttgcccaacccgctttgaagattctaaaatcctgcnttagaaaaaagccctgccngcat

SEQ ID NO: 9710 - DNA, 493 bp, Arabidopsis thaliana
  unsure at all n locations
  Clone ID: LIB24-091-Q1-E1-H10
tccaaaaattcccgggtccacccacgcgtccgggaatttgccatggtacagtcattggtatcgctctcaagatcgttgtttctcttcgaacacaannnnnnnnnnnnnnnnnnnnnnnnnnnnnnnnnnnnnnnnnnnnnnnnnnnnnnnnnnnnnnnnnnnnnnnnnntcggcggatatggaagtagaaagggaatattcaccggcggagaaagtggaagaggcggaggagatagggtacaaggtgatgggtcctcttaaaccttcggagagacttttcaaaccctatgaaccagtgtttgccattgttcagattggttcgcatcagtttaaagttagcaatggggactccattttcaccgagaagtttaaattctgtgacatcaatgataagttgggnctaaacaaaggtcctccattgggcctccgggaagccagacgaattattgggaaggcctaattttgccaanagtgcgaacagttcantgccggt

SEQ ID NO: 9711 - DNA, 489 bp, Arabidopsis thaliana
  unsure at all n locations
  Clone ID: LIB24-091-Q1-E1-H11
cgcctgtccgtacngctccgaaaattcccnggtcgacccacgcgtccggattcaacagcgatcatgttatgcttcctttggttcagctattgcatgatccatcttcctctgtccaggttgcagttcttggtgctctgaacaatatagtaatggatttttcatcaccgaagtcatcatttatcgagtatggagggataaaacagcttactgagttgtcaaaatcaatggatccaaatactcggtgtagcgctttgcgggctttaaggaacctcatgttccttgccgacattaaacgtaaagaactcttttattcagacgttaaggctcaaggacttgcttgtctcattagtgatcctgagcccccagtgcaagagcaagctttggccctcctccgtaatcttgttgatggatgtatcagctctatcgagtttgtatttgatgaaagatggncctatcctanataacggttgggaagcaattgaaggaaac

SEQ ID NO: 9712 - DNA, 536 bp, Arabidopsis thaliana
  unsure at all n locations
  Clone ID: LIB24-091-Q1-E1-H2
ntgtttacgcctgccagctnttgacgccnnccnntcacgggtccaaacaacgccgtcggcanctcccttgggggttatcaagttnggaaacttgttcctccctcccaagtngagaaaaaagaaaatgcaagatttcnntggtgaataaataagcttaaaacaaaagcagaggctattaactttgagaaacaagcaaaaagtttcttctgatcctgagttaagttttgcccaattatcctcatgtggtagaagagaagcaattattggttttggtttctctattggcttgcttgataatgtttctgcattagccgaaacaacttcttgtgaattctctgtgtctccttctggtcttgctttttgtgataaagttgttggttatggtcctgaagctgttaaagggcaactaatcaaggcacattatgtanggaagttggagaatgggaaagtctttgatantagctataatcgagggaaacctcctactttccgaattggggttgggtgaangggataaaaagggtgggattcangga

SEQ ID NO: 9713 - DNA, 470 bp, Arabidopsis thaliana
  unsure at all n locations
  Clone ID: LIB24-091-Q1-E1-H3
cacgcgtccgaactaagttaaagggaaagcaaaaatgggctgcatcggtgttgtgaatgtaacaagcataaatccatatctcacaagaagatcaaacaaaccctacaattcaagaagaccatcatccatggctgctgcgattagagctgagtctactgagaaattagggattacaattgaaaagaatcctcctgagtccaaactaacccaactcggtgttcgtagttggcccaagtggggttgtcctccaagcaagtttccatggacttacagtgcaaaggagacttgttatttactacaaggaaaagtgaaagtgtaccctaatggatccgatgaaggcgtagagatcgaagcaggcgactttgttgttttccctaaaggaatgagttgcacttgggatgtcccctgttgctgttgataaacattaccaattcnagtgaatggctggcaacaaacctctggcncacctt

SEQ ID NO: 9714 - DNA, 435 bp, Arabidopsis thaliana
  unsure at all n locations
  Clone ID: LIB24-091-Q1-E1-H5
acgcgtccgaaaacgttaaactgtgtgagacttcggagataaaatttcccagaaagcgtgaaaggttaaccggaagaaaatgccgtcacaagatgatgttcaaaatcttccaatcgatatcaccttctctcgtctcggagaatggttggtggatcggaagagaattccggcggattggaggaagagggttgctgtgatcagagtcaaaatcttaaaagagttctcttctttgcctaaagagatcgatccattctttcaaaccctagatcctgaagtgatcggttacttggaggtcaaaaaggtgtatgagattctcctgaagacaactccggaaagccgcaacatctttggncgactttcgggtgcttctggtgtttgnggaaagcaattgttccgtgcgtttgaaaaagatcacatttatcttgggggaagcan

SEQ ID NO: 9715 - DNA, 431 bp, Arabidopsis thaliana
  unsure at all n locations
  Clone ID: LIB24-091-Q1-E1-H6
acgcgtccgtttggattgtggggctgtacaagctgatgcattgaccgttgatcgtcttgcctcgttagaaaagtatgtggaaacagctgtggttcctcgagctgaaatattggaaactgaagtggagtggcttcattctatcaaagctgattttgtggtgtctgatgttgtccctgtcgcatgccgtgctgcggctgatgctgggatacgttctgtttgtgtcaccaatttcagctgggattttatctatgctgagtacgtgatggctgctggatatcaccatcgctccatcgtttggcagatagctgaagattattctcattgcgagttcctaattcgcctcccaggatattgtccaatgcctgcttttcgtgatgtcatcgatgtaccgttangttgtgaggagacttcacaaatctcgcaaggnggtg

SEQ ID NO: 9716 - DNA, 495 bp, Arabidopsis thaliana
  unsure at all n locations
  Clone ID: LIB24-091-Q1-E1-H9
gntaccctgtcgtatgcctccgaaaattcccaaggtcgacccacgcgtccgcaaagaagaagagaagtgtatgtttttgccactcgttttgttactttcttttgatattttgttttaggtgttcacataaatttgatagtgtaaagaaaacaaaaccactttctagttcttaaagaaactagaaatccatggacccgtctcgtcatactcatgtgatgctcgtatctttccccggccaaggtcacgtaaaccctctacttcgtctcggaaagctcatagcctctaaaggcttactcgtcacctttgtcaccacagagaagccatggggcaagaagatgcgtcaagccaacaagattcaagacggtgtgctcaaaccggtcggtctaggtttcatccggtttgagttctctctgacgggttcgccgacgacgatgaaaaaaagattccgacttcgatgcctttccgaccanaccttngaagccgtccggaaaaaaa

SEQ ID NO: 9717 - DNA, 474 bp, Arabidopsis thaliana
  unsure at all n locations
  Clone ID: LIB24-092-Q1-E1-A1
ccgggtcnaaccacgcgtccggtaacaacggtgaagcatcccagatgatcagatatcagagttataaccatcacaattccagactaccatcttcattatcatcgccattgcttgatttgagantgttctangtcanaatcagtaatttcaangtggatcattcgacacctgaggttctcaccattactcatattcctttggatccagattcacttctggagattaatggtgttagaatgancatgtactctgaaggagtttcttctcancttangcgtgatcgtgttgataagaaatctgaangttgctacttttatcagcacggataatatcacgttatctggtantgtgaaagtttgacgtttatnataaagatgagcctgggttttgtccnggaacgcctgagaagtcctggtaataatgggttcaacnggtggaatcnaagccatagcgttaaagcggtggaacatgaat

SEQ ID NO: 9718 - DNA, 449 bp, Arabidopsis thaliana
  unsure at all n locations
  Clone ID: LIB24-092-Q1-E1-A10
acgcgtccgctcttacaaggagcgaaagagaaacactttccgacttgggtaaggaaaaagagtttgatgggttgttgtcaatccttgttttccggcgataacccacttgggaaagatggagttcagccgcaaccactatctcaaaacaatcacggcnnnnnnnnnnnnnnnnnnnnnnnnnnnnnnnnnnnnnnnnnnnnnnnnnnnnnnnnnnnnnnnnnnnnnnnnatcccatctttctctgagttctctttcgctgaccttaaagcagctacaaacaactttagctcagacaacatcgtatcagaaagtggtgagaaagccccaaatcttgtctacaaaggccgacttcagaaccgtcgttggatcgctgtcaagaagtttactaagatggcttggcctgagcctaaacaatttgcggaagaagcatgggggtgttggggaaaatn

SEQ ID NO: 9719 - DNA, 473 bp, Arabidopsis thaliana
  unsure at all n locations
  Clone ID: LIB24-091-Q1-E1-G4
gggtcnaaccacgcgtccgaaaccaaccaaccccaaagccaaacaaagttttatagagaccttccatttctccctctcgtgacaaacgcaatttnnnnnnnnnnnnnnnnnnnnnnnnnnnnnnnnnnnnnnnnntttgagattactttgtatcgatttagctattcgagaaactcttgccgtttgaaagttttaattgttaaagatgtcgagttctatggaatgttctgagttcgtcggtagccggagatttactgggaagaagcctagcttctcacagacgtgtagtcgattgagtcagtatctaaaagagaacggtagctttggagatctgagcttaggaatggcatgcaagcctgatgtcaatggaactttaggcaactcacgtcagccgacaacaaccatgagtttattcccttgtgaagcttctaacaatgggttccaatgggtcaaagatgttaaaccgacgnaat

SEQ ID NO: 9720 - DNA, 487 bp, Arabidopsis thaliana
  unsure at all n locations
  Clone ID: LIB24-090-Q1-E1-D4
cggtacgcctccgaaaattccaaggtcgacccacgcgtccgcccacgcgtccgcggacgcgtgggcggacgcgtggggccaagcnaaaaatctcatagatcagagtcgtcgtcgtcaacttcatcatcacaaaaatctcagctttgnnnnnnnnnnnnnnnnnnnnnnnnnnnnnnnnnnnnnnnnnnnnnnnnnnnnnnnnnnnnnnnnnnnnnnnnnnnnnnnnnnnnnnnnnnnnnnnnnnnnncttcccgttactcttgacaccatcaaccccaaggttatcaaatgtgagtatgctgtccgtggagaaattgtcaacattgctcagaaattgcaagaagatttgaagactaanaaggacgcttatccctttgatgagattatctagtgtaatatcgggaatcctcaatctcttggtcaanaagcctanaacattccttcaaganaagttcctgcnttatgtncctacacagcccctggttgg

SEQ ID NO: 9721 - DNA, 496 bp, Arabidopsis thaliana
  unsure at all n locations
  Clone ID: LIB24-090-Q1-E1-D7
naaactgttcacgcctgccggtancggtccganaattcccgggtcgacccacgcgtccgcagcaaacttcaaaaggtaacatgataaaaaggtttgctgcttgggtttgacttcattacttgctctccctgggggtcaattccccgatgaagcgctgcagcgtgttttcagggcaacacttgatcttctagttgcatataagaatcagctagctgaagcagctaaggagacannnnnnnnnnnnnnnnnnnnnnnnnnnnnnnnnnnnnnnnnnnnnnnnnnnnnnnnnnnnnnnnnnnnnnnnnnnnnnnnnnnnnnnnnnnnnnnnnnnnnnnnnncacaaagtgttaaactgcagaagttagctgcacaggcaaaggccttccactnnnnnnnnnnnnnnnnnnnnnnnnnnnnnnnnnnnnnnnnnnnnnnnnnnnngtttcagtcacccatcgatgaggtggatgcctttgtattctttgtcgatgcaatc

SEQ ID NO: 9722 - DNA, 446 bp, Arabidopsis thaliana
  unsure at all n locations
  Clone ID: LIB24-090-Q1-E1-D8
acgcgtccgctcggttactgggaaacttgggatgggctctgatgcaacgagacaactttgtggaagctgaagatgcatacagaagagctttatcaatagcaccagacaacaacaaaatgtgtaaccttggtatctgccttatgaagcaaggaaggatcgatgaggccaaagagactttacgacgtgtgaaacccgcggttgttgatggccctagaggcgtggnttcacatctaaaagcttacganagagcgcaacagatgctgaatgatcttggatctgagatgatgagaagaggangagatgataangttgaacaganaangctctttgatgcaatctttggatcttcctctanatggcannctcagccttgtagtgagcanactgtgaaggctaaancaaagcctggtttaagcaatggtgatggatacngtgatgaaaacgtg

SEQ ID NO: 9723 - DNA, 505 bp, Arabidopsis thaliana
  unsure at all n locations
  Clone ID: LIB24-090-Q1-E1-D9
gnaatgtccacgccggccggtaacggtccaaaaattcccgggtcgacccacgcgtccgctgacatcacaagtctcttccttccagtctcttgccggatcatacaagcaaccattcattctatcctcccaggattcttcagctgttgtgttaccggattccacaaactcaccgctgtttcatgatgtgtgggacactcagttgaacggtctcaagtttgaccagttcagtcccttgatgcagcaggacctttatgctagtcagaatatctgtatgagtaatagcacaaccaagtaacattctaagatcctccactctcaaacacagtccttgatgacttctgtgccatcaaagacactgatttccaagaaccaaccttctggttgtttggttgggaaacaacaacactagcttttggctcaaagatgtccaagtcgcaagattcacatcaagctagctttgcaagactcacaggccttctctcgccaaagattttccanataattc

SEQ ID NO: 9724 - DNA, 507 bp, Arabidopsis thaliana
  unsure at all n locations
  Clone ID: LIB24-090-Q1-E1-E1
aactgtttacgcctgccgtacngcgtccgaaaattcccnggtcnacccacgcgtccgctggctctggtggtaggtctatgaaatcaacccatatcgtgaatggactgcaacatggtatcttcgtcccagtgggattgggagcatttgatcatgtccaatccgtcaaggactgaagatgacaagcaaaacagctacctactgagtgggaaattgaaaaaggtgaaggaatttgaatctatagttccacatttctcaggccttgagagagtcagtagtgggctctgcaaccagcttctgggcacactgctgtatcgaaaaagctcacagtcgacctctatcaactcatcatctcccgaagccaaacgatgcaagcttgcatcagaaagttcccctggangattcttgcagcaacatagactttgtccagntgaaggctcccacagctctcaaggtatcccnttgcctcagctgaatcanttctttgtttaaacctaggaaaccggncat

SEQ ID NO: 9725 - DNA, 446 bp, Arabidopsis thaliana
  unsure at all n locations
  Clone ID: LIB24-090-Q1-E1-E10
acgcgtccgatagatttagctccgtcccggagaaccatggcgtcgctttgctctgcgaggttccttccttctccatcgctcgatattttatctacgaagacgaagatatcctccgactcgcgctcgcttggttgctcttcgtcgcgtgtctttgctttctcttccgttcaccgttcttcttcgcgtcgcaatcggaatcagctgcaagttgtgtctatggctcctgaggaagaaaagctcactcgtcgtaatcctctcgatttcccaattgagtgggaaagacctaaacctgggaggaggcctgacattttccccaagtttagccctatgaagacaccattgccaccaccgatgccttatgatcctccggaagaggatgaagaagaggaagagaagaaagaagaaggaagaaagnaaacccaaggcaaagaaagaagaggaacaac

SEQ ID NO: 9726 - DNA, 519 bp, Arabidopsis thaliana
  unsure at all n locations
  Clone ID: LIB24-090-Q1-E1-E3
ctgnccgtacgctccgaaaatcccaggtcnacccacgcgtccgaatggcttcntctatgctctcttccgctactatggttgcctctccggctcangccactatggtcgctcctttcaacggacttaagtcctccgctgccttcccagccacccgcaaggctaacaacgacattacttccatcacaagcaacggngggaagagttaactgcatgcaggtgtggcctccgattggaaagaagaatttgagactctctcctaccttccctgaccttaccgattcccgaattgggcaanggaatttactaccttatcccgcaacaaagtggattcccctggtgttgaaattccagttnggancaacngantttgtgttaccgtnaagcaagggtnactcaacccggntantaatgaatggaccgtaactgggacaaatgttggaagcctccccctggtccngttgnaaccggactcccgctcaaagtgtttgaaagggaagttgggaaaagtgcaaagaaagg

SEQ ID NO: 9727 - DNA, 424 bp, Arabidopsis thaliana
  unsure at all n locations
  Clone ID: LIB24-090-Q1-E1-E5
cgagaagcagcagccatggccgacgtagttcaataccgcctcgagcggatggttgacgagcttgatgatctagaacgaagagaaatcttcactcgtgctgagatagctgagatcgtgaagcagcggcgtaagtttgagtaccggctcaagcgtccaagcccactcaaagaagatttcatagcctatattgactatgaggttaagctcgatgagctccgtcagctacggaggaaatcggtggcgcgtgtgactaagaagagaaagaagaaatcagtatctgatttcgccggtgtggctangattgttgagatttanagattgggcgacgatgangtataaaaggtgatatcaaattgtgggttaangtaaccccgaagttttgtaacaagaagaagnattggaagaatggaaaaaggaattggct

SEQ ID NO: 9728 - DNA, 494 bp, Arabidopsis thaliana
  unsure at all n locations
  Clone ID: LIB24-090-Q1-E1-E7
aantgttcacgcctgccaggtaacggtccgnaattcccgggctccaacaatggctaacaaaaacccacttcaaaaaccctttcttttcataatcttatcaatcaatctcatctttcttcaagcagaaacaactactcaaatctctaccaagaagacttatgttatccacatggataaatctgccatgcctttaccttacactaatcacctacaatggtactcttcaaagataaactctgtaacgcaacataaatctcaagaagaagaaggtaataacaacaggatactctacacttaccagactgctttccacggtttagcagctcagcttactcaagaagaagcagagaggcttgaggaagaagatggtgttgtagctgtgatacctgagacaagatacgagcttcacactacaagaagtccaacgtttcttgggttagaaagacaagaaagtgagagagtttgggctgagagagtcaccgaccatgatgtgg

SEQ ID NO: 9729 - DNA, 467 bp, Arabidopsis thaliana
  unsure at all n locations
  Clone ID: LIB24-090-Q1-E1-E9
gtccgnaattcccgggctccaacaatggctaacaaaaacccacttcaaaaaccctttcttttcataatcttatcaatcaatctcatctttcttcaagcagaaacaactactcaaatctctaccaagaagacttatgttatccacatggataaatctgccatgcctttaccttacactaatcacctacaatggtactcttcaaagataaactctgtaacgcaacataaatctcaagaagaagaaggtaataacaacaggatactctacacttaccagactgctttccacggtttagcagctcagcttactcaagaagaagcagagaggcttgaggaagaagatggtgttgtagctgtgatacctgagacaagatacgagcttcacactacaagaagtccaacgtttcttgggttaagaaagacaagaaagtgagagagtttgggctgagaagatcaccgaccaaggat

SEQ ID NO: 9730 - DNA, 377 bp, Arabidopsis thaliana
  unsure at all n locations
  Clone ID: LIB24-090-Q1-E1-F12
gnaacgcccacgcctgccggtaacggtccgaaaattcccgggtcnacccacgcgtccgcaaaggcattgcgtgttggtaaagctgtagcagtagtgagtgtggagctgaggaagaagacgactggtaagattattgctcaaggtcgtcataccaagtactttgctcctcgttccaacctttgatcgttcaaccaacctttcttcttttttacattcaataaacaacatcaaggtgtttttagtctttgtcccnnnnnnnnnnnnnnnnnnnnnnnnnnnnnnnnnnnnnnnnnnnnnnnnnnnnnnnnnnnnnacaaacaaccttactttttcnnnnnnnnnnnnnnnnnnnnnnnnnnnnnnnnnnnnnnnnnngg

SEQ ID NO: 9731 - DNA, 489 bp, Arabidopsis thaliana
  unsure at all n locations
  Clone ID: LIB24-090-Q1-E1-D10
actgtncacgcctgccggtaanggtccgaaaattcccgggtcgacccacgcgtccgttcttggtgagagtaatagacatgggagctcttgattctctttccgagtatatctccgactacttccgcgtcaccagaaaaaggaggaagcggaaagtcatgcagacggtgaatataaaggtgaaaatggactgcgatggttgtgaacgcagagtcaagaacgcggtttcctccatgaaaggntcgaatctccaactcgtagactacttatgtcatgaatggtttctgtaagtttttttgtaattttgatttccattaaacgantactcatgtnagcacgccaaaccatttctacatacaacaagccaaattaacacggtctttatatcaatataaaaatcgcgcangtgtgaaatcggtggaggtgaatagaaagatacataaagtgacngtgagtggatacttgaancanagaaggtatttaaagagaatc

SEQ ID NO: 9732 - DNA, 492 bp, Arabidopsis thaliana
  unsure at all n locations
  Clone ID: LIB24-089-Q1-E1-H8
cccngaaatccggaattcgcgggtcgacccacgcgtccgccgatgtatcaagtgaagttaagtagtcgagagaggggataatgatggaagtggaaggatcgatgaatcgtgctcctgatcaatcatccttcttacgatcaagacgatccaaagctctgtatcagtttaagcagcagaaactcccagcttgtaagccagtcttaacaccaatatcggttataacagtgtttatgttaatgggttttgttttcattcccattggtctcattactcttcgtgcttctcgtgatgctattgaaattatagaccggtatgatgttgagtgcattcctgaagaatatagaaccaacaaactgttgtatataactgattcatctatcccaaagaattgtacgcgctacttgaaggtacaaaagtatatgaaagctcccatttttatctactaccagcttgataactactatcaaaaccatcgccggtatgtaaagagta

SEQ ID NO: 9733 - DNA, 501 bp, Arabidopsis thaliana
  unsure at all n locations
  Clone ID: LIB24-090-Q1-E1-A3
naactgttacgcctgctcgtatgcctgtaanngtccnaggtccacgcacgcgtccgcanaaatcagttggagatattgagagattgattagtttcttggaaccttttggtggaattggtataattgctaggcggccagtgattctcaatagtgacttggatagtcagttgattcctagggttgatttcattaggaatctaagcggggaagacgatttcgctactggaacggtgctacgtagacttcctgccatattgagttatagtgttgagcatatgaacggccaagtagagtttctcaagtcttttgctggcttgacgagtgagcaagtgtttaagattgttcatgtgttccctaatgttatcagcactaagtaaagagaggaaactgcgcccgaggataanagtttctgaanggaatgcggctttgattcccccggcatgttcaaattcctgagtaaagcancattgattttaactctatccgaaaataatccctcgc

SEQ ID NO: 9734 - DNA, 495 bp, Arabidopsis thaliana
  unsure at all n locations
  Clone ID: LIB24-090-Q1-E1-B1
ctgttacgcctgccngtacggcctccgaaaattcccaggtcnacccacgcgtccgctttactctctctgtctgcaaaaggttcatcatttagggtttatacaagtttacagagagtttacgattctgaatcagtgattttggaagaaaccccaatcagctgaagatgaggagattgtttgcgatttcatcgacgggaaacagatttgttcatcggagtcttctcggaaaaggtaaatgtggaactgctcctccttcctttagccattgcagtttctgggtacgagatttctctggtgttagatatgattacagaaaaatatcgataaataggctaaatgatttgaagctagatgatgcggttaatctgttcggtgacatggtcaagtctcgtcctttcccttcgattgttgagttcaataaactgttgagtgccattgctaagatgaacaagttcgatctgtcatctctctcggcgaacagatgcaaaatttggg

SEQ ID NO: 9735 - DNA, 417 bp, Arabidopsis thaliana
  Clone ID: LIB24-090-Q1-E1-B10
tcttgatcttttagtgttcttgctttgtcgcttcaacgcttaagtttggatttgtgtgagtctgcataatcatggcgaggaagatgcttgttgatggtgagattgataaggtggcggctgatgaagccaacgcgacgcactatgattttgatttgtttgtcatcggtgccgggagtggcggtgttcgtgctgctaggttttcggctaatcatggcgctaaggttggtatttgtgagcttccatttcaccctattagctctgaggagattggaggcgttggtggaacctgtgttatccgtggttgtgttcctaaaaagattctcgtctatggagctacttacggtggtgaacttgaggatgctaaaaattatgggtgggaaataaatgagaaagtcgacttcacatggaagaaacctt

SEQ ID NO: 9736 - DNA, 491 bp, Arabidopsis thaliana
  unsure at all n locations
  Clone ID: LIB24-090-Q1-E1-B12
naactgttcagcctgcccgtaacggtccganaattcccgggtcnacccacgcgtccganagaattaaagaggcatgatgtatttgatgagtactgagaaagctgtcaggcttggtgaaaggaaagataaaacaatgtcagcttcagccgtgggaagcagtgcttcggcggcttcacagtgtcagaaatgtttccaagctgggcattggacttatgagtgtaagaatgaaagggtttatatctcgaggccttcgagaactcagcagcttaagaatcctaaacnnnnnnnnnnnnnnnnnnnnnnnnnnnnnnnnnnnnnnnnnnnnnnnnnnnnnnnnnnnnnnnnnnnnnnnnnnnnnnnnnnnnnnnnnnnnnngaagcgatctaagaagagtaagcgaaagcataggtcaaagtctgattctgaaagtgataagtgaaccctctgtgtttgaaacagatagtgatggctcatctggagaagagtantca

SEQ ID NO: 9737 - DNA, 494 bp, Arabidopsis thaliana
  unsure at all n locations
  Clone ID: LIB24-090-Q1-E1-B2
aactgttacgcctgccgtacngntccgaaaattcccnaggtcnacccacgcgtccgcacaactggggtcagcttctggttctctctctcggtaactttctgagctgaagaaccctaattcttatcttcaccggattccgggtatagggctttgtaaagttgttgaatttacaaagaaagatatgctggtttgtctgggttttgtagaagaatctgtgttgttgctttgagattaaagtccgaacaatgttgggtttgattcatgtccttgatgagctcgtcaatggtcttatgccactgcttatcattcagtagtcaaaacccagatcctgaatcatcatcatcttctcttcttcgttataagccttgtgattcgatttcgttgtggggtaagagaaggaagaagctttggagatttgttcccagtgcggagaagaataacagtcatacgggtaataataataagaggagaagaagctggtggcagangttttt

SEQ ID NO: 9738 - DNA, 492 bp, Arabidopsis thaliana
  unsure at all n locations
  Clone ID: LIB24-090-Q1-E1-B6
actgtcacgcctgcnggtaacggtccgagaattcccgggtcgacccacgcgtccgggaaaatccancttatagaagcaatcgtgcggcagcgttggntgcgtcagggangttagaagaancagttaaagaatgccttgaagctgtgagatgtgatccttcttacgctattagctcatcagagactcgcttctctttatctaagattgggagaagctgagaatgcgagacgtcatctttgtgtttccggacaatgtcccgatcaagctgatttgcagaggttgcagacgcttgagaagcatctcagactgtgtacggaggctcgaaagatcggtgattggagaacggtgattancgaaatcgatgcanccattgcaaatggagctgattcttctcctcagcttgtagcttgtnaaggctgaagcctttttgcggcttcatcagataaaggattcagatttgtgtatatccagcattccgatattggatnatca

SEQ ID NO: 9739 - DNA, 482 bp, Arabidopsis thaliana
  unsure at all n locations
  Clone ID: LIB24-090-Q1-E1-B9
gcctgccggtaacggtccgaaaattcccgggtcgacccacgcgtccgcagcaaacttcaaaaggtaacatgataaaaaggtttgctgcttgggtttgacttcattacttgctctccctgggggtcaattccccgatgaagcgctgcagcgtgttttcagggcaacacttgatcttctagttgcatataagaatcagctagctgaagcagctaaggagacannnnnnnnnnnnnnnnnnnnnnnnnnnnnnnnnnnnnnnnnnnnnnnnnnnnnnnnnnnnnnnnnnnnnnnnnnnnnnnnnnnnnnnnnnnnnnnnnnnnnnnnnncacaaagtgttaaactgcagaagttagctgcacaggcaaaggccttccactnnnnnnnnnnnnnnnnnnnnnnnnnnnnnnnnnnnnnnnnnnnnnnnnnnnngtttcagtcacccatcgatgaggtggatgcctttgtattctttgtcgatgcaa

SEQ ID NO: 9740 - DNA, 498 bp, Arabidopsis thaliana
  unsure at all n locations
  Clone ID: LIB24-090-Q1-E1-C1
ctgttacgcctgncgtaccgctccgaaaattcccnggtcnacccacgcgtccgcccacgcgtccgatggagtctctccctgaaaacgagaaagtggttcttgttggtcatagctatggtggcattggaacttctcttgctatggaaaggtttccgaccaaagtctctgtcggaatcttcctctctgcttacatgccgcaccatgactctcctccggcggttttgattcaagagtattttacgagactaccanagggtttcgctatggactgtgagtttacattcgaggaaggattataacacccaccaagttcagttttgttcggtactagtttcttgaangagaaggcatataantaattgccagttagaggatctanaattaaccatggcgttgatgaaaccaagctggttatacactaaggaaatgggaggtgaagatctgataacaaaggacaagtatgggatctgggaanagagtgtttaatgtctgtgaaan

SEQ ID NO: 9741 - DNA, 494 bp, Arabidopsis thaliana
  unsure at all n locations
  Clone ID: LIB24-090-Q1-E1-C11
gnaatgttcacgcctgccggtaacggtccgaaaattcccgggctccaacaatggctaacaaaaacccacttcaaaaaccctttcttttcataatcttatcaatcaatctcatctttcttcaagcagaancaactactcaaatctctaccaagaagacttatgttatccacatggataaatctgccatgcctttaccttacactaatcacctacaatggtactcttcaaagataaactctgtaacgcaacataaatctcaagaagaaganggtaataacaacaggatactctacacttaccaagactgctttccacggtttagcagctcagcttactcaagaagaagcagagaggcttgaggaagaagatggtgttgtagctgtgatacctgagacaagatacgagcttcacactacaagaagtccaacgtttcttgggttagaaagacaagaaagtgagagagtttgggctgagagagtcaccgaccatgatgt

SEQ ID NO: 9742 - DNA, 496 bp, Arabidopsis thaliana
  unsure at all n locations
  Clone ID: LIB24-090-Q1-E1-C3
aactgttaccctgccgtacngctccgaaattcccngggtcgtctaaagtctctaaaaccaccatcgaagtcttgacagagagaattcgaatcggacagagaatttcttccgtagtttttcttgtaagcgaanaanaagtttagttagctcgtgtgagagaagggtgtaatgagctgttttggntggtgtgggagtgaggattttcgcaacgctactgacactggcccaaggccagcgcataacccagcaggttacaatggaggccactaccaaagagctgatccacccatgaaccaacctgttattcccatgcagcctatttctgtaccanccattccagtggatgagctgagagatataactgataactatggttcaaagaccttgatcggcganggttcttatggaagagtgttttatggtgttcttaaaagcggtggtgcagctgccatcaagaaacttgactctagtaagcagccagatnaagaatttcttt

SEQ ID NO: 9743 - DNA, 497 bp, Arabidopsis thaliana
  unsure at all n locations
  Clone ID: LIB24-090-Q1-E1-C5
naaactgttcacgcctgccggtaacggtccnaaattcccgggtcgacccacgcgtccggtggattttagggaaaaaagagaattcgaacaaggtcgtcgtcgtcgtcggatttgtagatcatcatggagttctctttgatcgcagatacagtcacagtttgcacggctaagcaaggtatcgcgtttgggaaatctcttcttcaaaggttggatttggccaatcacatttctttcgccgattccgttgttgatcatcaatctcccggtggaggaatcgttcaagcatcggcgattattttccccgtcgatgcaattgctcctccaccggtcagatctagctcttataagacaattcgccggatccgtaaaaagcgacgaaccaggcgagtttcgtttggtgggagatggagatgacgcaggagattttgggtcgttttctgttaagaaggtgatttcggtggtaacgacggtccatttggatttggaggcggaggaaa

SEQ ID NO: 9744 - DNA, 488 bp, Arabidopsis thaliana
  unsure at all n locations
  Clone ID: LIB24-090-Q1-E1-C9
acgttcacgcctgccggtaacggtccgaaaattcccgggtcgacccacgcgtccgctggctctggtggtaggtctatgaaatcaacccatatcgtgaatggactgcaacatggtatcttcgtcccagtgggattgggagcatttgatcatgtccaatccgtcaaggactgaagatgacagcaaacagctacctactgagtgggaaattgaaaaaggtgaaggaattgaatctatanttccacatttctcaggccttgagagagtcagtagtggctctgccaccagcttctggcacactgctgtatcgaaaagctcacagtcgacctctatcaactcatcatctcccgaagccaaacgatgcaagcttgcatcagaaagttcccctgnagattcttgcagcaacatanactttgtccaggtgaangctcccacagctctcnaagtatccgttgcctcagctgaatcaaatcttgttaanaactaaggaa

SEQ ID NO: 9745 - DNA, 489 bp, Arabidopsis thaliana
  unsure at all n locations
  Clone ID: LIB24-089-Q1-E1-H2
tagaagtccggaatcgacccacgcgtccgcggacgcgtgggcaacagtttgactggtagtatacctgagacgataggaaattgcactgccttccaggttttggacttgtcctacaatcagctaactggtgagatcccttttgacatcggcttcctgcaagttgcaacattatcattgcaaggcaatcaactctctgggaagattccatcagtgattggtctcatgcaagcccttgcagtcttagatctaagtggcaacttgttgagtggatctattcctccgattctcggaaatcttactttcaccgagaaattgtatttgcacagtaacaagctgactggttcaattccacctgagcttggnaacatgtcaaaactccattacctgggaactcaatgataatcatctcacgggtcatataccaccaaagcntgggaagcntactgacntgtttgatctgaaagtgggcnacaatgatttgggaagggc

SEQ ID NO: 9746 - DNA, 508 bp, Arabidopsis thaliana
  unsure at all n locations
  Clone ID: LIB24-089-Q1-E1-F3
ntggttgccttgcctaggctccggaatccaggtcgacccacgcgtccgcggacgcgtgggtttatatattgtaacggtgaaaaatcgtcatctacttcttcttgaaaccctagttccaaaatctgcacacacactcagaagaagaagacgtcatctctctatctctgtctttctgctaatttcacgaagaatctgagaatatgccaaccatcagtgttggcagagaccgtttgttcgctgctcttggagaatcctatactcaggaaaaattcgaggaactgtgtttcagtttcggtatcgagcttgacgatgtgactactgaaaaggcaataatcagaaaagagaagcacatcgatgaagaagctgatgatgatgaagaaatcatctacaagattgaaattcctgccaacaagacctgatttgctttgcctcgaaagggcttgctcaatctcctcgcgttttcatcgaagaaacaggagataccaacgtatactcttgctgacattag

SEQ ID NO: 9747 - DNA, 445 bp, Arabidopsis thaliana
  unsure at all n locations
  Clone ID: LIB24-089-Q1-E1-F4
gggcaacagtttgactggtagtatacctgagacgataggaaattgcactgccttccaggttttggacttgtcctacaatcagctaactggtgagatcccttttgacatcggcttcctgcaagttgcaacattatcattgcaaggcaatcaactctctgggaagattccatcagtgattggtctcatgcaagcccttgcagtcttagatctaagtggcaacttgttgagtggatctattcctccgattctcggaaatcttactttcaccgagaaattgtatttgcacagtaacaagctgactggttcaattccacctgagcttggaaacatgtcaaaactccattacctggaactcaatgataatcatctcacgggtcatataccaccagagcttgggaagcttactgacttgtttgatctgaatgtggncaacaatgatctggaa

SEQ ID NO: 9748 - DNA, 482 bp, Arabidopsis thaliana
  unsure at all n locations
  Clone ID: LIB24-089-Q1-E1-F6
ccggaattcncgggtcgacccacgcgtccggttctttcaactttgaagtgcagagattaagttgagctcaagactcagagggatattcttttgtgttgttgctggcatttcggctacttttctcattgtcctgatgattattgggcatccgttcgtccttctcttcgatccctataggagaaaattccaccacttcattgctaaactttgggcttccataagcatttatccgttttacaaaatcaacatcgagggtttggagaatctgccatcatcagacactcctgctgtatatgtttcaaaccaccaaagttttctggatatctacacacttcttagtcttggaaaaagctttaagttcatcaagcaagacagggatattcgtaattcccatcatcggttgggccatgtccatgatgggtgtcgttcccttgaagcggatggncccaagaagccaagtggattgcttaaaacgctgcatg

SEQ ID NO: 9749 - DNA, 482 bp, Arabidopsis thaliana
  Clone ID: LIB24-089-Q1-E1-F7
acgcgtccgatttaaatcgcaactttcgtcagtttttgtgtgttttcttctacacatagacactttgctcaatcaaacacactctctgttctgtttttctcaaacttgtttaagttcgatgactatggaagtgtcgaaaaagaaaggtggagattttcagcaatgtcacgaattgattcccggtttaccttccgaactagctttggagtgtttggtcagagttccgttccaattccaatccgccatgagatccgtttgccgttcttggcgtagcttactctccggactcttcttttatccaagaaacggcgggagatgcggcaaaaacaagaagcttcctccctcctgcctccgttcaaaccgctaaacgccgccaattccaagcgtctaaaatcggttgacgaagacattaatgggttgacgaagaaaaaatcagaaggatgaagtcacaacccgcgccgttttctgcaagccgcgttttg

SEQ ID NO: 9750 - DNA, 513 bp, Arabidopsis thaliana
  unsure at all n locations
  Clone ID: LIB24-089-Q1-E1-G1
ntggttcccttgcctacggctccggaatcccgggtcgacccacgcgtccgtgtgtctgtaacattaccaaaacgaaaccttccttgtggattcccacttctttcttctgttttcttcttcctcttctttaaattggatgttttgggcaagaaacagagagaaacacgttaatttgagagtttgtcattgaatatttggtttgcaatggaaagagattttctgggtttgagcgacaagcagtatctaagtaataacgttaagcatgaggttaacgatgatgctgtcgaagaacgagggttaagtacgaaggcagctagagaatgggggaagtcaaaggtttttgctacttcaagtttcatgccttcttcagatttccaggaggctaaaggcgtttccgggtgcatancagtgggggatagtttctgcgggcaaatgttttccgcagatgccaaatttggtgggtgcgtttcaaaacgcgacgccgccttttacnangcgggttcaattccttta

SEQ ID NO: 9751 - DNA, 484 bp, Arabidopsis thaliana
  unsure at all n locations
  Clone ID: LIB24-089-Q1-E1-G11
tctngccgttcgtacgccccnaaattcccaggnccacccacgcgtccggnacatacaagcagctattttgttggtcgagatattcacagtcacaaggttgcttggggtcagatatcaatggttgatgcagaaagaaggctattagctcatgctctcgttgatcctgataatcaacactttatattgctgtcagatagttgtgtaccgctattcgactttaactatatctataaccacttgatcttcgcgaatctcagcttcattgattgttttgaggatcctggaccacatggatctggtaggtattcacaacatatgctgcctgaggttgaaaagaaggattttcggaagggctcacagtggttttcaatgaagaggagacatgctatantcgtcatggcggacagcctttactacacnaaattcaagcttnactgtangccaaatatggaagggacgcaactgctattcggacnaacatttt

SEQ ID NO: 9752 - DNA, 440 bp, Arabidopsis thaliana
  unsure at all n locations
  Clone ID: LIB24-089-Q1-E1-G12
gttttngggttccgtcgttcttattcactctcgattcttcgcttagcttcgtcttcttcatcgaagatttatctctacaattcgctgtggatcttcggggcgggcgaatttcattgattttccattgaatctgcgaggttacatatccggatttgtgttatcggagctgaatttaggaatggaggtagagaaatccaagtataggagcgaagatttggatgtggtggaggaggaggctgatttgaagaagagtcggcgagatcgtgatcggagtaatgagcggaagaaggataagggttcaagagaagcgtcgaagagaaggataggcgggaagaaacgagttaagaatantgattctgaaagatgattacgataganatgatgatgaaganaaggaaaagcctnaggagaangagaaggaaccgagaccgagggataan

SEQ ID NO: 9753 - DNA, 486 bp, Arabidopsis thaliana
  unsure at all n locations
  Clone ID: LIB24-089-Q1-E1-G4
gaattccaagtcgacccacgcgtccgctcaannnnnnnnnnnnnnnnnnnnnnnnnnnnnnnnnnnnnnnnnnnnnnnnnnnnnnnnnnnnnnnnnnnnnnnnnnnnnnnnnnnnnnnnnnnnnnnnnnnnnnaccaaatatgggaacctgcttctccagctcaactaaatccacggctgagatctctccctttgacctcgtcgtcaaacctcctcctccttccgccgccgccaccgcaccaccaacccaacgaatccccaccgcgaaaacagaaacatcgacggtgagcttcaccgcaacagtgagattatacggaccacctaacagtctagtgacgtcgtatctccgtttcgctcttctccacaagaaagttccgctccgtttcgttccatcggaagaccaaaaaccgacgattcaagtcggattgggagactgtatcaagttctcgagaggttcttctccgttacatcgaaggataagttccc

SEQ ID NO: 9754 - DNA, 483 bp, Arabidopsis thaliana
  unsure at all n locations
  Clone ID: LIB24-089-Q1-E1-G5
acgcgtccggggttttgaagcaaggtttctcgcgattttctcgatatctctcgcccatggcgaaaccaagtcgtggccgtcgttccccctccgtgtctggctcgtcatctcgttccagttccagatctcgttcgggttcgagcccctccaggtctatttcccgctcacgctcccgttctagatcgctctcttcatcttcatctccttcgcgaagcgtcagttctgggagtcgcagtcctccacgtcgtggaaaaagtcctgctggacctgctangcgaggtcgctctcctcctcctccaccatctaaaggagcatcttcaccttcaaagaaaagctgttcaaggaatcctctngttctcaaggtttgattcccttaagcaaggaaatgtgaaatgaaagccaacctcaaaagaaaatctttgggnaacntttgggtgnaagttaatncaatggtcgaaaattgcgaatnggattcgaacctgt

SEQ ID NO: 9755 - DNA, 511 bp, Arabidopsis thaliana
  unsure at all n locations
  Clone ID: LIB24-089-Q1-E1-G6
gtttgcngttccntggccgtanantccggaattcccgggtcgacccacgcgtccgccgtcgaagctttctctttccgatctttcaatggcgattctcaaatctcacttcttcttactcttccctcttcttcttctccactttcacactgtctcctttgctcagacgctctttgtgttcggagatggtctttacgacgccggaaacaaacagtttctctctcagaaccgagttgacgcaagctttcctccttatggagtcactgtaggacaagccaccggacggtggtccgatggttctatcgttcctgattatcttgctaaattcatgggaattcctaaaatctctccgattctcctaaccacggcgggatttttctcacgggagctaatttcgccatcgccgaagctaacgttcttggctctcctccggagacgatgactttgtcacaacaaagtgaagaaattctcggaaaacaaagaataagtggacaaatcaaacacgtttctgaaa

SEQ ID NO: 9756 - DNA, 510 bp, Arabidopsis thaliana
  unsure at all n locations
  Clone ID: LIB24-089-Q1-E1-G7
gttgncctgggccgtaccggtccggaattcccgggtcgacccacgcgtccgcccacgcgtccgtttcataaagctcataacatacataaaaaatgggtgaatcttttagattantcaatcatcatcacttcctcacaacttttctcataatcatagccatgctcaaattggttcatnnnnnnnnnnnnnnnnnnnnnnnnnnnnnnnnnnnnnnnnnnnnnnnnnnnnnnnnnnnnnnnnnnnnnnngtacccaagactctgtttctcttcactctcaactcatgctagtctcatccaaacaagccccaagctcatggctcatgcggctctcaacatcacattagcctcggctaaagtaacttcaagcaatgatggtgcgtctctcgaatagtcgggtcaagcctaaagaaagtctcgggcatganaagactgcgtcgaagaattaggtgacacgttgggagggagcttangaaatcnattggtgagatgtgtcaactaagtggctcnaa

SEQ ID NO: 9757 - DNA, 506 bp, Arabidopsis thaliana
  unsure at all n locations
  Clone ID: LIB24-089-Q1-E1-G8
gttnccgtnctacgcctggaatccggaattccgggtcgacccacgcgtccgcccacgcgtccggtttcttttccgattccggcgatggggtcagtcnccgatccaggcgagttaactgagttagctcagccgagtttcgaggagtttcagaaacagacgtcgttgatgacgagctgtactcttctatggcaagagcnctccgatcacttcacttctctanagcagantctgatgaanaaatctgaagcgttgaagcagatgnttganactctacgataaccagactcngacctcgctcgagtctctgaagcgtagagaggtancaatcgatcatagcgttgagatcgtagctgggaaagtaggtgaacgatctacagctgcncntgaancgttacanaaagctagaaatngttgtggtacatngttgatgcactnattggggaaatcgatgttgcatgttacccccaagtgttaatngagaaagccaccggacaatgcttgngact

SEQ ID NO: 9758 - DNA, 500 bp, Arabidopsis thaliana
  unsure at all n locations
  Clone ID: LIB24-089-Q1-E1-H10
gaacgtttacgccggtcgtccgncccgnaaattcccgaagtccacccacgcntccgaaaaaaacaagaaacagagcctatgacgtgcttgttcagattggtcatgcatacgcagatgaggagaatggtggagacaacgagaagttgcatgggtacttcgatatggtggttggttgcttggctggcgaaaaacctcaaatgattagtgctgctgtcaagggtgtagctcgtttgacatatgagttctccgatctcatatctagtgcttacaatttacttccttcaacatttcttctcctccagaggaaaaataaagaaattacaaaagcaaatttaggtttgttgaaggtgttggtggctaaatcacccgttgaaggactacacgcaaatttaaagagcatggttgaaggcttactaaagtggccaanaaggaacaaaaaatctgttcaaaagcaaangtgaggcttctgttggagatgctcatcaagaaatgttggcncc

SEQ ID NO: 9759 - DNA, 467 bp, Arabidopsis thaliana
  unsure at all n locations
  Clone ID: LIB24-089-Q1-E1-F2
acgcgtccgcccacgcgtccgtaaaaactggaccttccgatcgctaatcaatatcaatcttagctttttttcgtcttccggttttagattttgtatcctaagctccgatactctttacgagaagcgtttttatttcaagctcagagtcaatcttagtatagggctgctaatggttttcatgtcttggatcacatcctgtggttgaaaaaggagtnnnnnnnnnnnnnnnnnnnnnnnnnnnnnnnnnnnnnnnnnnnnnnnnnnnnnnnnnnnnnnnnnnnnnnnnnnnnnnnnnnnnnnnnnnnnnnnnnnnnnnnnnnnnnnnnnnnnnnnnnnnnnnnnnnnnnnnnnnnnnnnnnnnnnnnnnnnnnnnnnnnnnnnnnnnnnnnnnnnnnnnnnnnnnnnnnnnnnnnnnnnnnnnnnnnnnnnnnnnnnnnnnnnnnnnnnnnnnnnnnnnnnnnttcctc

SEQ ID NO: 9760 - DNA, 501 bp, Arabidopsis thaliana
  unsure at all n locations
  Clone ID: LIB24-087-Q1-E1-F8
ganatcgcgggtcgacccacgcgtccggaaaacatctaaagccatcaaaaatatatccatagaagcttcatcgaaatggcgaatcaagcagctgctgcagcattcttccttttcgctttagccgtcttctccaacttggagctctcagcttcttcacttgtcagtggcaagatctcttgccttgactgccaccgcgatttcgacttctcaggcattaaggtcctccttaaatgcgacggagagaagaaacaaataaccgcggtggcagctgcagacggatctttccggtcagtgcttccaacggctgacaaaaaaggctccataaattgtcttgcaaagctcttggggaggccctgagcaactctatgctcacaaacacaacttggtctctgaattgggtcaaatctaaacacgaattccaangttttaactacctcaaaccnacttgccttcnctctcncctgcccaaaccatcccgaaatgatatcggaantagaatcg

SEQ ID NO: 9761 - DNA, 505 bp, Arabidopsis thaliana
  unsure at all n locations
  Clone ID: LIB24-087-Q1-E1-G1
taggcctccggaaatccnangtcgacccacgcgtccgggagcagagaagagagaagaggaagcttgtagaaatcgatggcgacgatagtgcagtgtctttcttcctgtgcgaccctcgaatcccaattcaaagtcctttcgcttaagggaatctcttgttcgtcaccatcttcttccttctccaatcgtcgtggtgcttcggctaccttatcctcttcccttagcttctctcagagcgtttctcaatgcgtcgccttctcaaccgggaatttgtgggtacagaagccaatgaggcaattgattgtgtgtgaggctgctgctcctaccaagaaagctgattcagctgcaaagagagctcgccaagctgagaagaggcgtgtttacaacaaatcctaagaaatcctgaaancccttacccggattaaanaaaggccttggggaagcactttaaggggctcaagnaagaaaaactgatgccncaaacctgaatgaaaaattgtnaacg

SEQ ID NO: 9762 - DNA, 527 bp, Arabidopsis thaliana
  unsure at all n locations
  Clone ID: LIB24-087-Q1-E1-G2
cctaggaaatccaaagtcgacccacgcctccgctttntcccatctctctttcnatttctccctcatacctttgtttattctgatgaagttgtgagcactgnnnnnnnnnnnnnnnnnnnnnnnnnnnnnnnnnnnnnnnnnnnnnnnnnnnnnnnnnnnnnnnnnnntgacttggtgcaatgaccgtagcgatgttcagaccgttgaaagaatcattccctccccgggggcggctgagtcccccgtagcctcacttccggtctcttgtcacaaaacttgcccttcttgtggccataacttcaagtttcacgaacaggctgggattcatgacttgccggggacttcctgctggagtaaaatttgatccgacggatcaagaggtcttggngcatcttgaaggaaaggtaagagatgacncaaaaaacttcaacctcccaattggagaatttaanccttacaatcgaatgggtgaaaaccgnaatttgntaanacccaaccctgaaaaaattggcaaggagtngaacaag

SEQ ID NO: 9763 - DNA, 524 bp, Arabidopsis thaliana
  unsure at all n locations
  Clone ID: LIB24-087-Q1-E1-G4
taggaattccanagtcgacccacgcctccgcccangcgtcaggaagaacagagccgagaatttcaagaacgcatctgaggtaaaatcaataactgctagtctcaaagccggtgaagcagggtatgatccgttttcaagaagatggacccgatcatcaaactactacaacgggaaaaacaaggggaaagatggagaagagaacgaggcagcggttgcagcagcggttgagaccaatggagcagatgcaggagcaggtgttgaagcgacagaagcagctttagaagcagctgcagaggcaggaaagctaatagacacaagagctccaataggtcaaggagcagaacacaatcagcttcataactttgaattgtccgtttatcgctaacggctttacagaantacggaggacctcaaaggagttcaagaaagcgttcatggcnaggaancaactgaccgaagcaactgttgggattcaaaantcccagngaccaatgggcaagagaacatggccttacnttaactgt

SEQ ID NO: 9764 - DNA, 511 bp, Arabidopsis thaliana
  unsure at all n locations
  Clone ID: LIB24-087-Q1-E1-G5
gganatcccgggtcgacccacgcgtccggagaagattaggagaacgtggaagaagaagccatggactctatcgtctccagttcgacgattcttatgcgatcatatctcactcctccggttcgttcatgttctccggcaacctccgtttccgtcaaacctctgagctcagtccaggtcacctccgtcgcggctaaccgccacctgctttcgttaagctccggtgctagaagaaccagaaaaagctctagttcggtgataagatgcggcggaatcaaagagattggagagagtgagttttcgaagtacggttctcgaatcagcccagccggttttggttgaattcgtcgctacttggtgcnggtccctgcaaattgatctancangctatgggaagccttatctcaaggaatatggnggacaaaattggacaattgtaangattgtttacgacgnctganccaaaggttaatanccgggnttcaagggttaanggtttaaccgnatttccatt

SEQ ID NO: 9765 - DNA, 501 bp, Arabidopsis thaliana
  unsure at all n locations
  Clone ID: LIB24-087-Q1-E1-G7
gganattcccgggtcgacccacgcgtccgcccacgcgtccgcgcgtcgatccacatcgcaggtgagggttcctgcaatttatccctcgtggtctctgaatctcagatcgtcgtcaacgaatcctccattttctgaatcaaaattttctggaaacaatggggagcttggggacgatgctgagatatccggatgacatatatccgctcctgaagatgaaacgagcgattgagaaagcggagaagcagatccctcctgagccacactggggtttctgctattcgatgctccacaaggtttctcgaagcttttctctcgttattcagcaactcaacaccgagctccgtaacgccgtgtgtgtgttctacttggttctccgagctcttgatactgttgaggatgatactagcataccaactgatgaaaaggttcccatcctgatagcttttcaccggcacatatacgatactgattggcaataatcatgtggtacgaaaggataca

SEQ ID NO: 9766 - DNA, 533 bp, Arabidopsis thaliana
  unsure at all n locations
  Clone ID: LIB24-087-Q1-E1-G8
tcctaggcccccgaaaccgnanatcgcgggtcgacccacgcgtccgcccacgcgtccgcggacgcgtgggctcgtccccaacgatatttgttcacttctactgcgtattctccgaccagctctctattcaggtcttggagactttgtcccaacaccaacaaaacgtcgtccgatgctcctcctcagtgttccgtctagccaacgaccttgtaacctcaccggtaaacaatctcttccaagatgaattggcgagaggagacgtctgcaaatccatccaatgttacatgagtgaaactggagcatcagaggataaggcgcgttcgcatgttcgacagatgatcaatgacttgtgggatgaaatgaattatgagaaaatggcacatagctcttcgatactcaatcatgattttaagggaaacagtganaaatttgggaacgcatgtctcaattgcatgtatcaataatggcgatgggccatggctctcccgaaaaangccaaaatcgttggtngtggtcaagtccttacccttcaa

SEQ ID NO: 9767 - DNA, 522 bp, Arabidopsis thaliana
  unsure at all n locations
  Clone ID: LIB24-087-Q1-E1-H2
cgacccacgcntccgtccacttcctctgctccactcattctcctccaccgtcgccacaaaatccaccgcctctagaatcactgccacgccgtcgaaaatccgcttctctgtcataaacgccacgtcggagaatggaaacagcggtggtagtaaaaacgatcgtgatgaggatccatcttttaacccatttggtttcgttacagacaacccgtctagccggagtgcaattcagttaccagagtctccggcggaagacggcaatgtcggccaaatgctctacaggactgaagataaaggtaaagagtatggctcaactatcaaatctgggaagcttagatggtttgtgaanagagactgggttaaaaggagagtcgtcaaggaacaatggtatttgttcaaaggggctcctaactcaanccttttagcctacaagnaactggtcaatgtccgaanttgtcaaaangccggganttcnattgcctttgcnccctggaacgngnataaggattccggattcaantg

SEQ ID NO: 9768 - DNA, 453 bp, Arabidopsis thaliana
  unsure at all n locations
  Clone ID: LIB24-087-Q1-E1-H4
actggttcgcntgccctaggnncnaggaaatcgcaaagcttcctcatnccgtggtgaacctgangaagcagaggagaattacgctagaggctcatgggctgctctgttcgctggaatctgtttcgctcttcttctctgtaacatccaaaacgtcttcgacagttacatcttcaaacgaactgaatcaaccaatcaaaaaccaagctttgcctctgttttcgaagttattatcttctcttctctcgttgctacgatcatctccgtcgtgggtctgcttatagccggtgagcaacacgatttgaagagggaaatgaatggattctcgaaagggaaaggttcttatgttgatggctatggttggtcaagctgtttcgtggcaagtcnaattggggttgggattggttggactgtcnacccngttccnacctgntgnncnatgttattaatggncat

SEQ ID NO: 9769 - DNA, 430 bp, Arabidopsis thaliana
  unsure at all n locations
  Clone ID: LIB24-087-Q1-E1-H6
ncttttcttctgcatctagttttttttttgcatattcatcaccttctctcagttttcttctttcaatagaattatccagaaaacttttaagagatggcagctccgattcgattctttgaactgaacactggtgccaagttaccttgcgtcggtctaggaacctacgcaatggtcgcgacagcgatcgaacaggcgattaagattggttacaggcatatcgactgtgcttcgatttacggaaacgagaaagagattggtggtgtgttgaagaagctgatacgtgatggttttgtgaagcgtgaggagttatttatcacttccaaactctggngcaatgatnatttacctgaagattgccnaanggcactgggaaaaaancttacagggacntacagattgacnangttgagttanacccggaacattgggc

SEQ ID NO: 9770 - DNA, 390 bp, Arabidopsis thaliana
  unsure at all n locations
  Clone ID: LIB24-088-Q1-E1-A1
ctgtnnnnnnnnnnnnnnnnnnnnnnnnnnnnnnnnnnnnnnnnnnnnnnnnnnnnnnnnnnnnnnnnnnnnnnnnnnnnnnnnnnnnnnnnnnnnnnnnnnnnnnnnnnnnnnnnnnnnnnnnnnnnnnnnnnnnnnnnnnnnnnnnnnnnnnnnnnnnnnnnnnnnnnnnnnnnnnnnnnnnnnnnnnnnnnnnnnnnnnnnnnnnnnnnnnntcgtcttcttcttccttgagtagtgttaaatcgacgcctgagattgngaaaaagtatgttcatcgagtttacgatgcgantgctcctcaatttagctcctacaaggttgctaagtgggccaaagttgcngccnttccncgaaaccgtaccgtctggatttggggaatcccnaatc

SEQ ID NO: 9771 - DNA, 494 bp, Arabidopsis thaliana
  unsure at all n locations
  Clone ID: LIB24-088-Q1-E1-A2
tagcatgcctnacgggccgaaaattcccggaaccacccacgcgtccgtgctcatanaccctaaaaatcctctctttttctcaaccttgattcttanccatggagttcnggggaattgaagttaaatcangaaagccagttacagtgactcctgaagaaggcattccgtatccacgtttctcaggcatcgcttggagaatgtaaaaacaagaagggangagtttgtgcctttacatgtnaaggttgggaaccanaacttggttctgggaactctatcgactgagaacatccctcagcttttctgtgatttggtattcgacaaggagtttgagctttctcacacttggggaaaaggaagtgtttactttgttggatacaaaactcccaacattgagccacanngctattctgaggaagaanaggaagaagatgaagaagttcctgctgggaatgctgccaaggctgttagctaaaccaaaggctaagcctgcanaa

SEQ ID NO: 9772 - DNA, 525 bp, Arabidopsis thaliana
  unsure at all n locations
  Clone ID: LIB24-087-Q1-E1-F6
cctacganccggaaattcccgggtcgacccacgcgtccgcccacgcgtccgttttcggcttctatccgtcgattcaaatcggcggcagttcccagcgacattaatctccggcgagacagtttactcgtgtttattgaagctatgcctaaaagaacagcagaagcgtgtccatcatctgaaatccaaagaagcagaggagatacttttggtagttacagatctcaagtagctgagcttttgtctctaggtgagaggatctcacatcatgatcaacaagaagccaatgagaggcattctgagagtgttataggagctgggatgtcaaatgttgagaaagataatttgaatgttttgttaangcagtgtgtgaggaatctaagtccagaagttgatganatgcaggaatgtgtacgccccccggtancnaatttctcagctaggggaacaaatgtcantcaaccgtccccgaangantttgttccctgaanaaaaccggggggacccaaaagaaagatgattttcaac

SEQ ID NO: 9773 - DNA, 548 bp, Arabidopsis thaliana
  unsure at all n locations
  Clone ID: LIB24-087-Q1-E1-D1
ggaactggtttgccttccctangcctccggaaatcccangtcgacccacgcntccgcggacgcgtgggcggacgcgtggggcgaagaaacgggtttcggaatggatctgtttagagatgaaagaaccaactatgttcctcgccaaagttgtgctagctatgcggttcaagggattgggtttgtgtcaaatggttatggactaggagatagtaactggtcagtgtcatataagccattcatgaaggatgtctgggataacaacatggtaatatctgcagatttgattgctgctcaggctgtttcgtcactacagatatctgaggacgctgataggaacgcttatgtcttcgagacgatgttcggggggatgacaaaagccatccgtgccaaactttggctgcagaaacaaagtgtttgccaatgaagtagaagttgcantttttttccttaatcctaanaaacccctttgggtggtgaaaaantccccccccgttggttaacctttgaangttagacnaacctgaaaaaaatgttttcccgaaatcccc

SEQ ID NO: 9774 - DNA, 537 bp, Arabidopsis thaliana
  unsure at all n locations
  Clone ID: LIB24-087-Q1-E1-D2
tttgccttgncctaggcgtccggaaatccaaggtcgacccacgcgtccgcacaactccaagaagaaaaactgagagagtttgctcgaagaagaagaagaagcaaaagctttttaaaatccatttttattttcttgtatgattccaaacttatcttcatcattctttctcaatcataccattctttcttaatctccaagctcgtattctatttcttattcgatgtttatttcgttgaaatctcgaagcttctcttcgggtaatacctaaatgttgattggttactcgaaagcccagatgagattttgagagtaggccgaaattggagccgtgtttttggttcagtttctcgaggggttcgatttcggattcgtgagcttttggggactggagaatatggacaacnggccatgagggaaagacttgccgagaggtttccggaattgggaacccggagaatcanccnggttccaatgaaaaacgacgtttaaaacgataanctggttcaaggttancaaaagctggttgaagcagcanaa

SEQ ID NO: 9775 - DNA, 523 bp, Arabidopsis thaliana
  unsure at all n locations
  Clone ID: LIB24-087-Q1-E1-D3
ctaggcctccggaaatccaaggtcgacccacgcgtccgggaaaaagacgcttgatcgaaaattcccttagatttcgtaaatagggttttacagaaggtgagattacacagagatcggatttgcgaaaaaaaaaaatgggaagtccaaagaagaacgagaacaaaggcttcttcgccgccatgacttctggcttctccatgttcggtaccgccgtgtcgagatccgttaacggcgtgcaaggtaatgaaggagttgaggtcataaatccagaaggtggcaaggaagatgctgaagaggaagctcagaaaggaaggtggaaggacgaggaacgagatagttactggaagatgatgcagaaatatataggttcggatattacgtcaatggtgactcctccctgttgttaaattttgagcctaagactatgctccaaaaagatggctgagataatggagtaatccncaatttgttnggatnaaagcaagatgaatgccaaaattcatacntgcgtttaataaaagcc

SEQ ID NO: 9776 - DNA, 522 bp, Arabidopsis thaliana
  Clone ID: LIB24-087-Q1-E1-D4
ctagcctccggaaatccaaggtcgacccacgcgtccgattcaagacgtccacggggacaagatgtccttgtctcttgggctcttccaagactaaccaatagagagaaaattagtgaaatggtggatccaaccatgaaaggtcaatactcacaaaaagatcttattcaggtagcagccatagcagcagtgtgtgtgcaaccagaagcaagttatagaccgttgatgacggatgttgttcactcgctcattccccttgttaaaagctttcaacaaaagtactgattcttctcggtttcctagccgtagagaaagcttgtcatttgatgatattatgccatgacactcttttgtttaatatgtattaatttctctcttttaaagttgagattctccgttgttattggtatatttgtataggtaaatgaatccaattatcttgtactataacctaatattaagtgttgttaattgcctaaaaaaaaaaaaaaaaaagggcggccgccccaaaagattcaagcctaa

SEQ ID NO: 9777 - DNA, 483 bp, Arabidopsis thaliana
  unsure at all n locations
  Clone ID: LIB24-087-Q1-E1-D6
acgcgtccggctctgtnnnnnnnnnnnnnnnnnnnnnnnnnnnnnnnnnnnnnnnnnnnnnnnnnnnnnnnnnnnnnnnnnnnnnnnnnnnnnnnnnnnnnnnnnnnnnnnnnnnnnnnnnnnnnnnnnnnnnnnnnnnnnnnnnnnnnnnnnnnnnnnnnnnnnnnnnnnnnnnnnnnnnnnnnnnnnnnnnnnnnnnnnnnnnnnnnnnnnnnntccattagagtgtcgtcttcttcttccttgagtagtgttaaatcgacgcctgagattgagaaaaagtatgttcatcgagtttacgatgcgattgctcctcattttagctctactaggtttgctaagtggcctaaagttgctgcctttctcgaatcgttaccgtctggatcggtgattctcgatgccggttgcggtaacgggaagtatttggggttgaatccnagttgtttcttcanaggttgtganaaaagtcaccctttgattaaa

SEQ ID NO: 9778 - DNA, 504 bp, Arabidopsis thaliana
  unsure at all n locations
  Clone ID: LIB24-087-Q1-E1-D8
ggaaatcncgggtcgacccacgcgtccgcagaaaaaaaaaataaacacaaaatttcaataaccatggagggtgttagtgcaactatgcataagttaaggccttatttgttaatgatctttttgcaatttggagcagcaggaacatatattgttattatggccactcttaaccaaggccagaaccgttacgtcgtaattgtgtatcgtaatcttgtggctgctcttgtccttgcaccttttgcactcatctttgaaaggaaagtgaggccgaagatgacactatcggttttgtggaaaataatggcacttggtttcttagagccagtcttggatcagggttttggttacttggggatgaacatgacatcagcaacatatacatctgcgatcatgaacattcttccttctgtcacatttataatagcttggattttaagaatgggagaaagttaacatagcggaggtacgaagcaaagcaaagatnantgggaaaattggtgggtc

SEQ ID NO: 9779 - DNA, 516 bp, Arabidopsis thaliana
  unsure at all n locations
  Clone ID: LIB24-087-Q1-E1-E1
acggttgcctgcctagcctccggaatccangtcgacccacgcntccggtcaatattaaattcaggaggattgatgattttgagttcacacctgaatgtgcaatatttgatttacttgacattcccttatatcatggatggatagttgatcctcaggatgttgaagcagctaatgcaattggtagcaaatcgtataatgctcttatgggtgagctagttgcactggagacacagaatgtagaggctcaaggcgatcaaaatcccggagaagattctgttgattttgctgcggcaactactgcagttttaggggttccttcaccttgtctttcgaaaacaagatcttttgatgattctccacctgcggctgcagagcttcgtanaatgagaaagggggatcttgaagaagaaacagagttgttgcaagccttgcagttatcacaagggcaaggggaatgattcaactccaaacactaacggngactcaaacaatcaanaatccgcgttcanaatttca

SEQ ID NO: 9780 - DNA, 523 bp, Arabidopsis thaliana
  unsure at all n locations
  Clone ID: LIB24-087-Q1-E1-E3
anggttgcttgcctagcctccggaatccaaggtcgacccangcgtccggaanggttttgatctccttgagcaaatcggagattctttctacagttgtgcgaacgttcttataataagtttttagttgatcgatctccgatttagtgaactaggcgtcatcttaagaaccctaatttgttttctccggttgtgaaaacttctgttgttcgtcgtcgaaggtcagttcgtgattctgagtttgtacaccttttcgtttcctctgttggcactcgaattttccaggaagtgaaactagaatttgattctgcgtagtattgaacattaagataatgtctggaagaaatcgtggacctcctcctccatcaatgaaaggtggatcttacagtggtttacaaagctccggttcatcaaccgcctttcgttaaaggcttaagaggaggaccagtgcctcctcctcctcanccttctaagaattgatgataatanagaanctcaanttanagtanatgcaaagaaggcctcc

SEQ ID NO: 9781 - DNA, 517 bp, Arabidopsis thaliana
  unsure at all n locations
  Clone ID: LIB24-087-Q1-E1-E5
cgtctcctggnctacgaaccgatatcncgggtcgacccacgcgtccgctcacgcgtcctaaatcagaagagtagagcacaaattagggttagggttagggcttctcccttcctggcaaattcatcccttttagccgccattgaagatgactggtaaggccaagccaaagaagcatacagcgaaggagattcaagcgaagatcgatgctgcgttgactaatcgaggcggaggaaaagctggaatcgctgatcggaccggaaaagagaaaggaggccacgctaagtacgagtgtcctcattgcaaaattacngctccaaggtcttaagacgatgcagatncatcacgaatcnaagcatcctaatatcatttatgaggaatcananctcgttaatcnccatgctgttttaacaccaattagctgaatcggatanctaaacctggtatcangggaancttgaagaantnactccaatgtttggattttangaaaatttggtaacctttggatgttnaaaga

SEQ ID NO: 9782 - DNA, 504 bp, Arabidopsis thaliana
  unsure at all n locations
  Clone ID: LIB24-087-Q1-E1-E7
ctgtccccctgggactacngaaccgaannatcccgggtcgacccacgcgtccggtgantagagagagttatcatctagggtttatagattggagattttagccgcaacaaggaggaagtgtttttaatttaattttattgttaagagttattgttgctttagggatttttagaatttgggtgttcttttaaatggctcggttgataattccttgtcgaagttcgtctctggcgagagtcaatcttctgggtttgctctctcgtgctcctgttcctgttagaagcagttgtcttcgtagttcggcaaacagacttactcaacacagaccgtttcttacttccgaggccatttgtttgaggaagaatcggtttctaccccattctgttgatacacataagcanaacagcaggaggctcatttgttctgttgccacagaatcagttccggataaagctgaagatccaaaatggatgcacctaaagaaatatttcccaangaactaca

SEQ ID NO: 9783 - DNA, 481 bp, Arabidopsis thaliana
  unsure at all n locations
  Clone ID: LIB24-087-Q1-E1-E8
cncgggtcgacccacgcgtccgcccangcgtccggtgtgtctgtaacattaccaaaacgaaaccttccttgtggattcccacttctttcttctgttttcttcttcctcttctttaaattggatgttttgggcaagaaacagagagaaacacgttaatttgagagtttgtcattgaatatttggtttgcaatggaaagagattttctgggtttgagcgacaagcagtatctaagtaataacgttaagcatgaggttaacgatgatgctgtcgaagaacgagggttaagtacgaaggcagctagagaatgggggaagtcaaaggtttttgctacttcaagtttcatgccttcttcagatttccaggaggctaaggcgtttccgggtgcataccagtggggatcagtttctgcggccaatgttttccgcaaatgccaatttggtggtgcgttcaaaacgcgaagccgctttaacnaggcggtta

SEQ ID NO: 9784 - DNA, 538 bp, Arabidopsis thaliana
  unsure at all n locations
  Clone ID: LIB24-087-Q1-E1-F1
anggttgccttgcctagcctccggaatccaggtcgacccacgcgtccgcttcatcgtgatgtcaagtgttctaacatattcttgaccaaagagcaagatatacgccttggtgattttgggttagccaagattctaacatccgacgatctcacatcctctgttgtcgggactcccagctatatgtgccctgagcttttagctgatataccttatggttccaaatctgacatttggtctttaggtacgtttttattgcatgtagtagtggattgttaagttcccttatttgctacataaggaagcagtaatctatctcttgaattactaaaagtttcaagcataagcctgaaaagattactgcaatttaattttcatgaaggttccaaagaagtcctcaataaancataaaggaagactgaaagaagagttctcaaagtcctgtggtccttttggttaccaagattaatccnaagttgtccaantggtgaaattggattctaaccntgangggcaanctgtgttaaccngaataaaattg

SEQ ID NO: 9785 - DNA, 501 bp, Arabidopsis thaliana
  unsure at all n locations
  Clone ID: LIB24-087-Q1-E1-C7
tcncgcggtcgacccacgcgtccgcccangcgtccgctccgccctctctccccatctctttcgacagatctcttctctctctcgtgttncacgaaanaatggcgacncaattcangcgcttctgtctcattgcaaacttcttgtcnggcancaacanngattagtttccaaaagccagctttgatttccaaccatggaaagactaatctatccttcaacctccgccgttcaatctcatctcgccgcctctctgtttcttgcgcggnatancaggagacnatagagaaagtgtcngctatagttaagaatcaacnatcacttacnccggataaaaaagtcgttgcagnanccaaatttgctgaccttggngcaaattctctcgacacggttgagatagtaatgggtttagaggaagantttaacatcgaaatgggccgnngagaangcacacangattggcacagttgagcaaagctgctgaaactcattgaagaagctcaa

SEQ ID NO: 9786 - DNA, 510 bp, Arabidopsis thaliana
  unsure at all n locations
  Clone ID: LIB24-086-Q1-E1-H5
taactgtttcgcctgcncgtancnagtccggaattcccgggtcgacccacgcgtccgaacnaggttatgttgctaggacatagtgactcgtacatgagggacaaagctatgcaagtgaccattgcttacaatcattttggagtcggacttattcaaagaatgccgaggtgtcgacacgggtacttccatgttgttaacaacgactacactcactgggaaatgtacgcaataggtggtagcgcaaacccgacaatcaacagtcaaggaaaccgctatgccgccccaaaaaacccctttgctaaagaggtgacgaagagagtggacacaccggctagtcattggaaaggatggaattggagatcggaaggagatttgcttcagaacggtgcttacttcacttcttcaggagccgccgcgtctggcagctacgcacgtgcctccagcctttccgcgaaatcttcgtcattggtcggacacattacttccgacgctgggagctctaccttgtcg

SEQ ID NO: 9787 - DNA, 467 bp, Arabidopsis thaliana
  Clone ID: LIB24-086-Q1-E1-H7
acgcgtccgcaaaacattaccggaacagaaggacaaacgatccagaatttgtgctagatcttgaagagatatatgttattgattccaagacaaagtcaatcaccagagccagagttctggtgacagttccgggaggaagaaaaagggataggaaggatgacttgcttgtgatacgagataatggaacctcctttaagatcatacacgtgggtgaaagagatgacccaacaacggtaatagaaagagaagagtggaccaagactagagaagacatggagaaacatctcaggaagctacgagacttcagtgtctcaaattggttctaagaagaactcgagagacaccaaacgacaagtcagcataactttcttcctgagatggaaaacgagagcagatgatctaaatccgatgatatggtgggaagggtatacaattttggtgacctcaggtactgcactagcagcaga

SEQ ID NO: 9788 - DNA, 485 bp, Arabidopsis thaliana
  unsure at all n locations
  Clone ID: LIB24-086-Q1-E1-H8
attcccgggtcgncccacgcgtccggcncgtcatcaatcatcatcatccgaaacctcagatctctaaggccgggatggtaattgcacgaggtttgttaggaatacaaacaactcttgtgaaaaatatgcaacatatggtattttccctaaccgaagcaggggctcgacttttcgttaccaagattctttagacaattcatatcgatcggttgtgtaacgatactagaaggagacacgatattcatatttggggaaaatgaatctacttgtcctttgaaatctatcctcaagattcacagtcctcagttttactggaagattctcattgcaaacagagacctgaactcacgaaaatcaaaccttgccaagaaaaggggatngtggacaacaagtgtttccaaactggccaagcttaacatcctgcaacatanttacctaaagccatttccggttnacaggaaacctttactccaagncccaaaggg

SEQ ID NO: 9789 - DNA, 409 bp, Arabidopsis thaliana
  unsure at all n locations
  Clone ID: LIB24-086-Q1-E1-H9
ggatagcatcancggtgtatttggtgagagttctgatggtgtatctgtcgctcttggagtaagtgctgctgctggattaagtgtntttgcatttacagagattgaaaccatactccaactactangttcagctgcacttgttcaacttgcaggcangaaacttctatttgctgangaccnaaagcaaactctaaaacaggtggatganttcttgaacacaaaggttgcccctaaagaacttgttgatgagttaaacgaaataagaaaggctcttcttcctcaatcaacaancaacanngctctcccagcaccagcaacagtaacancagaagcagantcagctacaagctacaancaccacagtcgataaaccaagtacctgagccaagaaacagttgcagctacaaca

SEQ ID NO: 9790 - DNA, 537 bp, Arabidopsis thaliana
  unsure at all n locations
  Clone ID: LIB24-087-Q1-E1-A4
gantggtttgctcgccctggncctccggaaatccaaaggtcgacccaggcntccgcaatattccaaacagagatgacggtgaagataaggctcgcgcgtcttggttgtaaacaccgacccttctatcgtgtagttgtcgccgatgaaaaatcgcgcagggacggtaaacaaatcgaggtgttangcttttatgatccactccaaggcaaagaagatgcggatagagtgagcctcaaattcgacagaatcaagtactggttatctgttggagctcaaccaacagacacagtggaaagcatgcttttcagggccggtttgataccaccaaagcctatggtagtggtcggttcgaaaaatggggcagaagtctacgagccaacatgtttcacccaattacaggtgaaaatcctgaaactaagaagtgttnatgcctttaancaagaaaaaanccttttgtgtcnttttnaaagnanttaaggttaatgttgtttaaaaactttccggttaaggttaaaaggagttaatgtaaangttggt

SEQ ID NO: 9791 - DNA, 474 bp, Arabidopsis thaliana
  unsure at all n locations
  Clone ID: LIB24-087-Q1-E1-B7
acgcgtccgctantagatcatcacttctcagatttcgatattcccaataaataataaatactctcagttcttctcttctccaagaacaaaaaaaaaaaatgaattcagaatcgctagaaaatcttcaccgtccattaatcgaatcatcgaagtcgttcgtcgattatcgtctcgagactgtgttaacagatcgagagttaccgtattttcgccggatttatctagcgatgatgattgagatgaagtttctctttcatctggcggctccggcgatctttgtttacgtcatcaacaacggcatgtcaattcttacacgtatcttcgctggacacgtaggaagcttcgaactcgccgccgcttcacttggaaacagtggtttcaacatgttcacctatggacttctgcttggaatgggaagtgcaatggaaacattaagtggncaagcacatggagctcaaagatacnaaatgcctg

SEQ ID NO: 9792 - DNA, 504 bp, Arabidopsis thaliana
  unsure at all n locations
  Clone ID: LIB24-087-Q1-E1-B8
gganatcccgggtcgacccacgcgtccgagcaaaatgacaacattctccttcaatttaacggttaacgatttaaaaacacattttccggtgaacggagacggcgaattcgagattctcactggaatcatatggaaatgtgttgcgacggtgaggggagaatcagctccggtgacgattacggttatcagatcggatccgaagaagttgaagcctagagcggtgagaaatggtcagatgataagttccantcacgtcgatttctcggtggcggaggcgagtttggaggagattgtgaaatcgatcggtgaagcgaaagatgagagggttgtgatcgatgagattgttgatgatgtttcggattttattgtttacngagccgaatttaacgttttgttggatatgagttgaagttgaattttaanagggcanagttatggggaaatcncccggaatccnggttaatggtaataatccaggggaattggggaacaacggancaattg

SEQ ID NO: 9793 - DNA, 530 bp, Arabidopsis thaliana
  unsure at all n locations
  Clone ID: LIB24-087-Q1-E1-C2
anggtttgccttgccctagcctccggaaatccaaggtcgacccacgcgtccgcagatcttgntgggtctcgaaccttcctcttcgtttgcatcagagcgagaatggcgggaggaggaaactttattgcgagagtgatctcatacgttgcgaacgagttcatagttaatggtttggcaaacagccatgctttccagagatttgctgtgaggacttcaaagagaatagaaaacctctctaaaatggctgcagagaacagggagaaagtcgctcagcaaatggaagaatttgccaagaacattgactccacgaagaaaccctgatcattctagtgtggaatcttaaaacctcagtaaatcacatgggtcagctcaagtagggaggtctgttaanctttgtataaagaatgttaaaagttatanncttgtggattaacaacanttgatcttttgggccggttcccctcccctaaaaccnaattcttccggagtgactaaacaccngtatgaaaggaatttcaaccgccttttgc

SEQ ID NO: 9794 - DNA, 556 bp, Arabidopsis thaliana
  unsure at all n locations
  Clone ID: LIB24-087-Q1-E1-C3
gtttgccttnccctacggccccggaaatcccangtcgacccacgcgtccgcccangcgtcngctccgccctctctccccatctctttcgacagatctcttctctctctcgtgtttcacgaaacaatggcgactcaattcagcgcttctgtctcattgcaaacttcttgtctggcaacaacaaggattagtttccaaaagccagctttgatttccaaccatggaaagactaatctatccttcaacctccgccgttcaatcccatctcgccgcctctctgtttcttgcgcggcaaaacaagagacgatagagaaagtgtctgctatagtttaagaagncaactatcacttacaccggataaaaaagtcgttgcagaaaccaaaattttgctgacctttgggagcanaatccctcgaaaagggttgagaataagtaatggggtttaagaaggaagagtttaacaatccaaaattgggcggaaagaagaaaagcacaagaangattggcacaagtttgaancaaagctgcctgaactcaattggaagaactcaacaaacg

SEQ ID NO: 9795 - DNA, 533 bp, Arabidopsis thaliana
  unsure at all n locations
  Clone ID: LIB24-087-Q1-E1-C4
antggtttgccttgcctaggcctccggaaatccnaggtcgacccacgcgtccgcccacgcgtcngcgcgtcgatccacatcgcaggtgagggttcctgcaatttatccctcgtggtctctgaatctcagatcgtcgtcaacgaatcctccattttctgaatcaaaattttctggaaacaatggggagcttggggacgatgctgagatatccggatgacatatatccgctcctgaagatgaaacgagcgattgagaaagcggagaagcagatccctcctgagccacactggggtttctgctattcgatgctccacaaggtttctcgaagcttttctctcgttattcagcaactcaacaccgagctccgtaacgccgtgtgtgtgttctacttggttctccgagctcttgaactgttgaggatgatactagcataccaactgatgaaaaggttccaatccggaanncttttaacgggaaaaattccaatacggattgggaattatcaaggtggaacgaanggattccagattcaa

SEQ ID NO: 9796 - DNA, 530 bp, Arabidopsis thaliana
  unsure at all n locations
  Clone ID: LIB24-087-Q1-E1-C5
gtttccctggncctaccgantccggaaattcccgggtcgacccacgcgtccgctaaatcgcgagcggccgccctttttttttttttttttttttaagcagattgaagaactttaaggagaatcagtaactcataaggatcattccatgtaataaacataattctaatagaaaacatagattcgatttggtccaacaaaacattcaaattgaaaattgcaaaaccaacaaaactcacataagagttggttctaaaaagaagaaagacaaaacaaactcccgaatctacttagatcgctgtctcatctttcgtctcttcctcttcaatctcctcatacgcttcttcttccacttggctctcatgctgatttcgcagaagctgtctccttcgttcccctggattaattggtttaactttaccgggacgcgtgggctccgattcaaacaagaaaagagctagtttaaagaatggtacttgggaaactcctccaagtcacaaatctcatcancatcaacatcataatcatcatca

SEQ ID NO: 9797 - DNA, 491 bp, Arabidopsis thaliana
  unsure at all n locations
  Clone ID: LIB24-086-Q1-E1-H2
tanaaagtcccgaagtcgacccacgcntccgacttagtattgaagaatataatgaccgtgttagagcagtggtgcgatgtgaagcacaatatgctttgctgcagaagcttgttgatgatgacttcttaacgaaagatgaaagagatatacttcggtggggaaaaaacgtaggctcggttaaaacacggtcaactagacgtgccggtgttgctgtttataacaaggcctcatcattggaaacactaattgggtatttgtatctatcaaacgggaaaagactggaagaaatgatgcagaagctaggattctcaagtggttcttcaacagagagaatggttaaggaagctggctcaaacaaancatccttcaaataaacttactatattgtagttacagtctgtatcattaaaaatgttttgaatatatanaattttttttaacaaaaaaanannaaaaaaaaagggcgggccgctccaaaagattcaaacctt

SEQ ID NO: 9798 - DNA, 505 bp, Arabidopsis thaliana
  unsure at all n locations
  Clone ID: LIB24-085-Q1-E1-G4
actgtttaactgtntcgcatgnacgtgaaattcccanntcgncccacgcctccgaacaaagctcanaagactattacttagaagagaatcgatcagatatgattttagcgcatcttccaagattccatctctcaatcctcgcgaaaccttctttctctctctcttcttcgcatttcagtttcttaaaccctaagccttcggtaacagtatctcgaacccttttctcattcgcgtctaaatcgaatctcgccactgttgaacccataccattatcggtctcagattcaaccgatttggatgatgcacctgtcgagattgcgctcgacaagctttttattccgccggagaccgatatatccggtgaagactcggcgagtttaacgacgaggatacttaagggttcgaatattgtgctgagcaagtacncgagggacgcanaggtggttcnggctgattatgtgaagagtagtgtcnagacgggaggattgtcgggncggatggggtt

SEQ ID NO: 9799 - DNA, 457 bp, Arabidopsis thaliana
  unsure at all n locations
  Clone ID: LIB24-085-Q1-E1-G5
acgcgtccgctnaaatatctggttctcttgtccttgaaaattttacgaggttgttctctgtgaataatcgatgtctgcttcatgtgctttaacaccgtctgttaggacagagttattcagttcatcatcatctaaaagatcaatctttcctgctagaatttgtcgaccaagaaacaaatgtgaaatcagcagaagggattttgcaattaggggagggattgttgcttctggagtttcagtcatggatacttcttctgcttcttctcagtctgttcaaggtagtgagaggttggcttttaaaccagaaggctataacttttgggaatggagaggtcacaagattcattatgttgttcaaggagaaggctcgcctctaagttcttattcatggttttggtgcttctgtctttcattggaggtataacattcctgaattggctaagaaatacaaggttta

SEQ ID NO: 9800 - DNA, 458 bp, Arabidopsis thaliana
  unsure at all n locations
  Clone ID: LIB24-085-Q1-E1-G7
acgcgtccgcacngattcagcagctctttgaactactcttcgacaatggccgaacgtggtggagaacgtggtgttgagcgtggtggagaacgtggtgatttcggacgaggattcggaggccgtggaggtcgtggagatcgtggagggcgtggacgtggaggccgtggtggtcgtcgtggagggcgtgccagtgaagaagagaaatgggttccagtgaccaagcttggtcgtctcgtggcggctggtcatatcaagcagatagagcagatctatcttcattcactcccggttaaggagtaccagatcattgatatgctcatcggtccaacattgaaggatgaggtaatgaaaatcatgccggttcagaaacaaaccagggctggtcaaaggactagattcaaggcctttgttgtcgttggaagatggtaatggtcatgttgggttgggagtgaaatgcc

SEQ ID NO: 9801 - DNA, 424 bp, Arabidopsis thaliana
  Clone ID: LIB24-085-Q1-E1-G8
aagtttgatttatttagagagataagttaaaaaaaaaatggtcggtatggatttgttcaaatgtgtaatgatgataatggtgttggttgtctcttgtggtgaagctgtttctggagctaagttcgatgagctttatcggtcaagctgggctatggatcattgtgtcaacgaaggcgaagtcacaaaactcaagcttgacaattactctggagctgggtttgaatcaagaagcaaatacttgtttggtaaagtctctatccagattaagcttgttgagggtgattcagcaggaacagtcactgctttctacatgtcttcagatggtccgaaccacaacgaattcgattttgagttcttagggaacactaccggcgagccttacatagtccagaccaatatctacgtgaacggagttggaaacaga

SEQ ID NO: 9802 - DNA, 504 bp, Arabidopsis thaliana
  unsure at all n locations
  Clone ID: LIB24-085-Q1-E1-H1
tacngccccggaattcccgangtcgacccacgcgtccgcacaatctcacagcaaagcctctcgttgctaagaggaatcaaacaatggtgtttgtgaagtccaccaagtcgaatgcttacttcaagaggtaccaagtgaagttcaggagaagaagagatggaaagactgactacagggcaaggatccgtcttatcaaccaagacaagaacaagtacaatactcctaagtatcgttttgttgtccggtttaccaacaaagacatagtggcacagattgtatctgcaagcattgctggtgacattgttaaagcttctgcttacgcacatgaactgcctcagtatggtctcactgttggtcttacaaactatgctgcaagcttactgtactggccttctttttggctcgccgttgttttaaaagatgttgggaatggntnacgaagtatgagggaaacgttgaggccactggagaaaactttttccgtttgagcnaaactgaattcaa

SEQ ID NO: 9803 - DNA, 479 bp, Arabidopsis thaliana
  unsure at all n locations
  Clone ID: LIB24-085-Q1-E1-H10
tcgtcagcccgncccggtccaaantnaacgggtccagccacgcgtccggnttaanttggagcactgaattgttcttctggatttgttattaatttggaaccatggaagcagaaatcttcaggaatcttcttggcttgactcataaataaaaaataaggttttggaatgtgaaagtttaatctttgaacattctatttacaagaagtgtaggaaaggattactttgtgatttggatccttttctacacttgttagtttgtgattttgagttgtggtatttggtgttttgttatgtagcagatcaaataaaagaccactttacctgcaaaatgacgagatcgtgggtgcttttgtttgttcttatgttcattgtgttgacttctcagtttgagtggaatgaacaagttgagaatgaaagtgagactagtagtcngtcctctgattctttcagataaagagcaacaacatatccctcaaggn

SEQ ID NO: 9804 - DNA, 469 bp, Arabidopsis thaliana
  unsure at all n locations
  Clone ID: LIB24-085-Q1-E1-H11
gncccggtccaaaatacccgggtccacccacgcgtccgatcgcnaaagagaggtttatcgagaaaaatccaagatttactaaaaaaccactatctctctgctcttcctctgtctacattaatgtaattttgatcatcggattgggtgaaagaaacatcaaactcctaaaagagaagcctttaaagtttttttttaatcaaaaacaaaaggaagaaaattttcctttttgttttagatggcatgaatcatcatcatcgctttgctttcttgattctctatttcgtttgatgggatttgtttttctgggaatttattcattcacctgctgccatggctaaattatctttcaaggattctcttaaagctcttgaagccgatattcaacacgctaatacactagctttagattatcctcgggagaagggatggagcgcgcgttcagatgagattatcatacagcccgactgct

SEQ ID NO: 9805 - DNA, 498 bp, Arabidopsis thaliana
  unsure at all n locations
  Clone ID: LIB24-085-Q1-E1-H2
gaactgtttacctgtctctanggcccnnaaaattcccgaatcgncccacgcgtccgccaagataaaaggtttcgctatggaaacactaaaacgaagctcaaaagtatggctacaagagcttcgttcaaacctaaacattttctggggaacaatcgaatccgaaatctccaaaaacggtgccgcttcatatatcttccctctccaacgttgcatcttcagtttcctctgcgcctctctcgccggcgttgacgcttccgtatcgccggacatcgctgagaacggttggaaaacaatcaatacttggcttgcgttgcaagttattcccactgctaaacttggcgtagttcctcaagcctcttgaagagattttacttcatacttggccttatccttctctcttaatcgccggaaattacaaaaagctttacaatttcatcgacgagaacgccggagantgtccccggttaggtcaagaagaattcgggttgacccnagatg

SEQ ID NO: 9806 - DNA, 506 bp, Arabidopsis thaliana
  unsure at all n locations
  Clone ID: LIB24-085-Q1-E1-H3
aactgtctccctgntctacngctccganatcccgggtcgncccacgcgtccggttngattattatttattagctgaggtaatggaatcacttcatatacaaagaggagttcgtcgtgtgctctttagaacatccaacaccgacaagcggcttatgtttaagaaagagtttgattcaagctttgctgggttcatgaccgatggggctaaatggttggttgagaatacagacatcaaacttattgggcttgattatctttcatttgctgcttttgaggaatcacctgcaacacacagggttatacttaaaggacgggatataatcccagtggaagcgctgaagctggatggtgtggaggtaggaacatactcgcttcattgcttaccgctgagattagttggagcggaaggagcaccgacaagatgcattctcatcaagtgattcagttcttcttcttcttcttctgtgtaagttgttcagtataccaaactggataatgnataatat

SEQ ID NO: 9807 - DNA, 460 bp, Arabidopsis thaliana
  unsure at all n locations
  Clone ID: LIB24-085-Q1-E1-H4
gcntccgcgatcgagaaagacgtaatttgatcatcggagtaaaagatattgttcgacagtgggactcccgggaacgaagatggcgatggcatcattcgggcagctaaatctcgaggaacctcctccaatctggggatctcgcagcgttgattgctttgagaagctcgaacaaattggtgaaggcacttacggtcaagtttacatggctaaagaaatcaaaactggtgaaattgtggctctcaaaaagatacgtatggacaatgaaagagaagggtttcctataacagctattagagagataaagattctgaagaagcttcatcatgaaaatgtcattcagctgaaagagattgtgacttcaccaaggtcgggacagggatgaccaaggaaagccagataataacanatacaagggtggcatctacatggtttttgagtacatggatnatgattttgactg

SEQ ID NO: 9808 - DNA, 488 bp, Arabidopsis thaliana
  unsure at all n locations
  Clone ID: LIB24-085-Q1-E1-H6
taaaangtccgaaattcccggggtcgncccacgcgtccggaaagaaacacgttaatttgagagtttgtcattgaatatttggtttgcaatggaaagagattttctgggtttgagcgacaagcagtatctaagtaataacgttaagcatgaggttaacgatgatgctgtcgaagaacgagggttaagtacgaaggcagctagagaatgggggaagtcaaaggtttttgctacttcaagtttcatgccttcttcagatttccaggaggctaaggcgtttccgggtgcataccaagtggggatcagtttctgcggccaatgttttccgcagatgccaatttggtggtgcgtttcaaaacgcgacgccgcttttactaggcggttcaattcctttaccaactcatccttctcttgttccacgagtggcttcctccggatnatctcctcaagctcacaatcttttaatggcgggactaataagcgtcctttaa

SEQ ID NO: 9809 - DNA, 504 bp, Arabidopsis thaliana
  unsure at all n locations
  Clone ID: LIB24-085-Q1-E1-H8
aactgtttcgcntggcccgtanagagtccgaaaattcccgggtcgncccacgcgtccggaagactacgcacaacgtgtatgggccgaagcccctgatgagaagtacgagtgcgagtttgagatgcctgaagactttggaccagtgggagccatcaagattcagaaccaataccatcgacagttgttcctcaagggggtagagcttaaattacccggcgggtcgataacgtttacatgtgagtcatgggtggcccccaagtccgttgacccaaccaagcggatattcttctccgacaagtcctacttgccttcccaaacaccaagagcctcttaaaaagtatcgaaaagaggagctcgagaccttacaaggcaagaaccgcgaggaagttggtgaatttaccaagtttgagcgcatttacgactatgatgtgtacaacgatgttggtgaccctgacaatgatcctgaacntgctcgtccggtaattggaggctcacacatccata

SEQ ID NO: 9810 - DNA, 442 bp, Arabidopsis thaliana
  unsure at all n locations
  Clone ID: LIB24-086-Q1-E1-A11
gantcccgggtcgacccacgcgtccngagaatttggtccccttggcacgtataaaccctagcagagacattaaaccctgaaagtaattagggatcactgttctccggctccggcgaaaaaatccctcgaaatcgatcctaacctcaattgattgaaggaagttatgtattcgctttcgaggattctccaaaggagtcaaagatataactttgcaccttcttcgtttggtgcggtcagtaaattagaagtatcaagtggtggtgataaagaacgggtctttaaatcatttggattgatttatagcaaacctcaaggtttagtcagactttattccgcaagagatgtgttttcacggttctttggcatccacaagctttcttctatagctgatgctaaagataaaggagatgangtagttagggaagangagctgtctgaatca

SEQ ID NO: 9811 - DNA, 507 bp, Arabidopsis thaliana
  unsure at all n locations
  Clone ID: LIB24-085-Q1-E1-G3
aatgtctccctgntctaccgcnccganatcccgagtcgacccacgcgtccgcaanggcttctgaagatactctctcctcgaatcctctattgcagaattttgacttccctccgtttgactccgttgatgctcaccatgtcagacctgggattcgtgctctgttgcagcagctcgaagctgaattggagcagctagaaaaagctgtagagccttcatggccaaaactagtggagccattagagaagattattgatcggttatctgttgtttggggaatgatcaatcatcttaaggctgtcaaggacacacctgagcttcgtgctgccattgaagaagttcagccggagaaggtgaagttccagctcaggttgggacaagagcaaacccatttacaatgcatttaaggctattcgagaatctccagactggaattcattgagcgaagctcgtcaacgattanttgaagcccaaataaaggaggcggttctganttggtattgcccttga

SEQ ID NO: 9812 - DNA, 222 bp, Arabidopsis thaliana
  unsure at all n locations
  Clone ID: LIB24-085-Q1-E1-E7
acgcgtccgggnattcaccacgcgactgatcttaaaaaactacatggntatgcctaangtcaanactgtcggttcgattgaagctatgaaggttttaaaaaaggattttgttctgcttttttgtgtttacttaaaggtatagatcngtgcaagagattgtatgtgacaaactgattatgantaatatctatnattacattcaatanaaaaaaaaaaaaaagg

SEQ ID NO: 9813 - DNA, 483 bp, Arabidopsis thaliana
  unsure at all n locations
  Clone ID: LIB24-085-Q1-E1-E9
ngttattcgccggcccggtccgaaaatanccgggtcnacccacgcgtccgcggatgggttctcagatcacacacaaccaaccatctcctcaagaagcaatcaggtaagccagcggaatccgaatgtctctacgcaccaagaggtttgaatccagattccgctggcttacctgatggcttttcagatttccggatgggttctcagatcacacacaaccaaccatctcctcagaagcaatcgccgcgtcttttggctcctattcccttcgaatccgcgtatgaaggatacggttcttatacgcaattggttgatactcttttgggtattgagagtaagtcttgtagaggcaaattggttaagggagaaattggagtggttaaggatgaagaacgagtctcctatggtgaggactaggagtagttctcgtgtatctaaagtttctgttaaaaaggaagaacctgaanatgattcccttcagtgatt

SEQ ID NO: 9814 - DNA, 437 bp, Arabidopsis thaliana
  Clone ID: LIB24-085-Q1-E1-F1
tgaagaaaggcttctctaatatattgacggccacttgcagataatcatcgagatgaagaacagattccgaatttgaagtaattcctaaaccatctaacaaaagtcttgtatttatctgcacctggggctttagttatatgatgggttgctcagaagttttttgttgtccgttttgcaatccacttcgatctgattactttctccaagtataacagtgtcattggtggtgggcaatggactgtatgcctgataaaatctctgattttgcatctttgttggtgacacagtgaaaaccaataatatgtacattagtattttcttccttgtccgctgctttttacatgctaggtaaatgctgctctatttgctgaagagaaacaatgtgtcagctgccatgtttgctcctgggatggggtatatgagactgcacaacaacc

SEQ ID NO: 9815 - DNA, 479 bp, Arabidopsis thaliana
  unsure at all n locations
  Clone ID: LIB24-085-Q1-E1-F10
tttattcgnccggccgcggtccaaanaacccgggtccacccacgcgtccggactttgttctgtttctctgcgatttcttcgatgttcctcttcttcgttttgattttcagatttgtttaactcggtcgttgcgttgacttcaaatttcttannnnnnnnnnnnnnnnnnnnnnnnnnnnnttcagaaaatctgtcagacttgggatctttctcggcaatgcgacgcttgttcgccgcgaaatccctctcccgagaggatacaacctttttgtcattctcttcttcttcggtgacgcgtttcctcaaggctcttcttcctctccgttcagatccaagagatgtccgctaattctcatcctcctaattccaaaaacgtcctctgtaatgcagccgccggtgccgccgccggggttgttgcggctacgtttgtgtgtcctcttgatgttataaaaacgangtttcaagttcaagggctgcct

SEQ ID NO: 9816 - DNA, 507 bp, Arabidopsis thaliana
  unsure at all n locations
  Clone ID: LIB24-085-Q1-E1-F2
aactgtctccctgtcactacngccccganattcccgaagtcgncccacgcntccgcccacgcgtccggaaaaaaggaaaagaaagnnnnnnnnnnnnnnnnnnnnnnnnnnnnnnnnnnnnnnnnnnnnnnnnnnnnnnnnnnnnnnnnnnnnnnnnnnnnnnnnnnnnnnnnnnnnnnnnnnnnnnnnnnnnnnnnnnnnnnnnnnnnnnnnnnnnnnnnnnnnnnnnnnnnnnnnnnnnnnnnnnnnnnnnnnnnnnnnnnnnnnnnnnnnnnnnnnnnnnnnnnnnnnnnnnnnnnnnnnnnnnnnnnnnnnnnnnnnnnnnnnnnnnnnnnnnnnnnnnnnnnnnnnnnnnnnnnnnnnnnnnnnnnnnnnnnnnnnnnnnnnnnnnnnnnnnnnnnnnnnnnnnnnnnnnnnnnnnnnnnnnnnnnnnnnnnnnnnnnnggatnagcctttgaagacttttaagaggaaatttcggttgccgggaatcgatagataangatt

SEQ ID NO: 9817 - DNA, 505 bp, Arabidopsis thaliana
  unsure at all n locations
  Clone ID: LIB24-085-Q1-E1-F4
aactgtttccctggnctacgcncccgnaattcccangtcgncccacgcntccggtcnatttcgagttttacttaaggatttatctgaatcttcaagcgcatgtaaacgcaataatcggaagcggtgttaaaaactcatctgcgtttcttaaagcagctacaacaactttgttgcatactattagtgattctgagaaatcttcttatgttgctcatatcaataattatctctctggagatgagtttctaaacaagtgccttccgattaatccgtcttcgaatgatctattcgaagttgcaaaagatggtgttttgctttgtaagcttataaatgtggcggttcctggaacaatcgatgaacgagcgattaatactaagagtatgcttaatccatgggaagagaaatgaaaatcatacgctttgtcttaactctgccaagggctattgggtgtactgtggttaatatagggaacacaagatatccatgaaaggaaaggcgtcatctt

SEQ ID NO: 9818 - DNA, 483 bp, Arabidopsis thaliana
  unsure at all n locations
  Clone ID: LIB24-085-Q1-E1-F6
gtacaangtccgaaaattcccgggtcgacccacgcgtccggtttaatttggagcactgaattgttcttctggatttgttattaatttggaaccatggaagcagaaatcttcaggaatcttcttggcttgactcataaataaaaaataaggttttggaatgtgaaagtttaatctttgaacattctatttacaagaagtgtaggaaaggattactttgtgatttggatccttttctacacttgttagtttgtgattttgagttgtggtatttggtgttttgttatgtagcagatcaaataaaagaccactttacctgcaaaatgacgagatcgtgggtgcttttgtttgttcttatgttcattgtgttgacttctcagtttgagtggaatgaacaagttgaagaatgaaagtgagactagtagtcgtcctctgattctttcagataaagagcaacaacatatccctcaaggcaaagaatctgtt

SEQ ID NO: 9819 - DNA, 460 bp, Arabidopsis thaliana
  unsure at all n locations
  Clone ID: LIB24-085-Q1-E1-F7
acgcgtccgcannaaagcaaaattcgaagagacacaaaaaaaccttcgtttgtgtctcagaatttacaaagttttgagtcagtagagaaatggcgggaatcgtgacagagccgtggtcagtagctgagaacggaaacccaagcataacggcgaaaggatcgagcagagaactaagacttggaagaaccgctcacaacatgtcttcttcttctttgaggaaaaaatcagacctccgagtgattcagaaggttccatacaaaggtcttaaagattttctctctaatctccaagaagtcattctcggaacaaagcttgccattctttttccggccattcctgccgccattatttgcacctattgtggcgtcagtcagccttggatatttgggacttagcttgctaggactgacacctttggctgagcgagtcagctttttgacaagagcaactaactttctac

SEQ ID NO: 9820 - DNA, 464 bp, Arabidopsis thaliana
  unsure at all n locations
  Clone ID: LIB24-085-Q1-E1-F8
tcccgggtcgncccacgcgtccggaaaacggtgaaagtagcttgtagtatttggcataccgcagcgattgtcgaggttatgggtcaaaccgctacgagtatgtcatctaggaagttgtttacttggggtgatggtgacaaaaacaggttgggacacggaaacaaagagacttacttgcttccaacttgtgtatcttctcttattgactacaactttcataagattgcttgtgggcatacatttaccgtcgcactcacaacttctggacatgtttttactatgggtggtaccgctcatggtcagctaggtaactcaatctctgatggtaaattaccatgcttggttcaagatagattagtcggagaattcgtggaagaaatcgcgtgcggagctcaccatgtcgcggttttgacatctagaagtgaagtcttcacgtggggaaaaggtctaatggaagattanga

SEQ ID NO: 9821 - DNA, 474 bp, Arabidopsis thaliana
  unsure at all n locations
  Clone ID: LIB24-085-Q1-E1-F9
cgggtccgaaaatnaacgggtccanccacgcgtccgaaaaaaaagaaaacaaaaaaatcaaaaaaaattagaaaatgaaagcctcaacaagagtcatatggacaatatctgtccttatgctcgctgctgtgtccgaggccatcttccctctaccgtttctaccgttcctccctgggttcaacaacggctttagggacaatgaggctgtcaaggttgcgaaaccacagcctgcaggagcagttggtggaaaagccgcaagaaggcagcgtggcggcggtttagacgctcagacaacctggggtggtaagtgggagctcttcttggaaaactcgggtgtgtcagggatgcatgcgatccttatgccaagttatcaacaaggtccaagtactatgacgccaccatttgggagaatttcaaagattaagttgcctccaaggcgtaccatgccaatgtcgtgggacgctaagactaaca

SEQ ID NO: 9822 - DNA, 466 bp, Arabidopsis thaliana
  unsure at all n locations
  Clone ID: LIB24-085-Q1-E1-G1
acgcntccgcaatggcttctgaagatactctctcctcgaatcctctattgcagaattttgacttccctccgtttgactccgttgatgctcaccatgtcagacctgggattcgtgctctgttgcagcagctcgaagctgaattggagcagctagaaaaagctgtagagccttcatggccaaaactagtggagccattagagaagattattgatcggttatctgttgtttggggaatgatcaatcatcttaaggctgtcaaggacacacctgagcttcgtgctgccattgaagaagttcagccggagaaggtgaagttccagctcaggttgggacagagcaaacccatttacaatgcatttaaggctattcgagaatctccagactggaattcattgagcgaagctccgtcaacgattagttgaagcccaaataaaggagggcggttctgantgggtattgctccttg

SEQ ID NO: 9823 - DNA, 485 bp, Arabidopsis thaliana
  unsure at all n locations
  Clone ID: LIB24-085-Q1-E1-G10
tttatttcgnccggccccggtccaaantaacccgggtccanccacgcgtccggnttttcacttctaagatgatgatgactccctttgactctgatttctcactcgttagccctacgtctatactcgaagctaacccatccatcttctcctccaaaaaccctaaacccgtttcctatttcgagccaactatccctaatccccagcgttttcactctccagacgtctttggcctagccgatctcgtgaaagacggagacagtaacagagaccactctagaaaacctgtcaacaagatggtccttttcgggtcaaagctcagagtccaagatcccatcatcagctgattttggaactaaaaccggcatcagatatcctccttgtcaacttagtccttgtgtccaaacgaaggtcttagcagtgagcgagattgaccaagacggaggactacacgcgcgtcatctctcacggtcctaacccaaacatca

SEQ ID NO: 9824 - DNA, 501 bp, Arabidopsis thaliana
  unsure at all n locations
  Clone ID: LIB24-085-Q1-E1-G2
tacctgtnctacgggaccganattccanntcgccccacgcctccgcccacgcgtcaggataaaatcagtgactcttcgttcgtttcatctcccanttgagtttaacgacaccaaattcgtctcacggccttgtttcctggcgagatccttcccggtggttcgttgttcaagcaccatgagacgtacctaangcttgaactcttcanccgcggaaaattcgaccggattcttcaagatccgccacttattgaaaaagccgaanccgaactctcagattactgttcnacgcttgaaggtgatgactcttacagttgctgggagagcttactttgaactcaaagatctcgaaagagataatccaaaggttgaaagttgagaatttgattttgcanacangtggtttgaaatcgttnancgggtgtttacatggagttgcntcaatggaganngatnncannanccaacaatggtttacatgtagggngaagaatcagatagaga

SEQ ID NO: 9825 - DNA, 510 bp, Arabidopsis thaliana
  unsure at all n locations
  Clone ID: LIB24-085-Q1-E1-E2
aactgtttcgcctgncctacngccccggaaattcccgangtcgncccacgcgtccgcccacgcgtccggttttcgattcgaaaatcttaatctccatttcattccttcgacatcttcacacaaaccctaatctcatttctggtaaatccgattttgggaaactctaatttgatctcgagatcgctaacaacgatggaagaagacaagcaaatgcacgaggagaaatcatctctggttaaagaagaaccggttcgtggagaagagcccgagattgagaaattgacagtggcagatgtggacgcgccaccgaagagtaccggtggttggggttggggtttctctggcttctctgtgctttccgatctccaaaaagctgcggaagatatttctcgtaatgctgcagcggtggcagagaaagcagcgaaaagcattgcagagatgggagaagtggatgaagactctgaatcttctgctaaggaagaagagaanaactgaagaagctggatacaa

SEQ ID NO: 9826 - DNA, 477 bp, Arabidopsis thaliana
  unsure at all n locations
  Clone ID: LIB24-085-Q1-E1-C10
ttcttcgntcgcccggtccanantacccgggtccacncacgcgtccgcaaatggccgaggaaaacaacgttctagtgatgtcaaaaaccctgagcgatacctcttgaatcctgaaaacccttactttgtgcaagcggtgacaaaaaggaacgacgttctgtatgtgagccgaccggtggttcagagctatcgcttgaagtttggtcccgttaagtccaccattacctatcttcttcccggggagaaaaaagaggaaggcgagaatagaatctataacgggaaaccttgtttcagtggctggtcggttctatgtcggaggcacaatctgaatatcggagactccgtggtttgtgaacttgaacgctccggtggtgtggttaccgctgtaagagtgcatttcgtcaagaaagactagaccaatcctctctagtaacaacaatatgttatttacaactttctgtaacaatgctaaatgtg

SEQ ID NO: 9827 - DNA, 483 bp, Arabidopsis thaliana
  unsure at all n locations
  Clone ID: LIB24-085-Q1-E1-C11
ntgtttatttcgcccggcccggtccaaantaacccgggtccanccacgcgtccgcacgttctcatctttctctctaagagattttgtangtgacaatcaaaagtttgacaaaatggtgaagtttacagctgatgagcttcgaaggattatggactacaaacacaacatccgtaatatgtctgttattgctcatgtcgaccacgggaaatccactcttactgattctttggttgctgctgctggtatcattgcccaagaggttgctggtgatgttcgtatgactgataccagagctgatgaggctgaacgtggtatcactatcaagtccactggtatttctctctactacgagatgactgatgaatccttgaagagtttcactgggagccaagagacggaaacgagtacctcatcaatcttattgattcacctgggcacgttgacttttcttctgaggttactgctgctctccgtattactgat

SEQ ID NO: 9828 - DNA, 457 bp, Arabidopsis thaliana
  unsure at all n locations
  Clone ID: LIB24-085-Q1-E1-C8
acgcgtccggcattttgtacatccctgggatgggtcctcntaacaatgaagatgttacaaacccgaaaacaaagaacattcgtctctacgtgaagcgtgtgtttatctctgacgattttgatggagagcttttcccgagatatctgagctttgtgaagggagttgtggactctgatgatcttcctcttaatgtttctcgtgaaattctccaagaaagcagaattgtaagaatcatgagaaagaggctcattagaaaaacctttgacatgatacaagaaatctctgagagtgaaaacaaagaggattacaagaaattctgggagaactttggtagattccttaaattgggttgtattgaagacaccggtaaccacaagcgtatcacaccgctacttagattcttcagttccaagaatgaagaggaattgacaagcttgggatgattatatcgaagaac

SEQ ID NO: 9829 - DNA, 468 bp, Arabidopsis thaliana
  unsure at all n locations
  Clone ID: LIB24-085-Q1-E1-C9
ccatgantaaacgggtccagccacgcgtccggaataactcacctacccctaaaccaactccaatttctctcctcctctattaaatctttctcaatcatctttctttgagtcttttgccttggaatcctgatcatggcgtcttctctcacttccaaatccattctcggatgcaccaaacccgcttcttcttcttttcttccgtcggagctccgtcgtctctcttctcccgccgttcagatatctctccattcacaaaccaggaagaacttccggcagtcgtggggattgaagaagagtgatctgatgctaaatggttctgagattcgtcctgtgaaggttagggcttctgtttccacggggggagaaagcttcngagattgtgcttcaannccattagangaaatctcggggtctcattaagcttcctggggtccaangttctctnnccaaatcgaattctgcgtctcg

SEQ ID NO: 9830 - DNA, 480 bp, Arabidopsis thaliana
  unsure at all n locations
  Clone ID: LIB24-085-Q1-E1-D10
tttattcggnccggccccggtccaaantaaacgggtccagncacgcgtccgaaaaaaaaatgtctaccatttcaaaannnnnnnnnnnnnnnnnnnnnnnnnnnnnnnnnnnnnnnnnnnnnnnnnnnnnnnnnnnnnnnnnnnnnnnnnnnnnnctccactttcctctcacatctcttcgtctcactccaaccacaaactcctcctccttcaaaacctccctcctttctcgccggaacccatctccgccgtcgtctccgtacactttccgatcaaacatcaaatactcaatggctctaatccntctctcttcccataggaacaccatctcagtcacaagagctagttcttgacaccggaagccaactctcatggatccaatgccatcccaagaaaatcaagaaaccacttcctcctcnaacgacgtcgtttgattncttctttatcttcatcgttctccgacntacttgggctcatcct

SEQ ID NO: 9831 - DNA, 480 bp, Arabidopsis thaliana
  unsure at all n locations
  Clone ID: LIB24-085-Q1-E1-D11
ttattcgnccggcccggtccaaaataaccgggtccacccacgcgtccgcacacncgtccggcgaaaaccgcagtttcagtggaagaaagcgttgttcgtgtacaagctattgcagatgctgctcgtagattcaacccagacattatcgtcctctgccacggaggtccgatatcgggtccagaagaggcagagtttgtgttgaagagaacacagggttgtgtccatggcttctacggagcatcaagcatggaaaggctacctgtagaacaagcaataacaaacactgttcaaaaatacaagtccatatcgatcaagtgaagtcaaaataataagttcacttagaaacctttatctttggtgtttctaagtatatttgcatgtgttgtggcctaagggtgtggatgtttccttttgttgcatggttttttttttctggtcatctttgattgcctctgcangatcttaatatgatctccaagt

SEQ ID NO: 9832 - DNA, 465 bp, Arabidopsis thaliana
  unsure at all n locations
  Clone ID: LIB24-085-Q1-E1-D12
cggtccgaaatacccgggtcnacccacgcgtccgatcagatgtagagaaaggcttacctccaaaaaaggagacaatactcaaagttggcatgtctcaaatgcaaaaacagtactacaaggctttactgcagaaggatcttgaagtggttaatggtggtggagaacgcaaacgtctgttgaacatagcaatgcaattgcggaaatgctgcaatcacccttatctcttccagggtgcggagcctggtcccccatatactacaggagatcaccttgtaacaaacgcaggtaagatggttctcttagataaattgctacctaagttgaaggatcgagattcaagggttctgatatttctcagatgacaaggcttttggatattctcgaggattacctaatgtatcgtggttaccagtactgccgtattgatggaaatactggtggtgacgaacgagatgcttccataga

SEQ ID NO: 9833 - DNA, 463 bp, Arabidopsis thaliana
  unsure at all n locations
  Clone ID: LIB24-085-Q1-E1-D4
acgcgtccgcccacgcgtccgggnnnnnnnnnnnnnnnnnnnnnnnnnnnnnnnnnnnnnnnnnnnnnnnnnnnnntggcaagaatttcactagggatatgtctgatgttagtagtagcatcaagtgtgatctatgaagcgcaaggaacgttcttactaaaccattacttgaagaagaattttccaaaaaaatgcaacgagtttacgccttacgctaacaagggtatgataacgttggtgaccgatctcgaaggtagcagtccggccactacagagttcaagactttctttacacagttcaagtcttacatgtctttcatcgagacaacatcggcctcaacaaaaaatgttgatgccgagatgacagctaaatgtgacggtcttttcaaggccatgtctgcattgagtgctagtaaaggcgtcaaatcancggatgctgggagtatgaagatgancatgttgt

SEQ ID NO: 9834 - DNA, 502 bp, Arabidopsis thaliana
  unsure at all n locations
  Clone ID: LIB24-085-Q1-E1-D5
aaactgtttcgcctggccgtacaggtccgaaaattcccgggtcgacccacgcgtccgatntctatattcttcttcgatctaaccaccgccgatgaatcgccgatgattttccctcttagctactcttccttaccaccgcgaccgcgagtcgaggattttcgccgccgtcgccttcatcaatctcagctccctaacgctcacatgaaactctacgatgacctcctctccaacggctactacactacacgattatggattggaacaccaccacaagagtttgctttgattgttgatactggaagtactgttacttacgttccttgctctacttgtaaacagtgtgggaagcatcaggatccaaagtttcaaccagagttatctactagttaccaagctttgaagtgtaatcctgattgtaattgtgatgatgaggggaaattatgtgtctacgaaagaaggtatgcggagatgagttcgagtancggggttttgagtgaagatt

SEQ ID NO: 9835 - DNA, 487 bp, Arabidopsis thaliana
  unsure at all n locations
  Clone ID: LIB24-085-Q1-E1-D7
tacaggtccgnaaattcccgggtcgacccacgcgtccgcttaaagaacaaagaaaaaacttggtgaaatcgattctcttcaaagatcgtcttcctaatcactttcaacaactcgatcaatccttactgagacgatgccgaagaacaaaggaaagggaggaaagaacaggaagagaggaaagaacgaagctgatgacgaaaagcgagagcttatattcaaagaagatggacaagaatacgcacaagttcttcgtatgctcggtaacggtcgatgcgacgttatgtgcattgacggtgttaagcgtctttgccatatccgtggtaagatgcataagaaggtttggattgctgctggtgacatcatacttgttggtctaagagattaccaggatgataaagctgatgttatactcaagtatatgtctgatgaggctangcttcttaaggcgtatggtgaagcttccggagaatactcgtcttaacgaaag

SEQ ID NO: 9836 - DNA, 500 bp, Arabidopsis thaliana
  unsure at all n locations
  Clone ID: LIB24-085-Q1-E1-D8
aactgnttcgcctggccgtacnnagtccggaaattcccgggtcgacccacgcgtccgggaacatctttctgttcctcgtttcagcgatgtagcagtagtacccagtggagtggagcaatggcttgccttagccgaatcttccttattctgatgattactatgtcttcttcgtctcctcctttctgttccggtggaagtcggaaggagctccgagataaagaaattacgagtaagagtgatgatacacaggcgagttatgttttaggatctaaatttgtggacccgacacgtgttcttcaactttcatggctaccaaggtcaggtacttctgattgatatctggttctaccatcatggatcatttctgcacataggaatgtatgttttactgcttcaaattttaggggtctgaagcaatttggtatgtatagggtctttctataccgcgggttcttgtcggaggaagagtgtgatcatctgatatctctggttaatttcca

SEQ ID NO: 9837 - DNA, 483 bp, Arabidopsis thaliana
  unsure at all n locations
  Clone ID: LIB24-085-Q1-E1-E10
ctgtttcttcgnccgccgcggtccananaacccgggtccacccacgcgtccgcaaaaaaccaatcccagatctgaatctcaacctaaacctcagattcatcatcatggcttcttcttctaactacgatggaatccttctcggtatgggtaacccactcctcgatatctctgccgtcgtcgacgacgaatttctcaccaaatacgacatcaagttgaacaatgcgattctcgcggaagacaaacatttgcccatgtatgatgagatgagtagcaagttcaatgttgaatacattgccggaggtgctactcagaactcaatcaaagtggctcagtggatgcttcaaattcctggggcaaccagttacatgggatccattggaaaggacaaatatggagaggccatgaagaaggatgctacagcagctggtgttaatgttcactattatgaagatgagtcngcacctactggaacttgtggtgtct

SEQ ID NO: 9838 - DNA, 474 bp, Arabidopsis thaliana
  unsure at all n locations
  Clone ID: LIB24-085-Q1-E1-E12
tatcgccgtcncggtccaaatncccgggtcnacccacgcgtccgcngacgcgtgggatttcaactgcttgtgccacaagcaacttttgcattctgaattcagcaaaccacattattaaaggtgaagctgatgtaatgctctgtggtggctcagatgcagttattattccaatagggttgggaggttttgttgcatgccgggctctttcacaaaggaataatgatcccacaaaagcttcacgtccttgggataccaatcgagatggtttcgtgatgggagagggagctggagttctacttttggaagaactcgagcatgctaagaaaagaggtgcaactatctacgcagagttcctcggtgggagtttcacatgtgatgcctatcacatgaccgagcctcaccctgatggggctggtgttattctctgtattgagagagcgttagctagtgctggganttccaaggaacaaataa

SEQ ID NO: 9839 - DNA, 489 bp, Arabidopsis thaliana
  unsure at all n locations
  Clone ID: LIB24-085-Q1-E1-C1
tangccccgaaattcccgaagtcgacccacgcntccggtggcggcggcggctctcacctgcttcatcgcagtttagaaatgactagaggagatcgacgtagctccccgagtttcttctccggctcgaagcggagttggctagggtttcacggtggctcacggtcgccacttctattgattccgagctgatagatgatggtggctcgaggtcaatcgtgcgtatgggtttgcggctccgatcatccctgtgacggaaatcgagcggcggatcccgcagctgaggggtgatgacggctatcgtcggaggtatttcgtgctcgctttctcttttcgggagtttcatcgacggcggttcatgtgatggggttaggtcctgcggtaagatacggttcctccggcttgcgggattggtggctccggtctcggggttgttggcngtggctgtgctcgcaaccgtcgaataanggatagcctcntttaagagaatat

SEQ ID NO: 9840 - DNA, 491 bp, Arabidopsis thaliana
  unsure at all n locations
  Clone ID: LIB24-082-Q1-E1-F6
ttttatttggnccggccccgtaccaatcanagaattcccgggtcgacccacgcatccaaaagcactggatcaccatcaaccangcttttcacagtgcctacgagaggctatgcattgggaacagatgcacccggtcgatgttcccaatgggtggataaaagatgttacggtggagattcttccaccgaaccctatatcgttgcgcataaccagcttcttgctcatgccacggtcgttgatctatacatgacgagatatangtaccatggagggaagattggccctgtgatgatanctanatggtttctaccatatgatgacactctanagagcaagacangcaacttggagggccanagaattcttcttggggatnggttcatgggagccgctaacancncggtagataccatacatcatgnngaaaatttgtttggaanncnggcttccannagttcnagnagcancagataggtcgncccttttaatgg

SEQ ID NO: 9841 - DNA, 468 bp, Arabidopsis thaliana
  unsure at all n locations
  Clone ID: LIB24-082-Q1-E1-F7
ccngtaccgaatcaagaattcccccggtcgacccacgcgtccnactatatgagaatctttagtgtttttgtagtaacgttatggatcataagggttgatgctagggttttcggaggacgaggaatcgaaaaatttgtaactttcggtcagaattatattgttacgtggggacaaagtcatgtttctacactccattctggcgaagaagttgatctttacatggatcaatcttcaggtggtgggttcgaatccaaggacgcctacggatcaggtctctttgaaatgagaatcaaactgccttcaggaaatactggcggcatcgtcaccgctttttacttgacntcgaaangacgtggtcacgacnnagattgacttcgagtttctanggaacaancaacggaaaaccggtaacgttacaggacaanatctgtttcnaaaatgganaacggacacagagaatagaggntt

SEQ ID NO: 9842 - DNA, 483 bp, Arabidopsis thaliana
  unsure at all n locations
  Clone ID: LIB24-082-Q1-E1-G10
actgtttcccctgnccgtaccaaatccganaattcccgggtccacccacgcgtccggaaaattattaacaangtaaatctcnaaccaatatgtatgcataactaaaagtctaaaactatgtgatgtatgcataactggaactatgtttttgaaccctgcgtatttagtgtctgctaaattctaccgatttgacacaatgggatagggtaaatgaataaaagtgcaaagtatagttacttatctatgacttatctggtgccattacttataattttaaataattggtagtcccacacatgaatccttatgctttcttacancaataaccttcattttcttaaagctgacacatatttctctcttgacttctattgctaactgcnanttgcttctttgctacaattctaaatatgcttaaaatggtatcacttttctcttagtcatttanntatcttactccctcggccctcaaatctttacnat

SEQ ID NO: 9843 - DNA, 412 bp, Arabidopsis thaliana
  unsure at all n locations
  Clone ID: LIB24-082-Q1-E1-G4
aaaaatgctgaatgtacttcgaaattctaacctgacccttgccgttttgatttgctttgtcttgatagcttcaaagctatgttccgtcgattcctctgtgtatgacccacacaaaaccctgaagcagcggttcgagaagtggcttaaaacccacagcaaattatatggaggaagggatgagtggatgctacggtttgggatatatcagtctaacgtccagttgattgactacatcaactccctccacttgccctttaagctaacggataatagatttgcagatatgaccaattctgagtttaaggcccattttctcgggttgaacacgtcttccttgaggttacacaagaagcagagaccantttgtgacccagcangcaatgtcccgggacgctgtggactggangactca

SEQ ID NO: 9844 - DNA, 421 bp, Arabidopsis thaliana
  unsure at all n locations
  Clone ID: LIB24-082-Q1-E1-G5
ttcgtttccgatcggaggaagtatctggtgatgacgggaggcttgcataatgaggaggcgggttcactggctacgccgactagtgctaggcacattgggaagagagctcgcaagaacaaaagcctcaccgtctcttttgacgagaaagatctcaaggattttgtgactggttttcacaagaggaagaagaaaagaagaaaggaagctcagaagcagcaggaggaagcttttaggcggaaacgaatcgaggcccgtaagaataggaaattggaagagctaatggttgctggtaatggcgaggataatgaagatggggaagctgaagatgaagttggatgcagaggatgaagaagcagancctgatgccttcaacatctgccacgacgatgtatgatacangcgagttgaaaagtaactgtga

SEQ ID NO: 9845 - DNA, 470 bp, Arabidopsis thaliana
  unsure at all n locations
  Clone ID: LIB24-082-Q1-E1-G9
aaaccganaattcccgcggnccacccacgcgtccgcnnacgcgtgggttttttaaaagagtaataagaaaaacaattatctttgaannnnnnnnnnnnnnnnnnnnnnnnnnnnnnnnnnnnnnngaagtggaagtggataacaacaacgagaagccatctgagattaacagtttccatcacatgatcataagtagtantaaaaatgtgttgaaaatggnagaagttgaggtgagcaagaagaggaaatttcaganagatcaatctgatgagttatcgttattacctctgtcaaaacacacttgttttgccaatgttgcttgttcagagaatacaantggtaactcgganattgntacaggagtattcaaatgtcttcttatgtgaactcaacaacttctatggagtgtaacaatgatatanagatgaaagaggaatcatcctgggatcatgcnggtgaagacaagatga

SEQ ID NO: 9846 - DNA, 456 bp, Arabidopsis thaliana
  unsure at all n locations
  Clone ID: LIB24-082-Q1-E1-H10
aaaaccgaaaattcgccggtcnacccacgcgnccgtgattttgctaagtacaaaaactctcatagttgtacagtttctacttatggggtttgctgagactaaaaggtatatggattttgtctctccgggatcacaagccaaagaaggatcgtttttctttggacttgaancagcactcgaggggctcgagcctggatatcccggaggaccgcttttaaacccattaggccttgcnaaggatgttcaaaatgctcatgactggaagcttaangagatcaagaacggtcgtctagcnatgatgnctatgctcggggttctttgttcaagccnctgtgactcacactggccctattgataaccttgtngagcatctctctaatccatggcagaanaccatcattcaaagcctcttcacctctacatcttaggtaaattcttttggtaatgaaaaattcn

SEQ ID NO: 9847 - DNA, 414 bp, Arabidopsis thaliana
  unsure at all n locations
  Clone ID: LIB24-082-Q1-E1-H2
acgcgtgggttttgatctgacgtttaaaagcaggtttctttctatttccagataaaaaaactttactcatcgagactcgtttagtgattcgaaatttcccttctcggctcaaatcttcgatctgggctttcgtgtctttttgcgttttgattggtaataaaaagaagctttttaaaaactttttccatggctggaagtgaagaagttaatcttattgagagcaagacagtggttcctctcaatacatgggttctaatatccaactttaagctagcttacaatctcctgcgtcgccctgacggaacttttaaccgtcatctcgcanagtttctagaccggaaagtccctgcaaatgncaaccctggttaatggggtcctccccttttgatgtgatcatcgatngccaaactaaat

SEQ ID NO: 9848 - DNA, 420 bp, Arabidopsis thaliana
  Clone ID: LIB24-082-Q1-E1-H3
tcctcggctacaaactcttgatcaggaggaagagctttcagtacctgagatcaaagctgaaatggagaagtcgcttcaatggcttgtcccgttcgctgaaaacaccaccaaagcacatcaaggcttcggatgggtaggtgaatgggcaaattcaaggatagagtttgggaaaggaaaaggaaaaggcgagaacaacgggaatccaacacgacttcagacgcttcatcatgcggataaaccaatagttgattcatatgtactcgaactcgttgtatggcttcatcgactaatgaagtcatcaaagaaacgtgctcacggcgttaagcttcaagaaaccaaccatgtctctccacccaacaacagaaccatctccaacacgcaactatcactctcccctgacttcacctacaaaaaccagct

SEQ ID NO: 9849 - DNA, 398 bp, Arabidopsis thaliana
  unsure at all n locations
  Clone ID: LIB24-082-Q1-E1-H5
gccggagagaacaaggcgagaagaggagcgacaagggcgaagctgcagaattcttcggtaattttcanattcggttgaataatggcggctgcggcttttgggcagttaaatctagaggagcctccaccgatttggggatctcgtagtgtcgattgcttcgagaagcttgaacagattggtgaaggaacttacggccaagtgtacatggctaaagaaattaanactggtgaaatcgtggctctgaaaaagatccgtatggacaatgaaagagaagggtttccgataaccgctatccgggagatcaaaattctgaagaagctgcatcatgaaaatgtcatccatttgaaagagattgttacttctccaggtcgagatanggatgatcaangaaagccaca

SEQ ID NO: 9850 - DNA, 399 bp, Arabidopsis thaliana
  Clone ID: LIB24-082-Q1-E1-H6
tggcaatgataagctgttgacgaaactgaaagctgatgatgatcaatggagacatgtcataggaacgatcatagatggcagtgcatcatcaacaagtacagttgattggcttctacaggaactgcttaaagacaagctggatacatggctgtcttcaagatcatgtgatgaagattacataacgtgttctttgtcaaagcaggaacaaggtattatccatatggttgcaggccttggcttcgaagtgggcattttatccaatccttgctcatggagtcaatgtagattttcgtgatattaagggatggagcgctcttcattgggctgcacaatttggaaagtgaaaaaatggtggctgcccttatagcttcaagggcatcggctggagcaagtgactga

SEQ ID NO: 9851 - DNA, 483 bp, Arabidopsis thaliana
  unsure at all n locations
  Clone ID: LIB24-082-Q1-E1-H9
ctgtttgccctgnccgtaccgaaccganaattcccgggtccacccacgcgtccgaaaaacatnatacaaagagatatttaacgttttgaaatggaggctgttagattcgccgtcgccgtcgttcttgtattttgctacgttacgtcgtctaatgctcagatgacttcaccaccgancggcggtgcaggaggagacgcacactcactgccntgtattcagaaactgatgncgtgtcagccgtatcttcacttggcgantccgccgccggcgacgtgttgcatgncgttgaatgagatcgtacncaaagacgccacgtgtctctgcgctgtcnttaaccancgttgatatgctcanntcgcntaacctcactanagaaaacgctcncgatctccccaaggctttgnggcgccaaagctgacgtgtcactatgcannagcangcgccggtaactaattcctccgtcaacagcgccggnaaccccga

SEQ ID NO: 9852 - DNA, 501 bp, Arabidopsis thaliana
  unsure at all n locations
  Clone ID: LIB24-083-Q1-E1-A2
cgcctgccgtaccggtccaaattcccgggtccacccacgcgtccgtntgcctgaggacataacagcatctcctttaccgaccaagtcactcttgtcacctgaaataaacaactccggaaaggaggaagagcgagtgttaccaaagtccttggngtacatatcatgcctaattcatttggctgtttttgggatttttggggccattacgagatatttgctgcaaaaattgtttgggccaactggtgctcgagtaacaagtgatgggagcatcttgtaccttgatcttccctccaacatggtangatcattcctgatgggttggtttggcgttgtattcaaagcagatatnccaagagtttcngaatttgtggcnatangattatcgactggntaattggggaatctgacaacattcanccgggtttgggagcncnaaaangnnggntttttaangccgnnagggncnnagggggtttgcccggcgcggggntttaaaaaaga

SEQ ID NO: 9853 - DNA, 483 bp, Arabidopsis thaliana
  unsure at all n locations
  Clone ID: LIB24-083-Q1-E1-A3
ctgttaccatgnttgtaccgncccanaattcccanagtcgacccacgcntccgaaaaacatcntttccatccaatatttaccggtttcgtttcaccggatttgggctctccggcgacggagaatagccaccatctccgtagaaaacagtatacttgatagctgaggaacaagagaagtgacaagggtgattgaaaagttgaaggactcagatgggaagcagaagcggagaacaaggaaagcgaatggcggaactgagcaaaaatcttaaagaaggtgagaggattctggagcccacacgtanacctgatggtactctccggaaacccattcggattcgacctggatatactccagaanatgaagttgtcaaatatcantccaaaggttctctgatgaaagaaggagatggcctcacaaagggcctccangttatgnacctgatncaactccctaaaccaaagactaaaacttgcnaagaggga

SEQ ID NO: 9854 - DNA, 416 bp, Arabidopsis thaliana
  unsure at all n locations
  Clone ID: LIB24-082-Q1-E1-F5
atggtctgatccgtcgatcatcgaatttcaacacccagcgaatcaaccatatctacatcgatccacacaatgtcaacaaagctctgatgaaactccactacgccgatctcaccgacgcttcctctctccgtcgttggatcgatgtgatcaaacctgacgaagtttataacctagctgctcaatctcacgtcgctgtctccttcgagatccctgattacacagccgatgtagtcgcaaccggtgctctccgtctccttgaagccgtcagatctcacaccatcgacagtggccgtaccggtcaagtattaccangccggatcttcggagatgtttggatcaanncctcctccanaatcggangacgaaggccgtttcanccccagattcgcnntacggcagcttcaaaantgcggctg

SEQ ID NO: 9855 - DNA, 496 bp, Arabidopsis thaliana
  unsure at all n locations
  Clone ID: LIB24-082-Q1-E1-C11
tctgtttgcccctgnccgtaccgaanccganaattcgcgggtccacccacgcgtccgcgagacgcgtccgcccacgcgtccgcccacgcgtccgcccacgcgtccgcccacgcgtccgcaagaccttgcgctagaagaacagtttcggctttgttttgttcaattctcacctcaccccggacagagtccaaaacaacggtttatttcttgcgtttgtcgggaaatcagagttgagtataataaacacccttcacgacattctttgcttgtccaccttggtatctgaaattgggggactcttattataaaagatatgatgatttgttactctccaattacaacatgttctacgaatgctatcantatcaangaggcatttaggctctcgcctctanggcgttgtggctcacggatcatctaaattctcctgctacagtcttttatcaaggactttcaangangacattatacccgggttttcgtgtaacggtctcga

SEQ ID NO: 9856 - DNA, 423 bp, Arabidopsis thaliana
  unsure at all n locations
  Clone ID: LIB24-082-Q1-E1-C3
cattgaagtgaacagtcagcatcgttttgcttgcttgtgcgtttctctcgaactctctccatggctgttgcgctccaattcagccgattatgcgttcgaccggatactttcgtgcgggagaatcatctctctggatccggatctctccgccgccggaaagctttatcagtccggtgctcgtctggcgatgagaacgctccttcgccatcggtggtgatggactccgatttcgacgccaaggtgttccgtaagaacttgacgagaagcgataattacaatcgtaaagggttcggtcataaggaggagacactcaagctcatgaatcgangagtacaccagtgatatattggagacactgaaaacaaatggggtatacgtaatcttgggggaaatttactgtgaaactccctaaaagcatatggt

SEQ ID NO: 9857 - DNA, 443 bp, Arabidopsis thaliana
  unsure at all n locations
  Clone ID: LIB24-082-Q1-E1-C5
acgcgtccncgcctcttttctcgactctctctctttctaacaatttctctctttctgcaactgatagttaaaaagatattttgagacaacccgattgatatggaaaaagtgagagagattgtgagagaagggagaagagtggcaaaagaagacccgaggagagtagttcactcgttcaaagtgggtctggttcttgccttagtctcttccttctactattaccaacctctctacgacagcttcggtgttaatgcaatgtgggctgttatgacggttgttgtcgtcttcgaagttctctgttggggccacgcttgggtaaaggacttaacagaagtgggggcaacactatttgcgggggggacttggnatcgggagctcatnaantgggncaacatgtctggtcccgacagggagaacccantccttctcggcaagtcgtttgt

SEQ ID NO: 9858 - DNA, 432 bp, Arabidopsis thaliana
  unsure at all n locations
  Clone ID: LIB24-082-Q1-E1-C7
acgcgtccnagaaaccaccacatagatggagaagcagaagcgtttaaggtaactcaagttgaaaacagtaaacatacaggccactggagttggcttaggaagcttcgtctggggaagaagaagatgaagaataataagacagagcttagttcgagaccagtctcaggatttagtgatcttactcggggaatctttataaggtatcaggagcctgaagctgttgagctcactaaagatgaaagaatcacaagatctttcgagtttactangtattggttcccttgtggtctgtttttttcnttctgtntttttcgggcaacgccttgtggtctctgttttgttgcttttttcctgcttcnttcntcagatgcaatggagctgcatcacacacanntcatggtgtgtntgtaagttccnaaacaaaaaaacgat

SEQ ID NO: 9859 - DNA, 431 bp, Arabidopsis thaliana
  unsure at all n locations
  Clone ID: LIB24-082-Q1-E1-C8
acgcgtccnagcctttgctgctgcaacagttgcagtctcttcttcagtgttacggattcttattcttcagccctaaaaatcatcactttggaatcagaagcttgaatgatggaaggaagaagaatcatagcaaaccctagaccgtgtagcggtagtagaagagttattgctaagaagaggtctcgtcccgatggattcgtcaatagcgttaaaaagcttcaacgccgagaaatctcttctcgtatggatcgagctttctcaatcagcactgctcaagagagattccgcaatatgcgtctcgtggagcaatatgatacgcatgatcctaaaggatactgtttagtatcattacctaacttgttgaaaacgaagcaaagtttattgagattgttgcctgctccgtgacattgtctttgctcctactctatcng

SEQ ID NO: 9860 - DNA, 424 bp, Arabidopsis thaliana
  unsure at all n locations
  Clone ID: LIB24-082-Q1-E1-D1
ttgtttcacatcgtcgaagcaaaaatgattatatatctaatttcattactccctatcatcgtcgccaccctcatgctttatcaacgatggtggagatccaacataccgccgggaccaaaaccaaagtttctgcttggaaaccttcatcaaatgaaaccactttggacgcattctttctcggagtggtcagagacttatggtcctatcatatcggtgtggatagggtcacaagctcactgtcgtggtctcgagctctgatctagccaganaagtgttgaaganacanagancatcagttgtctaaccgacacaggatcgcaagggatgactcagaccggtaantgatcttgtttggtcccgattacagtccacattatgtgaaactgaggaaactctgtacactcgagctctctctccgaaaagc

SEQ ID NO: 9861 - DNA, 472 bp, Arabidopsis thaliana
  unsure at all n locations
  Clone ID: LIB24-082-Q1-E1-D12
taccgatccganaattcccgggtcnacccacgcgtccgcanctctctcctccgtcaccgagggagagcaaccatgccaatctcaattccccttaacgccactctacaatacnnnnnnnnnnnnnnnnnnnnnnnnnnnnnnnnnnnnnnnnnnnnnnnnnnnnnnnnnnnnnnnnnnnnnnnnnnnnnnnnnnnccttaccggaattcgccagcgatgcctcaggatggtcanttcttgcgtctccaacgctcataaatccgtcctgaatggtgccaccgantcntgtctctgtcggcgggnggggatgcatattcgtcttggncttcctagcnaaggacgcatngcgngccgattcgctggatcttctcaaggattgccaantgtttgtcaaacaagtcaatccaagagaatatgttgcncaaattcntcaattacccanatactgaagtttggtttcaaaaganccaaaa

SEQ ID NO: 9862 - DNA, 356 bp, Arabidopsis thaliana
  unsure at all n locations
  Clone ID: LIB24-082-Q1-E1-D2
attctttacgtntgggcttgagtccacggtaaagccgagacacaagaagataatcaagaagggaatcaantgttcattggcttggatgcnaaactgttcagatgagaagttcgaacagagaatgagctacgacacaatagatatagaagaggtagaaactgatccatcttcttttgacatgaatacattgatgcaacctnnnnnnnnnnnnnnnnnnnnnnnnnnnnnnnnnnnnnnnnnnnnnnnnnnnnnnnnnnnntttgcataaacccggagttcaacaaaggaaaaggtcnaantncagacaatgaatcgtngaacaagcttcatcgtcctgatgtancatcatcatggag

SEQ ID NO: 9863 - DNA, 485 bp, Arabidopsis thaliana
  unsure at all n locations
  Clone ID: LIB24-082-Q1-E1-D9
tttgccctgnccgtaccgaatccganaattcccgggagnaaactaagccgacacagcatagtgtcaaggggctacgaggattgggcttgacgccggatatcttagcttgtaggagcacaaagccacttgaagataatgtgaaagaaaaactagctcagttttgccatgtcccgcttgagtatatcttcactctctatgatgttcccaacatttggcgtattcctttgttgctaaaggatcagaaagctcatctggcaatctcaaaagtgctcaatcttgctagtattcttaatgagccttctctaggggaatggacttccaagagctgaattatgtgacaatttacatgtgccggtgagaatcgctgttgtggggaaatatacaggcctctctgatgcttatctctctgtcttaaaggctctcttacatgcttctgtggcttgtcgcaaaaagctcgtagttgattgggttccagcttgtgatct

SEQ ID NO: 9864 - DNA, 468 bp, Arabidopsis thaliana
  unsure at all n locations
  Clone ID: LIB24-082-Q1-E1-E1
tttngccagccccggtccanccaacccgggtcgnnccacgcgtccgagagaaacaaagcaatagaacaacaagaacaagaaaacagagaaaaaaacaatggctgccttgtcggataagttagcggatgcttaccagaacgcaaggccgagatatccgatcgattggttcacgaaacttgctgctcgaaccggtcagcacaaatcagcttgggatgttggtactggcaacggtcaagcagctattggtcttgcanagtatttcgagaaagttacagcaaccgacataaacgaagcacagttaanacgagcggtaatnacacnaaagaatcaattaccatcacactcccataacantgtccgaagaccaaatggttgctctaagtcnggcggacataactccgttgatctaatcnttggcagcacaaanccgtncactacctccgatctcgccancaattctacaaacgt

SEQ ID NO: 9865 - DNA, 425 bp, Arabidopsis thaliana
  unsure at all n locations
  Clone ID: LIB24-082-Q1-E1-E3
aaccaatcnaatcttacgaaaattttcgagtgaagatgaggtcgcttcaagcaccggttgtttgccctagtgttcgtcccagacaattgggtgtctctgctttacttgtcaactgctctgtttcgaaaactaggagtctcagaaaacaattctggggtaaccagaccaaaaatgacaagtctcaggctgctacagtgaatcttcgtctgcatcttcggaggtataagagtatcaaatgtcttttcagctcgcactctgatggtaccggnaagcacagcagangaatttcaacgagaacgatgacgattatgtcaagtctagttgtattgggagctgttgangtaaanactggaccacatgggtttcaatggtgnaaanatgaangatgggganggcaaacntcgatgtgtccaacaanaatcctc

SEQ ID NO: 9866 - DNA, 423 bp, Arabidopsis thaliana
  unsure at all n locations
  Clone ID: LIB24-082-Q1-E1-F1
cnccaaaaaatttcttctttagttctgagtttttctctgttctgaaaaaccccaaattttgttttttttggccattcaaaatttcagaagaaggcgatacaaaatcgtctttgaattctctttgtttatgatctgttcaagtaaaggaacggtcgtaattgctactagaagctcatttcccagattactaaaccggattcaaaatcgaaatgatgttccgattagtgtcatagctactcgacgatcatcaatgtcggtggaggcgtttccgatgaggttaaaatcatcacaagaagaagaggaagatgaacattggttgcggtgtttccccttcttcgccgacgacgacggtgggnanatgaggaagtaccattangcggaaaattggcaangagaccgggntttgggangataacggtggcg

SEQ ID NO: 9867 - DNA, 454 bp, Arabidopsis thaliana
  unsure at all n locations
  Clone ID: LIB24-082-Q1-E1-F12
tctgtncgcctgccgtacanaccgaaattcgccggtccacccacgcgnccggtccaaagaagaacgagaacaaaggcttcttcgccgccatgacttctggcttctccatgttcggtaccgccgtgtcgagatccgttaacggcgtgcaaggtaatgaaggagttgaggtcataaatccagaaggtggcaaggaagatgctgaagaggaagctcagaaaggaaggtggaaggacgaggaacgagatagttactggaagatgatgcagaaatatataggttcggatattacgtcaatggtgactcttcctgttgttatatttgagcctatgactatgctccagaagatggctgagataatggagtattctcatttgttggatcaagcagatgaatgcgaagatccatacttgcgtttagnatangcttcatcatgggctatatctgtttacnatgc

SEQ ID NO: 9868 - DNA, 415 bp, Arabidopsis thaliana
  unsure at all n locations
  Clone ID: LIB24-082-Q1-E1-F4
ttttaacacaacaaaactccttcagatctgaaagggttcttcttctctcttagtctctttgnnnnnnnnnnnnnnnnnnnnnnnnnnnnnnnnnnnnnnnnnnnnnnnnnnnnnnnnnnnnnnnnnnnnnnnnnnnnnnnnnnnnnnnnnnnnnnnnnngaacatgccacgccctttcttccataagttgattttctcatccactatccaagaaaaacgtctgagggtcccagataagtttgtgagtaaattcaaggatgagctttcggttgctgttgcactcacagtacctgatggtcatgtttggcgtgtaggactaaggaaagctgacaacaaaatttggtttcaagatggttggcaagagtttgttgaccgttactccattcgcattggttatcttttgatttttagatat

SEQ ID NO: 9869 - DNA, 482 bp, Arabidopsis thaliana
  unsure at all n locations
  Clone ID: LIB24-082-Q1-E1-B9
cgtgcccgtaccaatccgaaaattcgcgggtcnacccacgcgtccgcncctcctttatcgagagcttcagttttagagcaacaatgtctctatttctgaagcccttcctcttcctatacgacaccactcttagtcttctcttacttctgttcaatggatggagtcttgaggatacagcagcagcccaaaagaggcgtgaagcagacaaaaatgctgcagaaactgaatggatccaactccaatacttgtggaccaaaacaaggagtgttgtactacttcccgttttcaagggtttggtggttatgtgtttggttctatccattatagtgttcttcgagagtttttacatgaactttgtgatactcttcgtcaagttatttaaacgtaaaccccataaagtgtacaaatgggaggccatgcaagaagatgttgaggttggacccgataactacccaatggttcttatccaaataccaatgtac

SEQ ID NO: 9870 - DNA, 456 bp, Arabidopsis thaliana
  unsure at all n locations
  Clone ID: LIB24-081-Q1-E1-G12
gcccgtgccngtccgaaattcanagggnccaccnacgcgtccggaaagaaatgagcgcgacgcangacgcagacgcatgggaccgcactcgctggccttcagggtgatgcgactctgcaaaccgtctttccacgtcgatcctcccctccgcattgaccctttcgatcttctcgccggcgaggatttctccgangatccctcttccgcctccttgttccgccgccacagtatcttctgccgacgctgtcgantccgatctcagctaccgaaatagattcctcctcaaccatcctaccgatccaatcggtctctctggtcttctgcttcttcctcagtccttcgggngccgatctatctcggagaaacattctgtagcnatatcagcgtcaacaatagttccacttcanaagttcgggatgttaccantaaggnaagaaattcagacagangaggcag

SEQ ID NO: 9871 - DNA, 479 bp, Arabidopsis thaliana
  unsure at all n locations
  Clone ID: LIB24-081-Q1-E1-G3
cgttgccggccggtccgaattaacgggtccacnacgcgtccgcttctcactcttctgaagcactcaaagagtaaagtttctctgcatttcagcttctctctctcttctctctgtagaaatggcgggtcggatccaatcccaccagctaccaaatggactctacgtatcgggaaagcttgagcaaccaaaagagcgaccaccgacaatggcggctcgagctgtgccttacaccggaggcgacatcaagaaatccggcgagctcggaaggatgttcgacatctccgtcgtcgattcagcttcttttcaaggaccaccgccgttaatcgtcggtggtaatagcagcggaggtacgtcaaggcttcaggcgccgccacgtgtctccggttcttcttcaaaccctaacagtggatccgttcgatctgggtcccaactctggttcggttaagaaattctcaggtccactctctcagcttcagcca

SEQ ID NO: 9872 - DNA, 474 bp, Arabidopsis thaliana
  unsure at all n locations
  Clone ID: LIB24-081-Q1-E1-G6
taccggtccanaattcccgggnccacccacgcgtccggaagagctcacacttagaaaacaaaaaacaaaaatggctacgctttcgtttggaatcgccgccgctgcaaccaccgtccgtacgattccgagatttaattcacggaggagcaaaatcacatgcgaatgggatccgaaaggtgtgttgggtccggctcaaactggtcatatagctcggcttgagtttaagcgtcggctagagagagattcagaggcaagagaagcttttcagaaacaacttcgtgaagagaaagagcgtcgtcaagctcttagacaatctagagttgtaccggatactgctgcggagctgattgagtactttcttgatactgaagctcaggagattgagtatgagatcgctaggcttagaggaaggttaaacgacgaaattctttgcgcagatacgacttgaaatccggacagattcgatttgctgtt

SEQ ID NO: 9873 - DNA, 444 bp, Arabidopsis thaliana
  Clone ID: LIB24-081-Q1-E1-G9
acgcgtccgcgatgatcacttgtttcctcgaggtgagactacgaagatgccattgagctggcctcagagaaagagcatcattttggatgtggctaaagggttggcttatttgcattacggtgtgaaacccgctatttatcaccgggatattaaaggtacgaacatattgttagatgtcgatatgagagcgagagttgcggatttcggtttagctaaacagagtagagaaggagagtctcatctcactaccagagttgcgggaacacacggttacttggctccagagtatgccctctatggtcaattaaccgagaaaagcgatgtgtatagcttcggggttgttatattggagatcatgtgtggaaggaaagctcttgatctgtctacttctgggatcaccaaacacttttctgatcacagattgggcttggtcattggtaaaag

SEQ ID NO: 9874 - DNA, 486 bp, Arabidopsis thaliana
  unsure at all n locations
  Clone ID: LIB24-081-Q1-E1-H10
tttctntngcccgtgccgtccgataatcaaangngccccggacgcgtccgaaaaaacgnctcttcttcttcatcttcctcccacaaccacaacatcatcaatagccttcacttcgacaccaacaatggtaatactaataatagtaanaacagcaacaaccatctccatanatttcccatgaagaaagagcaacaaagcaatgaccatatcatgaattaccaccatagtatcatccctccttggcttgctcctcagcctcacgcactcacatcttcaaaccctaaccctagtaatggtggaggaggaggaggaagtttgttctctcttgcttctccggctatgtcagccaccgcattgctccagaaagcagcccaaatgggctctacaaanacacctcctttaccaccaaccacgggnctacgagaggtcaactcataataacaacctcanaacgacaattggnggggatgatgacgtcaccatctg

SEQ ID NO: 9875 - DNA, 488 bp, Arabidopsis thaliana
  unsure at all n locations
  Clone ID: LIB24-081-Q1-E1-H5
ctgtttgcctgcccgtaccgaaccgaaaattcncgggtccacccacgcgtccggnccattgctctgtgtactttgcttctttaggagaaagaaagcacaaggggcaanatcngaaagattatcatggccgacggtagtactanttcttcggagtccactaccgcctgcgctggnancggcacaagaagagagattatgctgttcggagtcagggttgtgcttgacccgatgagaaagtgcgtgagtttgaacantctgtctgactatgaacagactgcggtgactccanacatcganngccaaagatagatatgaacaatgatatnancaaaaccccggccggttacgcctcggcggatgaagctcttcccangtcttcttctaacggcannntcnagaggaaacgaggagttccatggactgaagaagancacaagctgttcntgcttgggctgcanagagtcggtaaaggacattggnaaaggaat

SEQ ID NO: 9876 - DNA, 448 bp, Arabidopsis thaliana
  unsure at all n locations
  Clone ID: LIB24-081-Q1-E1-H9
ncccacgcgtccgaaacactattagatcatcacttctcagatttcgatattcccaataaataataaatactctcagttcttctcttctccaagaacaaaaaaaaaaaaatgaattcagaatcgctagaaaatcttcaccgtccattaatcgaatcatcgaagtcgttcgtcgattatcgtctcgagactgtgttaacagatcgagagttaccgtattttcgccggatttatctaggcgatgatgattgagatgaagtttctctttcatctggcggctccggcgatctttgtttacgtcatcaacaacggcatgtcaattcttacacgtatcttcgctggacacgtaggaagcttcgaactcgccgccgcttcacttggaaacagtggtttcaacatgttcacctatggacttctgcttggnatgggaagtgcagtggaaacattatgt

SEQ ID NO: 9877 - DNA, 443 bp, Arabidopsis thaliana
  unsure at all n locations
  Clone ID: LIB24-082-Q1-E1-A3
cgnaccagtcataacgggtcgnnccacgcgtccgcnnaacttancaagtcantcacaacttactcttgtcgcatgcttacgctgttgacgcattcaganactgcaaacagtgtgctggaggtaaaattggnattgcacacagtccagcttggttcgaaccacaataccttgagcatgttggaggttccattgaacgtgtgcttgatttcatcctacgatggcatttggctccaacaacttatggagattatccacaatccacgaacgatcgtgtcggtcatagattgccaanattcacagaagctgagaagaagttgctaaanggttctacagattacgtaggaatgaagtactatacttcagtgnttgcaaaagaaattaagccctgatcctangaanccgacttggngcacngattccccntgttgagtgggatacccang

SEQ ID NO: 9878 - DNA, 353 bp, Arabidopsis thaliana
  unsure at all n locations
  Clone ID: LIB24-082-Q1-E1-A4
cgtcgctctctcacagtctgggtactcctagagctagagaaaaggcacaggcgttgctcagttacttcagaaaccaacggcatggaaacgctgggcgtgnnnnnnnnnnnnnnnnnnnnnnnnnnnnnnnnnnnnnnnnnnnnnnnnnnnnnnctctcagtgcctatttttatgttttgtcttgtgaccaaagtagtgattttgtacaaaagaggtctcttctgcaaataattttttcgtactcaagattttttgttggttctctgtattctttaattttctattgattctcataataaactttgatttggnatanaattttttttttttcaanagnaancgnaanaaaaang

SEQ ID NO: 9879 - DNA, 438 bp, Arabidopsis thaliana
  unsure at all n locations
  Clone ID: LIB24-082-Q1-E1-B1
cgggtcgngccacgcgtccggaacnactaaacaacactcacaccaaaaagacgacgatggtttcgtttcgcttccctttctcgttttctcagcccccgcgtgccaccacgtcattctccggattctccatttccgctgtcgctgtctccgtcaccgttggcgccgcagccgccggagctgcgatcgcggcgtcccggaatcccagccatccgattctagagtgggccttcncctctcaccgttcgtctctttcaccatggggatctataactctagcagacgaatccgttgtcgaanctaagaccggtttctcgtttcccgcttcaatcgganattcccgggcattactccggcgtntggnntgaggaanaangagctttactggggattaaagaacaancgatgtccaacgccttccgggtgtaaggctgaatggtn

SEQ ID NO: 9880 - DNA, 452 bp, Arabidopsis thaliana
  unsure at all n locations
  Clone ID: LIB24-082-Q1-E1-B10
taccgaaaccganaattcccnggtccacccacgcgtccgcnaacgcgtgggtgggggtaaatctagggttctgggaaaattagggttctgggaaaattagggttcatccatgctgtcgagttttagggtcaagtaaatgacggatccattaggatccgttttatatcttatgctctctcgtctcaatatatatatttaaaaatctcagcctttgggcttcgttagtgttggtttgctttcagaatttaacttaagttacggtaaaagcaatgcttancgttatacgangtgcatctaccgtcggagattcctattgttggctgcgaacttacaccttacgntacttctccggcggcctgataagaccccctccaccgatgatgtgcctgantcanccccgccttgaanggtcacttcttaaagtacagatggtttccantacagcagtgata

SEQ ID NO: 9881 - DNA, 388 bp, Arabidopsis thaliana
  unsure at all n locations
  Clone ID: LIB24-082-Q1-E1-B2
tatctccaagaatcaaagataaacggaggagaagagagcttcgtcgtcttcttcttcttcgcctccatgaatctcctcaagacgattcattaccagtctaccattactcgattttaccgttttgcccctacacgctcctttgcttcttctgtgtcactctctccacagagacacataatctctctcgtttctatctctaatcgtggaaggtgcttcgcattctcgagcgtctctggtgcttcgctttataataatcaagaggatgggaagaaagaagaatccgagagaaattacgcttcgacgaaggaaggagatgaaagtgggtttaccagaaaacgctgagattagtagaatgtgccatgttcgctgctgtgacaggcctcgntta

SEQ ID NO: 9882 - DNA, 149 bp, Arabidopsis thaliana
  unsure at all n locations
  Clone ID: LIB24-082-Q1-E1-B5
aaaccaaaccattcgtgtgagcttccatatgggccgaaattcatagggttttgagatgattgcaggcccattatttattacagatggcaattttctnnnnnnnnnnnnnnnnnnnnnnnnnnnnnnnnnnnnnnnnnnnnnnnnnnngg

SEQ ID NO: 9883 - DNA, 387 bp, Arabidopsis thaliana
  unsure at all n locations
  Clone ID: LIB24-082-Q1-E1-B6
ttttttttttttttatcatatannaatttttgatttgattagttctcctcatcacatatctgaaaaagcaatatggtgaggaaagatcgattctgtaacaaaagacaaacacaccaatgggtggtgagtgtgtttacatatctgcactcatctgtctaatgaaagggacaaagttgttccagttctcgaccctaaagatcttctcattcattctgcaaaacgtaaatgatcttagantgtcgccattcggttgcacacagttctctcgtanttgccttagtcccatctcatcaaatctttcgcttgtgtgtctaccantcacatgtantggtccaaccttcttcgaagacatcatgtatcnngtcnacgtaatccttcagggctngc

SEQ ID NO: 9884 - DNA, 369 bp, Arabidopsis thaliana
  unsure at all n locations
  Clone ID: LIB24-082-Q1-E1-B8
tgacgtggcacaatttccctgcgacgcacccaacctccgtctctctctctctcagatcggcggccatctccgtcgagtaattgaaatctctctcagccgttggattcgaattccgccgcatcttcatatacctcgtttcaatcctgcggaaccctagttgctctgaattgtggtttgctactgtgataagttcttcagtggtagattaggaagcaccaccaatggagattgtgtaagacatattcattacagctctcttttaangattatggggtctgtttgctgtgtggctgcaaaggacagaaatgttccnagtggaactantgngtanttcagtgtgttcaccatcgtgganttttcgacgggaca

SEQ ID NO: 9885 - DNA, 455 bp, Arabidopsis thaliana
  unsure at all n locations
  Clone ID: LIB24-081-Q1-E1-F9
ctcgtancggtccgattattcacggggccccccacgcgtccgcaaaatcatcttctcctgtancggaaatcaanaacttctctatacatccggttatgcaagtctttcccgagttcccggtaccaacagggaatcaatcatacggacagcttacttcatcgaatctcatcaatttggttccattaacttttcagtcaagtccagcaccgctttctctcaacctctcactagcttcatctaatcttaatgaaccatctccttcaatgcatccagcattcaacacgattggagtcgcttagagcttatcctaaaggtgaaaatctgcaacacaccctgtttgtttctttgctgtacagataggtcttgactttgttataaaaaaattcgtcaaatttatgtatttgggctaaaaaaaatctgttgaaannannaataataaacagagtttggngata

SEQ ID NO: 9886 - DNA, 459 bp, Arabidopsis thaliana
  unsure at all n locations
  Clone ID: LIB24-079-Q1-E1-H3
acgcgtccgtatnntgctcctaganaaagatggcganaangagtntgatgatcatgatgactatngttgctgtgnccatgattaacattgctnaaagtgatnccattgcancatgtnacatcatatttggtgantctttggttgataatggcaacaataatcagcttcagtcattanctanagctaattactttccttacggtattgactttgctgccggtccaaccggtcggtttatcaacggnttaaccactggcgatgttatcgctcagcttttgggtttcgaggactacattacaccttacncttctgcaagangacaagacattctccgangagttaactatgcttccgctgctgccggaatccgagacgaaaccggcagacaattgggaggtcgaatagcatttgcatggcanctagcanatcacgtgaacactgtgtcacaaagtattgaaa

SEQ ID NO: 9887 - DNA, 488 bp, Arabidopsis thaliana
  unsure at all n locations
  Clone ID: LIB24-079-Q1-E1-H4
ttttccgcncctagtctcaaaccgggtcgaccacgcgtccgctcnagactgtagagtgaagtttgatttatttagagagataagttaaaaaaaaaatggtcggtatggatttgttcaaatgtgtaatgatgataatggtgttggttgtctcttgtggtgaagctgtttctggagctaagttcgatgagctttatcggtcaagctgggctatggatcattgtgtcaacgaaggcgaagtcacaaaactcaagcttgacaattactctggagctgggtttgaatcaagaagcaaatacttgtttggtaaagtctctatccagattaagcttgttgagggtgattcancaggaacagtcactgctttctacatgtcttcagatggtccgaaccacaacgaattcnattttgagttcctaaggaacactaccggcgagccttacatagtccaaaccaatatctacgtnaacgggagttggaaacagagaaca

SEQ ID NO: 9888 - DNA, 498 bp, Arabidopsis thaliana
  unsure at all n locations
  Clone ID: LIB24-079-Q1-E1-H6
ttttccgccccgtaccggtcaagaattcccgggtcgacccacgcgtccgccaaaaaccaatcccagatctgaatctcaacctaaacctcagattcatcatcatggcttcttcttctaactacgatggaatccttctcggtatgggtaacccactcctcgatatctctgccgtcgtcgacgacgaatttctcaccaaatacgacatcaagttgaacaatgcgattctcgcggaagacaaacatttgcccatgtatgatgagatgagtagcaagttcaatgttgaatacattgccggaggtgctactcagaactcaatcaaagtggctcagtggatgcttcaaattcctggggcaaccagttacatgggatccattggaaaggacaaatatggagaagccatgaagaaggatgctacagcagctggtgttaatgttcactattatgaagatgagtcggcacctacngggaacttgtgggtgtccgttgttgttggtggaa

SEQ ID NO: 9889 - DNA, 456 bp, Arabidopsis thaliana
  Clone ID: LIB24-079-Q1-E1-H7
acgcgtccgccaaaatctctctcatttcgccatagctgagagcttcttctactttcccttagcttcttttttccttcatttttgttctacccttgcgaatctctgaaatgaaccctcaagctaatgaccggaaggagtttcagggagattgttcggcgacgggagatctcacggcaaagcacgattcagctggaggaaacggaggtggaggtgctaggtataagctgatgtcaccggccaagcttccgatctcgaggtcgactgatatcacgattcctcctgggttgagtccgacttcgtttttggaatctcctgttttcatctccaacatcaagccagaaccttcccctactactggttctttgttcaagcctcgaccagtgcacatttctgctagctcaagttcttatacaggcagggggttccatcagaacacctttactgagcagaagtcca

SEQ ID NO: 9890 - DNA, 382 bp, Arabidopsis thaliana
  unsure at all n locations
  Clone ID: LIB24-080-Q1-E1-A10
gggcggacgcgtgggcaatcagctcctctcgatttccgtttgtcggaaaatctctcccgtgatcggcgtattgtgaatgccgctcaccgagatattctccgattcttttccccagtgagganaagtgttcagttgacttattaggaggtggggtttgnataagttanaatggnctcaattcttaatcaaacccaagganttgcaanaatcttctaagggtcntgggcatttaanatgtgaaaacttctttcnattccccggagaaaacactttgtcaaatggnttgangggtgtgttatattttcgncggtcttgnctactgctttattgggttgtcanncatcactgnacggttcttnaagtcgntggaggaatgtcgtga

SEQ ID NO: 9891 - DNA, 473 bp, Arabidopsis thaliana
  unsure at all n locations
  Clone ID: LIB24-080-Q1-E1-B1
ttcacgtagccgtcnagaattcangggtagaaataatggctcanggacaccaaggcttatgctttgggtttatcttcttactatgcttcttcagctctacttttgcactcaggattcttaaggacctccctatgatggagccaagaaagctagatctgaaccatgaaatgatgcctgggatggttatgctacagccagatcatgaggtccaacctgagcacacggtcaagcctggccatacactccagtccatgtccggtgtatcanaacatccagagcacacggttaagcctggccatacactccaagtccatgtccggtgcattagaacatcctgagcacaaggaaaagcctgaccataaactccagtcnatgttgggagaacatcctgaagcacanngaaanagcctgaccatnaactccantcnanngttggggaagaacatccngaggcacaaaggaaaangcctgga

SEQ ID NO: 9892 - DNA, 417 bp, Arabidopsis thaliana
  unsure at all n locations
  Clone ID: LIB24-080-Q1-E1-B2
tcagggacaccaaggcttatgctttgggtttatcttcttactatgcttcttcagctctacttttgcactcaggattcttaaggacctccctatgatggagccangaaanctagatctgaaccatgaaatgatgcctgggatggttatgctacanccagatnatgaggtccaacctgagcacacggtcaagcctggncatacactccagtccatgtccggtgtatcagaacatccagagcacacggttaancctggccatacactccagtccangtccggtgcattacaanatcctgagcacaaggaaaagcctgaccanaanctccagtctangttgggagaanatccctgagcacaagggnaaagcctgaccataaactccagtcnatgttgggagaancatcctgaccacaaagg

SEQ ID NO: 9893 - DNA, 386 bp, Arabidopsis thaliana
  unsure at all n locations
  Clone ID: LIB24-080-Q1-E1-B9
acacgtccggcaagctttgtcgcagattatagatttgacgtgtcaaagctggagcctgtggtggctaagcctcattctcctgacaaccgagctctagctagagaatgcaaagacgtgaaaattgacagagtatacatcggttcttgtactggtgggaagacagaggattttatggctgcagctaaacttttccacgcagcaggaagaaaggtcaaagttccaactttccttgtcccggctactcagaaggtgtggatggatgtgtatgctctcccggtacctggagcaaggtggaaaagacatgtgcgcagatcnttgaagaaactggctgttgacacaccatccaagccctagntgtgggtgcttggccttgggtggcccangca

SEQ ID NO: 9894 - DNA, 460 bp, Arabidopsis thaliana
  unsure at all n locations
  Clone ID: LIB24-080-Q1-E1-C7
accggtcanaaattcccgggncgacccacgcgtccactcttcgaagatgagcggtacggtgaaggatatcgtttcaaaggcggagcttgataacttgcgccagagcggcgcaccagtcgtgcttcacttctgggcttcttggtgtgatgcttcgaaacagatggatcaagttttctctcatctcgctacngatttccctcgtgctcacttctttagggttgaagctgaggaacatcctgagatatctgaggcttactctgttgcngctgtgccttatttcgtcttcttcaagngatggtaaaactgttggatacacttgagggtgcagatncagcanagtntagctaataangttggnaaanttgcntggttcgagtactttctgcggagcctgctgcctccatgcaaancntaagggttgngctngncttgggccaacggattcttgnaaactggtgaa

SEQ ID NO: 9895 - DNA, 410 bp, Arabidopsis thaliana
  Clone ID: LIB24-080-Q1-E1-C8
acgcgtccggtgcattgccaaccctgcctgtgcagccaatgtcgcgtgccttcagacctgcaataaccgtccagatgaaaccgagtgccagattaaatgtggggatctgtttgagaacagtgttgttgatgagttcaacgagtgtgctgtgtcgagaaaaaagtgtgttcctagaaaatctgatctcggagaatttcctgccccagacccttctgttcttgtacagaacttcaacatctcggactttaacgggaagtggtacattacaagtggcttgaatccaacctttgatgccttcgactgccagctgcatgaagttccacacagaaggtgacaacaagcttgttggaaacatctcttggagaataaagaccctagacagtggattctttactaggtcagccgtacaa

SEQ ID NO: 9896 - DNA, 406 bp, Arabidopsis thaliana
  unsure at all n locations
  Clone ID: LIB24-080-Q1-E1-C9
ccgcccacgcgtccggggtcacagtttcacagacacgcggctcctcgatggttgtcttccgccgacagccgccgcgtgtatgtccttcccatacggaatctgccacgttgcgtttgtataatctgcctgactagggctttagcagtgtataagagacgagacgagacgcgattcaccggagagtcaaagaggcaaggaggagaaagccaatggnacatgccacgtttacgtcggaagggcagaatatggagtcgtttcgactcttgagtggccacaaaatcccagccgttggactcggcacgtggcgatctgggtctcaagccgcccacgccgttgtcactgcaatcgtcganggtggctataggcacatagatacagcttgggagtatggtgatcagaggagagg

SEQ ID NO: 9897 - DNA, 426 bp, Arabidopsis thaliana
  unsure at all n locations
  Clone ID: LIB24-080-Q1-E1-D1
aatgccgccaaagttggatccgagtcagatcgttgacntgtacgtccgagtaaccgggggagaagtcggagcagcgagttctctagctcccaaaatcggtccgctaggtctcgcaccaaagaagatcggagaagatatcgcgaaagaaaccgcaaaggaatggaaaggattacgtgtaaccgtcaagctcacagtgcanaatcgtcaggcgaaagtganggtggttccatcatcagcagcactngtcancannggcgttgaaagagccngngagagataggaanaaggtgaanaacattaagcataacgggaacatctcgtttgagnagtgtgacctgagatttcnacgatcatggagaactnagatctattgctaanggnatttnagtggaacagttcaaggganattcngggaacttgtgttgt

SEQ ID NO: 9898 - DNA, 423 bp, Arabidopsis thaliana
  unsure at all n locations
  Clone ID: LIB24-080-Q1-E1-D12
acgcgtccnggagactcgacgagtcaattttaaccangatttagaggatttgtggatgtgatttcttcttttggtctcttctctttgggattttttttcattggaattgagcatacacatgtgttttccgaatagtttttggagtgagaattaagtttggattgttgattctcttcctctggtcatggaggagccttgtgagacacttgacagtggtgaagcctatcaaatatctagatatcataactataaccaacacagctccagaagctcatctccctggttggatttgaagagtgttctatgtccggataagcaatttcgtgggtgggaagattcaanctcctgaggtcctcactancaatcacattcctcctggatccaagatacgcttttggagattaacgggtgttagaatgggaa

SEQ ID NO: 9899 - DNA, 452 bp, Arabidopsis thaliana
  unsure at all n locations
  Clone ID: LIB24-080-Q1-E1-D6
acttttcacgccgnccagtancggtcanagaattcccgggncgacccacgcgtccnaaaaatatttgtgttatcattattttctatttacgtcctctcatcagcggctgaaaaaaatacatcattttctgcgctttttgcttttggtgattcagtcttagatacgggaaacaataattttcttcttactcttctcaaaggaaattattggccatatggtttgagttttgactataaatttccgacgggaagattcggaaatggaagagttttcaccgatatanttgccganggtttacagatcaaaagacttgtancancttatagcaagattcgtcgcatcagttctgaagaccttaagactggcgtttgttttgcatcanggtggttcanggaattgacgatcttanatcccgaacactgnnagttttagtcggcaggtggaccanggtt

SEQ ID NO: 9900 - DNA, 429 bp, Arabidopsis thaliana
  unsure at all n locations
  Clone ID: LIB24-079-Q1-E1-G8
nctctgacggcatcagccacctctgcggcttcgcaaatccaaataagctgtggatgaaacgaagaatcctagatttctgaatggcgacaccatttatagcgggggttgcagtagctgcaacagcacttgctggtagatatggaatccangcatggcaagcattcaaggcaaggccaccaaggcccaaaattaagaaattttatgagggcggtttccagcctacgatgacnaaaagggaagctgctctcattcttggcgtcagggagagtgtaccggcggnaaaggtgaaggaagcacacaaggaaggtaatggtagcagaccatccanatgcaggtggtagccatttcctatcctcnaagattnaatgacagctaaanacgtgatncnagcaaaaactaataaacaagcggattccccnttgttgatgc

SEQ ID NO: 9901 - DNA, 457 bp, Arabidopsis thaliana
  unsure at all n locations
  Clone ID: LIB24-079-Q1-E1-E5
acgcgtccgttcntgttctctctttctctttctctcatcactatgaagagtttcaacacagaaggacacaaccactccacggcggaatccggcgatgcctacaccgtgtcggacccgacaaagaacgtcgatgaagatggtcgagagaagcgtaccgggacgtggcttacggcgagtgcgcatattatcacggcggtgataggctccggagtgttgtctttagcatgggctatagctcagcttggttggatcgcagggacatcgatcttactcattttctcgttcattacttacttcacctccaccatgcttgccgattgctaccgtgcgccggatcccgtcaccggaaaacggaattacacttacatggacgttgttcgatcttacctcggtggtaggaaagtgcanctctgtggagtggcacaatatgggaatctgattggggtcactgttggtt

SEQ ID NO: 9902 - DNA, 503 bp, Arabidopsis thaliana
  unsure at all n locations
  Clone ID: LIB24-079-Q1-E1-E6
tgttttcgcctggncctaccggtccggaaattcccgggtcgacccacgcgtccggccaataaagccctgaaccctaattttcttttggctttggctggagaacgactgtatgtgtgttcaacaatgtcgtcgatgaacttcaatccatttcaaaactggttcgagaaaccaccgaacccagtcccgtccatcaacttcgtctcgctcgctgattccttctttcccaagtcgcagtctccgaatttcgcttcgattggacttccaaaattctcaaagaagtccccaaaacccgaaacagcaggaaccgacgaaccaggaccgtacaagcaaatagcagagcagttcttatgggagtgtgagaacataccggattacaggcacactccagaagtggataagcttctcaacgaagatccagttttcgagaagaaggagaatcccgagcacaagaagagattgaagctgancagaaatggtggggagagtttcgagcgagtcctgtg

SEQ ID NO: 9903 - DNA, 497 bp, Arabidopsis thaliana
  unsure at all n locations
  Clone ID: LIB24-079-Q1-E1-E8
nttttcccgccccgtaccggtccanaattcccgggtcgacccacgcgtccgcttgtcaaaaaaggaaccaaactatgaggcgactaggcttcactttgataaccttgtagaacgatatggaaaccccatcatcattctgaacttgatcaagacaaaagagaggaggcctagagagtcaatcctacgagaagagtttgttaatgcaattgactttataaacaaagatttacctgaggaaaatcgtctgcgattcctccactgggacctgcacaaacattttcggagcaaaacaaaaaatgtcttggcactcctttgcaaagtagctacctgcgcattgatgctaaccgatttattttactatcaagttacaccagccatgacgattgaggattccatgagcttgtcttcttcttctgatgccgacactggggatatatctccacacactaagttctgatgatgataatggggacatgatagtcttgagaaaaaatcta

SEQ ID NO: 9904 - DNA, 512 bp, Arabidopsis thaliana
  unsure at all n locations
  Clone ID: LIB24-079-Q1-E1-E9
ctggtttgcctggncctaccggaccggaaattcccgggtcgacccacgcgtccgccgtaacatcatggagaatccagcttggtacactcaatacactccttatcaagctgagatctctcaaggtcgtctcgaatcgctcctcaatttccagaccgtgatcacagatctcacgggtcttcctatgtccaatgcgtcgcttctggatgaaggcactgctgctgcggaggcaatggccatgtgtaacaacattcttaagggtaaaaagaagacctttgtcattgctagtaactgtcaccctcagactattgatgtttgtaagactagagctgatgggtttgatttgaaagttgtcacctctgatcttaaggatatagattacagctctggtgatgtttgtggggttcttgttcagtatcctggtactgaaggtgaaagtcttgggattatgctgagtttgttaagaatgccaatgctaatgggtgttaaanggttgtgaatggctaccggatttg

SEQ ID NO: 9905 - DNA, 464 bp, Arabidopsis thaliana
  unsure at all n locations
  Clone ID: LIB24-079-Q1-E1-F1
acgcgtccggggaaagagaggagataaaanggcaaacaaatggcgttcaaatatcataacacctgggtccgtgtttattcagccacgtctctcactttcgtttccaccattaaagctgctttcgttaaacctcctttggcctctccgtctcgtcgtaacctccttcgtttctcatcatctcctttgtcatttccgtcgctccgtcnaggtttccacggtggtcgtattgtggcaatgggttcttctgctcctgaatcggtcaataanccggaagaagagtggcgtgcgattctttctcctgaacaatttaggattctcagacagaaaggcactgaatatccaaggaactggataatacaacaaagtattcgacgatggcatctattgttgtgcaagatgtggaactcctctctacaanatcaacaacaaaattcgactccggttgtggctgggcagcttccttg

SEQ ID NO: 9906 - DNA, 501 bp, Arabidopsis thaliana
  unsure at all n locations
  Clone ID: LIB24-079-Q1-E1-F10
ggttcgcctggccctaccggaccggaaattcccgggtcgacccacgcgtccgatcntctcctctccttcacgttgagatatttttgagttttctgtgttgaattttggggaatcgaagaaattgaatttcaaaaatcaatggcggaagaaattgaaaaatctgtgccgacagaggaatctctgatggagaagatctccgagaagattcaccatcacgattcgtcgtcatcgtctgaatccgagtacgagaaacctgattctccttcggctgtgaaggcgaagatctatcgtatgtttggcagagagaagcctgttcacaaggttctcggtggtggaaagcctgctgatgtgttcttgtggagggataaaanactatcaggtgctgttcttggtgtcgcgactgctatttgggttcngttcgagctggttgaagtatcatttgttgaagtcttttgtgtcacatttcgatactcgctcttgggaggcctccttttgtgggtc

SEQ ID NO: 9907 - DNA, 490 bp, Arabidopsis thaliana
  unsure at all n locations
  Clone ID: LIB24-079-Q1-E1-F3
tggttttctggcnccacggtccggaanacccgggtcganccacgcgtccgcccanangtccgattaacttctctcacactgactctgcgaccctaatttgtgagctctcttctctttgcgcagtcaatttgctacaacttataaaatggcggnggctacttcatccatcgctccttctctttcatgcncatctccttcttcttcatccaaaaccctttggtcttccaaagccagaaccttggatctacccaatatcggtttcctctcgtcttcttccaagtctctgaggtcgcttactgccaccgtcgctggaaatggcgccactggattctcccttgccgctcgcatggnttcntcggnctgcggtcaaaagcccctgtttctctcgattttgagacatctgtcttcanaanaggagaaagtttctcttgcnggttagnnanggagtanantgggancangaaggaagagacctgttcaagcatctcnc

SEQ ID NO: 9908 - DNA, 461 bp, Arabidopsis thaliana
  unsure at all n locations
  Clone ID: LIB24-079-Q1-E1-F4
acgcgtccgagcatctttcctcttcttcaccggggagatttgtcggtactaaatctagggtttttgggtatcaccggagggttgaagagagagaaaaaaactcacaatggnatcagatcagggaaagcnatttatcggcgggatttcatgggataccgacnagaatcttcngacagagtacttcagcaatttcggcgangttttgcaggtcactgttatgcnagagaaagctactggtcgtcctagangattcggattcgtcncattctcggatcctgctgttattgatanggttcttcatgacaagcaccatattgataatagagatgttgatgtgaagagagcaatgtctanangaggagcacagtcctgctgtggaaatnagggacttttaatgcttctacgaattttgatagtggagctaacgtgaggactaacnaaagaatattcctgggaaggtt

SEQ ID NO: 9909 - DNA, 485 bp, Arabidopsis thaliana
  unsure at all n locations
  Clone ID: LIB24-079-Q1-E1-F6
ctaccggtccagaaattcccgggtcgacccacgcgtccgcccacgcgtccgcccacgcgtccgcccacgcgtccgcccacgcgtccgcccacgcgtccgatttcatatataaagtaaaacattttgaggtatgtaaccgatgtgggacaaantacaagtttgggcttcccagatcccacatttggtggaacacatatataaagagtctcttcgttgattagcttcccagatcccacatttcagtgggaggagctcttctcagaccttaagactattgctttagtggaatgcttctcgtaaatgtataagtgaggaaagaaactccattcgtatctatctactaccctaagccgtttatgcattttctgtccatcagaagatcaacacctgtttctggaggattccattgatttaagggattagatggatgatggaccatgtgggattcagtagatgacaagaacacangaggaatccacctaaca

SEQ ID NO: 9910 - DNA, 501 bp, Arabidopsis thaliana
  unsure at all n locations
  Clone ID: LIB24-079-Q1-E1-F8
cttttcgcgcgcctaccggtccanaattcccgggtcgacccacgcgtccgcccacgcgtccgcggacgcgtggggcgaacgattatatctctgctatcaatcacagctcggcatccagaagcttctgaagctggattcgaagccctccggtttataatgtcagaaggagctcacttgttaccatcaaactacgagctctgtttggatgcagccagtcactttgctgaatcccgagttggtgaantcgatcggtctatctcaagcaattgacttaatgtcaaactctgtgttttgtcttgcaagatggtctcaagaggcgaaaaactcgattggtgaaactgatgctatgatgaaactaagtgaagatattggaaaaatgtggctcaaacttgtgaagaacctcanaaaagtatgtcttgatcaaacgctacgaagtgagaaaccatgcaatctcaatgctgcaacgagctatagccgggtgcaagacggggattatgttac

SEQ ID NO: 9911 - DNA, 506 bp, Arabidopsis thaliana
  unsure at all n locations
  Clone ID: LIB24-079-Q1-E1-F9
tntttgcctgggcctaccggancgganatcccgggtcgacccacgcgtcngcccangcgtccggatttagagcgtgtgagggagataggaagagagaaagtgagcgagagacgatcacggccgcgctgaaatccacgaccacggccgcgctgaaatccacgaccacggccgctctgaagaagaagactctctccgtctcctcccttctcctcctccgtctaagagacaaggcatccccaagacgccatgatctctctcactccctcgttgtttctgaacaagacggttgttcctggatgttccacacgcctctctctgcgccagcctagaactataattactcctcctgcttccttgagagtcttttcctctctcggatctaaccaggatcccaccggcangcgttttgattgagaccactgccacttcatcctcctctctcgagacctcngccgccgacattgttcccanatccaacgtatctggtggagttcaaggatgtctac

SEQ ID NO: 9912 - DNA, 458 bp, Arabidopsis thaliana
  unsure at all n locations
  Clone ID: LIB24-079-Q1-E1-G3
acgcgtccggacncgaanggtggtccgagtggaccgggacttttgcgttgaacactctgacttacagagagtattcgaacacaggagcaggggctggaactgcaaatagagtgaagtggaggggctttaaggtaattacggctgctgctgaagctcaaaaatatacggctggtcagtttattggtggtggaggctggttatcgtcgaccggtttccccttctcgctcggtctttgagagattgttgtgtaatgtgttcctacgtattgttggctacaaaaattattgattaatattgtatgaagcaaatcgtgttgtcctctttgttttgtttgggttgtgtactttctctanatcatccgtangtattataaacgagatgaaataatgccnggtttttgcgccttgagaatatggatttgagaaaagganggatgttgcctanttgatgatgatgca

SEQ ID NO: 9913 - DNA, 417 bp, Arabidopsis thaliana
  unsure at all n locations
  Clone ID: LIB24-079-Q1-E1-G6
tttatccgatcaaatcttgccgtggaatctctgttcctcaggctaccgttactcatactggttttcagtgggaccggtattggttagttgttaactataaaggaagagcatacactcaaagagttgagccaacccttgctcttgttgaatcggagttgcctaaggaagccttcttggaagattgggagccaacaaatgactcattgttggtgataagagctcctggtatgagtccgttaaagataccgttgactaggccaagctcggtagcagaaggtgtgtcgatgtgggaatggtctggctctgcttttgatgaaggagaagaagctgcgaaatggttttcagattatcttgggaaaacaaagccgtttggttcggtttaataaagatactgaaactagancttcaactccctga

SEQ ID NO: 9914 - DNA, 499 bp, Arabidopsis thaliana
  unsure at all n locations
  Clone ID: LIB24-079-Q1-E1-E2
ctggttttctggcggccgcggtccggaaaacccgggtcgacccacgcgtccgcccacacgtccgaaagaacccaaagctcttggagggaggtgatcttctcttctcagatcatcttctactcttgagtatacccttcctttgaagataattcctagtttgggacttatccttacttctccgggatttcactttaatccaccgaagagttttgacatctgaattgtattgttttgggtgtgatcccgatagaattcgagggtaggaatcggaaagtagggtgatttggtttagaagaagaaagaaatggagggttttgtcgatcactacattgttctaggtttagcttctgggagaggaagctctgaagcttaccgaaaaggagattgcaaaagcatacaagttgaaagctttggacttgcatcctganaaacgccctgatgatcctgatgcccatganaaattcagaggcttaanacatcctacgaagttcccaaagac

SEQ ID NO: 9915 - DNA, 432 bp, Arabidopsis thaliana
  unsure at all n locations
  Clone ID: LIB24-079-Q1-E1-C8
atggtggtgacgtctttctcttcagcgccgcctatcttcttcttacctggagctgatgctcagttttcttcttccaatggaaggtttgctattccttcctcttctctcgtaaagggactaagaagacaccaagatgcaaagttggtgggcaacagagccagagttggagtagtacgagtcctagcgaacccaaatgtatctcctcctcctcctccaggaaaagcaaaggtaaaaaaagaggtaatcatggtagaccctcttgaggctaagcggttagctagtaagcaaatggaagagattaaaggcagagaaaagcaacagagaaggcgtgaaatagaggctattaacggagcatgggcaatcataagactcatgaaaaggctggtgatcgaagctcaaacgggngaagggtattcctggctcanttgggct

SEQ ID NO: 9916 - DNA, 509 bp, Arabidopsis thaliana
  unsure at all n locations
  Clone ID: LIB24-079-Q1-E1-C9
tggttggcctgggccgtaccggaacggaattcccgggtcgacccacgcgtcngcccacgcgtccgatcagaaaaaaaaaaaaaaaatccaaattcaacactctcacacttcgatatctccgccttcattctcctcagagccaactgtcctgagatttcgatttcgatttctccgatctctcttcctccgtcgccggcgaaaccatgtctcagtctattcaattctccactccttcacacactcctcaccttctccatctccctcactcacaattcaaccgtcctctctcctctatctccttccgtcgcttccctctaacaaccatcaaatacacttcnnnnnnnnnnnnnnnnnnnnnnnnnnnnnnnnnnnnnnnnnnnnnnnnnnnnnnnnnnnnnnnnnngcaagtacttctctcacctaacggtactggtgctgtgaagtctgatgagaagattcgttgtcgctacgggggttacgactggataacgtctgggattgaggttgat

SEQ ID NO: 9917 - DNA, 491 bp, Arabidopsis thaliana
  unsure at all n locations
  Clone ID: LIB24-079-Q1-E1-D1
ncggtccggaaaaccgggtcgacccacgcgtccgataaaaattgatagagaaataatgggtgtatttcctgcgtttggagcatggatcaatcanaattctcaacagcctcttgaggaagatcccangagctctgagcatgttgaatctaagtcggcatcagagatggataatggtcctgctaagatgaaaaaatactatgacgaagatgagtgggagaggcaagataaactttggacagctgcagagaagaagcatccatggaaagatgcccctcctaaggttaaggtgacaacaaaaaagggtatatgccatatgcacatagaattgacattggggttgcctcctgatggagtcntcgnacttttcactaaatccacataaccggnnccanacaccgaaccactccggntttaattcctatcattgaatgattcaaatgttggtantaattgtagcaataccttgaaagtgtactccttttggttaaant

SEQ ID NO: 9918 - DNA, 508 bp, Arabidopsis thaliana
  unsure at all n locations
  Clone ID: LIB24-079-Q1-E1-D10
cggtttgcctgncctaccggaacganatcccgggtcgacccacgcgtcnggcgaagtctctcttcaacctcttcccctccactttgcttctctctctcctccccgggggttttacagtcatatcatcntcngagactctgcgattcttcacgggatcgtatttctctctcancgatttttttcgattctcgaagctgcaaggaccacccatcanacattgaaactcaagcgggagaaattttctggctcgggagggaaactatggagccctaatgcccattttctgctgtctatgaggttatgtttggatgntagatacattttgactttctcatanactgagtacacnancaaatggcatttccaangcatcagnngangtganaaattttgtggtgaatggncaccgntggatactaattgcanggggtgcattgnttgaagcacattgtccaantccgctttgggataccangctaaagcactcgcgtgattccgagacctcaat

SEQ ID NO: 9919 - DNA, 469 bp, Arabidopsis thaliana
  unsure at all n locations
  Clone ID: LIB24-079-Q1-E1-D2
ncgggtccggaaaacccggggctgagccctgatacatcaatacaccaacaacaatgggagttaccaaaactattaatctcactctttctcttctcattctcatctttcttcttaggtgctgaatcggattatcctcagcatagtaacttgaagagactgagaccgaatagactgttcgtgtttggagattcctatgcagacaccggaaacataaggaaatctctctccgattcttggaaaattccttacggcatcactttcccccaaaaaccttccggtcgtttctccgatggncgcgtcgccaccgantttctancaagatacttggggataaagtcaccaattccgtncacntggaaaggataagccngaaanggaangggtaatggtacgggaanncanttatgcctatgggagggaacaaggagtgtttaaagaataanagataatccaattggcaanacaatga

SEQ ID NO: 9920 - DNA, 505 bp, Arabidopsis thaliana
  unsure at all n locations
  Clone ID: LIB24-079-Q1-E1-D3
ctggttttctggcnccacggtccggaaaaacccggggtcgacccacgcgtccgcccacgcgtccgcgctttgacaatgcagtttgaaggagagaagaaaaacgtatccgaagttgcagacgtaaccctcaagcaagaagatgaacaacaagaacgtagatcttattcgacgccgtttagggaagagagagacacctttggcccgatccaagttccttccgataaattatggggagcacagacgcagagatcgcttcagaacttcgagattggtggtgaccgcgagcgaatgcccgaaccaatcgtccgagcttttggtgtcttgaagaaatgtgctgccaaggttaacatggagtatggtcttgatccaatgattggggaagccataatggaagctgcacaagaagtagcagaaggaaagctcaatgatcatttccctcttgttgtatggcaaactggtagtgggacgcagagtaatatgaatgctaatgaggtcattgccaata

SEQ ID NO: 9921 - DNA, 466 bp, Arabidopsis thaliana
  unsure at all n locations
  Clone ID: LIB24-079-Q1-E1-D4
acgcgtccgaaagagcctagttttactgggacttctagagatgaactgtttggtcaactctttggtgcgcttgagaaagtacggtattttaggaatacacctgatggagatgatgatcctgctcagctggagaaagctacaaggatatttcatgattgtgtcaatgaaatggaaaagtctggatgtcagacgtttgatgtgaatagcttggcggaaacactcaagtgtcaaggtaacaaagctatgcagtccaatctttatcttgaggcagtcgagctttattcttttgcaattgcactgacggataagaacgctgttttctactgcaacagggctgctgcatatacacaagatcaacatgtgctcagaagcaatcaaggactgtcttaaaatccatttgagattgattcaaaattatagtaaggcgtannagtcgtccttggggtttaacatattaatgcctcaa

SEQ ID NO: 9922 - DNA, 498 bp, Arabidopsis thaliana
  unsure at all n locations
  Clone ID: LIB24-079-Q1-E1-D5
cgcctgggcctaccggtccggaattcccgggtcgacccacgcgtccgcccacgcgtccgtcttctcatcctcctctcaagctccaatggcganagttctagtctcgtctccatcttcattcttcggttcaccgttgantaanccgtcgtcatcnctccgtcacagtggagtaggaggaggaggaagcgctcaatttcttccataccggagtaataataacaaactcttcactacttcaaccaccgtacgattcagcttaaacgagattcctcctttccatggcttggattcatcngtagacatcggagcgattttcaccagagctgaatctcttctctatacaatagctgacgccgccgttgttggtgctgattccgtcgtaactactgattcatccgccgtgcagaagagtggtggttggtttggttttatctcccgatgctatggaattggttcttaagattttgaagggatggattatcaacgggttcatgtacc

SEQ ID NO: 9923 - DNA, 442 bp, Arabidopsis thaliana
  unsure at all n locations
  Clone ID: LIB24-079-Q1-E1-D6
aaagaagggcatattcctcanttgtggcatcgatatggtaaatgttctgaaggaactattcccatgaggaggacaaaggaagatgatgttttgagagcaagttcagttaaaagatatggcaagaagaancgtagaagtgtccctttacctaaatctgcagaacctgaccttattaaccaaagtggtcaccagcatgccatagcttangtagaaggagataagtactatggagctaaggctactataaatgtgtgggaagccaaanatacagcagcanaatgagttcagcttgtcacagatatggcntcttggtggctcattcggacaagatcttnatancatccaangctggttggcaagtngnncccgggatttgtcnggngacactacncganactcttcacttactggacnantgatgcacatcaagctnccggtttgc

SEQ ID NO: 9924 - DNA, 460 bp, Arabidopsis thaliana
  unsure at all n locations
  Clone ID: LIB24-079-Q1-E1-D7
acgcgtccgagcnaatgagtcgactcgttgactccgttaaagaaatatcagggttttcatcttcaaggggttttattgggaagatccaaggcgatcttgttcgtaggatcacgcttctcagccctttcttcgaggaattgattgacgtcaatgttgaattgaaaaaggatcagattacagggtttgaggctatgagaatcgctcttgattcaagtcttgagctttttcgatcggttaatggaggaagcaagctttttcagcttttcgatagagattctcttgtggagaagttccgtgacatgacagtggagatagaagcagcgttaagtcagattccttatgagaagattgaggtatcaagaggaagtcagagaacaggttcaagcttctgcattttcagttcaagagagcaaangaaagatgggaagagtcctgatctacagcttagccatgatctaac

SEQ ID NO: 9925 - DNA, 439 bp, Arabidopsis thaliana
  unsure at all n locations
  Clone ID: LIB24-079-Q1-E1-D8
aaangagtctcaagcangcatcagctcgtccttaaatctgatccagcatcgtcactttcncccggcgaattccgttttatcgatttaagtaacgatgatttgtgcaaagatgactcaggacgtggagatganagataacaacaccccttctcaatcgattatctcttcttctacctctacnatgcagnatttgaaggagattgcagcactcatcgatactgggtcntacangaaggaggttcgtcgtattgctcgtgctgtgcgtctcactatagggcttangcagaaactcaccggctctgtgccctcttccttcctgggattttgctttngttccatgatnccgagtctcagtcncgcctcncttcctttgttcgtaangggtgangaacatgacatggaanttgataactgcntcatcggncagacaagctgctcc

SEQ ID NO: 9926 - DNA, 505 bp, Arabidopsis thaliana
  unsure at all n locations
  Clone ID: LIB24-079-Q1-E1-E11
tggtttgcctggncctaccggancggaaatcccgnggtcgacccacgcgtccggtgatctcgattttgcaatatctgacgtttactgtgcatgattgttcactgctccgccgtcaatttagattgataaagtttgatacttgtgttgcaatcattgtggaattcaaactcaatgtcactttccgcttttgagcattgttgtctgttttcgcgtatccaaaatctgactagtatctagtgttnnnnnnnnnnnnnnnnnnnnnnnnnnnnnnnnnnnnnnnnnnnnnnnnnnnnnnnnnnnnnnnnnnnntcgtttggataattaagaccaaaatagtcggtaatgtatcgctatagctaggaataattttatcatcaattagtgtgttaatccggcttaatgggtttctaagtcatcacataagtgtcttcttctctgtatcnntctattttactagtaacgtgttcaattggntcaanngtnagacctcttaaattaaccatta

SEQ ID NO: 9927 - DNA, 471 bp, Arabidopsis thaliana
  unsure at all n locations
  Clone ID: LIB24-079-Q1-E1-E12
tgtttgcctggccctaccggaacgganatcccgggtcgacccacgcgtcngcccangcgtccgggcgacaaaaccaaccatctcctccttatctccaccatgatctcactccactcatcagccattaaagcctctctctacggctctttcccttcttcgttacgatcaacactctctgtttccttctctgctggatctcttattcggcttccttccgtcggcaagcgcaatctctccgtcgtcgtttcctctggaagagactcctcgatgtcatcaaacaatgtttctcgcggatcgtcttcaaaggttgctgctgaatctttcttcaggagtgtcttanggcagatggaaactgtttacctaaatcgaaacccgacgcctaaatccgtcttggancttgttcgatctgttgntgaccatcaantttgcnatgatcatctcgctttcagaacgtttgggattgggtnggtt

SEQ ID NO: 9928 - DNA, 461 bp, Arabidopsis thaliana
  unsure at all n locations
  Clone ID: LIB24-079-Q1-E1-C7
acgcgtccgttcnttgcttgcccttttctttttattttattcttccaaaatcaaatagttccttctttgatctcattgggataactaaaagtttcaagaagagaaacatatcattgaagagagaacccacacaaaaaaaaatgtctgtagatttctcatctgagcgtgtttgctatgtccactgcagcttctgcaccacgattttagcggtaagtgtaccatacgcaagtttgttcacacttgtgacggtgagatgtggccattgtaccaatttgctatccctcaacattggagtttcacttcatcaaacctcagctcctcccattcaccaagatcttcagcctcatagacagcacacaacctctctggtgacaaggaaagattgtgcatcgtcctcctaggagncacaancatttaaccgggaaaacattgatcggtgaggctcctaagantgcctccta

SEQ ID NO: 9929 - DNA, 498 bp, Arabidopsis thaliana
  unsure at all n locations
  Clone ID: LIB24-078-Q1-E1-A3
ccgtagccgnagaagtccgaaaattcccgggtcgacncacgcgtccgccnacgcgtccgcaggaggatgaggaggaggagcatcggctgatcttcactccgcggcaagatccggtgatttagcagcagttcaatctattatcagctctaatcctttggctgttaattctanggataagcattctcggactccactacatttatcagcatgggcagggcacaacgangtagtgagctacttatgcaagaacaaagctgatgttggtgctgcagcaggagatgacatgggtgcgattcactttgcttctcaaaaggggcatttggaagttgtgagaactttattatctgccggtggttctgtgaagtcatcactcgcaanggactcactcctcttcactacgctgctcaaggttctcactttgaaatcgtcaagtacttggttaanaaangagcaagcgtcagaantacgactaaggctgggaagagtccanctgatgtt

SEQ ID NO: 9930 - DNA, 498 bp, Arabidopsis thaliana
  unsure at all n locations
  Clone ID: LIB24-078-Q1-E1-A7
cgntcgtagaagtccaaaanggccnggggcccccacgcntccggnacattatngacacaaangatggaagctgtaagatgcanaagaggcagngagaacaacaaaagtccagagaggatcataaggtctttgaatcatcatcaacatgatgangaacttgaagaagaggtcaagacatagaaacccattttccgaagagtccaagttgtttactatctcacaagaaatggccaccttgaacatcctcacttcatcgaagtcatttctccggttaaccagcctctccggttaagagatgtgatgaaccggcttacgattctgagagggaagtgcatgacatcacaatatgcttggtcgtgtaaaaggagctatagaaatggatttgtgtggaatgacttagcagagaatgatgtgatttacccttctgactgtgctgaatatgtcctgaaaggatctgaaatcaccgacanatttcaagaagtacatgtgaacagacca

SEQ ID NO: 9931 - DNA, 424 bp, Arabidopsis thaliana
  unsure at all n locations
  Clone ID: LIB24-078-Q1-E1-A9
tcgacccacgcgtccnctccctcatcactttgataaacaagagtctcatttttcgcttttccaaagggaacaacttcttcggattattatctatggcagagaagcttgagccggtgaaggttttgtactgcggagtttgctctcttccagcggaatactgcgaattcngtcccgatttcgctagatgtaagccctggctcgtcgaaaacgccccagatctctatcctgatctcctcaaagaagcaaatgagaaggcagcatataatgtttctgacanactccagtcggtgggaatctcttcaggtggtgcngatggggcaccatcttcagctcagactggagggacatccaanaatgaggaagtgaancgcctacctggggggaaagttaaaaagaaaagattgacaggaagttatcantgaaa

SEQ ID NO: 9932 - DNA, 494 bp, Arabidopsis thaliana
  unsure at all n locations
  Clone ID: LIB24-078-Q1-E1-B1
anttccaaggtcccccacgcgtccgcaaaggctgggaacaatgtctcaaggaaaacaaagagggttacccgtgtggaattaaataagcgatgtaggcaaaaggcactgcgaaaaaaagagacaaaggaaaaggctaaagagaagatattaaacgaaattgacagcttgcccaacatcttagaagaaatagccaaagaagatgaggataaacagaataaacatttacgaagggtcatcgccaagcaggaagtgctgaagatacgtcctcctcggttgggaaagtacaaatttgaggctcctccagttcaagtcctcttgacagaagagatgactgggtcacttcgtaagctgaangcatgttgcactcttgcaagagatcgattcaagagcctccaagaagcgaagaatacttgttccctcaaaacagattanaaggtttaaggaactccttctcactggtctaaaagccttgtttgagaaaaagcnttttggga

SEQ ID NO: 9933 - DNA, 452 bp, Arabidopsis thaliana
  unsure at all n locations
  Clone ID: LIB24-078-Q1-E1-B10
acgcctcanaaattccaaggtcgacccacncgtccgcccacgcgtccggaggaaatgcctcatcaagaacactgacaatggtgttcgcatcaagacatggccaggatctccccccggtatcgcctccaacattcttttcgaagatatcacaatggacaatgttagccttcccgttctcatcgaccaagagtactgtccttatggccactgcaaagctggggtaccatcgaaagtgaagttgtcagacgtgactatcaagaacattaagggaacatcagcaacaaaggtagcantgaagctaatgtgcaagcaaaggcgttccttgcaccaatattgctctctctgacatcaacttggtccacaacggcaaagagggaccagctgtctcagcatgttctaacatcaaagcctattctcaacggaaagttggttccagcggcttgcactgaaag

SEQ ID NO: 9934 - DNA, 407 bp, Arabidopsis thaliana
  unsure at all n locations
  Clone ID: LIB24-078-Q1-E1-B12
ttactgatccaataagaagataaaacggnnnnnnnnnnnnnnnnnnnnnnnnnnnnnnnnnaagaaccagtcatgggaagatctccagcttcttcttgtctccgtctcatctcttgctccggcggtgatgatacctccgccgatcctaactccaccgccctcgagaacaagagctctggggataagcgtggatggagtttcaggaagaaatctgggaaacagcgagggttgattactagtgtagtttctgaaactactcctgcttctaggactagagagactcttgaatctgctctccttaaatctccgtctcctgataataacaatgtttctgaaaaacagcagcagtctttctctgttgatgaaaagaagagtcagttacctgttgttacctatgtggctgagcc

SEQ ID NO: 9935 - DNA, 476 bp, Arabidopsis thaliana
  unsure at all n locations
  Clone ID: LIB24-078-Q1-E1-B2
ggccncccacgcgtccgcancangttcttacctttttcccatttacantcggtaaatttctccgatcacgagatacanatttcactttctgatatcttggatcttccgatcacnnnnnnnnnnnnnnnnnnnnnnnnnnnnnnnnnnnnnnnnnnccanaaagttcnaattttttanagagaagaaaccatgantgctttagctgcaacanacagaaacntccgtcatgcatctcgaatcctgggtttggattcnaagatcnagagaagtcttatgatcccanttagagaaatcaaggttgagtgtacgattccnaaagacgatggcactctggtttcatacatcggatttagggttcaacatgacaatgctcgtgggacccatgaaaggtgggantcaagntatcatcctgangttgattcaagntgaaagttaacgcactaagctcagctgatgaacttggganaactgctggt

SEQ ID NO: 9936 - DNA, 492 bp, Arabidopsis thaliana
  unsure at all n locations
  Clone ID: LIB24-078-Q1-E1-B3
cggntcgtagaaatccaaaggtccacccacncgtccgcaaagagatagtttcttcttcatccaaaagaatccaatcttttcctcaaaagatagtttctggatcgaacgacaatggagattttctactacttggtgtttggggttttgggtctcgtcgtcgcggcgttggagcttagcaagaacaacaaggatcgaatcaacacttcttcagctttcaattctttcaagaacaattatctccttgtctattcgctcatgatggcgggtgattggttgcagggtccatatgtgtactatctttatagtacttatggatttggtaaaggggacattggacagcttttcattgctggttttggttcctctatgttgtttggtaccatcgttgggtctctagccgacaaacaaggtctaagaaggcatgtgttacctattgtattanctatatattgaagctgcatcancaagcattctcctcaaataaaaaggttt

SEQ ID NO: 9937 - DNA, 496 bp, Arabidopsis thaliana
  unsure at all n locations
  Clone ID: LIB24-078-Q1-E1-B4
tagcctccganaattccaanggnccacccacgcgtccgganaaagattgttttcctctggaatgattccgatggatttgctgcaaccatttctgatactttaaaccctagccctagttcccctcttcgcaaactagaagaacagatccagcttccgttggataagtatggcgttgaaggtgtggaaaccggcgggagtatcgttcatttcgtagatgaaaatgaagtttatcaggtctcgatttttcttcttcgaagttatgagcctccagtactagtgtgtgctatgaatgaactgctggacctaattacaaggggatcgtcaactctacccacaatcatagctcctttctttgtgggcggcatctaagctcaagttcaataacagattcctggaaagcaaataacagaaaagctagtccttcattacgttcaagttgctacagaaacagagaccaagtaggttaattgcctctcgcatcgagaaaacaccacta

SEQ ID NO: 9938 - DNA, 418 bp, Arabidopsis thaliana
  unsure at all n locations
  Clone ID: LIB24-078-Q1-E1-C11
tctctctcttttctcaaatcttggaggagaagaagcaaagaattagactactctgcaacaatggctatttattctgtccataacggcgacaagaaacattggtggttcactcacaagaagattgttganaagtacattaaggacgcangatctttaatggagagtgaggagcaaaacgacgttgcttcagccattcatttactagacgcggctttatcaatatccccgcgttcggaaactgcgttagaacttaaagccagatctttgctctttctacgtcgcttcaaagatgtacttgatatgcttcaagattatatcccaagcctcaagcttgccgtgaacgaagaagatggatcttattcatacgaaggttcttcttactcttcctcctcctctcaactctcccgggaaacttctc

SEQ ID NO: 9939 - DNA, 512 bp, Arabidopsis thaliana
  unsure at all n locations
  Clone ID: LIB24-078-Q1-E1-C2
aactgtttccctgnccgtagccgtccgaaaattcaagggtccacccacgcgtccgtgtttttggtcactctgatgctttcagtttccatggttttatgagaaaatatcattgattatggttgcttctgagattaaatccccggtgagtgtccccgagactccgggaagctcctctgtgcatcataggaagcagttgagtgtgttcttcatagaatcagataacagacgtcttgctcttggccgtggctataccggaggaaccactcccgttaacatccatggcaaacccatcgccaatctttccaaaaccggtggttggatcgcagctttcttcatttttggaaatgaaatggcagagagaatggcgtatttcggactctcggtgaacatggtggcgttcatgttctacgtaatgcataagccttttgaaagttcatcaaacgcagtcaacaacttccttggcatctctcaaagcctcctctgttccttggagggcttcctaagccgacgcc

SEQ ID NO: 9940 - DNA, 469 bp, Arabidopsis thaliana
  unsure at all n locations
  Clone ID: LIB24-078-Q1-E1-C3
nccgacccgtccggatctgaanactgnttcttcattgacggtaggagtcaccacttttggcggcgattccttgttctctattttttttgcacaagcaacatttagcttctgcaaactccagttcatctctcaancctcatatcgccgtgttttctcgctctantaccgcgagctcggncgaaccaggaatgcaatccgttaatctataancggtgttgagaagatgacnattacatcaaatatctctgtacagaacgatancctcgttgttcaagggaatactatccttacnaaaatccctgacaacattatcctaactccggttaccggtaatggantcgtttccggttcatttatacgcgcgacntttgaacaangcangagtcgtcatgtgttccccatcngtgtantgganggtcctccggttcatgttgctgttcccggtttangctatggtggatgactcaaa

SEQ ID NO: 9941 - DNA, 443 bp, Arabidopsis thaliana
  unsure at all n locations
  Clone ID: LIB24-078-Q1-E1-C4
ggcgacgacgacnaagatgagagagacggtgaagttgataagcatggaaggtttcgagttcgtcatcgacagagaagccgctatggtttctcagactatccgaagcatgctcacttctccaggtggtttctcggaatcgaaagatggcgtagtgactttccctgatataagcaccacaatactagagaagatttgccagtacttctactggtctcttcaatactccagaggcaaagagacagagtttcatattgagcctgaactgactctagagctgatgatggctgctaactatcttcacacttgaagaatgaaaaggataacgctgttgaatcttattcgacttgtgtgaatcaaaaggataaatctgcattgggttcaagaagaactattgaataactctaaggaaaagtcatgtacttctttactaactgttaattttt

SEQ ID NO: 9942 - DNA, 412 bp, Arabidopsis thaliana
  unsure at all n locations
  Clone ID: LIB24-078-Q1-E1-A10
acgcgtccgatctccctctctcttacaactctctatccgtagtttcagtttcgtcctagaatttcttttcttgtctgttccagatgaaattgtgagttctccgagttatatgcatccgttagaatcaaagcggtaatcaaaagcagaatttagaggattgaaaaagatggttttggggtgtttccctttgaaaagcaagaanaaacgtggntctgtttctatgaagcggttggatcttgaagaaagcaagccaactgcttacctgagccaccaaagattccaagtcgtaatttacaatcagctcctccgaagtttcaagaactcgtggtgaagccaattcaatctaacaacggtgggaaccggagagatgagtagcccgagcangagtcatgtctgctccgtcaagcatcca

SEQ ID NO: 9943 - DNA, 439 bp, Arabidopsis thaliana
  unsure at all n locations
  Clone ID: LIB24-077-Q1-E1-F5
acgcgtccgtaacaataagaaaccaataaactctaacgctcttcaaagcaaaaaaaaacatcaataatgaagcaatctcttcttctatccttcgtgttactactactctcatcatcatcactcgtgacaccaatccatgcacgtaacaaatcaaatccggcaaagtctcctgttggtgctccagcaccaggaccatcaagttccgattgttctacagtaatatatagcatgatggattgtctcgggtaccttggtgtcggatcaaacgaaactaagccagagaaatcgtgttgtactggaatagaaactgttttacaatataacccacaatgtatttgtgctggtttggttagtgctggcgaaatgggaattgaactgaatagcacaagagctcttgcaacanctaaggcttgcaaactctccattgntcccccctcaa

SEQ ID NO: 9944 - DNA, 441 bp, Arabidopsis thaliana
  unsure at all n locations
  Clone ID: LIB24-077-Q1-E1-F6
ccggtcanagcattcccgggncgacncacgcgtccnatacagaggcctcaagctggagcttcgaatacggtttataagagtggccctctcttcatatcatcaaaaggactaggttggacatcctggaagaagcgttggtttatccttacccgaacttctttggtctttttcaaaaatgatccaagtgcattaccacaaaagggaggtgaagtaaatttgacccttggaggcattgacttgaacagttcggggagtgtcgtggtgagagaagataagaagttgctgactgtactattcccagatgggcgtgatggacgagccttcacccttaaggctgagacattggacgacttgtatgaatggaaggctgcccttgagcaagcccttgcacaagctcccaatgcagcacttgtaattggtcaaaatggaatnttcccgaac

SEQ ID NO: 9945 - DNA, 436 bp, Arabidopsis thaliana
  unsure at all n locations
  Clone ID: LIB24-077-Q1-E1-F7
acgcgtccnattttcgtttgaatctcaacgttttttgcttgattttagcttctgagagagtccagatccaaggaattggaggaagaataatgtcggcaaggcatgggcaatcgtcgtatcgagatcggagtgacgaattcttcaaaattgtggagactctaaggagatcgattgctccggctccggcggcgaataatgtgccgtatggtaataatcggaacgatggtgcgagaagagaggatcttatcaacaaatccgagttcaacaagagagcttctcatattggtttagctattaatcaaacgtcgcagaagctatcgaagcttgcgaaacttgcaaagaggacatcagtgtttgatgatcctactcaggagatacaagagctgacggtagtcatcaagcaagagattctgctccaaaatctgctccggncgaa

SEQ ID NO: 9946 - DNA, 483 bp, Arabidopsis thaliana
  unsure at all n locations
  Clone ID: LIB24-077-Q1-E1-F9
cgtttaggccggcccggtaccganccanaaattcccgggtcnacccacgcgtccgcngacgcgtgggcggacgcgtggggttacaaagcctttcaaaaannnnnnnnnnnnnnnnnnnnnnnnnnnnnnnnnnnnnnnnnnnnnnnnnnnnnnnnnnnnnnnnnnnnnnnnnnnnnaaaatggcgtcgacggtaggagttccatcactataccaagttcctcaccttgaaatctccaaacccaattccaaaaagaggtctaattgtttatctttatctctcgataagcctttcttcactcccttatctcttgttcgtagaactcgtcgtatccattcctcttctcttcttgttccttctgctgttgctactcctaattctgttctcagtgaagaagctttcaaaagtcttggtctttctgaccatgacgaatatgaccttgacgggggacaacaacaacgttgaaagctgatgatgggtgaag

SEQ ID NO: 9947 - DNA, 481 bp, Arabidopsis thaliana
  unsure at all n locations
  Clone ID: LIB24-077-Q1-E1-G11
cgtttagcctgcccgtaccggaccaaaattcccgcgggtcnacccacgcgtccggactgagagacatctcggtgaagaagtagcagagatgtcgacggtgtacgtgctagagccgccgacaaagggaaaggtcattgtaaatactactcatggtccaatcgacgtcgagctttggcctaaggaagcgcccaaatccgtacggaacttcgttcaactatgcctcgagggttactttgacaacaccatcttccatcgtgtcattcccggttttctcgttcaaggcggcgatcccaccggctccggaaccggtggagatagtatatatggaggtgtctttgccgatgagttccattcaaggctgagatttagccaccgtgggattgttgccatggctaatgcgaagctcacctaattctaatggaagtcagttctttttcactttggataagtgtgattggctgataagaagcacactatcttt

SEQ ID NO: 9948 - DNA, 412 bp, Arabidopsis thaliana
  unsure at all n locations
  Clone ID: LIB24-077-Q1-E1-G2
acgcgtgggtcgcccacgcgtccgcccacgcgtccgcctctctccttctctcgcagccgacgatcccatccaaaaaccaaaactcgctctccggtgatcgtctttcgaaaatgaatttcttaaactcagctgcatccatttgcagaagagttagtctgagggaactcatcactgaggttcctgcttatactggcagcagcatttccgatggttcttcaagtgggttgagtttggtcttgaagcgttgggctactaagaaaaccgctggttctacaaagaacggtcgtgactctaatcccaagtttcttggtgttaagaaattcggaggagagagtgtgatacctggaaacatcatagttcgtcaacgtgggaactcggtttcatcctggagaataagtccggaattggnaag

SEQ ID NO: 9949 - DNA, 411 bp, Arabidopsis thaliana
  unsure at all n locations
  Clone ID: LIB24-077-Q1-E1-G7
acgcgtccgcccacgcgtccgatctgttcacagagaattgaagtcgagacattagaannnnnnnnnnnnnnnnnnnnnnnnnnnnnnnnnnnnnnnnnnnnnnnnnnnnnnnnnnnnnnnnnnnnnnnctccaaagctgaagtggacaccagaagaagaaacagctcttaaagctggagtacttaaacatggaactggaaaatggcgtaccattctctcagatcctgtgtatagcacaattctgaagtctcgttctaatgtggatctcaaggacaaatggagaaatataagtgtaacagctttatggggatctaggaagaaggctaagcttgctcttaaaagaactcctttgtcgggtaataagcaagacgataacgctacagctattaacattgtggtccttanccaaag

SEQ ID NO: 9950 - DNA, 455 bp, Arabidopsis thaliana
  unsure at all n locations
  Clone ID: LIB24-077-Q1-E1-H1
tacccgnccttaccgggccaaaaattcccggancgacccacgcgtccgcttcaacctcntaagcacattcttatctctttctgaaacgagttcccaaattagctctacaaaaaccaggatcttgatttctcatcagttaaacatgggaactcctgtcgaagtctctaagctccatttcttgctcttccctttcatggctcatggncatatgataccaactctagacatggctaagctctttgccaccaaaggagctaaatccactatcctcactacacctctcaatgccaagctcttcttcgagaaacccatcaaatcattcaaccaagacaacccgggactcgaagacatcaccatccagatccttaatttcccttgcacaagagcttggtttgcctgatggctgtgagaatactgntttcatcttctccaaacctgacctaaacgttngggac

SEQ ID NO: 9951 - DNA, 480 bp, Arabidopsis thaliana
  unsure at all n locations
  Clone ID: LIB24-077-Q1-E1-H11
ttttagccggncggtaccggaaccanaattcccgggtcnacccacgcgtccgcncacgcgtccgagcaataaatctcacctcccttttttttttttttgtctcgctacttttgattatcatttaaaaccaaaaaacctaccatgaatgagaatcacattcaaagtgatcacatgaacaacaccattcatgtaacaaacaaaaaactcccaaacttcctcttatccgtacgtctcaaatatgttaaacttggttaccattacctaatctcgaatgccgtctacattctcatactccccgtcggcctcctcgccgcaacctcctcctcctttagtctcaccgatctcacactcttatacaaccaccttctcaaattccacttcctctcttccactctcttcgccgctcttcttatctttctaaccaccctctacttcacaactcgtcctcgcagaatctttctcctcgatttcgcttgttac

SEQ ID NO: 9952 - DNA, 474 bp, Arabidopsis thaliana
  unsure at all n locations
  Clone ID: LIB24-077-Q1-E1-H3
ttaccgggccanaaattcccggaaacgacccacgcgtccgccaaaatctcnctcatttcgccatagctgagagcttcttctactttcccttagcttcttttttccttcatttttgttctacccttgcgaatctctgaaatgaaccctcaagctaatgaccggaaggagtttcagggagattgttcggcgacgggagatctcacggcaaagcacgattcagctggaggaaacggaggtggaggtgctaggtataagctgatgtcaccggccaagcttccgatctcgaggtcgactgatatcacgattcctcctgggttgagtccgacttcgtttttggaatctcctgttttcatctccaacatcaagccagaaccttcccctactactggttctttgttcaagcctcgaccaatgcacatttctgcganctcaaattcttaaacaagggaaggggggttcaancaaggaaacctt

SEQ ID NO: 9953 - DNA, 410 bp, Arabidopsis thaliana
  unsure at all n locations
  Clone ID: LIB24-077-Q1-E1-H5
tgagtacacgacgttgcgtaagagttcgccgattctccgaaaacccgttgaccactgtcatggcttcacgttctgcttctaggcttcgttctctcgcatctgcctgttctggaggtgctgaagacggtggtggaacctctaatggctccctatcagcctctgctactgcaactgaagatgatgaattggctataggcactggatatcgtctgcctccacctgagatcanagatattgtagatgctccaccagtcccggctttatcattttcaccacatagggataagatattgtttctcaagcggagagcattgcctccgctcgcagatttagctagaccagaggagaagcttgctggtgttcgaattgatggatactgcaataccaagaagcagaatgtcattcccana

SEQ ID NO: 9954 - DNA, 442 bp, Arabidopsis thaliana
  unsure at all n locations
  Clone ID: LIB24-077-Q1-E1-H8
cgcgtccngtttgctttgacattcccaaagtttcttggtaacaacttggcttatctatcggttgctcctagtgagggaaaggggaaatctaaacgaactttagtgaatctctctgtgagagaagctgatcagaaaggtttacctgattcaattagtgtttactcagttgcattacccaaaccactgagtaaaggcgatactttgacgctggaggtagttgctgcattcaccaatgtacttcagccatttcctgaaaagataactcagggtgaaatccatcttgttatgctccaagaaagcgcacaatatctctctccttacgcggttgagtctcagtcattgtctatcaaactaccgaatgccagaatcgaatcttacaccaaattcgagaatacaaagctccanggatnagagctcaaatatggtccctacaagaatccnc

SEQ ID NO: 9955 - DNA, 406 bp, Arabidopsis thaliana
  unsure at all n locations
  Clone ID: LIB24-077-Q1-E1-H9
agaagaagagataatgcagatcttcgtcaaaaccctcaccggcaaaactataaccctagaagttgagagcagcgacaccatcgacaatgttaaagccaaaatccaggacaaagagggcataccacctgatcaacagaggctgatttttgctggtaagcaattggaagatggccggaccttagctgattacaacatccagaaagagtctactcttcatcttgtcctcaggctcagaggtggaaccatgatcaaggtgaagacactcactggaaaagaaatcgagattgatatcgaaccaaccgacactattgatcggatcaaagaacgtgttgaagagaaagaaggcatccctcctgttcancaaaggctcatatatgccggaaaacagcttgctgatgacaaaacg

SEQ ID NO: 9956 - DNA, 454 bp, Arabidopsis thaliana
  unsure at all n locations
  Clone ID: LIB24-078-Q1-E1-A1
acgcgtccgcnnaagttatgctaccgaggaagatggagattctcaaccattcttcaaagtttggatcaccggatcctcttcatgttcttgccgtcgacgacagtcacgttgatcgtaaattcatcgagcgtttgctcagagtatcttcttgcaaagttactgttgttgatagtgcaacaagagctctccaataccttggtttggatgttgaggaaaaatcagtcggttttgaggatttgaaggttaatttaattatgactgattactcaatgcccggtatgactggatatgaactcttgaagaagatcaaagaatcctcagcttttagagaagtancggtggtaattatgtcctccgagaacattttgcctcgtattgatagatgtcttgaagaaggggctgaaganttcctactgaaccggtaaaacccccggtgtaaaaagattaagagant

SEQ ID NO: 9957 - DNA, 472 bp, Arabidopsis thaliana
  unsure at all n locations
  Clone ID: LIB24-077-Q1-E1-F4
ctctacgcgntctttaccggccannaattcccggatcgacccacgcgtccncccacgcgtccgcggacgcgtgggtgcgataacaatggccgaaactatgaaagatattacgatgaagaacgatgaatcacaggaagaagaaatccccgatcaatttctctgctgcgtttgcctggaacttctttacaagccaattgtgttatcttgtggtcatctatcatgtttttggtgcgtacataagtccatgaatggctttcgtgagtctcattgtccgatatgtagagacccgtatgttcactttccctctgtgtgccagaagctttattttctgttaaagaagatgtacccacttgctcataagaagagagaagaacaagttttaaaggaagagcaagaacgagaatgtttttctcctcagattgatcntgttttggatttgtcngtgtgtantgganaatcccccaaaggcccc

SEQ ID NO: 9958 - DNA, 435 bp, Arabidopsis thaliana
  unsure at all n locations
  Clone ID: LIB24-077-Q1-E1-D12
acgcgtccgcnagtttcatagtcactaacctaaaagaattaatggaggaaactcggaggaggtttgtcatatcctctgttctaagtgtttctttgatctacttatgtctttcgacatgtcacgtttccgccttcgacttcggtagaaggcagctccggtttaatactgatggtcggttcaagatactgcaagtgtcagatatgcactacggttttggcaaagagacgcaatgctcagacgtttcacctgcagaatttccttactgctccgatctcaatactacctcctttttacagcgaactatcgcttccgagaagcccgatctcatcgtcttctctggagacaatgtatatggattgtgcgagacaagtgacgtggcaaaatcgatggacatggcatttgctcctgcgatcgaatcggggattccatgggtgg

SEQ ID NO: 9959 - DNA, 423 bp, Arabidopsis thaliana
  unsure at all n locations
  Clone ID: LIB24-077-Q1-E1-D3
acgcgtccgatccgatcagaaaatatgagcgaagaactaagtcaaaagccatcatcagctcagtctctgtcactgagagagggcagaaataggtttccttttctgtccctgtcacagagagagggcagattttttccttctctatctctttcagagagagatggaagaaagttttcttttctcagtatgttctcttttctcatgccactgttggaggttattaagattattattgcttctgtggcctccgtaatcttcgtcggtttcgcctgtgtaaccctcgctggttctgccgcagcattagtcgtaagcaccccggttttcatcatatttagtcctgttctcgtaccagctacgatagccacggttgtcttggcgacaggattcacgggcggtggctcctttggagccanagcacttggg

SEQ ID NO: 9960 - DNA, 448 bp, Arabidopsis thaliana
  unsure at all n locations
  Clone ID: LIB24-077-Q1-E1-D5
tcccgggtcgacncacgcgtccncagacaactctttctcctttcttctctcttctctgtctcatcacaaaccagaaatgggaggagtgtccttcctctccactgttccttccttcaccaacacaaccaatcatcaacatctcactacactctcttcttcttctcatcgctctgctgttatacgatgttccaagattgaacctcaagtttccggtgaaagtttagctttccaccgccgtgatgttctcaaactcgccggcactgcagtcggaatggaattaataggcaacggtttcattaacaatgtgggtgatgcaaaagctgctgacttgaatcaacgtagacaacgatccgagtttcaatcaaagatcaagattttgctttcaaccaccattaangctaaaccggagcttgtaccttccttacncaaactagctcccnatgatgct

SEQ ID NO: 9961 - DNA, 395 bp, Arabidopsis thaliana
  unsure at all n locations
  Clone ID: LIB24-077-Q1-E1-D6
acncacgcgtccgggaagatctccatttgtatccaaccaananaactctccgggaacacgccggagatctcaaaacactaattagctccgccattacnaaccaggagacttgtctcgacggcttctctcatgacgacgccgataagcaagttcgtaaagccttgttgaaggggcagatacacgtagagcacatgtgcagcaacgctctagcaatgatcaagaacatgactgatactgacatagccaacttcgagcaaaaagctaaaataacctcaaacaaccgtaagctcaaggaggagaatcaggaaactacggtggctgtagatatcgccggagccggagaactatactcggagggatggccaacttggttatccgctgganataggaggcgt

SEQ ID NO: 9962 - DNA, 454 bp, Arabidopsis thaliana
  unsure at all n locations
  Clone ID: LIB24-077-Q1-E1-D7
tcccgggtcgacncacgcgtccgaaaaaacattttttctctataaatcctttattattgttataaaaactccgatggntcggcaaaattccgatgacatcatgagatttctcgatggaatggctagctccgacgacgttcttttcggttttcttgacgaaggaaaccagtcaccggaagatttctccgtaaacctcaacgccggcgaagatgacggtgacgaagacgacaataataacaattctgaagataacaaagctttttggcaggaacacgaacaacttcttcaggggacactgtataggacaagttccattgagacaaagattagacaagctacaaaagaagcgttgaaacaagttaaatctaagggtctttattgtgtttgccggcgaccagtggacngcggttgccggagttgcctangtggcgaaatccctagacacccaanggga

SEQ ID NO: 9963 - DNA, 434 bp, Arabidopsis thaliana
  Clone ID: LIB24-077-Q1-E1-D9
acgcgtccgggttttgcgattggtaacggtttaaccaacccggagatccaatatggtgcgtatggggattatgcactgcaaatgaagttgatttcagagtctgaccacgagagcctcaagcaagattacgttgagtgtcaaaatataaccaaaaaatgcagtaatttcaataaaaagctctttcttctttattttcgttagatacatattgttcgagttaaaagataagaaacttatattttgttaatatcaggtcttggtggtggtttagtttgtgattctgctgttgaagtttgcaccagtatcttcaacaagatagtggcaaaaaaaagtggcctaaatgtaagcataaaaaaccttaaactgattgtgttttctcaataaaatttcttttgtttacgagatttcctcgatttgtttgaagtattatgaca

SEQ ID NO: 9964 - DNA, 425 bp, Arabidopsis thaliana
  Clone ID: LIB24-077-Q1-E1-E12
cgacgcatcagagaatctcttaaccggaccgatccctccagatatgtgcaagaacgggaagatgaaagctctgcttctcctgcaaaacaacctcactggctctatccctgagtcctacgctaactgtttgactctgcaacggttcagagttagcgagaacaacctcaacggaactgttcccgcgggactttggggattaccgaagctcgagatcatcgatatagagatgaataacttcgaaggtccaatcaccgcggatataaagaacggtaaaatgctcggagcgttgtatctagggttcaacaagttgtctgatgagctgcctgaagagataggtgacactgaatctttgactaaggttgagcttaacaataaccggtttaccgggaagattcctagctccattgggaaactcaaaggactta

SEQ ID NO: 9965 - DNA, 487 bp, Arabidopsis thaliana
  unsure at all n locations
  Clone ID: LIB24-077-Q1-E1-E4
aacttttacccgncctttaccggccaagaattcccgagtcgacccacgcgtccggaagatacatgccatattggtagtagcgttcttggtcctgatgaagaccgccgtttcccaggacaataatccgctggaacattgcagagacgtgttcgtgagtttcatgccctgcatgggcttcgtcgagggaatatttcaacaaccttctccagattgctgcagaggcgtgacccacttgaacaacgtcgtcaagtttacgtctccaggatcgaggaataggcaggatagtggagaaacagagagagtgtgtctgtgcattgagataatgggaaatgcaaatcatcttccttttcttcccgccgctattaataaccttcctctccgttgttctcttactctcagctttcccatctccgttgatatggactgttcccagttcagaaacancaagaatccccgacgttnggaaatttaatttacttcccagggn

SEQ ID NO: 9966 - DNA, 489 bp, Arabidopsis thaliana
  unsure at all n locations
  Clone ID: LIB24-077-Q1-E1-E5
gngnacgttagcagccttacccgnncagtaccggtcaagnattcccgggacagaaagaaaaaaagagaaggcatggccgcggaagaagcgacggagttctacctgagatactatgtcggtcacaaagggaaatttggacacgagttcctggagttcgagtttagagaggacggtaagctccgttacgccaataactctaactacaagaacgatactattatccgcaaggaggtatttctcacccccgccgtgctcaaggaatgcaagcgtatcgtctccgagagcgagattctgaaagaagacgataacaattggccggaacctgaccgtgttggaaagcaagagctcgagatcgtcttgggtaatgagcatatctcattcgctacatctaagattggatctcttgttgattgccagagcagtaatgatcctgaaggacttcgcatcttctactatcttgttcaagacttgaaatgtcctgntttttcc

SEQ ID NO: 9967 - DNA, 447 bp, Arabidopsis thaliana
  unsure at all n locations
  Clone ID: LIB24-077-Q1-E1-E6
ccggtcanagcattcccgggncgaancacgcgtccgcttccttgtcgctattgccttcgccgtcattttcaccgcctccaccgtacatggtcgtcataatggtgcagaagatatcgtgcattcctcctgcgaacacgcgagctatccatcactatgcgtccgtactctttcgtcatactccggtccaaccatcaccaaccgccgcgatctagctcaagccgccataaaaatcagcctctcccacgctcaaagcgccgcgaagaaactcgcggtggtgcgagactcggtggggaagaagaagcaagagaaagcggcgcttgtggactgtgtggagatgattggagactctgtggacgagctaagccgtacgctcggcgttttgaagcacctccggtgtctctggcggttcaactaaagagttccgggggcaaattaacnatgcacaaa

SEQ ID NO: 9968 - DNA, 438 bp, Arabidopsis thaliana
  unsure at all n locations
  Clone ID: LIB24-077-Q1-E1-E7
acgcgtccncccacgcgtccgttgaggtcacattttctagctgtgttccttttctcagcaactctctcatcttgcctcgtagtctcggcttcgctcgtggaagggaaagtctcttgtttcgactgtcccaatgattatgattattcaggaatcacggtcggagttagctgtagccacacaaacacgcggttcactgtaacaactgacaagaagggtgacttcatatcggaacttccctcaaagatcgaatcaaactgtgaagcagaactccaaggcagcgtcaagcaactttatgcttccaagaataacgttaagtcgaagattgttaagcttggcggtgacaaatatggtctctcttccaagttgttcttcttgaaatcatgtccaagaagcttcggatcttttaattcgtccaaaaacgttgaattaacaattcct

SEQ ID NO: 9969 - DNA, 471 bp, Arabidopsis thaliana
  unsure at all n locations
  Clone ID: LIB24-077-Q1-E1-E8
cctttacgcgnccagtaccggtcangnattcccgggncgacncacgcgtccgtaaaacccaaaagaaactaggaagaggagtaaataatatttgttttaaagaaatgattctccacaaaatggcgttcttggccgttattctcttcttcttgataagcagcagcagcgtttgcgttcatagccgtgaaacgtttgcttgcgatacaaaggacgcagcaacagctacactgagattctgccagctttcagttcctataccggagagagtcagagatttgatcggacggttgacattggccgagaaagtgagcttgttagggaacactgcggcggcgataccacgtctaggaatcaaagggtacgagtggtggtcggaggctttacacggcgtttcaaatgtgggacccggtactaagttcggtggggtttaccctgcagccaccagtttccctcaagtcatcancaacgttg

SEQ ID NO: 9970 - DNA, 478 bp, Arabidopsis thaliana
  unsure at all n locations
  Clone ID: LIB24-077-Q1-E1-F10
tagccggntcgtaccggaccanaaattcccgggtcnacccacgcgtccgcnctcttttaccttctctccaagaaatcttcactttctctctagaaaaaagttggaagctgactcgataaagactctctttttcttcttcttcctgcaaatggcgatcgaggatcaagagaacacaatccgtgaaatcaaacctaagaacagaagaatcatgggagctggtggtccggaggaagaggagaaccggtggccgccatggttgaaacctttgcttaaagagcaattctttgttcattgcaagtttcatggagactctcataagagtgaatgcaatatgtattgcttagactgcaccaatggcccactttgctctctttgtcttgctcatcacaaggatcatcgcaccattcaagataaggagatcttcttatcatgatgttataagggtgaatgagatacaanagtatcttgatataggtgg

SEQ ID NO: 9971 - DNA, 490 bp, Arabidopsis thaliana
  unsure at all n locations
  Clone ID: LIB24-077-Q1-E1-F2
cttttacccgncctttaccggccaanaattcccggatcgacccacgcgtccgccaaaaaccaatcccagatctgaatctcaacctaaacctcagattcatcatcatggcttcttcttctaactacgatggaatccttctcggtatgggtaacccactcctcgatatctctgccgtcgtcgacgacgaatttctcaccaaatacgacatcaagttgaacaatgcgattctcgcggaagacaaacatttgcccatgtatgatgagatgagtagcaagttcaatgttgaatacattgccggaggtgctactcagaactcaatcaaagtggctcagtggatgcttcaaattcctggggcaaccagttacatgggatccattggaaaggacaaatatggagaggccatgaagaaggatgctacagcagctggtgttaatgttcactaataagaanattaatccggaactaaagggaactttggggtccgggttnt

SEQ ID NO: 9972 - DNA, 491 bp, Arabidopsis thaliana
  unsure at all n locations
  Clone ID: LIB24-077-Q1-E1-D1
tttacccgnctttaccgggccaagaattcccggancgacccacgcgtccgcccacgcgtcngcccacgcgtccgcggacgcgtgggttttaactttggctgctctgtctcaatccctcgagacttaaacccacttagtacaatctccatataatttgagtagaacctaaaagatcgaagcttgaggaaaatggtcccttccaatggcgcaaaggttcttcgcttgttgagtcgtcgatgtctctcttcatcgcttattcaagatttagccaatcagaaactgagaggagtatgtattgggagttataggagattgaatacgagtgttggcaatcatgctaacgtgattggagattacgcttcaaaatctgggacatgatcggaaatggatcaactttggaggttttaatactaattttggttctacaaagncctttcaaggnacaaggtcntcgtttaagtccggctnaagggctaacaaaatgttttttg

SEQ ID NO: 9973 - DNA, 416 bp, Arabidopsis thaliana
  unsure at all n locations
  Clone ID: LIB24-075-Q1-E1-F4
cacagagctgacgttagcatttgtctctgaaatcccagatccgaaaacccaacaatggcgtcagagaacaacggatccagatccgattccgaatccatcaccgctcccaaagctgattccaccgtcgttgaaccgaggaagatagctctgatcaccggaatcaccggccaggacggatcatacctgacggagttccttctcggaaaaggctacgaagttcatggtctgatccgtcgatcatcgaatttcaacacccagcgaatcaaccatatctacatcgatccacacaatgtcaacaaagctctgatgaanctccactacgccgatctcaccgacgcttcctctctccgtcgttgggatcgatgtgatcaaacctgacgaagtttatnacctagctgcncaatctcacgtcgctg

SEQ ID NO: 9974 - DNA, 449 bp, Arabidopsis thaliana
  Clone ID: LIB24-075-Q1-E1-F5
acgcgtccgggcgtgctcgcctaacacagatggggaaatatttcacagcatacaggattgatcatatattgggattcttcagaatctgggagcttccagctcatgctatgactggtttagtggggaagttccgtccatctattcctttaagtcaggaagagttggaaaaggagggaatatgggattttgaccgcttaagcaagccctatatccagaagaagtttcttgaggagaaatttggagatttttggccttttattgcatcaaactttcttaatgaaactcagaaggacatgtatgagttcaaggaggactgcaacacaagagaagaagattgtaccaaagctgaagtcattggctgagaagtctttgttgctagaaaatgaggacaaagttcgacgtgatgtctttgacattttacggaatgttgttctgatcaaagatccaga

SEQ ID NO: 9975 - DNA, 409 bp, Arabidopsis thaliana
  unsure at all n locations
  Clone ID: LIB24-075-Q1-E1-G1
ggagagaagaaggtaaagagagaagatanaaacataaaatgtcngataagaagggaaggaaagaggaggtggtgaccagagagtacaccatcaaccttcacagacgccttcatagctgtacctttaagaanaaggctccaaaggcgatcaangagataaggaagtttgctgagaaggaaatggggacaaaggatgtgagagtggatgttaaattgaacaagcagatttggagcaaangtatcanaggtcctccgaggagaatcatgagtccgagttgctcgtaagagaaatgatgatgaagatgcaaangaagagttcttctctcttgtcactgttgctgaaatccctgctgaaggantctctgngctccgcactaanatcattgaagaagaaggattaactatcttan

SEQ ID NO: 9976 - DNA, 477 bp, Arabidopsis thaliana
  unsure at all n locations
  Clone ID: LIB24-075-Q1-E1-G12
naaactgtcacgcctgcctgtnaaggtccaaggtcnacccacgccgtccgnaaaanaagantaatcagtgcattttagagagaagatngagatanagattaccttcttcttcttcttcttttttgtcaaagagagagattaccttcttcataggaaaagatttctttcttcttctgcattccccaaattttatcttcccaagaaacccaacacagaagaaaatcttaaagtttagngaattgtggtggagatgaaagttggagctccggcaagtaagccgggtcggatcattgntcaagtttttcttctacaacttcgtcttcttcntcaaagtgttcattcacagagatnacanaacaaacttaacatcacaaagcctggacaaaacatancaaccttaacaagttcagctaaaggagagttggccaatgatacggtggtagttgataatggnattgtccaagttactttctcgaa

SEQ ID NO: 9977 - DNA, 435 bp, Arabidopsis thaliana
  unsure at all n locations
  Clone ID: LIB24-075-Q1-E1-G4
acgcgtgggcggacgcgtggggaaatatccaagctttttactcgtaggcctgctttgcagagagccaatgttgctcagttagagtttaagttaagccttcttaagccactgggaatcacgtcttcagaccttgtgaagattcttaactgtcgtcctaggttctttagttgccgtcttgtccttgatgaaaggatcaactacttcatggagattttggggtcaaaagaggtgttgcgcagagtcattatccggaatccgtcactcatgttgtatgacctcgatgacaagatcaaacccgcgatagaatactacaaagggttgggctttagccaacaggatcttgtcgcaatgttgatatcgcgacccacgttgattccaagaacaaactttaacaatgagaagtttgaatacattgagaaaactgggatcancaaa

SEQ ID NO: 9978 - DNA, 418 bp, Arabidopsis thaliana
  unsure at all n locations
  Clone ID: LIB24-075-Q1-E1-G7
aacactgtggtagaaaaaaatatagacttttagatatgtgtagtaaaataacattagtgttaactttattttccagttatttcatatcaacagatgctgtgaatggatcatttcctgcgcttttggcttttggagattcaattctcgatactggcaacaacaattttctcctgacttttatgaaaggaaatatctggccatatggaaggagtttcagcatgagaagggcgacaggaagatttggaaatggaagagttttcnctgatatagttgctgaaggtttagggatcaagaagattttaccagcttatcgtaagttgttcaattctccaagtgaccttagaactgggtgtttgcttcgcatcangtggtgcaagagttgaccctgttacatcccaaattgccgaaaanttttaac

SEQ ID NO: 9979 - DNA, 420 bp, Arabidopsis thaliana
  Clone ID: LIB24-075-Q1-E1-H10
atttcaaatcaaaatctctctctttctcttatctctaatggcgttgaggaacattgaaaacgctcttccgatctcacaggaacgacctaagaagctggccaaactctcaaagcaaccggagattggtctaaatgacgaaaacaaccctgtcgctgtggctgaatcgaccgtcgaatacgttgcttctgagaatctcaaaccattttcagatcctgaatcttctgtccagagattacttgaagaattagcatcaaaggattggattaaagtatgtgactcattgaacaacacaaggagatttgcaattcatcactcttctctgttgctaccaattctagaaaagcttatagttgtgatggtgaaggcgatgaagaatcctagaagtgcattgtgcaagacttcgattatgacttgttctga

SEQ ID NO: 9980 - DNA, 422 bp, Arabidopsis thaliana
  Clone ID: LIB24-075-Q1-E1-H11
agaacatcctgattctgttgcaagtgcagcgttaaaaagaaaggttgggaatgatgactttactgtcccggggcatattcgggttgaacagtttattcatggatcagcaagtcagtcacaagatattgaaactgtcaagttgatggaagaaaacaagaagctccgagcaaaatgtttggaccgcaaggtgcgaagtcagaaccttgaagtcaaggccatgaatcttaggagtgagctcgagaactataaaagtgagtatgaaaggttaatgttagagctacaagctttggatttggtgaaagacgagcacagaagaaatgtaaatacgtagaaacttcctctgcacttaaaaaaacactcttttttggctggtcgtatccatcttctaggtatgaaaactagagattcttagtttatgggct

SEQ ID NO: 9981 - DNA, 423 bp, Arabidopsis thaliana
  unsure at all n locations
  Clone ID: LIB24-075-Q1-E1-H12
acgcgtgggcggacgcgtggggcatttnnnnnnnnnnnnnnnnnnnnnnnnnnnnnnnnnnnnnnnnnnnnnnnnnnnnnnnnnnnnnnttcttggaaaacgacgccgaggctgcctctgccgccaccgccgccggaaaatctacggatggtgtttctgagtcacttaacatccaaggagaaatcttatgtggtggagctgcggcggatatcgccgggagagattttggcggcatgaactgtgtgaagcctcttgctgtggtgagaccagtgggaccggaaagatatcgccggagcggtgaaagcggctctgaggtcaagataaactaacggtggcggcgcgtggaaacggccattctatcaacggtcaagccatggcggaaggaggactcgttgtcgatatgagtaccacggcggagaatca

SEQ ID NO: 9982 - DNA, 438 bp, Arabidopsis thaliana
  unsure at all n locations
  Clone ID: LIB24-075-Q1-E1-H2
gaatcaatcaactagacaaaaatcggaagaagaaacacaaaccgaggttttagaaacatggcgtctaaggtaatctctgccacaatccgcagaaccctaaccaaaccacacggcactttttcccggtgtcgctacttatcaaccgccgctgctgcgacggaggtgaattacgaggatgaatcgattatgatgaaaggagttcgaatttcaggtagacctctttacttagatatgcaagcgacgactccgattgatcctagagtattcgatgcgatgaatgcttcacagatccatgagtatgggaatcctcactcgcgaacgcatctctacggctgggaagctgagaacgccgtcgagaacgcacgaaaccaggtcgcgaaactgatcgaagcttcaccgaaggagatcgtatcgtgtccggtgcaacggaaggcgaan

SEQ ID NO: 9983 - DNA, 438 bp, Arabidopsis thaliana
  unsure at all n locations
  Clone ID: LIB24-075-Q1-E1-H4
attctcttcgatttgtttgcttgctagtgactagtgagtgagagagtatggagagaagtactccggtgagaaagccacacacatcgaccgcagatctacttacttggtcggaagttccaccgccggattctccttcctccgcttctcgctccgccgttcgttcccaccagccatcggatgggattagcaaagtggtgtttggtggtcaagtcaccgatgaagaagttgagagcttgaaccgcaggaagccttgctcagaacataaaatgaaggagataactggcagtgggatcttttctcgtaacgaaaaagatgatgcgtcagagccattaccagtttatcaagcaagcagttaatggtataagccagatatcatttggtgaagangaaaatctatctcctaaaaagccggctactgtacctgaaattgngaaacaa

SEQ ID NO: 9984 - DNA, 436 bp, Arabidopsis thaliana
  unsure at all n locations
  Clone ID: LIB24-075-Q1-E1-H6
aggtttcangagctaccagagtttgatgaagctaaaagaanctgcaggaggcgcttagctggacacaatgagaggaggaggaagatctctggtgacagttttggagaagggtcaggccggagagggtttagcggtcaactgatccagactcaagaaagaaacagggtagacaggaaacttcctatgaccaactcatcattcaagcgaccacagatcagataaaccctcccgctctctctcttctgtcatctacatatgctctatctacactcttattagacaatataatggcatctaacaatgtcaagaaaagttggtcatggtattaaatcctacacggatatataactataaacctctagtcccctctatgctgtcctgtaatgaatatctatccggaaatgtattcgcatantcctgcctctaataaagttta

SEQ ID NO: 9985 - DNA, 449 bp, Arabidopsis thaliana
  unsure at all n locations
  Clone ID: LIB24-075-Q1-E1-H8
cacgcgtccgatnnagtctctnannaantcgatcattcgaaatcaactcgaagatcttcaattccatcaaactcaaggagtttcgtttctctgatttcttcgattgagataaggantaaatggcgacagatgatttttttagcttgcaganagaatattggngacaagtggcggaatccgatggtttcgatattgagagtgttcaaatacnaccanctatgtatggaaggatcaatggactgattccccanaactgtgaaatcaatacnccgcttccttaccgtgtcttgggcaagcactatgctaagcttgggcttcatcgttacaatatgttgaaggggactaaattcgagttcggtcgcctaatgaaattcaacatgttacanaactgtgtggcctctttccacataaccttggaaagcatacgaatacggtgttccctggcaaaa

SEQ ID NO: 9986 - DNA, 423 bp, Arabidopsis thaliana
  unsure at all n locations
  Clone ID: LIB24-076-Q1-E1-A10
taattgagttttttccttctgcgcttgaaaagaaatgtcgaattctaggatgaatggtgttganaagctaagcacgcaaatccacanggcgtgtcncaaatgccggaaaggcaacactgcttgctcttggcaaagccttcccaanccaagtcgttcctcagganaatctagtggaaggatttctacgagacaccaaatgtgangacgngtttatcagganananagctggaacacttgtncagaacgacaaccgtgaagacacgatacactgtgttgacgcgatagatacnggcnaaatcncctgagcnaacaacagagggttcaccagnaatcanngcaaagacttgaaattgcaaacgaggcggttgtggaaatggcattgggcagccagtttaggttcatcaagggaatgggggaaagcc

SEQ ID NO: 9987 - DNA, 289 bp, Arabidopsis thaliana
  Clone ID: LIB24-075-Q1-E1-F12
gtaaccaattgagcatgacttgtttgaggaatgggaaatcagcatcttacattttggcaaatccctcggattcacggattaatagcttatgtgttcagctttgccgttgatttactgatttttagaaatatgatagatacagtgtagagtgtgtttgtgtacataataatattttttcttgcttattatgtgtatgttttatagaggcccttgttcaataaataatacaatgttttcctaaattactataacggtgctttgctacaaaaaacaaaaaaaaaaaaaaagg

SEQ ID NO: 9988 - DNA, 418 bp, Arabidopsis thaliana
  Clone ID: LIB24-076-Q1-E1-A12
acagaggtgtttgaagtggcgccatcattgcatgtggtagttgtctttacggacattaaagcctaatggctttgcggtttcttccattttcgacattatttcactcgcagatcgttgagaagtaaaccgcgtttctttcttcacaagttgcgcttgcttctcgaacaagttttcaagactgaactcgcttgagctagagataagttcgaaagcgttcatggatacaggtttctccttcttctcagttacaagacattccttggagttactaaaagcagcatcaacatcatctatggttatgtcctcgtcatcttggtcaaatgatggcggcttgtaccctttcttgaaccattcatctcggacgcgtggggaaaaacctcctaagctcaaaaaatgttggttgagaaacgaatggcgg

SEQ ID NO: 9989 - DNA, 420 bp, Arabidopsis thaliana
  Clone ID: LIB24-075-Q1-E1-C12
ctcaccaacgtctctttcctcctccttcgctctctcttctgctcttttagtccctcgttcgttctccatgccagggacaaggagattcatggttctgtgtagttcccagaaggaaagtcagatgacagtgtcagtaactggagcaactggattcatagggagacgattggttcagagacttcgtgctgataaccacgctatccgggtcttaacacgctctaaatccaaagctgagcaaatatttcctgccaaggacttcccaggtattgtgattgcagaagaatcggagtggaagaactgtgtacaaggctctactgctgttgtgaacttggcaggactgcctattagtacaaggtggtctcccgaagatcaagaaagagattaagggcagccggattcgtgtcacctccaaagttgttg

SEQ ID NO: 9990 - DNA, 440 bp, Arabidopsis thaliana
  unsure at all n locations
  Clone ID: LIB24-075-Q1-E1-C6
acgcgtccggggagagcaaaacaaagatcggagaagatgaagacgattctttcttccgaaacgatggacatccccgacagtgttaccatcaaggntcacgcaaaagtgatcgaagtccaangacctcgcgggaagcttgttcgcgatttcaagcatctcancctcgatttccagctgatcaaggatccanagactggaaagaagaagcttaagatcgattcgtggtttggaacacgcaaaaccagcgcctccatcagaaccgctcttagccacgtcgataacttgatctccggtgttaccagaggtttccgttacaagatgaggttcgtgtacgcccattttcccatcaacgcctccatcggcggtgacggaaagtctatcgagattcgtaacttccttggcganaagaacgtgaggaaaggaacccatgttggatngtt

SEQ ID NO: 9991 - DNA, 453 bp, Arabidopsis thaliana
  unsure at all n locations
  Clone ID: LIB24-075-Q1-E1-C7
acgcgtccgaactcgccaaactaattccaaaacgtttcttcatcagatccaaagatcgttccactgtctctaagtcccccacggctttttccttcggatccgcttcctcatcttccggccaagactgtaaaaactccggtggtgatggcggtggcggttccgttaccccgactagcattctcccggaggttccttctccttattcctacgtcgagattctccaagcgtttaagttgatagacagagacaacgacggagctgtctctagacacgatcttgagtcgttacttagccggctaggtcctgatcctttgacggaggaggagatcaacgttatgcttanagaggtggactgcgacggcgacngtacgatncgtcttgaagagcttgcgagtcgtgntagtcnctttagattcggctcgtgactcgactgagctgaaggagactttcgag

SEQ ID NO: 9992 - DNA, 426 bp, Arabidopsis thaliana
  unsure at all n locations
  Clone ID: LIB24-075-Q1-E1-D11
acgcgtccgtcttcctcgaactctcttcttctttctctcttactttgtgtttgctctgttttgctctcttaacacaacacaaaaaatgtccatcgntgttggccaagcttaccaacatcttcccaagcaagtaagccaaaatcctgacgtgggtggatggagtttcttgcaatatttctctgagccaaaaggcattgtccagaacagagaagacgacacaaagaaaacagcttatgtctacccgatcganaagcgttccgtagctaaactgagccttgagatgtgcacagagagcctcgggaccgagaatgggagtgatagtggngacgagatgtcgttacttgcgcttgaagcaaccaatatttcaaagagtcctcgtctnactacnaaacctcaannnagaaactaacttcaatgagcccgtgg

SEQ ID NO: 9993 - DNA, 442 bp, Arabidopsis thaliana
  unsure at all n locations
  Clone ID: LIB24-075-Q1-E1-D12
acgcgtccggaaaaagatatctcgttagtctcgttccaatcagtctccaaaggatattatggagaatgtggaaaaagaggaggttacatggaggttactggattcacttctgatgtaagagaacagatatacaaaatggcttctgtgaatctttgttctaacatctctggtcaaattcttgctatccttgtcatgagcccacccaagcctggtgatgactcatatgactcatacatggcagaatagagatggaattctctcatccatggctaaacgtgcaaagactttggaagacgctctcaacagtttagaangtgttacatgtaacagaggccgaaggagcaatgtatctcttcncgcgaattaaccttcctcaaaangctatccangntgctgangctgaaaaaactgcaccagattcnttctactgcaaacgccttct

SEQ ID NO: 9994 - DNA, 453 bp, Arabidopsis thaliana
  unsure at all n locations
  Clone ID: LIB24-075-Q1-E1-D2
acgcgtccgcgttttttggcttctgggttttttatttcaagtgttcaatttccgaattaggtaagaaagttaggttttgagatctgtgcgaattgtgagagatgtccacgccgttgaaggtgtggcaacgttggtctacaccgacgaaagcgacaaatccagattcgaatggctctagtcatggaaccggtttagacatggtgaccccagtttcgggtcgggttagtgagatccagttcgatgacccaagaatattgcctgagaaaatttcagagcttgaaaaagagcttttcgaatatcaacatagtatgggtcttcttctgattgagaaaaaggagtggagttcccagtatgaagcgcttcaacaggcttttgaagaggtgaatgagtgtctaaagcangaacgtaatgcgcatccgattgctatancagatgttgaaaaaccggaagaag

SEQ ID NO: 9995 - DNA, 435 bp, Arabidopsis thaliana
  unsure at all n locations
  Clone ID: LIB24-075-Q1-E1-D5
acgcgtccgacagaatagcagagatcgaaggaaanattcactttgggtatacacaaaaaacgtatgcttatgacccaaagcaaggtgaatgggaatgctgtgaaggcgaggttgcatttccgaggtcccaatgtgtgatggagagtgtattgtacacctttgctaataactacacttgggaggacgactacgggtgcaagtggtggtcaacggatggatatggggaaaangtaaaagggttggagtcactantagagatacacaagaggaatggtggctcaagtgataatacgactaaactagttgcctgtggtgggaaactcttacttttatgggaagggtacatgaagcataatcccaataatacgaagaagatttggtgcgcggttatcgcgttagaaaancgtnatggaggtaaggttttggggaattgtn

SEQ ID NO: 9996 - DNA, 495 bp, Arabidopsis thaliana
  unsure at all n locations
  Clone ID: LIB24-075-Q1-E1-D9
ctgttacgcctgnccgtacngntccgnaaattcccgggtcgacccacgcgtcngcccacgcgtccggtgacgtggcaagaccgtgtcatcaacacaacagtcagagctcaagcagacaatcaccaagtgggaaaaggtcaccacccaatttgttgagaccgctgcttcttcaagttcatcgtcatcctcatcctcatcctcatcctcatcttctgctgcttctcagcagcagggcaatgcagcaatggtcaagactaattgagtttaaaggtgaagttactttattgcgcaaaagatcaccagagaaagacacaaccagtaatgccaaatantataataagtanttaactattagataatttttcttgganataanaactaaagatnggtanaggtaaagcattgcaatgcttatnaacctgntgtatgcaacgtnaaaaactcnggtannaanaacgttnccangananaattgtaacccgcttgtttggttaa

SEQ ID NO: 9997 - DNA, 457 bp, Arabidopsis thaliana
  unsure at all n locations
  Clone ID: LIB24-075-Q1-E1-E1
acgcgtccgannnnnnnnnnnnnnnnnnnnnnnnnnnnnnnnnnnnnnnnnnnnnnnnnnnnnnnnnnnnnnagaggagacgatcttacgcgacgaatccttgagagattgagagggacaagcgagttttgacccaaggattgttgacggtctatattgaacaagtaaacaaggatgcgtaagtggatctgttgtacatgtcaaatagaagactcaaatgaagagcaacaactgaaaagttcacagcagcaatctgatgcaaatcataagaattcaaaaccagcacctgttgcaaaacatgaggttaagaaggaagctcttcccatcgaggtccctcccttgtctttggatgaggtcaaggaaaagactgaaaattttggatccaaggcactgattggtgaagggtcttatgggagagtatattatgcgacactaaatgaaggtgttggcnggtgcc

SEQ ID NO: 9998 - DNA, 455 bp, Arabidopsis thaliana
  unsure at all n locations
  Clone ID: LIB24-075-Q1-E1-E3
acgcgtccgggaaacgagtgacgttgttgtccagccctacaactcactgttgacgctgaagcggcttacgttaaatgctgattgtgttgttgttcttgacaacactgcattgaacagaattgctgtggagcgtctacatttgactaatcctacttttgctcagaccaattctttggtgtcaactgtgatgtctgctagcacaacaacgttgcgttatcctggatacatgaataatgacttggttggcttgcttgcatctttgatcccaactccaaggtgtcacttccctcatgactgggatatacaccgttgactgttgagccgccaagcaaaatgtaatccgtaaaactactgtgctggatgttatgaggagacttctacagacaaaaaatatcatggtttcgtctaatgctagaaacaaagaagctatcaggcaaagtncatatcaatattga

SEQ ID NO: 9999 - DNA, 496 bp, Arabidopsis thaliana
  unsure at all n locations
  Clone ID: LIB24-075-Q1-E1-E4
ctgtttacgcctgcccgtagcccgtccgaaaattccngggtcgacccacgcgtccgcccattctcactcgcagaatatttgttctcatctgattcctccgatctgccatgtctcggcttttctaacgctaagaagtttcacagacgcggcgaaggagagggaggaaggagatagatctctttttccgtcgcgataataataaaaaataaacgtgtctagaggctgttactgaagagttgattcatacggagagaggatagaaatggcagatgggatatcgagcttttggggtcctgtgacttctactatagagtgttgtgagatgaactacgcctactcatcctacattgctgagttctacaacactatatccaatgtccctggaatcctattggctctcattggtcttgtcaatgcattaaggcaacggtttgagaagaagtttagcattcttcacatttcgaatatgatactgctatccgcagcatgccccaac

SEQ ID NO: 10000 - DNA, 445 bp, Arabidopsis thaliana
  unsure at all n locations
  Clone ID: LIB24-075-Q1-E1-E7
acgcgtccgatccaattctctctctctccctccagattcaaacgatccgatccaaaactttgagatccgagaagatgtctacgttcagcggcgatgaaactgctccgttcttcggcttccttggcgccgccgccgctctcgtcttctcctgtatgggagctgcttatggaacagcaaagagtggtgttggtgtggcttcaatgggagtgatgagacctgagttggttatgaagtctattgtccctgtggttatggctggtgttttgggtatttatggacttattattgctgttatcattagtaccggcatcaatcctaaggctaagtcttactacctatttgacggatacgctcacctttcgtctggtcttgcttgtggtcttgctggactctcagctggtatggctattggaattgttggtgatgcgggtgttanggcaaatgc

SEQ ID NO: 10001 - DNA, 414 bp, Arabidopsis thaliana
  unsure at all n locations
  Clone ID: LIB24-075-Q1-E1-E8
ggggtgaagtttgatttatttagagagataagttaaaaaaaaaatggtcggtatggatttgttcaaatgtgtaatgatgataatggtgttggttgtctcttgtggtgaagctgtttctggagctaagttcgatgagctttatcggtcaagctgggctatggatcattgtgtcaacgaaggcgaagtcacaaaactcaagcttgacaattactctggagctgggtttgaatcaagaagcaaatacttgtttggtaaagtctctatccagattaagcttgttgagggtgattcagcaggaacagtcactgctttctacatgtcttcagatggtccgaaccacaacgaattcgattttgagttcttagggaacactaccggcgagccttacatagtccagaccaatatctacgtnaa

SEQ ID NO: 10002 - DNA, 426 bp, Arabidopsis thaliana
  unsure at all n locations
  Clone ID: LIB24-075-Q1-E1-E9
acgcgtccgcggacgcgtggggcacgattccacaacctctttcttttcttctanatctacgtaaattcatcagctanagattgaaaaatggcggacggtgaagatattcagccgctcgtttgcgataacgggactggaatggtcaaggctggttttgcaggtgatgatgctcctagagctgtattcccaagtatcgttggccgtccacgtcacacgggagtgatggttggaatgggacaaaaggatgcatacgtcggagacgaggcacagtcgaaacgtggtatcttgactctcaagtatccaattgagcatggtattgtcaacaactgggatgatatggagaagatttggcatcacactttctacaatgagctgcgtgttgccccggaagagcatccggttttgctaaccgaagcgccgccttaa

SEQ ID NO: 10003 - DNA, 420 bp, Arabidopsis thaliana
  unsure at all n locations
  Clone ID: LIB24-075-Q1-E1-C10
caatgagagactcttggaaatcactcaaacatcgaggaattggaccggttaagttgttgtaggataggtcaagaatagcaagagagcttcggttgcaggtttcaagaggtatgtttcctgtgaaactattgttccatgcagataagaggttgatagagagtggtggtttaggaaatggtcctctaaaatggttataagccaaatctaaaagcctcaccgatgaattcactaaaacttcctccgaaccttctaaatcggtgaacaaattgttaaaaagattcactctgcggagacgaagaaggttccaaaaccactcagggactttcccttttattttattgttgggaaaggtctatatgctccaatttcgtaaggttctttaagatggttgggaactcaatgangccgcaacttaacaag

SEQ ID NO: 10004 - DNA, 471 bp, Arabidopsis thaliana
  unsure at all n locations
  Clone ID: LIB24-074-Q1-E1-H5
acgcgtccgaaaatcctgagctcatcaaaagggttcacatggaatattggaagctggtgcagacattgtggttacttcatcttatcaggctacgatcccggggtttctttctagaggtttatcaatagaagagagcgagtctttgcttcaaaagagtgtagaattagctgttgaagctcgtgatagattctgggagaaagtgagcaaggtttcaggacatagctataacagagctcttgtagctgcatctattggaagctatggtgcttatcttgctgatggctctgagtacagtggtcactatggtgagaatgtaagtttggataaactaaaggactttcacaggagaagacttcaaagtcttagtggaagctgggtcctgatcttcttgcttttgaaaccatagcgaataaactcgaagctcangcttgcgttgagcttttggaggaagagnaaagttcaaatcccaac

SEQ ID NO: 10005 - DNA, 501 bp, Arabidopsis thaliana
  unsure at all n locations
  Clone ID: LIB24-074-Q1-E1-H6
ggaatcccgggtcgacccacgcgtccgcccacgcgtccgcgtggtcattacaccattgggaaagagattgttgacctgtgcttagaccgtatcagaaagcttgctgataactgtactggtctccaaggattcctcgtcttcaacgctgttggtggagggactggatctggtcttggatctctcctccttgagagactttctgttgactacgggaaaaagtccaagttgggtttcacagtttacccatctccacaggtctctacctccgttgttgagccttacaacagtgtcctctccactcactctctcttggaacacactgatgtctccatcctcctcgacaatgaagctatctatgacatctgcagacgctccctaagcattgagaagaccaacctacaccaanctcaancngcctcgtctctcaagttatttcctccttgactgctctcctgaaggttggtggggccnttaaatggttgantgtcactgagtttccaa

SEQ ID NO: 10006 - DNA, 422 bp, Arabidopsis thaliana
  unsure at all n locations
  Clone ID: LIB24-075-Q1-E1-A10
acgcgtccgatctcagctcgaatttctgggctactgaagtttaatctaggtgtgcgcttcgttgaagaaattttgaaatttgcagagaaatttgcggagaaagcggaaagattagatttatccatcgtttatcccagtaaaaagctttgatttttccacatgtcttttttccccccttttttcgtattaaaagccctagatatatatatcaaaattgaaaattatctgaaatcgatttcgtgggtttcaagttccggttcggttctctttcttaaaatattgatttctgtcactttccgcgatgaaaagttttcgaattttgcttcttttggctccaaagtttttatctttcaaatattttaaatctgggtacttttttgttatgggntccttctttggtgaantgtatctaggggctttgc

SEQ ID NO: 10007 - DNA, 437 bp, Arabidopsis thaliana
  unsure at all n locations
  Clone ID: LIB24-075-Q1-E1-A12
tgaaatcgatttggagattagatctgactcagcttcgactaaaagccattgctttcgcctttggattgttgattccctagtggatgttctttatctcnttaaaaaggtcctctcttttaaatcaatttttgctgaacttgcccaattcggaaactttgttgcaagtctcctcttggtctctggtaatcgttttcgcatcaatccttatattgatttgaatctgtaatcagattcgatctttgatgctaatttggtattctatagaagacaacatatctgaattgggtttcttcgttgggataggataagtggttagggaatgagaaaattgtatangaagctggtttcattcaagagacccatttgctangngtcaagagacatgttagttcacattcanggtttagaagctttcagcgacagaaaatggttgttcc

SEQ ID NO: 10008 - DNA, 438 bp, Arabidopsis thaliana
  unsure at all n locations
  Clone ID: LIB24-075-Q1-E1-A3
acgcgtccnnnnnnnnnnnnnnnnnnnnnnnnnnnnnnnnnnnnnnnnnnnnnnnnnnnnnnnnnnnnacagagggaagggttgagaaatacattggtgtaaaagtgaaggtctcgttcactggtcaaggggaaacacaattaatgaaacaattgtctggaggccaaaagactgttgttgcactcgcgttaatctttgcaatccagcgatgtgatcctgcaccattctatctttttgatgagattgatgcagcacttgatccacagtaccgaaccgctgtgggaaacttgattcgtcgtcttgctgatgattatggcacgcaagttcatcaccacaactttccgtcccgagcttgtgagagtcgcggataagatatatggagtatttcataagaacagagtgagtattgtgaatgttatctcaaaggatnaaggcttg

SEQ ID NO: 10009 - DNA, 417 bp, Arabidopsis thaliana
  unsure at all n locations
  Clone ID: LIB24-075-Q1-E1-A4
agcaagctgcgaagctcangagagcaagtcgcgaggcaacagcaagcggttttgaagcatttagggcatgttaatgctgatgctgttgttgttgatgaagaagagcttcattgtcatcangaaacttcaagatctttatagctctactaaagctgctaagcgtttgcaaaggaacattgttcgtggactcgaaggtttcattgcgactggcacaaaggttgttgagatagggttgaagtttgctgaagatttcaagaaatatggagatgagaatcctgatgctaatactcctctatcaagagtcgcacatcactttgggacctcttacaagtcggtggaaggcganagggaaactctcctcggagttcttagtgagcaagtttgtgagccaattccgtacaatgatatatantgcgc

SEQ ID NO: 10010 - DNA, 439 bp, Arabidopsis thaliana
  unsure at all n locations
  Clone ID: LIB24-075-Q1-E1-A5
gggttggagagtagaagagatcttgattttggaagtgcagagagtttccagggcttcctcggtcaacttgagaagacatatgaccactgtagagtatatgtcagaatcttggaacctttgcaggctgtggaaatcctgaaacggcatttcacgttagttctaccgccaaatggttcctatatgcacatccctgatagttctacatggcaagaatgtcttatcttactgattaacttttggataagattagctgatgagatgcaagaggtaaaatcatctaatccaagtttggtggagaatcttaccttgagccctgaatgcattagcagctgttttactctactcataaaacttgtaatgtatgacaagtctgtccccaagtcaggcttggggctgcaatacntgtctaccttagatttggctggntggtgaatgggcc

SEQ ID NO: 10011 - DNA, 455 bp, Arabidopsis thaliana
  unsure at all n locations
  Clone ID: LIB24-075-Q1-E1-A7
acgcgtccggttcccgtcttatcgtgtacagtttaggagctcaagttccgaagattgagaaaactgtaagttgtctttcttatgaattatcgatgtttaggtttctcttgtttgtgctacttgggattgagttcttaatatctttgtgttgaattgatgtacaaaacccttttctaggcttcaacactatctaaannnnnnnnnnnnnnnnnnnnnnnnnnnnnnnnnnnnnnnnnnnnnnnnnnnnnnnnnnnnnnnnnccagtttctctcctaaacnnnnnnnnnnnnnnnnnnnnnnnnnnnnnnnnnnnnnnnnnnnnnnnnnnnnnnnnnnnnnnnnnnnnnnnnnnnngcctcctcagccgatgggagaccctactgctgaagtgaccgatgaaaatagggatgatgctcagtcagagaagagcaaagctatggaggnaatctctgaat

SEQ ID NO: 10012 - DNA, 437 bp, Arabidopsis thaliana
  unsure at all n locations
  Clone ID: LIB24-075-Q1-E1-A9
acgcgtccgcccacgcgtccgcaattttccgtttccgttactatctccgaacagcctctttatcgtctccttatttcttccatcatcaccgggtatacattgtggaatgcggagtatcgtgtatcactgaggaggaattttgatataccgattgatcctagaaaggaggaggaggatcaatcttcgaaagacaatgttagatttggttcagagaagggaatgagtgaggatttagggaattgtgttgaggaatttgagagactgagtcctcaggtgtttggagacttgtcacctgaagcgttgagttatattcagcttttgcagtctgagctatcttccatgaaagaggagctaagattcacaaaagaagaaagctttgaggatagaatgtgagaaaggaaacangaatgatttgttggattaatttgcgttcctta

SEQ ID NO: 10013 - DNA, 405 bp, Arabidopsis thaliana
  unsure at all n locations
  Clone ID: LIB24-075-Q1-E1-B10
tttctttctctcctctctatctttctctcacactcatgggtcttccaacagatttcaaagagcttcagattccaggttacgtactaaaaacactttacgtcatcggtttctttagagacatggtcgatgctctttgtccttacatcggtctaccaagttttcttgaccacaacgagacctctcgatncgacccgacccgactcgctctctccacgtcagcaactcttgccaacgagttaatcccgggtgggtcgtttctccggattcttttaaccgattcgggaagaatgctgcacggtttgcttaaccggattttggtatcccgacgaataaggattaggacaagctgccgaagntgtggnanacgngtttcaacaatcgntggttaanaccggttgggattcg

SEQ ID NO: 10014 - DNA, 420 bp, Arabidopsis thaliana
  unsure at all n locations
  Clone ID: LIB24-075-Q1-E1-B12
aatcacaccatcaccaagaagaagaagatctaggttttgcatctctcgtcattacaatggagcgagcacgaaccgaaagccctagctacttccgtcaatggagcggcgattcaggtaccaccaatgccgccgccgtagctccttcttctccggcgcgtcatcaccacgctcgatcttcttccgtcactaatatgtctaacgtcaaacgagctcaaaacgttgctgctaaagccgctgctcagagacttgctaaagtcatggcttctcagaccaacannnnnnnnnnnnnnnnnnnnnnnnnnnnnnnnnnnnnnnnnnnnnnnnnnnnnnnnnnnnnnnnnnnncctcctcctctttccttcactagaaatccttcttccacaattgctaaacctaaacctgttgcttcttctgctgttg

SEQ ID NO: 10015 - DNA, 448 bp, Arabidopsis thaliana
  unsure at all n locations
  Clone ID: LIB24-075-Q1-E1-B7
acgcgtccgcccacgcgtccgacgaagcttatcaagtcagtcacaacttactcttgtcgcatgcttacgctgttgacgcattcagaaactgcaaacagtgtgctggaggtaaaattggaattgcacacagtcnagcttggttcgaaccacaagaccttgagcatgttggaggttccattgaacgtgtgcttgatttcatcctaggatggcatttggctccaacaacttatggagattatccacaatcgatgaaggatcgtgtcggtcatatattgccanaattcacaagaagctgagaagaagttgctaaagggttctacagattacgtaggaatgaattactatacttcagtgtttgcancaagaaattagccctgatcctaagagtccgagttggacgactgattctcttgttgattgggatagnaaagagtggtggatgggntac

SEQ ID NO: 10016 - DNA, 421 bp, Arabidopsis thaliana
  unsure at all n locations
  Clone ID: LIB24-075-Q1-E1-B9
cattgacggtaggagtcaccacttttggcggcgattccttgttctcnattttttttgcacaagcaacatttagcttctgcaaactccagttcatctctcaaccctcatatcgccgtgttttctcgctctagtaccgcgagctcggacgaaccaggaagcaatccgttaatctagaagcggtgttgagaagatgacgattacatcaaatatctctgtacagaacgataacctcgttgttcaagggaagactatccttaccaaaatccctgacaacattatcctaactccggttaccggtaatggattcgtttccggttcatttataggcgcgacgtttgaacaaagcaagagtcttcatgtgttccccatcggtgtattggagggtcntcggttcatgtgctgtttccggtttaagctatgg

SEQ ID NO: 10017 - DNA, 446 bp, Arabidopsis thaliana
  unsure at all n locations
  Clone ID: LIB24-075-Q1-E1-C1
acgcgtccgcttnnnnnnnnnnnnnnnnnnnnnnnnnnnnnnnnnnnnnnnnnnnnnnnnnnnnnnnnnnnnnnnnnnnnnnnnnnnnnnnnnngtcatctttgtctgtctctgtccgaaactcaggagccctaatctctgaatccatcaagaaagctctttctcttccttcttttatgcttctgaatttgctacatatataaactatctgaagaaagctagagaataagatgatgagtctaagtggaagtagcgggagaacaataggaaggcctccatttacaccaacacaatgggaagaactggaacatcaagccctaatctacaagtacatggtctctggtgttcctgtcccacctgagctcatcttctccattagaagaagcttggacacttccttggtctccnagactccttcctcaacaatccctttggatgggggtgnt

SEQ ID NO: 10018 - DNA, 482 bp, Arabidopsis thaliana
  unsure at all n locations
  Clone ID: LIB24-074-Q1-E1-H4
acgcgtccggtgcaactaaagactttttgattcttgagaatcacgaggaagcccaagaagagttaccgaagaaagtgaagttcttctacagtgctgctgttcagaattgggacgcagagttttatgtcaaagttgatgacaacgttgacttggatcttgaggggatgattgcgcttcttgaaagtcgtcgtagtcaagatggtgcttacattgggtgcatgaaatctggagatgtgattactgaagagggaagtcaatggtatgagcctgagtggtggaaatttggggacgacaaatcgtatttccgtcatgcaactggttcgctggtaatactctcaaagaatctggctcaatatgtcaatataaacagtggattgttgaaagacatatgccgttttgatgataccaacaatgggtnatggatgaatgggcgtccangcaacatatataggacgacaatcgcctttgctgcaacancacaa

SEQ ID NO: 10019 - DNA, 429 bp, Arabidopsis thaliana
  unsure at all n locations
  Clone ID: LIB24-073-Q1-E1-A6
gggtttatatataacaatctggatccgccaccgtcgaattaatctccggaaagctcgtcgaaagatgtcgatgggaggcgacacgacgtgggttgggaagaagccgatcagacgcatcggtggattatctgatgctctctctatcgcctccgatctcggtttcgccgtcgctcctcctccgtcgcaggaagaattacaaagctttgcgtcttcgaatggggaaagaggtgatgatttgataagggtattgagagagttatctgttgttcaaaggaaaattgcagacttgcanggtcgagcttcaanggaggaaggatgataaaaatgtggcgcatttgactcatgttggtgaaatgcanaagaaaatcgaagactttgtcaaggattactcaaatattgaaagatgttatacaaaacaaggatcgcatn

SEQ ID NO: 10020 - DNA, 424 bp, Arabidopsis thaliana
  unsure at all n locations
  Clone ID: LIB24-073-Q1-E1-A9
acgcgtccgctctcttctctctctatatcgctcctcatgatccgattttttatataatttataaaaaatttatgtgataattacagatacacgttatttgtgtgtatattgatagagacaataaccattggaatctgaccatggatctcttttcttcttgagatatttttcatttctttctcctgttctcgtctcccagatctgttcgtcaatcttaccattggaaagcttcaagcttcctttttttctctatctggggacgggaccgttgtataaaagagttagaccaagacgacggcacaatgtatttcttcggtttgtccaaagaagaagtgttgtcacaagaaacatgttgtancatataaagagacttctaagcagaacccaagtcantatggtcactcctgtttggcaagacangtgt

SEQ ID NO: 10021 - DNA, 440 bp, Arabidopsis thaliana
  unsure at all n locations
  Clone ID: LIB24-073-Q1-E1-B11
tcccgggtcgaccnacgcgtccgcagcaaagcaaaattcgaagagacacaaaaaaaccttcgtttgtgtctcagaatttacaaagttttgagtcagtagagaaatggcgggaatcgtgacagagccgtggtcagtagctgagaacggaaacccaagcataacggcgaaaggatcgagcagagaactaagacttggaagaaccgctcacaacatgtcttcttcttctttgaggaaaaaatcagacctccgagtgattcagaaggttccatacaaaggtcttaaagattttctctctaatctccaagaagtcattctcggaacaaagcttgccattctttttccggccattcctgccgccattatttgcacctattgtgggcgtcagtcagccttggatatttggacttancgtgctaggactgacaccttttggntgaacg

SEQ ID NO: 10022 - DNA, 463 bp, Arabidopsis thaliana
  unsure at all n locations
  Clone ID: LIB24-073-Q1-E1-B5
acgcgtccgctacttttcgcaaaagaagggaaaaaaaaagagagagataaagctctcttcgattcttttgcaatcttctctcctacggttgtttcaatctccgaccaaaccgtgctttcgaatagaacccagaaatggcatcgccacagagtaccaaaaccggtttgaatcttcccgcagggatgaaccagacttcgttgcgtttagaaacgttttcgagctcatttcgtgggatttcgagtttatcctcgccgtctaaatcgacttgcagcgacagattcataccgtgcaggatcttcttcgagactccacgctttcgatctgcnaggataaggaaccgactaccccggttaaagagggagggaatgaagcctaattctagacttttgaaatccggagccttttcggntncngantttgcgtcccctccttttgtcncctgcaagtgggtcaanggatctgc

SEQ ID NO: 10023 - DNA, 503 bp, Arabidopsis thaliana
  unsure at all n locations
  Clone ID: LIB24-073-Q1-E1-C4
aacgtttcgcctgcccgtancggtccgaaatcccgggtcgacccacgcgtccgaatccagggccttccccggcaccagagcctaagccatgtccgagtccagggccaaaccccgcaccagcgacaactaagaggacacataacactacgtttccggcgatcttcgcctttggggattcgatcttagacacaggaaataacgattatattttgaccttgatcaaagctaattttcttccatatggcatgaattttccagataaagttcccaccggcagattttgcaacggcaaaatcccttcggactttatcgcggattatataggagtaaaaccagttgtaccggcatatttgagaccgggactgacccaggaagatttgctcactggtgtatcctttgcttcgggtggttctggctatgatcctttgacaccaatcgtantaaagtgcgataccgatgtcaaaacaattgacatactttcaagaatacatagggaaaagtga

SEQ ID NO: 10024 - DNA, 383 bp, Arabidopsis thaliana
  unsure at all n locations
  Clone ID: LIB24-073-Q1-E1-C7
ctttttttccttttgcattctctcgtcgtcgtctcaagatctagaagaaggaaacaacaatttcaagagacatggcaggcaaaggtggaaaaggactcgtagctgcgaagacgatggctgctaacaaggacaaagacaaggacaagaagaaacccatctctcgctctgctcgtgctggtattcagtttccagttggacgaattcacaggcaactgaanacccnagtctcggcacatggcagnagttggtgccactgcangcgtctacacagcttcaatcctggaggtatctgacagcagangttcttganttggctgggaatngccangcaacggntctcaaaagtnaacgaggatnactccaaaggnatctgcagttgggcg

SEQ ID NO: 10025 - DNA, 412 bp, Arabidopsis thaliana
  Clone ID: LIB24-073-Q1-E1-C9
gatttaacccatacacacatctctctgttccacgattctcttcctcagcctccacgtcgtctctaaactcagcaaaaaccaatgtcgacggtgagaaaaatcactcttaagagttcggatggcgaaaacttcgaaattgacgaagcggtggcgctagagtcacaaaccatcaaacatatgattgaagatgactgtaccgataatggtatccctctccctaatgtcacaagcaagatcctttcgaaggtgattgagtactgtaagagacatgtcgaagctgctgagaaatccgaaaccacggccgatgctgctgctgctactactaccaccaccgtcgcgtcgggttctagtgatgaagatctcaagacttgggattctgagtttatcaaagttgatcagggcactctcctcc

SEQ ID NO: 10026 - DNA, 467 bp, Arabidopsis thaliana
  unsure at all n locations
  Clone ID: LIB24-073-Q1-E1-D10
tgacgccgccaaaaaccggtcnagtcttcccgggtcnaccnacgcgtccgangagactcccgtattggttgaggatactgaaaaaatcaattcattaacatcagaggtggaagctctaaaggcttcgcttcaggctgaacgacaagccgcanaaaatttgagaaaagctttctctgaggcanaagctagaaattccgagctggcgacagagcttgaaaatgctacaagaaaagcagatcagcttcatgaatcagtacaaacactanaanagaagctttcgaattcagagtcagagattcaagtactccgtcancaggcacttgctatttcgccaaccagcagaactatggccacacgatcaaatcaatgcttttaccgagaactccanagaatggaaatnatcttaatgggaggnacacnagactacaccgggcatgactcctgctggtacnggaaccaagagtctg

SEQ ID NO: 10027 - DNA, 426 bp, Arabidopsis thaliana
  unsure at all n locations
  Clone ID: LIB24-073-Q1-E1-E10
acgccgccaaanaccggtcaagncttcccgggtcnaccnacgcgtccgagagttcagtgaaacagaagccgcacttgtaaagggttcatatgattttcttggtctcaactattacgtcactcaatacgcccaaaataatcacgacgattgttccttcggacgtacacactgccttgatggactcacgcacaactctcacatctaaaaatgcaactggtcatgctcctggtccaccgttcaatgcagccagttactactacccaaanggnatttactacgtaatggattacttcaaagccacttacggtgaccctttaananatgtcactgagaatggntttngtaccccaggtgatgaangactttgngaatgctactgccgattacaaccggattgattatcnctgtagtcatctccgtttccnc

SEQ ID NO: 10028 - DNA, 410 bp, Arabidopsis thaliana
  unsure at all n locations
  Clone ID: LIB24-074-Q1-E1-A10
gaaaatccgagacatccacaatgccgccaaagttggatccgagtcagatcgttgacgtgtacgtccgagtaaccgggggagaagtcggagcagcgagttctctagctcccaaaatcggtccgctaggtctcgcaccaaagaagatcggagaagatatcgcgaaagaaaccgcaaaggaatggaaaggattacgtgtaaccgtcaagctcacagtgcagaatcgtcaggcgaaagtgacggtggttccatcagcagcagcactcgtcatcaaggcgttgaaagagccggagagagatangaagaangtgaagaacattaagcataacggggaacatctcgtttgatgatgtgactganattgctaagatcattgagacctagatctattgctaaggaattgagtggaacng

SEQ ID NO: 10029 - DNA, 398 bp, Arabidopsis thaliana
  unsure at all n locations
  Clone ID: LIB24-074-Q1-E1-A12
acgcgtccgcccacgcgtccgcggacgcgtgggtcctcactcactcttcttccccaaaaaaaaaacaagacagaggaagagaatcacgaaaccatagtcccaaacccttcgaatctataagcatttctcaaacacaatcaagaaactgtgtttagcttttagatttctacaagcatgtaagacgagattttgtttcttttttttctgcatggtggatcgaacggtgagaatggggacggaggtgaagtcgattagggttccaagaagggtctggtttggatcacaaatatctatagttctcctcgtgggtggaaaccatacctcctccaggttttgtactcgctagattcttcgattttctctttgcgattcttctttgttcttaagatctgtttanc

SEQ ID NO: 10030 - DNA, 477 bp, Arabidopsis thaliana
  unsure at all n locations
  Clone ID: LIB24-074-Q1-E1-A2
acgcgtccgctctgtttatggaatcactccgttatctccctcagcgcctgcttatcaatccggtccatcttctaccggtgtttcaaataaggaacaaacttttcctcagcgacctgaacaacctgagtgtcaatactttatgagaaccggagattgtaaattcggaacctcttgcagattccatcatcctatggaagcagcatcgccagagggcgcagtgccatgcactcactttgcgcaacacggtatttgcaagtttgggcctgcctgcaaatttgaccactccttgggctcttcttcactaagctacaagccatccccttcttcactcacggacatgcccgtcgcaccttanccctcctcgctcggcacattagctccatcatcctcatctggaccaatgcactgagcttatctcttccaactctaatgaacctataacaacaacaactggggggctcagaaactggtngctgc

SEQ ID NO: 10031 - DNA, 474 bp, Arabidopsis thaliana
  Clone ID: LIB24-074-Q1-E1-A3
acgcgtccgcccacgcgtccgccttcacgtctctgcctttatcttcttcttccttcttctccatcatcatcagagagacgaagacgaagaagaagaacttcactggttattctctctccgtagccaaccactatggattctagagctattctcgattccgctttgtttcaactcactcctactcgcactagattcgatctggttctattctgtgggagtaagaaggagaagctagcttcagggatttttgaaccattcgtctctcatcttaagttcgctagagatcagatctctaaaggcggttactccatttctctgactcctccttcttctcactcttcttggttcaccaaatccacttttgatcggtttgtgagatttgtaaacacgcctgcgattatcgaaagatttgcgactctggagaaagagattttgcaagattgagaattctattcaaagctaatgaaaattgca

SEQ ID NO: 10032 - DNA, 414 bp, Arabidopsis thaliana
  unsure at all n locations
  Clone ID: LIB24-073-Q1-E1-A11
aaacaaaaatctaaatttctttcttggtctgctttcaatatggctcctctacctatttcttcgattagagttgggaaaatagatgatgttcaagaactcataaaatccaaaccaaacaaagttccagagagattcattagagaagagtatgagagaggagtcgttgtgtcgtctcttaagactcatcatcttcatcatcagattcctgttattgatctctctaagctctctaaacccgacaatgatgattttttctttgagattcttaagctctcacaagcttgtgaagactggggatttttccaggttataaatcatgggatagaagtggaggttgtggaaagatatagaggaagtggcttcagaagttctttgatatgccattggaggagaagaagaagtatcnaatgggag

SEQ ID NO: 10033 - DNA, 485 bp, Arabidopsis thaliana
  unsure at all n locations
  Clone ID: LIB24-072-Q1-E1-F10
acgttaaatgncagcctgccggtaacggtccagaattcccgggtcgacccacgcgtccgatcgttgagttggtgagatcatcttcttctcaacttcatcgatcttatcgtctcgaaaattgtcaccttttcttctcagctacttcaggcggagaaacactttccgtggtttagtgttgaggacgatcactgtttgtaattcgatggcgaggaagaagatcagagaatatgactccaagagacttctcaaggagcatttgaagcgtcttgctaatattgacctgcagattcgctctgctcaggtgacagaatctacggatttcactgagttaaccaaccaggagtcatggctatcgtccacaaagctagttgtgaaaccggatatgctatttgggaaacgcgggaaaagtggtttggtagctctaaagctggatcttgctgaagttgcagactttgtcaaagccccgcctcggcactgaggtccag

SEQ ID NO: 10034 - DNA, 397 bp, Arabidopsis thaliana
  unsure at all n locations
  Clone ID: LIB24-072-Q1-E1-F2
aaaccctagcctgccccgccgtgggaggagaattacaccacgacgagctcgtaatcgccgctgggtttctatgtttacatcgctaagagattaaccatcgagcgtgatttggtattggggttaggtaaatttggggatcaagcgaacagtatcatttggaaatgacgaaagtagttgctaagaggaagacgccttctgaactgagaggagaacaattgaaacggactgcttttgtggaccaagctaaagaagcttttgatgcantgcgtccttgcaaaagtgctganagaagaaaatgggttcaaagaaatcaagagccttcnaaagaatnccaaaatacattgagatgcctatggatgaactggtatccctgtccaaaaaggtaaggccntggatg

SEQ ID NO: 10035 - DNA, 433 bp, Arabidopsis thaliana
  unsure at all n locations
  Clone ID: LIB24-072-Q1-E1-G1
tcaggatttcttctcaagaagtatctagtgatgttaccgttcatgtaggagaagcttcgttttcactgcacaagtttccactcatgtcaaaatgtgggtttatcaagaaacttgtgtcggaatcaagcaaagattcagattccactgttatcaagataccagatattccaggaggctctgaagcatttgagctagcggctaagttctgctacggcattaactttgatatgagcacagagaacattgccatgttgcgatgtgcagcggagtatctagagatgacagaggaacactctgtggaaaatctcgttgtaagagccgaagcttacttgaatgaagtagctctcaagagcttatcgaagttcgatnacagtcntgcacaaatcagagaagttgttgcccaattgctgaaaagagtcaaaccttgtaagcc

SEQ ID NO: 10036 - DNA, 399 bp, Arabidopsis thaliana
  unsure at all n locations
  Clone ID: LIB24-072-Q1-E1-G10
ccctatacaactctcatctgtaatcnatacagatggcagcttcatcancttgtcttgtgggaaatggtttgtcagtgaacacaacaaccaagcagaggttaagtaaanatttttccggcagacagacaagcttttcttcagtgattangacatctaaggttaatgtantgaangcttctttggatgggaagaagaagcatnaaggaagaagagattttctcaaaatcttgttaggaaatgctggggtcggtttggttgcaagtgggaaagcaaatgctgatgaacaangtgtttcttcgtcgangatgtcntattctaagtttctagaagtacttggataacganagggtgaataaagttgatttgtatgagaatgggactatanctactgtggaaact

SEQ ID NO: 10037 - DNA, 417 bp, Arabidopsis thaliana
  unsure at all n locations
  Clone ID: LIB24-072-Q1-E1-G11
gggataagtttcatgaanatgatcacggtgaggttgtctccgaggttacaaaacctgggctggagccttatcttgggctgcattatcctgccaccgacatccctcaagcagcccgttttctgtttatgaagaacaaggtccggatgatanttgattgcaatgcaaaacatgctanggtgcttcaagatgaanagctttcctttgaccttaccttgtgtggctccacccttagagcaccgcacanctgccatttgcagtacatggccaacatggattcgattgcatctctgttatggcggttgtagttaacgaggaagatggagaaggggatgctcctgatgctactacacaagcctcaaaagagaaagagactatgggggttaagtggttgtcacaattacnactccgaggtttgtt

SEQ ID NO: 10038 - DNA, 426 bp, Arabidopsis thaliana
  unsure at all n locations
  Clone ID: LIB24-072-Q1-E1-G4
gctcgtctcttcagagaatttcaccttctagggtttgttcaagagaagtcttgggaaaatgagtcgtggaggtgcagctgttgccaagggaaagaagaagggagtttccttcaccattgattgttcaaagcctgtcgatgacaagatcatggagattgcttcccttgagaagtttcttcaggagaggatcaaggtcggtggcaaagctggtgcacttggtgattctgtcacaatcacacgtgagaagagcaagatcactgtcactgcagatggccaattctccaagaggtatttgaagtacttgacaaagaagtacctgaagaagcacaatgtaagggattgggctcagagtgattgcagcaaacaaggaccgttacctccatgagttgaaggtacttcaacantgctgagaacgaanggagaagg

SEQ ID NO: 10039 - DNA, 435 bp, Arabidopsis thaliana
  Clone ID: LIB24-072-Q1-E1-G5
acgcgtccgcccacgcgtccgcccacgcgtccgtaagagcgtctcaatttcagtgtttcatcgaatatgctgagggtttcgacaatctgagattcttctccttgtgttcatgtccaaaggagattcctttcttcattctccttaccttcttaacaaacccttctctcttattatctaattcgcttttgtagctctatacgcaattagcaaatttggagaaatctcgattatagcaattttcttcagtctccatgtacttttcctctgtattactctaattcaaatgtataagatgtgccatgaacctaccaacatctcttcatcggagtctgattttacattccttgaggaagaccatctccccttgacgtcacggcggagtttattgctatcgagtgaaagagtctcccaacgtatcgctgcttatgttcctgg

SEQ ID NO: 10040 - DNA, 399 bp, Arabidopsis thaliana
  Clone ID: LIB24-072-Q1-E1-G8
ccctttttctctcttattcttctatcttcctcctcctctatctttcgctcgagccattgagcaattatgtcgattccttgtctaaccgaagagacagccaaaactgttcttcgccaggtggagttctatttcagtgatagtaatctacccattgatgatttcctcaagaagactgttacagagagcgaagatggcttggtgagtttggcgttgatttgctcctttagtaagatgagaggatatttgaagttgggtgattctaaaggagatgatattcctgaagataccatcaaagctgttgctgatactcttcgaacctcttctgctctcaagatttctgacgatgggaaaaaggttggtaagagtactgaattgttgaagctggaagatttgattgaa

SEQ ID NO: 10041 - DNA, 433 bp, Arabidopsis thaliana
  unsure at all n locations
  Clone ID: LIB24-072-Q1-E1-G9
acgcgtccgctctttctttatatgcatgtttggaagcgtttctacgcgaagagcctttggtacctgacgaaatgtggttctgtccacaatgcaatgaaagaaggcaggcaagcaaaaagcttgatctgtggaggcttcctgaggtcttagtcatacatctaaagagattctcatacagcaggtccatgaagcataagttggaaacatttgttaactttcccattcatgacttagatctaacaaagtatgtagccaacaaaaacctatctcaacctcaactatatgagctctatgccttgaccaaccattatggtggtatgggcagcggacactacactgcacatatcaagcttttggacgacagtaggtggtataacttcgatgatagccatatatcacacataaacgaagatgatgtgaagtcangtgctgc

SEQ ID NO: 10042 - DNA, 427 bp, Arabidopsis thaliana
  unsure at all n locations
  Clone ID: LIB24-072-Q1-E1-H10
gatgtgacagaccagatggtgggaagatccgctcttccgaatcagtttgaggataaaaacccgctaaacttcccgggactccgcagagatgtagacgccatcgaacgccatttcttgagcggaatgaagagtttctttgatgcggctgaagagatgacaagcagcttatttgatatcatgggagaccatcacccaagcaccaggagaggagggatacccattgaaaaccatcccaaggtagaggagcaccgcaatgacgaaactgcccctacacgaccacactcctctggcgagattgatctctcgggcttggccaaggacgtttgagaaaggnnnnnnnnnnnnnnnnnnnnnnnnnnnnnnnnnnnnnnnnnnnnnnnnnnnnncaagcttttggcatatataatcttaaaaatgtaatgtgact

SEQ ID NO: 10043 - DNA, 452 bp, Arabidopsis thaliana
  unsure at all n locations
  Clone ID: LIB24-072-Q1-E1-H3
acgcgtccggcatttctggtttgagaagaatcttgtggaaaccaaagagaaatgtcgtttcgaggcattgttcaagatttgagagatgggtttgggagcttgtcaaggaggagtttcgattttaggctctcgagtcttcataaagggaaagctcagggttcttcgttccgtgagtattcgtcatcccgtgatctcttgtcgcctgtgatagttcagacaagtagatgggctaatcttcctccagagttactctttgatgtgatcaaaagattagaggaaagtgagagtaattggcctgcaagaaaacatgttgtggcttgtgcttcggtttgtcggtcttggagagctatgtgccaaagaanattgttttgggggcctgaaatccggtgggaaaactcactttccctgtttccctcaaaacanccaaagggcctccttgaatcaaatggatt

SEQ ID NO: 10044 - DNA, 437 bp, Arabidopsis thaliana
  unsure at all n locations
  Clone ID: LIB24-072-Q1-E1-H4
ggggcaattccggatcctttttatggacttgaaaatgaagcgatcacagatattgccgattccggaagggactactacactttctggttcttcactaaattccaatgtcaaaggttattgaatcaatacgtgcatttgaatttccgtgccatcaactactctgcacaagtgtttgtaaatggccacaagacagagcttcccaaagggatgtttcgcagacatacacttgacgtcactgatattctccatcctgagagcaatttacttgctcttattgttcatcccccagatcatcctgggactatacctccccgaagggaagccaaggtggtgatcatgagattggnaaagatgtagctgcacagtatgtgcaaaggttgggaactgggattttgtccaataagggaccggaataacggggaatatgggatgaaatt

SEQ ID NO: 10045 - DNA, 422 bp, Arabidopsis thaliana
  unsure at all n locations
  Clone ID: LIB24-072-Q1-E1-H5
agtaatgcagctgaaagtcgttctcctatatgtcatcttccatcagaatctgttggagaaggtcacctaagtaatgatgagatgggagttgatgtaggaacaccggacaatgtagaatcagggatgactgggagaagcaacgaagatgaaagaactctgtccaagtctcttagttttggattgattctgaaaaagttgatcgacctgggtaaagtggatgtgaaggatgtggctgcagagattgggattaatcctgatgctttgagggctaaacttacggacggagacttgttacctgatttactangcaaagtacttaaatggcttagccagcatgcacacatgggttcttcggataaaggcaaaaatttaaaactaaagaccactactaaatctgagcgtcgggcanctatccgtactga

SEQ ID NO: 10046 - DNA, 467 bp, Arabidopsis thaliana
  unsure at all n locations
  Clone ID: LIB24-073-Q1-E1-A1
acgcgtccgaaagattcttccggcaagattcaggaacattctgccatatttcagtgtattcaaggtttgcctgaangcgctctgcgcaagataatcttgactgcatctggtggagcttttagggattggcctgtcgaaaagctaaaggaagttaaagtancggatgcgttgaagcatccaaactggaacatgggaaagaaaatcactgtggactctgctacgcttttcancaagggnnnnnnnnnnnnnnnnnnnnnnnnnnnnnnnnnnnnnnnnnnnnnnnnnnnnnnnnnnnnnnnnnnnnnnnnnnnnnnnnnnnnnnnnnnnnnnnnnnnnnnnnnnnnnnnnnnnnnnnnnnnnnnnnnnnnnnnnnnnnnnnnnnnnnnnnnnnnnnnnnnnnnnnnnnnnnnnnnnnnnnnggtnccacaaggattcatccgttccttgcctcaattngggttgggcct

SEQ ID NO: 10047 - DNA, 404 bp, Arabidopsis thaliana
  unsure at all n locations
  Clone ID: LIB24-072-Q1-E1-F1
aaggcggtggcggcgtctgcggtgcatccggcgtctgaaggagggaagaggattgtggcgtctccttatgctaagaagttagctaaggagttgaaggttgaattggctggtttagttggaagtggaccgatgggaaggattgtggctaaagatgttgaggcggttgctgctggaggaggagttcaagctgctgttgctgttaaggaggtagtggcagctcctggtgtggaagttgggatcggtggttccttttacgacaatgcagggggctgtgagtangaatatggtggagagtcttggtgttcctacttttagagtcggttacacgattaatacggatgctccttgatcccctctacaagaagattaantcnaaaggtgtgacaatgacggcacttttaaca

SEQ ID NO: 10048 - DNA, 401 bp, Arabidopsis thaliana
  unsure at all n locations
  Clone ID: LIB24-072-Q1-E1-C10
gattcagttacagttacaagtttagggttttaaagccatatcttgcgaatggctataatcgcaggtaancatctcnaaaattctctctgcagtttgtctttcccgaattgataagtcagtcgcttctgcaactgtgttccttctgatacccaaaactttccatttgggatagtggcagaattantggaagaagtaagcatgagcagggtcgagcatgtattgaactatctgaaacgtaggcagctcgagaatcctggtttcttatatgcaattgaggacgattgtgggaatgttttctgggcggatccaacttgcaggttgaattacacctactttggtgataccctangctttgacaccacctataggagggggtaagaggtancaaggtgccatttgct

SEQ ID NO: 10049 - DNA, 479 bp, Arabidopsis thaliana
  Clone ID: LIB24-072-Q1-E1-C12
ctgttcacgcctgccggtaccggtccggaattcccgggtcgacccacgcgtccgagaagaaaaaaaattggaacgaaactagcataatgactaataaaacgtttgagtcattgtcattatctgataacacttataaatctatcaaggagatgggttttgcacgcatgactcagatacaagctaaagcaattccaccattgatgatgggagaagatgtacttggagctgccaggaccggttctggtaaaaccttagcttttcttattcctgctgttgagcttctttaccgtgttaagtttactcctcgcaatggaactggtgttcttgttatttgcccaacaagagagcttgctattcagtcttatggagtggcaaaagaacttcttaagtatcattcacagactgtgggaaaagttattggcggtgagaaaacgaaagacagaagctgagattcttgcgaaaggtgttaatttattaag

SEQ ID NO: 10050 - DNA, 444 bp, Arabidopsis thaliana
  unsure at all n locations
  Clone ID: LIB24-072-Q1-E1-C3
acgcgtccgctcgtccacatctttctcctttggtggcaaacacaacgacagatagagagaaacgatggcgtcgaactcgcttatgagctgtggcatagccgccgtgtacccttcgcttctctcttcttccaagtctaaattcgtatccgccggagttccactcccaaacgncgggaatgttggtcgtatcagantggntgctcactggatgcctggcgaagccacgaccaggcttaccttgacggttctgctcctggtgactttgggtttgnnncanntggacntggacaagttccangccaggccttgagatatacaaaagagtcaaganctcanccantggtagatgggctantgcncactngttcctgggattttgggacccannnancattanggtatggaaaactggggttaagggcncaaggaatggggnaaaccact

SEQ ID NO: 10051 - DNA, 449 bp, Arabidopsis thaliana
  unsure at all n locations
  Clone ID: LIB24-072-Q1-E1-C4
ccgnaattcccgggctaatattctccatcctctttcttcagatttaagagaaaccttatcgttatattctctcttctcttttctttttgactcccacaagaagaaagcaaatttctttttctcaggattgcttgaaaactgtagaaatctttaaggtttttttacaccaatannnnnnnnnnnnnnnnnnnnnnnnnnnnnnnnnnntctattcataaaaaagacaggtaatctcaactccgnnnnnnnnnnnnnnnnnnnnnnnnnnnnnnnnnnnnnnnnnnnnnnnnnnnnnnnnnnnnnnnnnnntggttgctttttatcagcttggccttgggaaaactttggcaatctcaagtatcttctctacgctccattagctgcacaagtaggtgtactcgtgggtctatgaaagaagatatctcaaaaggttctttggtggtantcat

SEQ ID NO: 10052 - DNA, 421 bp, Arabidopsis thaliana
  unsure at all n locations
  Clone ID: LIB24-072-Q1-E1-C5
agaaaagcctccatttttctcaaggcaatctctctctctctgcctcatctcataaacccattacaccaaaacctcatcgtagagagagaaacacaccaaccattgttacactctaagagaagagaagagagaaggaaaaatggacggtgtatcaccaaagtttgtgttgccggagacattcgacggcgtgaggatggagatcacaggccaactaggcatgatctgggagcttgtaaaagcaccagtgattgtccctcttcttcaattagctgtttacatctgtttgcttatgtctgtcatgcttttatgtgagagggtttacatgggaatcgtcatcgtcctcgtcaaactcttctgggaaaaaaccangacaaacgttacaagttcgagcccattcacgatgattgaagagcntgggaac

SEQ ID NO: 10053 - DNA, 421 bp, Arabidopsis thaliana
  unsure at all n locations
  Clone ID: LIB24-072-Q1-E1-C6
acgcgtccggaaacttgangaactttaagctaaacctctgtagttttcagattgattcgttggtggaaagcgtctaaattttgcgtaaatggcggcagctcttgtacgcagattctgccggggatcatcttttccggtctctggtcatggatataggatgctatcgacggttgaaaatgtatctgaaagtggtaaatcgatgaatctatactctgctattaatcaagctcttcacatcgctttagagaccgatcctcggtcttatgtttttggggaagatgttggatttggtggtgtcttccgatgtacaacaggattaagctgaacgttttgggaaaatctcgagttttcaacactcctctctgcgagcaaggcattgttgggctttggcaattgggttaactgcaaatgggaaaatncg

SEQ ID NO: 10054 - DNA, 437 bp, Arabidopsis thaliana
  unsure at all n locations
  Clone ID: LIB24-072-Q1-E1-C8
acgcgtccgcgtttctgaatcagcttaagaactaacaaggagacagacactaagcttggtttttctctccgattagacggaggaaaaagtgaaaacgaggggcttagacgagtnnnnnnnnnnnnnnnnnnnnnnnnnnnnnnnnnnnnnnnnnnnnnnnnnnnnnnnnnnnnnnnnnnnnnnnnnnnnnnnnnnnnnnnnnnnnnnnnnnnnnnnnnnnnnnnnnnnnnnnnnnnnnnnnnnnttcagatatgcctttgcctcaacagaacagagcctttagtttgtcgcgtgagattttgaatgctactccagggaaggctgataacaaaagactcgctcatgccctaaaaaaggacttccgattcagcctacggcccggcatgggcactgcattgttggnacaagctttggttcatacgtgactcantccacag

SEQ ID NO: 10055 - DNA, 434 bp, Arabidopsis thaliana
  unsure at all n locations
  Clone ID: LIB24-072-Q1-E1-D2
tgtctctctcgccggccgatatggccgcctccgtagcaaactgctgcttctccgtcctcaatgcctccgttaaaattcaatcttcgtccatctcctcaccgtggtgtttcgtgtccgcatcgtcgttgactccccgagcttcctccaatattaagaggaaatcgtcgaggtctgattcaccatctcctatattaaacccagagaagaattacccaggtanagttcnagatgaaagttccaatcctcctcaanaaatggctttcaaggcttttgggtcacccaananggagaaaaaagagtctctttctgattttagtcgagaccaacagactgatcctgccaagattcacgangcatcctttctcaacgctgttgtcanngtttaattgcnctcatactgctncctgaataacnccctcccaatggggaagaag

SEQ ID NO: 10056 - DNA, 431 bp, Arabidopsis thaliana
  unsure at all n locations
  Clone ID: LIB24-072-Q1-E1-D3
actcttctctctcattctctttcgcttctcgatagcttctcaaatcatggttcagcaaatatgggagacgttgaaggaaacaatcacagcttacactggactttctccagctgcgtttttcaccgtacttgctctcgctttcgccgtttaccaagtcgtctccggtttcttcgtttctcctgaagttcaccgacctcgttctttggaggttcagcctcaatcggagcctcttccaccgccggttcagctcggagaaatcactgaggaggagcttaagctttatgatggctccgattctaaaaagccccttcttatggcgatnaanggccaaatntangangtttctcanagcanggatgttttaaggnaccaaggtgggccatatgntccgtttggcangggaaagatgccaagcccgagctcttgggnaa

SEQ ID NO: 10057 - DNA, 480 bp, Arabidopsis thaliana
  unsure at all n locations
  Clone ID: LIB24-072-Q1-E1-D6
aactgttccgcctgccggtancggtccanaattcccgggtcgacccacgcgtccgcccacgcgtccgggtagctcgaggtgataagagtggagaagatggcatcccgatgctactgaagattccgcggatgttcgatccgtggggaggctacagcattattggatttggtgatattcttttgcccggtttgctaatcgcatttgctctcagatatgactggctagctaacaagactcttagaaccggctattttatatgggcaatggttgcctatggattaggtcttttaattacttacgtggctttgaacctaatggatggacacggccaaccagcattgctatacattgtccctttcacacttggaaccatgttaacgctggctcgaaaaagagacgatctttggattctaaggaccaaaggagaaccagaaagagcttgtcctcaaccaagttcgggcttgaacaatgttctgagaa

SEQ ID NO: 10058 - DNA, 425 bp, Arabidopsis thaliana
  unsure at all n locations
  Clone ID: LIB24-072-Q1-E1-D9
cgctagctagtgtactgagttcaatgaagatacatgccatattggtagtagcgttcttggtcctgatgaagaccgccgtttcccaggacaataatccgctggaacattgcagagacgtgttcgtgagtttcatgccctgcatgggcttcgtcgagggaatatttcaacaaccttctccagattgctgcagaggcgtgacccacttgaacaacgtcgtcaagtttacgtctccaggatcgaggaataggcaggatagtggagaaacagagagagtgtgtctgtgcattgagataatgggaaatgcaaatcatcttccttttcttcccgccgctattaataaccttcctctccgttgttctcttactctcagctttcccatctccgttgatatggactgttctcanttcangaaacaccaagaatcc

SEQ ID NO: 10059 - DNA, 483 bp, Arabidopsis thaliana
  unsure at all n locations
  Clone ID: LIB24-072-Q1-E1-E4
ctgttacgcctnccggtagccgtccgaaattccngggtcgacccacgcgtccgaggaaacaagggacaattcaacacggtcacagccgatggaaacgaaaagggtctagcgatgaaaatcggtatcgtcctccaaaactgtcgcatcgttcccgacaagaaactagcggcagagagattaatcgtggagtcatacttgggaaggccatggaagaaattctctaccaccgtgattatcaactccgagataggagatgtgattagaccagaaggttggaagatttgggatggggaaagtttccacaagtcatgtaggtacgttgagtacaacaaccgtggaccaggagctatcactaaccgaagagttaactgggttaagatcgccaggtctgcagctgaggtcaatgacttcactgttgctaactgggttaggtcctantaactggattcaagaagccaatgttcccgtcacgcntggattaaa

SEQ ID NO: 10060 - DNA, 421 bp, Arabidopsis thaliana
  unsure at all n locations
  Clone ID: LIB24-072-Q1-E1-E5
acgcgtccgcggacgcgtggggtgacgagcctcttgttgtttttggttatcanattgatgatcggacggttcttattggtttatcggttttgacggttgtgatgcttttgttgactcacgctacttcgaatattctgggatctttgttaaccgccgccgtgttggttctgattcatgcggcggttagaagaagtgataatttgtttcttgatgaagaagctgcggcggttactgaagcttcagggctgatgtcatacccttcgtcgtaaatccaaaaatttgttttttttttttttgtatgttactgagtttggtgcnanttgagaaaactgacatgttcttcctaanaaanccnnaggcatganaagngggtnngaaatcggtgnaaaaaaanggncgggccgctccnaaagggattcca

SEQ ID NO: 10061 - DNA, 424 bp, Arabidopsis thaliana
  unsure at all n locations
  Clone ID: LIB24-072-Q1-E1-B8
gattatggccaccgntggcgagagtatctcgatgtcgttggnggtggntacctgcgtcgcgatggcactattctacgttttgatcctttacgttcccaccgtgatactccgtctcccgtcggcttcttcttacaccgaattcatgattcggcgattcatctgcgcggccatttgtactgtancatctctcgtcttcacagcttttatacttccgataaaaagctgggaggcctcttatatacttggagtttatggcataaggaaagatcatctgtggcaaggagtggtgtatcctcttctattgacctcgctcgtttatgctggggtctttggtgttgaagttgtttactctcctggaatcatgggaaggaaaatggcngaaggatgtanntcctttaattaaatcangaaacctttttccaaa

SEQ ID NO: 10062 - DNA, 447 bp, Arabidopsis thaliana
  unsure at all n locations
  Clone ID: LIB24-072-Q1-E1-E8
acgcgtccgctctgtgcgagctctctcctctcatcaatggaatctctcatcaatcccagccatggcggaggaaactacgattctcactcttcttctctcgatagtctcaaaccaagcgtactagtcatcattctcattctcctcatgactcttctcatctccgtttccatttgcttcctcctccgctgtctcaatcgctgtagccaccgctccgttctccctctttcatcttcctcttccgtcgcaaccgtaacttccgattcccgacgattctctggacatcgaagtctctcccgaaacagaacggtcctccggtgcttgattnggcttccgattttcaaattctcctccgtnacttcgccgatctagctccaatgaattcccggaaaattgcgccgttttgtttggtcgaaaatttgnaaccgggaggattaagctccgtcttct

SEQ ID NO: 10063 - DNA, 412 bp, Arabidopsis thaliana
  Clone ID: LIB24-070-Q1-E1-F12
gagacgagagctcgtcgaaccagatctctttctctttcttctctctaattttgatttttttgaattttcttctgcaaagcaaaatcgcagaagtcgtcgtgtgtccgcgttgcatcgaaccacttgttcgattctctttcgtcatcctctcttatatcatcagcaacaacaacccttgtttcaaatttcttcatttccgccggatttataatcgcagattgattctgatcgatagagatagggttattcaaggagagacctcgattgacttcaattgtcttcctgattcgatagataagatttagggttagcttgacgttgacgttgatataggggaatggagacggacaatgggaaggggttgatactagctgtagcgtcaaagtgttttcaatgggtccaacttcaatct

SEQ ID NO: 10064 - DNA, 416 bp, Arabidopsis thaliana
  unsure at all n locations
  Clone ID: LIB24-070-Q1-E1-F5
ccgtcttagccttacgtgcgccaacggcgcactctcctatcctacgctcatctatcgtcactcccacagcgagagctgtctcggaagtttccggttgtactacgatcgatccagattttctcgtanagatctctgattctaaccagacgcgggcgatgtcgaaagctcgtgtgtacaccgaagtcaatgtgattcgacccanggattattgggattacgagtcactcattgttcaatggggggagcaagatgattatnaggtagtaaggaaggtaaggcgtggaaaatatagtgaagttttcgagggtatnaatgtgaanagcaagganaagtgcattatcaaaatcctcaaacctgttaagaaanaagaagataanaagaagnattaanntacttcanaaacctatgcgggtggg

SEQ ID NO: 10065 - DNA, 410 bp, Arabidopsis thaliana
  unsure at all n locations
  Clone ID: LIB24-070-Q1-E1-F9
gaaaccctaaatctcgacctcaaaccctgaaccatggctgaaggactcgtgttgaaaggcacaatgtgtgcccacactgatatggtcaccgccattgctacaccggtcgataactccgacgtgattgtaacttcgtcgcgtgacaaatcaatcatcctctggaaactcacaaaggaagacaagtcatacggtgttgctcagcggaggatgactggtcactctcacttcgttcaagacgttgttctctcctccgatggacaattcgctctctccggatcttgggacggtgagcttcgtctctgggatctcgctaccggagaatctactcgtcgtttcgttggtcacacgaaagatgttctctctgttgctttctctaccgataaccgtcagattggtctcngcttctcggt

SEQ ID NO: 10066 - DNA, 406 bp, Arabidopsis thaliana
  Clone ID: LIB24-070-Q1-E1-G10
ctcttctgcgtctcgccaaatttatttcccgattcaatttgtagggtttctgcagaagaaggaaaccaccattaaaccctaagtacgtcacctttcaagctccttcttctgtaggttttttctgttcttctgattcatgtttacaaagttttttttatgtctcttctaacttcttctccttctcgccgcgtaatcagtccttattgttcttcataatcgcagtaccaatcgcaatcgttttcttcctctctcgatctgttcctcggacgagaaaactgggacaacaaacctatgccgtcgacgccgctggctaacggtggtacgcctcctatgggtggcggagagagaacgacggttacaacttccacggtggcgggatgataagcctggagtttcgatgatggag

SEQ ID NO: 10067 - DNA, 421 bp, Arabidopsis thaliana
  unsure at all n locations
  Clone ID: LIB24-070-Q1-E1-G3
catattacaaaagaactaaagaagatggatcagtcatcatcaacgttgctcataaaccagagaaagtcatcatcgtctccgactaggatcccacctaagcagaagaggaagtcaacgactacgcacaaacccatcaaagtccgttacatatcaaatccgatgagagtcgagacttgtccttctaagttcagagagcttgttcaagaactcaccggtcaagacgccgctgatctaccaccgtcgcccaccacttttaccgccgtagatctccaccgtccgtgtgagtcggagatgaacttagagccgttggatggagaggtccgtggagagtattattcaccgttggatgaggaagtgtttaatgctcctcaagatgtcggcaggtctttctggntttttctcgtcctggattttacaaatg

SEQ ID NO: 10068 - DNA, 417 bp, Arabidopsis thaliana
  Clone ID: LIB24-070-Q1-E1-G4
aaaccgaaacatcaagcaaacaaaaaaaaaagagaagagaaattatttttttttgttttcgttttcaaaaacaaaatctttgaattttatggcaacccgtcttctccgaacaaactttatccggcgatcttaccgtttacccgcttttagcccggtgggtcctcccaccgtgactgcttccaccgccgtcgtcccggagattctctcctttggacaacaagcaccggaaccacctcttcaccacccaaaacccaccgagcaatctcacgatggtctcgatctctccgatcaagcccgtcttttctcctctatcccaacctctgatctcctccgttccaccgccgtgttgcatgcggcggcgataggtcctatggtcgacctaagggacgtgggtcatgagctctaaacttatggacg

SEQ ID NO: 10069 - DNA, 412 bp, Arabidopsis thaliana
  Clone ID: LIB24-070-Q1-E1-G8
actgcatgctcatctctatattccttatactccttatacgggaggccaagggcatggaatatgcaagggctgcaagtttattttcaatcaattgtggcagcaaaggatttcatctacttcatctactgccttacattcgtcacttcacatctctgtctcaagtttgctttgattcccatcttgtgccgggcacttgaacaagtagccaagttcttgaggcgtaactttggtcggtccactatatacagaaagtacttggaagacccttgtgtgtgggtggagtcaaacactactaccctcaacatcttgtcatcgcatgctgagatagccattgggcttccttctgattatctctctgctctcaaggcaacgttacaattatacagacgtcaatgtactgggagctattgaa

SEQ ID NO: 10070 - DNA, 417 bp, Arabidopsis thaliana
  unsure at all n locations
  Clone ID: LIB24-070-Q1-E1-G9
agaataagagagagagaagagaactactcagatataaaaaccctagatttcttctcttaaaacccacatcgaatctcaactcagaaccaacaatgctccaacctttctcttcctcctctgttttctcgagaatcctctggactttcttggtttaagaagattcgttgttgaatcagagagaaagaaagcatccatttttctatcattgcttgcttgctatggaattgggtaaatcncgattctacttatgttgcaattgcttttctcctgttaagattttccgattattctttagctgggaagtgattatccagacgccatctccatcactttcaattgtattccnataccttcttctgaagattcttngtagttctcgattcgatgtttaaaacttcaanttctcttccaaatctt

SEQ ID NO: 10071 - DNA, 411 bp, Arabidopsis thaliana
  unsure at all n locations
  Clone ID: LIB24-070-Q1-E1-H11
ctgtttgatcctcgtcttcaagctaagatattgaatgtggttgatgtttcttacggaggagagaatggtttcaaccaagcaattgagctgtctgctgagattctatctaatgtgaagttcatacaagaaaagaaattgattgggaagtactttgaggagattagtcaagacactgggaaatatgttttcggtgttgaagatactttaaaggctctggaaatgggtgctgttgagactcttatagtgtgggagaatctagatattaataggtatgagttaaagaacaacacgaccggagaaatcgtgattaagcatttgggaaaggatcaagagaacaaccaaagcaatttccatgatgcangagactaatgcagagttagaagttcaggagaagatgcctccgcttgaatg

SEQ ID NO: 10072 - DNA, 418 bp, Arabidopsis thaliana
  unsure at all n locations
  Clone ID: LIB24-070-Q1-E1-H3
caaactcttgggttcntctctgattganaatgancttatcatcgccaaccagtgcttgtanctcgtccagatgttactcctcgggattatcgtttccgattggatttggatcgaatcccatcaatgtgggattggtttgttacccaaaaagatacagtattgctgctcggaagttcgtatgtggcttgctcctcctcctcttccgatccacttttggttaaggctgcaaaagggcaagccatanntcgtcctccagcttggatgatgaggcaagcangaaggtatatggctgtttaccaaaagctcngccaagaaacatccgtccttcagagagagatcagagaacactgatctaatagtggaantctctttgcagccttggcangcattcagnccanacggtgtcatcatttttntc

SEQ ID NO: 10073 - DNA, 420 bp, Arabidopsis thaliana
  unsure at all n locations
  Clone ID: LIB24-070-Q1-E1-H4
cnnnnnnnnnnnnnnnnnnnnnnnnnnnnnnnnnnnnnnnnnnnnnnnnnnnnnnnnnnnnnnnnnnnnnnnnnnnnnnnnnnnnnnnnnnnnnnnnngatgtgattaggaagagcaatagaggaagagaagaatcagaaaaaatggatccggcgactaattcaccgattatgccgattgatttaccgattatgcacgacagtgatcgttacgacttcgttaaagatattggctctggtaatttcggcgttgctcgtctcatgaccgatagagtcaccaaggagcttgttgctgttaaatacatcgagagaggagaaaagattgatgaaaatgttcaagagggagattatcaatcatagatcattgagacatcctaatattgttangtttaaagangtgattttgacgccttcccaattt

SEQ ID NO: 10074 - DNA, 415 bp, Arabidopsis thaliana
  unsure at all n locations
  Clone ID: LIB24-070-Q1-E1-H7
acagtgtcgtattaattgattggtgtggcgaaacaaatccgtcgttttgctccgttgatcggcaggtgatcaccagaagcctcgtcaccgtctctttctctcccccctttttcatgacgccgccgagaccaccgtctgggcgagtaaggtcgctgcgtgattattcttcggaatcagaaaagatggatggtaccggtagttgggacacgcttgaatggaccaaactcgattcaacttcagggtcaggttctttctcgaatttgagttgcttgctggaatcggagagggtcatcgtcgagggttatggaagttgtgcttattaacaccgatgaggcaggaacccttttggggactaatttccgtattccttttttgagtgaaggaaccangaaaaagtcattccaacnttggtaca

SEQ ID NO: 10075 - DNA, 446 bp, Arabidopsis thaliana
  unsure at all n locations
  Clone ID: LIB24-071-Q1-E1-A1
gatgtccggttttagtncannnnnnnnnnnnnnnnnnnnnnnnnnnnnnnnnnnnnnnnnnnnnnnnnnnnnnnnnnnnnnnnnnnnnnnnnnnnnnnnnnnnnnnnnnnnnnnnnnnnnnnnnnnnnnnnnnnnnnnnnnnnnnnnnnnnnnnnnnnnnnnnnnnnnnnnnnnnnnnnnnnnnnnnnnnnnnnnnnnnnnnnnnnnnnnnnnnnnnnnnnnnnnnnnnnnnnnnnnnnnnnnnnnnnnnnnnnnnnnnnnnnnnnnnnnnnnnnnnnnnnnnnnnnnnnnnnnnnnnnnnnnnnnnnnnnnnnnnnntggattggataagagagattatcgaacaagctcnaactgttacaagaaataattacaatcacagtggtgttttgaatcctgatgaaggaaattcccntttggcaatgataattgtgcaaccaatcctg

SEQ ID NO: 10076 - DNA, 449 bp, Arabidopsis thaliana
  unsure at all n locations
  Clone ID: LIB24-071-Q1-E1-A8
gnantaggtcaaaanaacaaatcccaantcttcatcatcttcaacgtttatggatttgagtcgntctcaaacaaattttcanttagggtttggttgttcacacgcancaatgactccaacaccaacacnaagagctccangcgcagacnattcgattaatctacaagtcgatcaaagtttccgatcattaccacnaactttctctccgattccgttacaattactcgaacaanaagccgnnaagaccaccaccgttgatgagccaaagaaagatggaggangaggaggagatcaaaaggaagacgagcatttcagaatcttaggtcaccatatgtgtctcaaaaggcaaaggagattgtccacttttgttaacgcaaatnaaagcatccgaagagaanttccatcggtgattcagatctggaatcgcgactgctgctgtacgagcttgg

SEQ ID NO: 10077 - DNA, 472 bp, Arabidopsis thaliana
  unsure at all n locations
  Clone ID: LIB24-071-Q1-E1-B12
gctgccgtacgctccgaaattccaggtcnacccacgcgtccgcggacgcgtccgcccacgcgtccgcccacgcgtccgattattttcttctgcangatccttcatcaccacaaaacctcttccgattgattcatttantccnaaaccanagctagagaatgcggctgcgtgttcttacacggtgatcattaagacaagctgttcctctgtgtcttacactanagataagatcagtanatcgtttggtgatgtctacggcaacgaggtgtatgtgaagagactanacgatccatcgtcgaggacgttcgaaaagtgttcatcagacacatacaagatatcnggaccgtgtatgcgcgacgtttgttatctctacctcctcaggcaaggatccgacggctggaaaccagagaatggttangatntactgcncatcccatcagatnagtcactttctactacaangcttttcttg

SEQ ID NO: 10078 - DNA, 411 bp, Arabidopsis thaliana
  Clone ID: LIB24-070-Q1-E1-E9
agtttcttgttacaaaaatgagagctattcaaactcatgtgataaccttctgcatgttagtcatcatcgtaacatcatcaacaagagcccaaaagagtcctcatgtgcctaacaaccatgaactttctatcgccatcgaagaaatggagaaagcaaattacttctcttttgtgatgctcatcaacatgttaccatccgtaaatcctcgattcttagccaatgtcacattcttgatgccaaaggacaaaaccctttctacatcaaacattattaatcaacaagattcggttaccgagttcttgcttcgccactcaatcccttcttctcttcttttcgagcaccttaatctcatccccaatggctccattgttccttcctctttaccacattacaccctcgaagatctccaat

SEQ ID NO: 10079 - DNA, 411 bp, Arabidopsis thaliana
  Clone ID: LIB24-070-Q1-E1-B5
gaagcaaatacttgtttggtaaagtctctatccagattaagcttgttgagggtgattcagcaggaacagtcactgctttctacatgtcttcagatggtccgaaccacaacgaattcgattttgagttcttagggaacactaccggcgagccttacatagtccagaccaatatctacgtgaacggagttggaaacagagaacaaagactcaacctttggttcgatcccaccactgagtttcacacttactcaatcctctggagtaaacgcagtgttgtattcatggtagacgaaacaccgattcgagttcagaagaatcttgaagagaaaggtatcccatttgctaaagatcaagcaatgggtgtttacagctccatttggaatgcagatgattgggctacacaaggaggtc

SEQ ID NO: 10080 - DNA, 411 bp, Arabidopsis thaliana
  Clone ID: LIB24-070-Q1-E1-B8
gacaagcctcaattgcttgctgctgtaaaatttatagcgcatctagtaaaccagcaagtcgctgaggagatcatagcacttgagttagttaccatacttctgggagacccaactgatgacagtgttgaggtggctgttgggtttgtgacggaatgtggtgcaatgcttcaagacgtttcaccaagaggattgaatgggatttttgagaggtttcgtggtatactgcacgagggagagatagataagagagttcagtatttgattgaaagtctctttgctactaggaaggcgaaatttcagggacatccggccgttcgtcctgagctagatcttgttgaagaaaaatattcgcatgatctctctcttgatcatgaaattgatcctgaaactgctcttgatattttcaaacct

SEQ ID NO: 10081 - DNA, 389 bp, Arabidopsis thaliana
  unsure at all n locations
  Clone ID: LIB24-070-Q1-E1-B9
aaagcattttcctcaatcgttattggggttttacgaattcgacatctgtttctgactccgccggatggctagatgggatcagattttctccttacctgtgcaaaatcctaccttgccagaattttcttctaccgatcttgtctggtcaaaggttgaaggttaccgggacaatatagataggttagccctcatcccatatactagggtggatgattttgtaagaggtgaatgctcgaataaagattgtcctacaagtttccatgttgaagctagacgacggaaagccaaaggaaaaaaatataagccaaaggtggatggcatcttggagtatattctgtattggtgttcctttggaccggatgacaatangaaaggcggaactgtacggc

SEQ ID NO: 10082 - DNA, 424 bp, Arabidopsis thaliana
  unsure at all n locations
  Clone ID: LIB24-070-Q1-E1-C1
caaccatggctcctctggttctctaccttctcactctcctcatggctggccataccagtgcctcatggtgtgtgtgcaaaacagggctgagtgactcagtgctacaaaagacattagactatgcttgtggaaatggagctgactgtancccaactcacccaaaaggctcttgcttcaatcctgacaatgttagggctcattgcaactatgcaagtcaatagcttcttccaaaagaaaggtcaagcttctgagtcttgtaacttcactggtactgccactcttaccaccaccgatcccagctatacaggatgtgcattcccttctaaatgctagtggttctaagtggaagcggtancaccaccgtgacnccaggcaaaaacagtccaaaaggaagcaacagnatcancaacaattttcccggggg

SEQ ID NO: 10083 - DNA, 420 bp, Arabidopsis thaliana
  unsure at all n locations
  Clone ID: LIB24-070-Q1-E1-C2
aacatgaagcagaggcagcaatgctagnnnnnnnnnnnnnnnnnnnnnnnnnnnnnnnnnnnnnnnnnnnnnnnnnnnnnnnnnnnnnnnngaaaaaatcttcagtttctgaatctagaaaatcagataagggcaagaaaaggtttagaaagaaaagtgggcagtcagatgaaagtgatggcgaggtggccgttagagaggatagtagacacgttagaagaaaggtttctgaagaggatgatggttctgagtcagaagaggaaagagtgcgtgaccaaaaggagagagaagaactggagcagcatttaaaagatcgtgatactgcacggacacgaaagctaacagagcaaacgttgtcaaagaaagagaaagaagaagctgttcgaagagcaaatgctttggagaaagatgaatttatat

SEQ ID NO: 10084 - DNA, 417 bp, Arabidopsis thaliana
  unsure at all n locations
  Clone ID: LIB24-070-Q1-E1-C4
gaattagggttctaggatctctgctcttaaaactcttatcgccgctaaaactctctacccatcgcagagcctctctaaaggttatcttcatgatctcactcaatacatatgtttcgttactatatgtttttgcttctgattgtcgttattctgtaatcgtttagagtcgtttatggtttcccccattttgtctgtaatgtccatgctctgtttctttacagtttcctctccggcttgttagatatcangtttagttcctgatttactgagaaaccaancttttgagcttaagtatgttagggttctgacgttgattgagaaatattataaactgggntttcaagtttanttctttctggaatttcttttgtagtccggattatnaggtacactgctagaatataccgggntagggta

SEQ ID NO: 10085 - DNA, 414 bp, Arabidopsis thaliana
  unsure at all n locations
  Clone ID: LIB24-070-Q1-E1-C7
acgcgtgggcggacgcgtgggcggacgcgtgggcggacgcgtggggcgtctttctctgttgaaatcgaaaaaattttcaaaacaaaatctaaggaaaaaagagcaacaagtttcaaatctcatttgggtttttcattttgaaaagaaggacccatttttatctctctctttgttttgttttctcgaatctgaaggagtaaagttaaaagctttgaaggagagaatcaatggcgggttacagagcagatgatgaatacgattacctattcaangttgttctgataggtgattcaggtgtgggcaaatccaatttgctttcacgattcacgaagaacgagtttagtctcgagtcaaaatccacgatcggggtccnagttcgcgactccggagtttgaaatgttgatgaaaaangtc

SEQ ID NO: 10086 - DNA, 412 bp, Arabidopsis thaliana
  unsure at all n locations
  Clone ID: LIB24-070-Q1-E1-C8
aaatccgatcgggctcgcttgttctgatttcgtgagggtgaacatggatggaaacaaagacgatgcgttgaagtgcttgaaaatctgcaaaagtgctatggaagctggagatcgacctcgcgctttgaaattcctggctaaagctcgtcgtcttgatccaaatctcccgatcgatgatctcgtatctgagcttaacaacaacaaatcagacgaaccaggatctgcaaaatcgcctggatctgcagcagcaaaggattcttccaattcttcagatcggccttctttacgtcaacgtggatcgtcaacaacgtcatcgtcttcttcgatgtcctacactgaagaacagatctcaatcgtgagaaagataaaatctaaaaaggattattacganatcttaagtccttgaatccaa

SEQ ID NO: 10087 - DNA, 417 bp, Arabidopsis thaliana
  unsure at all n locations
  Clone ID: LIB24-070-Q1-E1-D1
tcacagagagaaaaaccaatggcttgtattcacatcgaatcatcacatccacctgcatggaagacacactctgtccaagagaacaaaccagcaaatgctgatgatatatcgaacacaaccttaccagaacaccacgacggtggcgacgggggaatccaagaaacgtgggccgcgattggagattctggcggcagaggaggaggctatttcgccggagagagtaggaagaagctggagaagaagaagagccaagtgttgcttgagggatacgcgttggatgatcaagatgatttgacgagagccaagagtttgacggatgatgatcttgaggagcttaaaggttgtttaaatctagggtttggttttagttacgatgagattcctgagctttgcaacactttgcctgngttagagcct

SEQ ID NO: 10088 - DNA, 364 bp, Arabidopsis thaliana
  Clone ID: LIB24-070-Q1-E1-D10
tcacaaacacggaaaaatatgttggaaaatttcttgatttactccctgaaaatccgtctggtgaactcgtcacttgggatgctcgacttcctttgagaaatgaagctatagtaataccaacccaggtgaactatgtgggaaaagcgggaaatatatacagcagtggctacaaacttgatgggagttcatatgttatatcaaagcatattagtaacacatggttatgggatcgtgttcgtgtaagtggtggtgcatatggaggttcctgtgattttgattcacattcgggagtattttcgttcttatcttaccgtgatcccaacctattaaagactctagacatatatgatggaactggggattt

SEQ ID NO: 10089 - DNA, 414 bp, Arabidopsis thaliana
  unsure at all n locations
  Clone ID: LIB24-070-Q1-E1-D3
gcctccaaagattcntccttttccgattccgatgaaaaggaattttgggttttaggaaagttcgattggntggtttggaaacatctccctaacacacgcagcaaacaccttcgttgtttacggagacagtcactttttgtacatatggattcnaatcaatcgatgcggctcctcagtgcttggattggtcaaattggtgatcttggtcntaatttgctatggcgttttatacacattgttgtgagcttatggtacattgtctctggcatatttgaggcaatagaaagctatgccataacgttaggattgaataaanagtacggttccatcgatcttgagaaactccggtgtctagctgttgtagtggacancnaagcaactcanagatgttgccaatgttgttaacctttgcan

SEQ ID NO: 10090 - DNA, 417 bp, Arabidopsis thaliana
  unsure at all n locations
  Clone ID: LIB24-070-Q1-E1-D4
acgcgtccgcccacgcgtccgtaacactangcaaaatccgtcacaggaacattgtcaggctatacagtttctgttaccaccaaggatcaaactcgaacctcttgctctacgaatacatgtctcggggaagccttggcgagttacttcacggcgggaaatcacatagcatggattggccaactcggtttgctatcgcactcggtgcagcggaaggtctcgcttacttacatcatgattgtaaaccaagaatcattcaccgtgncatcaaatcgaataacattctcatcgatgagaatttcgaagcccatgttggagatttcgggttagcaaaagtcatcgacatgccactatcaaaatccgtctcaagccgttgctggattctacggttacatcgctcccgagtatgcatacacaatg

SEQ ID NO: 10091 - DNA, 407 bp, Arabidopsis thaliana
  Clone ID: LIB24-070-Q1-E1-D9
aaccactcaaccaaaaaactagggttctgtttctcgtctctctctcaaacccacattgcacaatccatttctcgtttctctgatttagatccaaagatggatgggatgaagctttcgttcccaccggaaagtccaccactttcagtcatcgttgctctttctctctcagcttctccggtgacgattgattcttccgccgctgcaacaaccgtcccttcttttgtcttctccgacgggaggaaattgaatggagccaccgttcttcttcgctatgttggtcgatcagcgaaaaagcttcctgatttctatggcaacaatgcttttgattcttctcagattgatgagtgggtagattacgcatctgtcttctcttctggttcaaagtttgagaatgcttgtggtcgtgt

SEQ ID NO: 10092 - DNA, 416 bp, Arabidopsis thaliana
  Clone ID: LIB24-070-Q1-E1-E1
ctttgatcaattgagagagaaatgaacaccggcggtggccaatacacggattttccggcggtggaaactcacggaggacagttcataagttacgatatcttcggtagtttattcgagatcacatctaagtatcgtcctccgattataccaattggtcgtggagcttatggaatcgtttgctctgtgttggatacggagacgaacgagctagtagcgatgaagaagatagctaatgcttttgataatcatatggatgctaagcgtacgcttcgtgagatcaagcttcttcgtcatcttgatcatgaaaacattatagctataagagatgttgttccaccaccactaagaagacagttcagtgatgtttatatctctactgaattaaatggatactgatcttcaatcaaatcatcaga

SEQ ID NO: 10093 - DNA, 412 bp, Arabidopsis thaliana
  unsure at all n locations
  Clone ID: LIB24-070-Q1-E1-E12
acgcgtccgcccacgcgtccggttctgattactgattcttcattgacggtaggagtcaccacttttggcggcgattccttgttctctattttttttgcacaagcaacatttagcttctgcaaactccagttcatctctcanccctcatatcgccgtgttttctcgctctagtaccgcgagctcggacgaaccaggaagcaatccgttaatctagaagcggtgttgagaagatgacgattacatcaaatatctctgtacagaacgataacctcgttgttcaagggaagactatccttaccaaaatccctgacaacattatcctaactccggttaccggtaatggattcgtttccggttcatttatangcgcgacgtttgaacaaagcangagtcttcatgtgttccccatcgg

SEQ ID NO: 10094 - DNA, 413 bp, Arabidopsis thaliana
  unsure at all n locations
  Clone ID: LIB24-070-Q1-E1-B3
aagtttgatttatttagagagataagttaaaaaaaaaatggtcggtatggatttgttcaaatgtgtaatgatgataatggtgttggttgtctcttgtggtgaanctgtttctggagctaagttccatganctttatcggtcaanctgggctatggatcattgtgtcaacgaaggcgaagtcacaaaactcaancttgacaattactctggagctgggtttgaatcaagaagcaaatacttgtttggtaaagtctctatccangattaagcttgttganggtgattcagcaggaacagtcactgctttctacangtcttcanatggnccgaaccacaacnaattcgattttgagttcttanggaacactaccggcgagccttacatantccangaccaaatatcctacgtnaaa

SEQ ID NO: 10095 - DNA, 429 bp, Arabidopsis thaliana
  unsure at all n locations
  Clone ID: LIB24-069-Q1-E1-E3
tctcttaaacttatagacaagaatcaatcagtcacacgtctataccacgatttgctcacaaaatctttggcttccaccaaagattataagcagagatcattcacttacncgtatcaatagatcaaatcttcatcacaatagaagaaatggttttagagacggtttcaaagacggaaccaccaccgttgcttggacctcgtatctccttctcatctgatttatctgacggtggagatttcatctgcatcacccccgtaatgtgtaaggaagatgtcgtcaaagggtcagtgaaagtctccgactttgagttcttgtcgtcggaaaatgtgagtccacaagagaatgcttaccgccgatgaactcttctccgaaggtaaattgctcctttttggnaagttaaagcactcaggagnaacctaaaaacaatta

SEQ ID NO: 10096 - DNA, 413 bp, Arabidopsis thaliana
  unsure at all n locations
  Clone ID: LIB24-069-Q1-E1-F11
acgcgtgggcggacgcgtgggtttcctctcccaacattgctaaagaaatgcatgttggtcatcttagatcaactatcattggtgacactctagctcgcatgctcgagtactcaaaggttgaagttcttcgcagaaaccatgttggtgactggggaacacagtttgggatgctaattgagtttctctttgagaaatttcctgatacagagagtgtgaccgagacagctattggagatcttcaggtgttttacagagaatcaaaattgaaatttgatttgaatcctgagtttaaggaaaaagcacaacaggctgtggtccgtcttcanggtggagatcctgtttaccgccaggcatgggctaagatttgcgaaatcagccgaaacgagtttgccaaggtttacaaacgccttcga

SEQ ID NO: 10097 - DNA, 496 bp, Arabidopsis thaliana
  unsure at all n locations
  Clone ID: LIB24-069-Q1-E1-F4
ntgttacgcctgcctttaccgggccgagaattcccggatcgacccacgcgtccgatggtataacactgcttattcacttgagaagataaccaaattcaccattcaggagtggatgcagtcagcccctgatgtaaacctgcttctaccaacacctaatgtcttcattcctacggatttttcattaaaggatttaaaggataaggatatctttcctgttttgctgagaaagacatcatactcaagattgtggtataagcctgacacaaagttcttcaaaccaaaggcatacgttaagatggattttaactgcccccttgcagtcagctctcccgacgctgcggttctttcagatatttttgtttggttgctagtggactatttgaatgaatatgcttattatgctcaggctgctggtcttgactatggattaagtctttcgggacaatggctttgagctctctcttgcctgggctttaatcacaaatttgaggatctt

SEQ ID NO: 10098 - DNA, 451 bp, Arabidopsis thaliana
  unsure at all n locations
  Clone ID: LIB24-069-Q1-E1-G2
acgcgtccgagctgtttnnnnnnnnnnnnnnnnnnnnnnnnnnnnnnnnnnnnnnnnnnnnnnnnnnnnnnnnnnnnnnnnnnnaatagtgtgatgatgcaatgagaatggagttgatttcagtgattttcttcttcttttgctctgttttgagttcctctgctttaaactctgatgggttggttttgatgaagtttaaatcctctgttcttgttgatcctctgtctttattacagacatggaattacaaacacgaaagtccatgttcttggagaggaatctcttgtaataacgattctaaagtcttaactttgtctcttcccaattctcaagcttcttggttcgattccttctgatttgggttctctcttaacacttcaaagtctccgatctttccaataattccttcaatggggccattaacggtttctttcctcaaacgctaganaag

SEQ ID NO: 10099 - DNA, 439 bp, Arabidopsis thaliana
  unsure at all n locations
  Clone ID: LIB24-069-Q1-E1-G3
gaaagannaaggcgaagaatacgcagaatccatccaatttacggttanggctgcccctaatcnggaaacctttgcctcgtttctgatctgttttccggatccgacttgaaggaaanaagacgacgacgcactaccancaaacatgggcgcgaattcgcgtccaacggatgcaaccctcgatctagatgagcagatctcgcagctcatgcngtgcaagcctctctccgagcaacaggtcagagcattatgtgagaaagctaaggagatcttaatggatgaaagcaacgttcagcctgttaaaagccctgtgacaatctgcggtgatattcatggacagttccatgatcttgcanagcttttccgtantgggggaaagtgtcctgataccaanctanctgtttaagggagactaagtcgancggtggatataatccgtggg

SEQ ID NO: 10100 - DNA, 405 bp, Arabidopsis thaliana
  unsure at all n locations
  Clone ID: LIB24-069-Q1-E1-H11
ctcacaaagaacaacaacaaccaaaaaaaaaagatatcattattttcttcttctcttctttcttcttcaaggaaccctccaagagaacatacacagagaaacctaattccttgtctgctcataacttcacaagtagnnnnnnnnnnnnnnnnnnnnnnnnnnnnnnnnnnnnnnnnnnnnnnnnnnnnnnnnnnnnnnnnnnnnnnnnnngagacacaaaacagaggagataacagagtggagattttcaagaattggtaatgagaagaatcttaaagttccaaagtttttcagagtcaacaaccttctgaggccangagttnnnnnnnnnnnnnnnnnnnnnnnnnnnnnnnnnnnnnnncttttgtataacttgtcgggtgagaatccaaatctgaataaana

SEQ ID NO: 10101 - DNA, 391 bp, Arabidopsis thaliana
  Clone ID: LIB24-069-Q1-E1-H3
aaatccggaagagatcaagggaaaagaacgttttctttccttgcggttaacgatggatcttgtccagcgaatcttcaggttatggtggatccgtctctctatgatgtctctaacttggttgctacgggaacttgtgtgactgttgatggagttttgaaggttccaccgaaaggtaaaggtacgcagcagcagattgagcttaacgttgtgaaggtgattgatgttggaacggtggatgcgtctaagtatccacttcctaagactaagttgactcttgagactttgagagatgtgcttcatcttcgttctagaactaactcgatctcagctgttgcaagaattcgtaatgctcctgcttttgcgactcacaatttccttcaagaacataatt

SEQ ID NO: 10102 - DNA, 432 bp, Arabidopsis thaliana
  unsure at all n locations
  Clone ID: LIB24-069-Q1-E1-H6
acgcgtccgcacattccctcttcacaacaacagcttcgtattcgctcatcttcttcgctttctgatcttggaaatcgcaggcattgttcgtctactcgaggatttcaattttggtcatnnnnnnnnnnnnnnnnnnnnnnnnnnnnnnnnnnnnnnnnnnnnnnnnnnnnnnnnnnnnnnnnnnnnnnnnttaaaccggcggttcgtatttccgacgggaatctaatcatcaaaaaccggacgattctaaccggtgtaccagataatgtcatcacgacgtcagcatcggaagctggaccggtagaaggagtcttcgtcggagctgtatttaacaaggaagagagtaaacacatcgtaccgattggtacgcttcgcaattcccggtttangtcntgtttccggtttaagctctggtggaatggccaagagaat

SEQ ID NO: 10103 - DNA, 475 bp, Arabidopsis thaliana
  unsure at all n locations
  Clone ID: LIB24-070-Q1-E1-A3
aagctgtcagcatgcctgtnaagntccanggtcgacccacncgtccgctcatggtgaaagcaccaaaccaaggttgcccagaattaattctgctgagtccatggagttatgggctagccaacagaagggaaataagctctatcttgttttgattaagtcttcatggtctcatacgtggtgaaaacatggagctcggccgcgactctgacaccggtggacaggttaaatatgttgtggaacttgcacgtgcactgggttcaatgccaggagtttatagggttgacttgcttactagacaagtgtcttcaccangatgttgactatagttatggtgaacctacggnaatgctgactcctaaanattctgangatttctcggatgagatgggggagaagtagcggtgcttatattggtgaggataccattttggtccaaaaggacaagtatantccaaaaagaacttctatgggcctc

SEQ ID NO: 10104 - DNA, 400 bp, Arabidopsis thaliana
  unsure at all n locations
  Clone ID: LIB24-070-Q1-E1-A5
acgcgtccggaaaagagtaaaaaagcacatggcctcattaccattggggcctcagcctcatgctcttgctccgccgctgcagcttcacgacggcgacnctttgaaacgccgtcctgaattgggttctgataaggnaatgtctgcagctgttattgagggaaatgacgctgttactggtcatatcatttccactactattggaggcaaaaacggcgaaccaaagcagaccattagttacatggctgagcgggttgttggaacaggttcattcgggattgtttttcangcgaaatgcttggaaactggagaatcagtagccattaaaaaggtcttgcaagatcgacgctataaaaaccgtgagttgcaactaatgcgaccaaatggatcatccnaatgtcat

SEQ ID NO: 10105 - DNA, 416 bp, Arabidopsis thaliana
  unsure at all n locations
  Clone ID: LIB24-070-Q1-E1-A6
cttgacccacaccgaaagaaaaagagaagaagagagactttttttcttgggcattcccaagttttcttttttcttcctcttaacactttttttgtgggtatttccctaaaaagaaaactttatttttgttcttagtaaatctgcttttaaattttataaaaatgggaaactgtttgatgggaggaaacaacgttgagaaaatggttaaagaagaagaagtaatgaagaaagaatacaagangaaaagatcgtaaagtaaagatagttttgagaacagatgagttagagaaactcattctttttcagctaaatgccaatggtaacgtcgacggcaaggganaaacaactttgggcttcntttggtgacnttccaagggaattagaaggcggngagatntgccgggaagaacgggctg

SEQ ID NO: 10106 - DNA, 413 bp, Arabidopsis thaliana
  unsure at all n locations
  Clone ID: LIB24-070-Q1-E1-A7
ggtgagacagaataagagagaatttcaaatatcgaagaaatttgggatcttgctgagcagtacaagtaattggattttgaaaatcagtctcactggattcgccgtccgttcgccgtttaaaaatgtctagccgccatgacaaagagaaaggcgtcaatgttcaagtcctcctccgatgcaggccatttagcgatgatgaattgagaagcaatgcgcctcaggttctcacttgtaatgatttgcaaagagaagttgctgtttcccaaaacatcgctgggaagcatattgatagggttttcacttttgataaggtgtttggaccatcagcacaacagaaggatttgtatgatcaagccgttgttccaattgtgaatgaactacttgaangttttaantgtactaaattttgcgta

SEQ ID NO: 10107 - DNA, 407 bp, Arabidopsis thaliana
  unsure at all n locations
  Clone ID: LIB24-070-Q1-E1-B12
gttttccatatactaatggggaggtttcataaatttcctctcctaggtttagttctgttcctcggtctgaccggctcacttatcgccgccaatgagtatgcctgttctagtaccgatatacactttactcgtgccaatttccctaaaggtttcatttttggtaccgcaactgctgcttttcaggttgaaggagctgtaaatgaaggatgtagaggtccaagcatgtgggacgtatacaccaagaaattcccacataaatgtaattatcacaatgccgacgttgctgtcgatttctaccatcgttacaaggaagatatcaagttgatgaaaaatctgaacactgatggctttagattttccattgcatggcccagaatattcccccaaggtaagatgggagaaaggna

SEQ ID NO: 10108 - DNA, 418 bp, Arabidopsis thaliana
  unsure at all n locations
  Clone ID: LIB24-070-Q1-E1-B2
tgaaaaaatacaaaatggcgaaaatctaccggaagttgacaggctacggtggtgaaggagggcgtgaatgggacgatgatgtatatgagggtgtaagaaaagtgtatgtaggacaagatatcaatcgtatcacttacgtcaaattcgagtatgtgaaggaagacggccaagtcgtaacaactgaatatgggaaaatcattcaacaacccaaagagtttgtacttcaatatccggacgaacatatcatagcggtggaaggaaactatcgcggagtggctctatgtgccacagaggtgatcacaaacctcgtcttcaagacctcaaagggtagaaagtcaccactgtttggtccaaacttgcttggaattacgaccggtacaaagttcgttattgangatggaggaaagaaagatcttag

SEQ ID NO: 10109 - DNA, 432 bp, Arabidopsis thaliana
  unsure at all n locations
  Clone ID: LIB24-069-Q1-E1-E12
ttccgtagcctccgaaattccaanggtcgacccacccgtccgggcgaaatcgaagaatcacacggcgcacaatcagtctgccaaggcgcataagaacggaatcaagaagccaaggagacaccgtcacacaccaaccagaggaatggatcctaaattcctaagaaaccagaggtatgcaaggaagcacaacgtcaagagtggcgagaatgctggtgtcnaagagtagatcttttgatcgtctgattgacagtttaagttttttttatgaatttcacttgtttagacaaaggaaccaatgttctacaatcagggattatgtctatccagattctcttanatattttgcatgttacttgatttgatgcaattctttcacttgttcgtttatgttcatgtanacctataatcctgaaagctgaacctgatttncat

SEQ ID NO: 10110 - DNA, 400 bp, Arabidopsis thaliana
  unsure at all n locations
  Clone ID: LIB24-066-Q1-E1-E4
tacagaaagaaagatggtaataacatcctcctctttcgtcctgaggagaatgcaaagcgtatgagaaatggtgctgagaggatgtgtatgcctgctccaaccgttgagcagtttgtagaagctgtgacagaaactgtactagcaaacaaacgttgggttccaccaccaggtaaaggttccttatatgttagaccattgctaatgggaacaggagctgttcttggtcttgcgcctgcaccagaatatactttcattatctatgtttcgcctgttgggaactacttcaaggaaggtgtggcacctatcaatttgattgtggagaatgaatttcaccgtgcaactcctggtggtaccggaggtgttaaaaccatangcaattatgctgcantactgaaaggac

SEQ ID NO: 10111 - DNA, 413 bp, Arabidopsis thaliana
  unsure at all n locations
  Clone ID: LIB24-066-Q1-E1-E6
gacttcacgaagatacgatctcttcggttagaaatgtgaataattggtccggtgcggtttggatcactcccatagccggagcttacatcgctgactcatacatcggtcgcttctggacttttactgcctcctctctcatctacgtcctggggatgattctcttgacaatggcggtaacagtaaaatccctaagaccgacatgcgaaaacggggtatgcaacaaggcctcctcgttacaagtaacatttttctacatatccctctataccatagctattggagccggtggaacaaaacctaacatttccacatttggagcggaccaattcgacagttatagcattgaagaaaaaaagcaaaaggtttcattcttcaattggtggatgtttagctctttcttangcgcgttgttt

SEQ ID NO: 10112 - DNA, 404 bp, Arabidopsis thaliana
  Clone ID: LIB24-066-Q1-E1-E8
gaacgccggcggcgatggcgacggtggcgccgatggcgcgtcagttaatgtcggagatgaacctgattcgtttggtggtcgaataggatctccgaggaggatattcttgttctgcttggcgtttcgtgtggtaaatgcattgttgattcagacttatttcaatcctgacgaacattggcaatcacttgaagtagctcaccgcaccatatttgggtatggttatatgacatgggagtggaaaagaggaatacgaagctatttgcatccaatgttgttcgcattcttgtataaacttctacaagttactggccttgatactccctacataatgatcaaagccccacgtcttatgcaatccatattttcagctattggtgatctctatttgtataaactccctgatg

SEQ ID NO: 10113 - DNA, 409 bp, Arabidopsis thaliana
  Clone ID: LIB24-066-Q1-E1-E9
aacctgatttcacagctccatctggagaatcactgaggcaagtagagtttcgaatggttcagtttctaaacgggacagtctcaggagttgcagagaagcttaggtcagattattcttccactacgaatcacaatgaaactcatgagcgtgatggtggtgtgtcacttgcttcgactaactgggacttactacacaagcatcgtcccagtcttacaaggaagaaatctggtaaaagcaggcttcaagtgatgactaatcacgaacctgacgatggaaactccccaagggaagaagttaatcataatcacactgacctaagtgattcgtcttccttaatctcgaattgtgtcggggttttcacgcattctttgcctataaagtgtcttttaacccggaatcctcggttgca

SEQ ID NO: 10114 - DNA, 395 bp, Arabidopsis thaliana
  unsure at all n locations
  Clone ID: LIB24-066-Q1-E1-F11
acgcgtccgcccacgcgtccggtttttccggttgtccatcggcgttggngcttgctgctttatggggacttgatttggagcaagggaggaaagatgaagagaatcaagttccgatgatggcgatgatgatggataatttcgggatgcagttggattcttgggttttgggatctaatgaattgattgttcccaacgatacgacgtttaagaagcgtggatcttgtgcgatctaanttgtgggangtataagcangtattgtgtaacgcagcttgaggagttgcttaagagtggtgttgtcggtnggtgatgggcgannnnnnnnnnnnnnnnnnnnnnnnnnnnnnnnnnnnnnnnnnnnnnnnnnnnnnnnnnnnnnnnnnnncangatgagggg

SEQ ID NO: 10115 - DNA, 482 bp, Arabidopsis thaliana
  unsure at all n locations
  Clone ID: LIB24-066-Q1-E1-F6
naaactgtttacgccgccccgtaacggtccaaaaattcccgggtcgacccacgcgtccgatttgtttgtggatgcaggactctttgaatgttaagtttaatagaagcagcaatgttgagaatccgtggtttttctttggagtatcttattctggagctttaagtgcttggttccggcttaagttccctcatttgacctgtggaagcctcgctagttcagcagttgttcgtgctgtctacgaattccccgaatttgatcaacagatagctgagtcggctggaccggaatgtgaaactgcgctacaagagactaataaactcttggaactagggcttaaagtgaataacagggctgttaaagctctcttcaatgccacggaggtctagctttactgtttctgttttcttttgtttgaatcttaaggaagtaagaagtctatctccaatctgattaagtttctgaaatccgtagcttggatgttg

SEQ ID NO: 10116 - DNA, 407 bp, Arabidopsis thaliana
  unsure at all n locations
  Clone ID: LIB24-066-Q1-E1-F8
gacgcgtccgagagagagagttttgtgaactcaagaaantnanaaaaagttatagttaatgggattcggcttagagagtatcaaatcaatctccggcggatggggcgcggcggcgcgttcctgtgacgcttggaaatcagttaccgccgccgtgttctgtcgagttgactcagctttcttatgcatagcatgtnacacaagaatccattcnttcactcgccacgagcgcgtgtgggtttgtgaagtttgtgaacaagctcccgccgccgtcacttgcaangccgacnccgccgctctttgcgtcagttgtgatgccganattcactctgctaatcctctcgctagccgtcacgaacgtgtcnccgtcgaaactttcttcgactcagccgaaaccggcgtcgccaana

SEQ ID NO: 10117 - DNA, 402 bp, Arabidopsis thaliana
  unsure at all n locations
  Clone ID: LIB24-066-Q1-E1-F9
gggcggacgcgtgggctctgagatttgtgtaagcattcttctttgagattttccgaggtcacaagtcagtacacaaaggaagttccttttttgggttttggggtctgctttgtgtcagtgattttaggattgcttcatttgccacacatttccaatctcttaagtagttggcggcgaagatgggtttcctgatagggggctcttgcttcgtcccnnnnnnnnnnnnnnnnnnnnnnnnnnnnnnnnnnnnnnnnnnnnnnnnnnnnnnnnnnnnnnnnnnnnnnnnnnnnnnnnnnnnnnnnnngagtaatgtcgccaagttcaagcgccgacgaccaacattggcttctttaaaccaaggaaagatgggtacgaagtatgacgttgcntccgccaaaaagg

SEQ ID NO: 10118 - DNA, 408 bp, Arabidopsis thaliana
  unsure at all n locations
  Clone ID: LIB24-066-Q1-E1-G12
nnnnnnnnnnnnnnnnnnnnnnnnnnnnnnnnnnnnnnnnnnnnnnnnnntttcactagggatatgtctgatgttagtagtagcatcaagtgtgatctatgaagcgcaaggaacgttcttactaaaccattacttgaagaagaattttccaaaaaaaatgcaacgagtttacgccttacgctaacaagggtatgataacgttggtgaccgatctcgaaggtagcagtccggccactacagagttcaagactttctttacacagttcaagtcttacatgtctttcatcgagacaacatcggcctcaacaaaaaatgttgatgccgagatgacagctaaatgtgacggtcttttcaaggccatgtctgcattgagtgctaataaaggcgtcaaatcagccgntgccgggg

SEQ ID NO: 10119 - DNA, 463 bp, Arabidopsis thaliana
  unsure at all n locations
  Clone ID: LIB24-066-Q1-E1-G3
tgttacgcctgccggtaccgntccaaaattcccnggtcnacccacgcgtccgaaattctacaccaaaagcttaaccagatttttcccaagaaaaaacccatccatgaaaccatcatcagcttcaagattttctttaactttctcacactttctcacactctactgtcttctcacacaaacacatgtagctcaaggatctcatcaatggcaatcaccaatcaaaaccgtcgtcgttttagtgttggagaatcgatctttcgatcatctcttaggatggatgaagaactcagtaaacccgacaataaacggtgtaacgggtcattcgtttgaagctgttgagcaacaagtattcgggtctgggccgggtcanatcccgtccatgatgggtttcgttgagcaagcgctttccatgccgggaaatttgtcngngactgtaatgaaaggtttaagcctgnaactgttc

SEQ ID NO: 10120 - DNA, 431 bp, Arabidopsis thaliana
  unsure at all n locations
  Clone ID: LIB24-066-Q1-E1-H1
tctttctcctttcttcactgtagaatccgtcgaccaaacaactagctccaatggcataatgagcattgtagtttgcaanttcttcttccgtgaagaagaagaagatggctttggagaaagaggaagaagcgtcacaaaacggtgcgttttgtgtccttgatgggctctattgcgaggaagaaaccgggtttgtggaggacgatcttgatgacgatggngatttagattttctcgagaaatctgatgagagtgttgtaaantttcagtttttacctcttttggatangttcttatgggatgacgatgacattctgagtttgatttcaaaggaaaaggacacganatccatgttttggggaacaaatnttagatggcttttttgggttcctgtnggaaaagagnggcttaanagttggggttcctaanggggt

SEQ ID NO: 10121 - DNA, 411 bp, Arabidopsis thaliana
  unsure at all n locations
  Clone ID: LIB24-066-Q1-E1-H11
gaatcttgctaccaagcctcttcaaggtccttctgaagtacaggccagaagacaaagctgccaagaaggagcgtcttgtaaagaaggcccaagctgaagctgagggaaagccttctgagtctaagaagcccattgtagtcaaatacggnctcaaccatgtgacctacctcattgagcagaacaaggcccaacttgttgttattgctcatgatgtcgacccaattgagttggttgtctggttgcctgctctgtgcaggaagatggaagtcccgtactgcattgtcaagggcaaatctcgtcttggaacggttgttcaccagaagactgcttcttgcttgtgtttgaccactgtcaaagaacgatgacaagctagaagttcaacanaatcctgggaagctatcaanggcaact

SEQ ID NO: 10122 - DNA, 419 bp, Arabidopsis thaliana
  unsure at all n locations
  Clone ID: LIB24-066-Q1-E1-H4
cgtagaaaccttgaaaatccgagacatccacaatgccgccaaagttggatccgagtcagatcgttgacgtgtacgtccgagtaaccgggggagaagtcggagcagcgagttctctagctcccaaaatcggtccgctaggtctcgcaccaaagaagatcggagaagatatcgcgaaagaaaccgcaaaggaatggnaaggattacgtgtaaccgtcaagctcacagtgcagaatcgtcaggcgaaagtgacggtggttccatcagcagcagcactcgtcatcaaggcgttgaaagagccggagagagataggaagaangtgaagaacattaagcataacgggaacatctcgtttgatgatgtgactgagattgcnaggatnattgagacctagatctaatgctaaggaattgagtggnac

SEQ ID NO: 10123 - DNA, 447 bp, Arabidopsis thaliana
  unsure at all n locations
  Clone ID: LIB24-066-Q1-E1-H6
cggtccaaanactcccgggtcgacccaagcgtccggtaaaactctctctccgtcttcaatggtttacacgatttcaggcgtacgttttcctcatcttccatcgattaagaagaagaattcgtctcttcacagtttcaatgaagatctcaggagaagcaacgctgtctcattctctctgaggaaggactctcgttcttctgggaaggtttttgctcggaagccatcgtatgattctgattcgtcttccttagctaccactgcatctgagaagctccgtggccatcaagantgatagctcttcatctgcctctgatcaagtacaatctcgggatactgtctctgacgatactcaggtgctcggnaangtagacgttcagaaaactgaagaagcccagggaaacagagacactagatnaaacttctgcactctcaacatctgggaagcan

SEQ ID NO: 10124 - DNA, 406 bp, Arabidopsis thaliana
  unsure at all n locations
  Clone ID: LIB24-066-Q1-E1-H9
gatttcgatgacgatagagccgacgcaatcgccgtcttcggagccggaggttcactctggagaggacttcgttcacatcgatgaccctaggcctaccggcgatatctctttaagcgacagcatagttaatgtggagaaggatgaactgctcgacgaagcggcggaggaagaatttagaggctccgattctgtgtttagcggcggcgatggcggtggagcggatgatgatggcggcgagtgttcatcggaggctactaaagtggagctaccggaggaattggcgaaaagtgttgtgattctgacgtgcgagtcaacagcggatggtggatcttgcgatgtgtacttggttggtactgctcatgtatcaaagcaatcctgtcttgaaattgaagcaaataatcancat

SEQ ID NO: 10125 - DNA, 473 bp, Arabidopsis thaliana
  unsure at all n locations
  Clone ID: LIB24-066-Q1-E1-E2
ttntgtacgcccccaaaattccanangtcgacccaggccgtccgtaccttcnaagaaagggagctgcatcaatggcgaccaataatgattttggagctttcattgagaaagttacaatctctccaacttctacttcctcgtcgcctccttctctacagggtcttactttcgccattaaagacatttttgatgtggaaggacacgttaccggttttggtaanccggattggttaaagacacactcggcagctacttctacagctccagtagtttcatctctcttagaagctggtgccacagctttgggtattaccattatggntgaaatggcttacantataaacgggnaaaatgcgcattatgggactccgtngaaacccgattgntttcgatagantgccngngggatcanccgagtggctcanncgnnnccggtaactgcncggcctggtnggagttttccacntgggaaa

SEQ ID NO: 10126 - DNA, 408 bp, Arabidopsis thaliana
  Clone ID: LIB24-066-Q1-E1-B11
cattgttacccaattttgctctgaattctattaaatctcatcggaattattcaaattccttccataaatttcgaaatgacagagcgtggagctatggtggtatcgtcttctacctgttacgttccttttcgatgtcctcaagcaagaaaagattttgctttcgtcgagccgagtaagaagctaaaccctaatcgtgtattgataaagcctccggtttacacgtattctccggcactgacggcggcgaaatgtaacatttttgattacgcggaaactggtgagaatttggtcggcgataagcaatttgtgcggtggtttcgtgaagcttggccttatttgtgggctcatcgtagctgtaccttcgtcgttactatctccggcgaagtcttagacgggccttaatgtgat

SEQ ID NO: 10127 - DNA, 417 bp, Arabidopsis thaliana
  unsure at all n locations
  Clone ID: LIB24-066-Q1-E1-B5
ccaacgaaaggtcttttctagtctagtcacttcacttctacggctactgccatggcggcttctttctcttccactgctcccacgacaccggttcttcgattcagagccaactactccaagcctctcctctctctcccagattcgtgtttgaggataatctcttcggcgatatctccctctacacgcttaattgcgtgttcgttcaagacagacaagcttccgctcggtgccggcgtcaatctctccggtggccccgttgccaagcgctctctacagaagagattggtgataaggtctgctactattgaagaaatagaagcagagaagtctgctattgagactgatgtnaaatcaaagatggagaagactattgaaacgcttcggacgaatttcaactccataagggctggganattc

SEQ ID NO: 10128 - DNA, 418 bp, Arabidopsis thaliana
  unsure at all n locations
  Clone ID: LIB24-066-Q1-E1-B7
ccgaagaggaaatcccgggttcaagaagcgcttaattactatttgatcgagtcatccgtcgcacttttcatctccttcatgattaacttgtttgtgactactgtctttgcaaaggggttttatggaactgagaaagctaataacattggcctagttaatgctggtcagtatcttcaagaaaagtttggaggcgggcttcttccgattctttatatctggggtatcgggttgttagcagccggacaaagcagtacgataactggtacatatgctggacagtttataatgggcggttttctgaatctccggcttaagaaatggatgagggcagtaataacaanaagctgtgctattgtgcctacaatgattgtggcaatccgtgttcaatacttctgaancttccttggatgttttggaa

SEQ ID NO: 10129 - DNA, 409 bp, Arabidopsis thaliana
  Clone ID: LIB24-066-Q1-E1-C10
ttgagaagctcgaacaaattggtgaaggcacttacggtcaagtttacatggctaaagaaatcaaaactggtgaaattgtggctctcaaaaagatacgtatggacaatgaaagagaagggtttcctataacagctattagagagataaagattctgaagaagcttcatcatgaaaatgtcattcagctgaaagagattgtgacttcaccaggtcgggacagggatgaccaaggaaagccagataataacaaatacaagggtggcatctacatggtttttgagtacatggatcatgatttgactggactagcagatcgtcctggactgagatttactgttcctcaaattaagtgttacatgaagcaattgcttaccgggcttcactattgtcatgtgaatcaagtgcttca

SEQ ID NO: 10130 - DNA, 398 bp, Arabidopsis thaliana
  unsure at all n locations
  Clone ID: LIB24-066-Q1-E1-C12
tgaagaaaattgctcaagttgttgtgccgaaacgttacgggaaaggggattatgtggttcgtgaagatcaaacttgggatggatgttattttattttgcaaggagaggctcaggtttccggaccagacgaagaagataaccgttccgaattcctcttgaaacagtatgattacttcggcgttggtttatctgggaacgttcattcagcaagacattgttgctatgtcccagcttacgtgtttggtgttgccgcgtgatcactgtcatttgcttgagacnaattccatctggcaatcggatacgtcacttgacaaatgctctttagtggaacgcattttgcaactcgaccctttagaattgaanatcttcaaggggatcacactacctgatgcncctat

SEQ ID NO: 10131 - DNA, 469 bp, Arabidopsis thaliana
  unsure at all n locations
  Clone ID: LIB24-066-Q1-E1-C4
ctgttacgcctgtncgtacgccccaaaattcccaangtcnacccaggccgtccgaaagttgcaagccactaaatcagatccgacaatgccgaagcaaatccatgatgatcaaggacttccttttgacggcganaaggaatgatgcaaggtctgtgaagatcaagagaagcaaggacattgtgaagttcaaggtcaggtgctcaaggtacctctacacactatgtgtcttcgaccaatgagaaggccgataagttgaaacagtctcttcctccaggtttgagtgtgcaagacctttgaagatcttatgaaatcangatctatcatggttttatanacccttgtcttagatgattttgttttttccctttctgctgtcttttgaactgactatgattcagacttccgttgaatttctttcctagagcttcaagactaaaattatgaattgngatttgtnacttttttttgc

SEQ ID NO: 10132 - DNA, 448 bp, Arabidopsis thaliana
  unsure at all n locations
  Clone ID: LIB24-066-Q1-E1-C9
accgntccaaaaattcccgggtcnacccacgcgtccgnnggacgcgtgggtggatatttaaaagaacgggccgtcaccttttcttgaaggatgaagaagagggaaaaccaccattgcttcgacgcatggtggaagataccgatgattgtcatttcatatctgcactgcgagccttcaaaaggcgggtggcttattcaaatgtgggccatgatcacgttgttggctggaagacggcatccattagacgtgacagtgaattgcctaagtgggaagattctctgaatgagaagtatcctcatattgtttacgaagaactctgcaaggcatgtgatatggaggacataccagaaggcgagaatcattcagacgacatagaagaagaaatgatcaaaggcctctcctctgtctcatgggaaaaagttgatgttagctttcacaattancaagc

SEQ ID NO: 10133 - DNA, 485 bp, Arabidopsis thaliana
  unsure at all n locations
  Clone ID: LIB24-066-Q1-E1-D1
ctgttacgccttcntgtacgcctccanaattcccaaggtcgacccacgcgtccggcgagctcntgaggctgaaacgaaaatccgctcttgtagaaagagaacaagagccgtccaagaaaccacggctggggaaaagttcgaaaagggaaaatgtatttgctgtgctatgttcgacactgagccatgcagtgcttacgggtaagaaaagtccaggccccgctggatcagcagcccggtcaatagtagcgaaaggagctgaggattcaaaaagtagtgaagagaataatagcagcaagttcagatgatgagaatcataaggatgatggagtatcgagttctgaacatgaaacatcagacaatggnaagctaaatggggaagaatctctggtagtagctccaaaatcatcacctgaaatggctgtaaatggattctgagattttaacactctgggctccttaatttgtggctggggnatggaaaaggc

SEQ ID NO: 10134 - DNA, 408 bp, Arabidopsis thaliana
  unsure at all n locations
  Clone ID: LIB24-066-Q1-E1-D10
aggaagaggtaagagagcttggtgataagttaaaatctgcagacattgcgaactttcagcttcaagttgtgctagagaaatcgaatgccgaactactctctgccagatcagccaatgttcatttggaacatgaaatagctaatgtgaaggttcagaaggagaaagagcttttagaagcaatgctgatgatctccatcatgcaaaatgaaaaatctgaattatctaaggcagtggagggtttagaatgtagatacaaggaagctaaagcgatagaagaggatagggataagcaggtcttgagactccgtggagattacgatgagcaggttaagaagaatagtcattcgaacgaagctaatctgaaattggaagctgacttgatgaactactcaagggactcnaagaaat

SEQ ID NO: 10135 - DNA, 409 bp, Arabidopsis thaliana
  Clone ID: LIB24-066-Q1-E1-D12
ttctcaagatcttcagagtctacaagggaagatcaaagtaattaaataagctgaagtaagaggaagtgatgttttctcttatgtctggactatggagttacatgtttagcaagactgagtttaatgtgcttattcttggtatcgacaaagctgggaagacgacatttttggagaaactgaagacgatatactcaatctcggaaggtcttcctcatgatcgaattgttcctactgtggggcttaatattggtcgcattgaagtctccaatgctaaaattgtgttctgggatctgggaggtcagcctggtttgcggtctatttgggaagaaatactatgaagaagcacacgcgttgatatatttgattgatgcaacttgcccaaccccgctttgaagaatctaaatctgct

SEQ ID NO: 10136 - DNA, 465 bp, Arabidopsis thaliana
  unsure at all n locations
  Clone ID: LIB24-066-Q1-E1-D6
gtaacggtccatnaattcccgggtccacccacgcgtccgaaagacgcgtgggtttgcttcttcgtcttcttctctctttaggttcttcaagttcgcaatcctggtttgggtttaggacaaatcagagaagaagatgatgtttggtttagagaaaacgatgactttggagcatgaaattctgaaggagaatcatgagactctgttgaaagattatgagagtcttcaggagaggattaagcatgctgaggaagcttatgaggctattaagttgcatcatgagaacaaagctaaggagcttgaagtgagtaacaaacgcttgcttgaggaatgtatgaaagagagaagggagaaggctaaggttaggaagacttttgaggagatgaaggaagacaatggagagtgagagaactgctattgttgatgagttgaagntcgaagnatcanggggctttgttggggaanaaa

SEQ ID NO: 10137 - DNA, 408 bp, Arabidopsis thaliana
  Clone ID: LIB24-066-Q1-E1-D9
ctgttgtgaataatgcagagccgccgtgagctcaggcgccaccgtaacgaagaacaaacctgaaggagaaaaataagccatgggatgtgcggcgtccaagctcgataacgaagatgctgtacggcgttgtaaggatcgccgccgtctgatgaaagaagctgtctacgctcgtcatcatctcgccgccgctcacgccgattactgccgatcgcttcgtatcactggatctgctctttcctcattcgcctccggtgagcctctctctgtatctgatcaaactccggctgttttcctccatactccccctcctccgctttctgaacaatctccggctaaatttgtccctccacgtttttcgccgtcgcctgctccttctcatgcctcctccgtctggaactgggaaaaatt

SEQ ID NO: 10138 - DNA, 406 bp, Arabidopsis thaliana
  unsure at all n locations
  Clone ID: LIB24-066-Q1-E1-E11
ttgttgaccttctaattatgccatctccgattatcgatttttgtagagcaatcgtattttatcgaagcccttgtttctggttttagtctcttgtctgaaatcaatctcaaaaaggttctgttttttcggggaaatgtgcagcttttgattgtttcattttccgattgtttcagaagaactggaatcgccgtaaagttcgaattttttnnnnnnnnnnnnnnnnnnnnnnnnnnnnnnnnnnnnnnnnnnnnnnnnnnnnnnnnnnnnnnnnnnnntttttggctgttgttgtaatctgggaaagtttgggattttgtatcgatctcagatggtgaaaagacgaagaagtgtgattgttttggggatatgattaaagaacctgaattgttcctggtgttgaaaanaa

SEQ ID NO: 10139 - DNA, 414 bp, Arabidopsis thaliana
  unsure at all n locations
  Clone ID: LIB24-066-Q1-E1-B10
cctcgccggacatgctagaagataacaatccacacccaaacttacccagagagacaatctctgattcacgtccactacaattaccgaatctctccgaagccaccgatcacctacgctagtttcagtggcaattcgaagcttccaatgagtttgttctgtaattcaatcggaaaccctttatccaaaaccattcctttcacacaaatctcacttctttaccttctccaattccaaattccaaaaccctaaattcacaagcttcccacttcgtcaccaatggcggatcgaatcatgtctgaaatcagcatcttcatcagaaatcgatatggtaagaaacanagaaggtatcctttgcaccaaaggagaanaaaagttggtagtcgtatggggacttaagacaacaagaccaccacg

SEQ ID NO: 10140 - DNA, 375 bp, Arabidopsis thaliana
  unsure at all n locations
  Clone ID: LIB24-065-Q1-E1-C4
tcaaaggcaagaccgttacaaatctaacaagataagaatcatctatacaactgcactaaatgttcttggtaaatcaaggaggcctgtggaagctctcaatgtattccacgctatgctgttacaaatttcatcatatccggatatggtagcataccgttcaattgcagtcacacttggacaagctgggcatatcaaggaactcttctatgtgattgacacaatgaggtctccacctaaaaagaagttcaagccancaacacttganaaatgggatccccggcttgaaccagatgttgttgtttacaatgcggtgctcaacgcangtgttcaacgtnnagcantgggaanggccatcccggggtatttgnaacagtt

SEQ ID NO: 10141 - DNA, 340 bp, Arabidopsis thaliana
  unsure at all n locations
  Clone ID: LIB24-065-Q1-E1-C8
acgcgtccgggaaggagcaaagtagaggatttaacaatggcgtcnnnnnnnnnnnnnnnnnnnnnnnnnnnnnnnnnnnnnnnnnnnnnnnnnnnnnnnnnnnnnnnnnnnnnnnnnnnnnnnnnnnnnnnnnnnnnnnnnnnnnnnnnacttccaattctcagattaggtgttcgataaatgagccgttgaaggtgatgatttcgggtgcaccggcttcaggaaaaggcactcaatgtgagctcattgttcacaagtttggtttggtgcacatatcaacaggggatctattgagagcagaggtgtcatctgggacangatattgggaaagagagcaaaa

SEQ ID NO: 10142 - DNA, 422 bp, Arabidopsis thaliana
  unsure at all n locations
  Clone ID: LIB24-065-Q1-E1-C9
aagcgtccggtaaaatcagtgttcttccgacgagtttgttcttcctagcatacaatgttttacaaacgccattgacgaccacgacaggagccaagcctcagtttttgacaactcgagtatctctgagaaaaagctccttggtcgcttcaacacttgtctttccctattatcgacctacgcagtaaatangattacttattgctatcttttanctgatgcantctcgcggcattgtcgcgcctgagaagttactacaanagatcatcggtatttcccagctnagacaatgaccgatccgtgcaantattnaatcncgtacgttngaggttactcttccagctcanggaccacgtgttccacaanccngaatggctgattggggagctgtgcaanagtangnaaaatttgcagaaggcacgcng

SEQ ID NO: 10143 - DNA, 419 bp, Arabidopsis thaliana
  unsure at all n locations
  Clone ID: LIB24-065-Q1-E1-D11
cccgggtcgacccaaacgtccgcccacgcgtccgtactcttcaacatcatccagcccattctatctggggtagcaattggagcagggatgcagagtatggtagcattagtgaacttagcatcttattatgcaattggtgttcctttaggtgtcctccttgtttacgttttcaattttgggattaagggactctggtccggaatgttggntggagttggtatccaancgttgatattgtgttatgttatttacaaaactgactgggaattgggaggttaagaagacaaaccgagcgtatganancgtggactcnaaatttanctgctgtacaatcgactactatctccacaagangatgaagagagaacgtgaacatacaacnaagttaagttagagaaatcttttaagcaaattccnta

SEQ ID NO: 10144 - DNA, 500 bp, Arabidopsis thaliana
  unsure at all n locations
  Clone ID: LIB24-065-Q1-E1-D7
aaactgtttacgcctgcccggtaccggtccaaaaattcccgggtcgacccacgcgtccgggcggacacttaattctaataaacggcggcagaaaatgaactctctgttcaccgccttccgccgcaacctcctcttaaaccctaatcctcaccgcaacttctttcttcatagattgttatcatcatctcgccgttcatccccgctcattcccgtcgagcctctcatccaacggatacantcacccgccgtacccgattctacatgtactccaccgcaacaaaacaccgtctcgaaancccgatctcnctagnatatcgaatcttctcgagaancactggatgttgttcccgggttcgagntctcgagtcangctttanatnnanncgggnatcgaaacgnactgntgaagttgggtcacgcgttngtccatnnggtgaacgttcaanctccgaatgttggcttcantncaggtgttncgaaatnggccgggagcatcaaaa

SEQ ID NO: 10145 - DNA, 413 bp, Arabidopsis thaliana
  unsure at all n locations
  Clone ID: LIB24-065-Q1-E1-E10
angcgtccgcttctttctcaaattagcttttctttatcgtcttcctcaagcgtgagattcgttgtggatatangtttttctccttgattctctggttctttccatgatccaattttaagggtttcacggcttcggtttttttgggtatatctagctctanncgttcgtggtggttttctttctggatcaaagttttctgagatctctgcgatttctgggattcgaaaattgganaattagggcttttttacggtaacagggtttcgaagagcataanataagaatgccttcggtgccctctaagcttcntcctcncctgtcnttgattccttcgntgactccntagcattctggtttgagttcgaatcgtttgnaaacncctgaaaangtgtgagatggcgtgggnaagctaa

SEQ ID NO: 10146 - DNA, 426 bp, Arabidopsis thaliana
  unsure at all n locations
  Clone ID: LIB24-065-Q1-E1-E7
tgctcacatggngctggatgtttgatgatgttggtattccacaagattacaggcacatggagggtttcggtgtccacacctacacncttattgccaaatctggaaaagttctctttgtgaagttccactggnaaccaacttgtgggatcaanaatctgactgatgaaaaggccaangttgttggangagccaatcacagccacgccactaaggatctccacgatgccattgcatctggcaactaccccgagtggaaacttttcatccagaccatggatcctgcagatgaangataaantttgactttgaccccacttgatggtgacccaaagatctgggcctgaaggatattttgcctctgcaaaccggttgggncgcttggttcctgaacagggaccattgacanttttcgttcagtngaaactg

SEQ ID NO: 10147 - DNA, 468 bp, Arabidopsis thaliana
  unsure at all n locations
  Clone ID: LIB24-065-Q1-E1-H2
taccgccccaaaattcccaangtcnacccacgcgtccgnctgccttnttgtggccattacatatgttggccaaaaagcttatctacaagaaaattcattcgtctattgggatatcgaaggctggtattagcggaggtggtagtttacccattcatgttgacaagttttttgaggccatcggtgtgattctacaaaatggttatggtttgacagagacctcacctgttgtctgtgcacggacacttatctgcaatgttcttggctcagctnggcatccaatgcatggtacanaattcaaaattgtagatcctgagactaataatgtactccctcctgntttcaaaggggcattatcaaagtcagaggtccacagggttatgaangggttnttatnangaaccatcgactncaangcangttccnaaaatgagagtngggtggttcaagtccaggagacaacngggtttg

SEQ ID NO: 10148 - DNA, 437 bp, Arabidopsis thaliana
  unsure at all n locations
  Clone ID: LIB24-065-Q1-E1-H4
aaagatctctcaaagaatggcttccgcggctgttgcatcgatggttcttgaccctaaagcatcaccggccttgatggatctatccaccgcagacgaagaagatctctatggccgcctcaaatcgcttgaacgacaactagagttcaccgatatccaagaagaatatgtgaaagacgagcaaaagaatctcaaacgagagctgttacgangcacaagaagaggtcaaacgaattcaatccgtgcctttggtgataggtcagttcatggnnatggtagatcagaacaacggcatcgtccgggatctactactgggctnccaantactangtcaaaattctcancacaatcaantagagaaactcttaaangccttctgccttccggtngctcttcancgtcanntcccaangnccctggttgagggttttgcctccggg

SEQ ID NO: 10149 - DNA, 480 bp, Arabidopsis thaliana
  unsure at all n locations
  Clone ID: LIB24-065-Q1-E1-H6
acgcctacgccgcccgaaacggtccaaaantcccgggtcgacccangcgtccgnccacgcgtccggaagaagcttagcttataatcgaatctaagccgtttcgggaaattctgtttgtaggtgacaaaatcctcttatagggttattcttagctatgaatttcctctgcaatttctttttttccccgccaaaatttctcctgaagcaaatgtagctttttacttgctgaactagggttttgttcgattttgttcctctttcctcgctgattttgtcggaatttctgggtttgggaagagaanttgganntcgttattgattgaaatgaagaagcttttaggaggtccnggaactgtgtntggtcagtnactgagaatcggacaatgttgcttcagcctgctgctttcaatcggggtnatggtctccggctaaaagaagttcnctgttnacactgcttttntgcctacttngatctgcggt

SEQ ID NO: 10150 - DNA, 413 bp, Arabidopsis thaliana
  unsure at all n locations
  Clone ID: LIB24-066-Q1-E1-A10
aaatatcaaagtgtcattaatagaaagacgagaaagaaagaccaaccctgaaacatggctgaagaacaacaaaactcagatcagagcaatggtggaaacgttattccaactcctgaagaagttgctacgttcctgcacaaaactgttgaagaaggtggatgggaaaaatgttgggaagaagagataacaccatgggaccaagggagagccacacctctcattgttcatcttgtcgacacttcctcactcccacttggccgtgctctggtccccggctgtggtggaggacacgacgtcgttgcgatggcaagtcctgaacgcttcgttgttggattggatatttccgaaagcgcactcgcgaaaagctaatggngacttacggctcctcaccaaaaggcagaagttacttttcc

SEQ ID NO: 10151 - DNA, 388 bp, Arabidopsis thaliana
  unsure at all n locations
  Clone ID: LIB24-066-Q1-E1-A2
attcttcattgacggtaggagtcaccacttttggcggcgattccttgttctctattttttttgcacaagcaacatttancttctgcaaactccagttcatctctcaaccctcatatcgccgtgttttctcgctctagtaccgcgagctcggacgaaccaggaagcaatccgttaatctagaagcggtgttgagaagatgacgattacatcaaatatctctgtacagaacgataacctcgttgttcaagggaagactatccttaccaaaatccctgacaacattatcctaactccggttaccggtaatggattcgtttccggntcatttanangcgcgacgtttgaacaaagcaaagagtcttcatgtgttccccatcngtgtattggg

SEQ ID NO: 10152 - DNA, 476 bp, Arabidopsis thaliana
  unsure at all n locations
  Clone ID: LIB24-066-Q1-E1-A3
ctgttacacctgcntgtacgccccaaaattcccaaagtcgacccangcgtccgtctcttttgaccccattactgcttctctttcctcctctcctttggcaacacacacgcttaaggatagtgatggtgatcctgtggctgtttcagtgcaccctggtggggattactttgtttgctcaacctccaaaggtggttgcaagttatttgagcttgtcggaggagcaacaggtattacgatcttagccaaagaactccttcctctccaaaatgctggactacaaaagtgtatggccttcagctttgatgggtctaaattagctgttgggggagtggatggatgtcttagaattatggagtggccaaacctaagtgtaattttggatgagccaaaggcacacaaatccatccgggacatggattttagtctgactcagagttcttanccacaacatcaaccggatgggtnaacctacaaaa

SEQ ID NO: 10153 - DNA, 412 bp, Arabidopsis thaliana
  unsure at all n locations
  Clone ID: LIB24-066-Q1-E1-A6
gacacttctctctctctttctctttgctattcatcttctacagtttcttaaaaattatacnnnnnnnnnnnnnnnnnnnnnnnnnnnnnnnnnnnnnnnnnnnnnnnnnnnnnnnnnnnnnnnnnnnnnnnnnnnnnnncaggatttgttttttccgtttgaggtaaagcagctttgcagttaaagaaaccttgagtatccaatgtccccggaagaggagctacagagcaatgtatcggtggctagttcttcacctactagcaattgcatctccaggaacactctaggaggacttaaagagcataactacttgggtctctctgattgttcttctgttggaaagctctactctctctccccttgctgaagatgacaaaggntacgatcaancctcaaaggtaanggagccctg

SEQ ID NO: 10154 - DNA, 392 bp, Arabidopsis thaliana
  unsure at all n locations
  Clone ID: LIB24-066-Q1-E1-B1
acgcgtgggcggacgcgtgggttctggaactggagtccactgtttaagcttcactgtctctgaatcggcaaagctttagaagaaaatggcatcaggaggtaaagccaagtacataatcggtgctctcatcggttctttcggaatctcatacatcttcgacaaagttatctctgataataagatctttggagggactactccaggaactgtctctaacaaagaatggtgggcagcaacggatgaagaaattccaagcatggccaagaaccgctggtcctcccgttgttatgaatcccattanccgtcagaatttcatcgtcaagactcgtccggaatgagaaaatnataaggttcaatgctttgattttcagaataaggatgaancgatgacc

SEQ ID NO: 10155 - DNA, 396 bp, Arabidopsis thaliana
  unsure at all n locations
  Clone ID: LIB24-065-Q1-E1-B5
cctcagcttctctcctccagtaacttcaaatctctctttgactctgtcgatacgttcctcttcgactgcgatggtgttatatggaagggtgaaacgctcatcgatggcgtctcccaaactctcgaccttatccgttctaagggtaaaaatgttgtctttgtgaccaacaattccgtaaaatcgaggaggcaatacgctgaaaagttccgatctttggggtgtcacntctantactcaggatgagatcttcncttcgtcatttgcggcagctatgtatctcaaagtcaataactttcntaagggncangaaggtttatgtgattggtgcanaanggtgttcttgagggacctggcaggattgcnggtttnacagggtcctggggggtccctgaanaa

SEQ ID NO: 10156 - DNA, 411 bp, Arabidopsis thaliana
  unsure at all n locations
  Clone ID: LIB24-063-Q1-E1-G1
actatcaacatatgcaacgggaagcccaggagagactcggcaaagcgcagcggttaaatcattctttgagaagcatccgaaatctcaaaagtgtttgttgctctttgttcttttagggacatgtatggctattggtgatagtgtcctcactccaacaatctcagttctttcagctgtttctggagtcaanctcaagattcccaaccttcacgagaattangttggtaatcatcggnangtntcancttggtggcganattctcagntccancgttatggtacgcananagtcgccttcattttcggctccaatctccactgcttggcttcnctccatcagtagcattggagtttacaacactataaantgggaaccngcgtatagtcctcngcgctttcgcccggtttana

SEQ ID NO: 10157 - DNA, 407 bp, Arabidopsis thaliana
  unsure at all n locations
  Clone ID: LIB24-063-Q1-E1-G12
acgcgtgggagaaaggttatgctgcaagatttgcttttgcagcttctgtttttggtgaaacctcagaagcacttttctggttgcaacttcctcaagccattcgccatctgatgaacaagctaacgagaaggtctccgcagaaaatctcttcccctactttagactcaggagctgatgaagtagctatgccgagtaaaataccatctactggattatcgtcacctgaagccaggaagatagactctatgtgtgatggttcacttagattgatggcttttgagcgaagaagaattacggacgcgtgccaatgaacgtcttccttggcatgaaaaattagacggagaagattgcattcagaaacaagtacacganctgataatcagttgggaaatttgggaagcctgctg

SEQ ID NO: 10158 - DNA, 412 bp, Arabidopsis thaliana
  unsure at all n locations
  Clone ID: LIB24-063-Q1-E1-G3
attaagaanagagaaatggggaaagacggcgaatganacaagaagcgatnaaacaatggcngtgatgagcttaatgaaggatcaacacaatccaantcaacagtttcaagtcaaattcaagganattgagactggtttcaagtcntggttatcanaacagaagttaccggtggnanccgccgttgtcacggccatgggtggtgttcanggagcttttatcggtggtttaatgggaactttatctcctgaaatgcctcaangctgngtantganccctcaaagctatggcttcnctnanncaaaactcaggctcntgttggtgggcctttggttcaagctcggaactttgctgctataactggtgttaatgctggtattgcttgtgttangaaacggattagaaggcaacgag

SEQ ID NO: 10159 - DNA, 409 bp, Arabidopsis thaliana
  Clone ID: LIB24-063-Q1-E1-G4
aaacgcgctgatagctctagtaatgaagctgctgttgctgcaactagttattctgatgaacttgatttccagccttcatcagggaattccgaaaattggatggtgttatcggttaatggcgaaaaacccgctccacgctttaatcatgcagcggcgactattgggaacaaaatgatagtagttggtggagagtctggtagtggcttgttggatgatgtacaggtgcttaactttgattcatgtacatggtccaccgcatcttcaaaagtttacttatcgccgagtagtcttcctctcatgatccctgcttggaaaggccattgcttggtctcttggggtaaaaaagtgctgttggtgggtggaaaaacagatcctagcagtgatagaagtttcagtgtgggcatttgat

SEQ ID NO: 10160 - DNA, 403 bp, Arabidopsis thaliana
  unsure at all n locations
  Clone ID: LIB24-063-Q1-E1-G7
tcttctctgttgtttcgtgccctgagaaaccttgaagcagccatggctcccaaatcgaaagaaaaccccaaaacctcgactccagcaatcgaagatctcttcacttccctccacaaacatatcaaggatactaaatatgaagaagccgtcaaggtcgctgatcaagttttgtcgattgtacctaccgatgaggatgcgatccgatgcaaagttgtggctctgataaaagacgataagttcgatgattatctaatcaaagacgttaagatcaatggtgctctctccgtcattaactcgtttccaatcgatctangttttcacaaggtatagtaattttgctaagatttgaaagttttttggggtctaatggatgtttctcttgataggcgtattgtttaatacc

SEQ ID NO: 10161 - DNA, 408 bp, Arabidopsis thaliana
  unsure at all n locations
  Clone ID: LIB24-063-Q1-E1-G8
anacatatnacanacacaagaaancaccaaaagaccacatatccttccantggccccccttcaacgcaccatctcggatatttcacaccacatttcaatatacancactctaacaaaagaaccatctccaaccgcaaccgcaacaactttgttagccttatcagcgatatccgaagtggnagatgcaaagtgtgagtgttgtggcatgtctgaagagtgcacgccggagtacatacaccgtgtgcgttcanaattctcagggaagctgatttgcgggctgtgcgananagcggtggngggggagatggataagannancaacagtgaagtgctgatggnnaagcggcnagaagangcagtgaaggtacacatgagcgcatgttcncggttcaacnggctaggccggga

SEQ ID NO: 10162 - DNA, 449 bp, Arabidopsis thaliana
  unsure at all n locations
  Clone ID: LIB24-063-Q1-E1-H1
ggtccanaattcacgggtcnacccacgcgtccgnaattatagagatttaagagccatcgatgtgtgtgtgatcttcaatgggtttatgcttagctcaattggctgtaacatgtttgttcctagtaccttttgttctgtctcaagttacagagtttgtaagtatagattgtggttgctcaagtaactacacagacccaagaactggnctaggatgggtttcagattcagagatcatcaaacagggcaagccagtaactttggccaataccaattggaactcgatgcaataccgtangagaagngatttcccaactgacnaataagaagtattgttacagactcagtaccaaagagangaaagcgatncanttgncngaactacattccttaaagggcnggtttgggtattgangaagcctaacccaaaagnttcaactttaccttggggt

SEQ ID NO: 10163 - DNA, 406 bp, Arabidopsis thaliana
  unsure at all n locations
  Clone ID: LIB24-063-Q1-E1-H10
nnnnnnnnnnnnnnnnnnnnnnnnnnnnnnnnnnnnnnnnnnnnnnnttgtcttgctctgttctatttaacttttcttatatataaaaaaaatggcgaaaaatttactagcaatatgtctggtgtttatggttgcatcaagtgtggtttatgaagtgcaagggactttcttgttaaagctttacttgaggaggaagtttcccagacgttgtatcgactttgccccttatgctggcaaaggtatgttgatgctcgtgagcaaccttgaaggtggatgtcccgcaactagagagttcaaacaattcttttcaacgttcaagtcttacatgagctttatcagctcagcatcgatatccgcatcgaaaaacatcgatgtggagatgaatgggagatgtgaattgctttcc

SEQ ID NO: 10164 - DNA, 407 bp, Arabidopsis thaliana
  Clone ID: LIB24-063-Q1-E1-H12
aaatataaggaagagaaggcgtagaatcgattcagaatctgtgaattacgaatccatagagagaaaggttttgcatttgcaacctttctcaaattgggttctgtgcatttccttgcactttggataataggaactaaatctctttctctggttcatcaatggcggatcaaacgaagaagagatacgttacaagcgaggatttgaaaaaacacaacaaacctggagatttatggatttcgattcaaggtaaagtttacgacgtttccgattgggttaaatctcatcccggaggcgaagcagcgattctcaatctcgccggccaagacgtcaccgacgcgttcatcgcttaccatcccggaaccgcatggcaccacttagaaaagcttcacaatggctatcacgtggag

SEQ ID NO: 10165 - DNA, 455 bp, Arabidopsis thaliana
  unsure at all n locations
  Clone ID: LIB24-063-Q1-E1-H4
ccggtgccggtcnaaagtccacggncccanncacgcntccgcnggtgacattggnaagtacattcagatatgncaaagataggactgatgcagaagtagctactattgaggcggctatgctacgtgaagccatagagaagaaacaattagatcatgaccatgtcctgtacatattaggaacgcgtagtatctatcagctcagagaaacttttgttgcttacaagaagaattatggggtcacaattgataaggatgttgatggatgtccaggagatgctgatctgagaagtctattgaaggtggcaatcttttgtattgatactcctgagaaacactttgcaaaggtggtaagagattcgattgagggttttggaacagatgaggattcgttgacgagggcgattgtgacgcgtgcagagatcgatttgatgaaagtaagangagagtatttcaac

SEQ ID NO: 10166 - DNA, 449 bp, Arabidopsis thaliana
  unsure at all n locations
  Clone ID: LIB24-063-Q1-E1-H7
actgttcccctgccggtacaagtccnanaattcccgggtcgacccacgcntccgcggacgcgtgggcggacgcgtggggtcgatatcggcggtgacgatgcggcggcgttaccattctcatcgggaacaacagggttaccaaaaggagttgttttgacacacaagagcttaatcacaagcgttgcacaacaagtagatggagataacccaaatctttacctcaaatcaaacgacgtcatactctgcgttttaccacttttccatatctactctctcaatagcgtcctcctcaattcactccgatccggcgccacggttcttttaatgcataagtttgagatcggtgcgtnattggatcttattcaangacatagagtgacaatagcggcgcttgtnccgccgctagtgatcgcnctagctaaaaaccccgacgggttaattcttangat

SEQ ID NO: 10167 - DNA, 410 bp, Arabidopsis thaliana
  unsure at all n locations
  Clone ID: LIB24-063-Q1-E1-H8
actccgtatctcgatccttggtctcgtctacatcttagctttcatagctcgtctcttcagtgttctccgctacgaatcaatgatccacgaattcgatccgtatttcaactaccgtacgactcttttcctcacagagaaaggcttctacgagttttggaactggttcgattccgagagttggtatcctctaggtcgaatcatcggcggtactctttatcccggtcttatggtcacagctgcgttaatcnactgggacattgcgatttctcccgattcttcgttcatatcccgtgaggtttgtgtgttaaccgcaccgtttttcgcgtcgaatacgactctcgttgcgtannttctttggtaaagagctttgggatacaggagctggtcttgttgctgctgttcctancgcc

SEQ ID NO: 10168 - DNA, 419 bp, Arabidopsis thaliana
  unsure at all n locations
  Clone ID: LIB24-064-Q1-E1-A4
ttttaangaagcaatattttttgtgttttgttttaagttttaacacacaaacacattacctcgaattcgatacgtcatagtaattagcaactatggaacgatgtcgttctggtcatcatcgcatcatttcttattanctctcttcttcgttgatactattttggtgtattttcgttctcgtgctgttatctacgacaagtactacaaatgctttagtgaaaatcccgaaaaacacgaccgttccggcggtaataagtgttcggtgattcaattgtcgatgccgggaataacgacgacatgataacagaagctagatgcgattatgctccctacggcattgattttgacggtggagttgctacgggaagattctctaatggcaaagtccctgggtgatattgtagccggaagagctangg

SEQ ID NO: 10169 - DNA, 415 bp, Arabidopsis thaliana
  unsure at all n locations
  Clone ID: LIB24-064-Q1-E1-A5
cttttattttattttattttgtcttaaagcttttggcgagtttgcttgtgtgtgagtgtgtggttatggactctccgttcaaacctgatgtcgtcagaggtcaagtggctctcatcaccggtggtggatccggtatcggttttgagatctcttctcagtttggcaaacatggagcttctatcgctatcatgggacgacgaaaacaagtcctcgatgacgccgtctctgctcttcgatctcttggaatccaggctattggattggaaggtgatgttcgtaagcaagaagatgcgagaagagttgtggaagcaacttttcagcattttggtaaacttgatattcttgttaacgccgctgctggcaattttctggctgctgctgaagatttgtcccctaangggttcagaacaatctt

SEQ ID NO: 10170 - DNA, 376 bp, Arabidopsis thaliana
  unsure at all n locations
  Clone ID: LIB24-064-Q1-E1-B10
aaaacagcgataaaaccgaaacatcaagcaancaaaaaaaaaagagaagagaaattatttttttttgttttcgttttcaaaaacaaaatctttgaattttatggcaacccgtcttctccgaacaaactttatccggcgatcttaccgtttacccgcttttagcccggtgggtcctcccaccgtgactgcttccaccgccgtcgtcccggagattctctcctttggacaacangcaccggaancacctcttcaccacccaaaacccaccgagcaatctcacnatggtcncgatctctccgatcaagcccgtcttttctcctctatcncaacctctgatntcntccgtgccaccgccgtgttgcatgcggcggccgat

SEQ ID NO: 10171 - DNA, 404 bp, Arabidopsis thaliana
  unsure at all n locations
  Clone ID: LIB24-063-Q1-E1-F8
ttgactcgtgagcatcaccagttttttctttatcagatgcttcgtgctttgaagtatatgcatacagctaatgtttaccatcgtgatcttaaacccaagaacatactggcaaatgcaaactgcaagttgaaagtctgtgactttggacttgcaagagtgtcgtttaatgatacacctacgacagtcttttggacggattatgttgccacaagatggtacagggcacctgagctctgtggatcattctgttctaagtatactccagcaattgacatttggagcattggctgcatcttcgctgaggtattaacagggaagcctttgtttccaggaaaaagtgttgtccatcagttagacttgattaccgatcttcttggcacaccaaaatcagagaccantgctgg

SEQ ID NO: 10172 - DNA, 406 bp, Arabidopsis thaliana
  unsure at all n locations
  Clone ID: LIB24-063-Q1-E1-E1
tagacaagtatgcacattcgctcaagttgatagttaacgcgtcaatctctgggaaaacaaataacattgacgtttgctttcaccggaatttgtcgcgtggaattggaatgtgccctcatagtcgatgggagaaagcctctaaaggttcatgggttcagacaatgtcacccttcgaccataaaatccttgatgttagaagtacctagctctaacaaggtctcattggaagtgtctgctgtagaagaattatttatgcatcgcataagtattcttactccttggtgctgtattactggcttcggcttctacactgagccaatctttagcgttttactacagtagtgcaatggctgttggtattatccttgtcgtgctgcttgttctctttcanggaatgaagcttcta

SEQ ID NO: 10173 - DNA, 433 bp, Arabidopsis thaliana
  unsure at all n locations
  Clone ID: LIB24-063-Q1-E1-E11
tncccgggtcgacccacgcatccggcagcttctcctcttctcagaaattagggttccgtctcaaattacgagcagatctcgtactctctgatgtctgaanatccggagtaccgttgcttcattggtgggcttgcttggacaacgtctgatcgtggtctcagagatgcctttgagaagtatggncacctcgttgaggccaaggtggttcttgacaagttttctggtcgctcccgtggttttggattcatcactttcgatgagaanaaagctatggatgaagctattgcagcaatgaatggaatggatttggatgggcgaactatcactgttgataaagctcancctcatcagggtggtgcaggcaaganataatgatggtgaccgtggtcganaccgtggatatgatcgtgatcgcantccgtccctctggtgg

SEQ ID NO: 10174 - DNA, 414 bp, Arabidopsis thaliana
  unsure at all n locations
  Clone ID: LIB24-063-Q1-E1-E12
acgcntccggacaatgtgggggactgtgctgctagaggtgctgatttatttgaaagtatagctgcagaaatcatcagtgcaatgatactaggtggaacaatggctaagaagtgcaaaattgaagatccatcaggctttatcctttttcctctagttgttcattcttttgacttgattatatcctcaattggtattctatcaatcaagggaacacgtgatgctagtgtgaaatctccggtagaggatccaatggctgtacttcagaaaggatattctctgacaattatattagctgttataacatttggcgcgtcgactcgctggctgctttacactgaacaagctccatctgcatggttcaatttcgccctatgtgggttggttggcatcatcacagcctatatctttgtctgg

SEQ ID NO: 10175 - DNA, 408 bp, Arabidopsis thaliana
  unsure at all n locations
  Clone ID: LIB24-063-Q1-E1-E2
ttttgttgagaatgctgatgtctatttgcatggaatcaaaggctttgaagaatttgaagtgagtcattctgtgaatccttttcttcctgagacatctaagggagaagaatgtgaaatagatacacttactgaggcagagaatttaggaattaagcctgaaggcttaagtattggctcagaggtttcttcatcagacaagcttctcgctggagacaaaactgaacctcaaggccaaaccgatttggttgcggtcaaggaatttcccagtgcagagaacatactgatatctaagattaactctgaagatatcggaatgaaagctgaagagggtaaatcatcattagggaatgcacaaactgttgaatcagaaaccttgagagtttctctacctgctgtagattctgtant

SEQ ID NO: 10176 - DNA, 412 bp, Arabidopsis thaliana
  unsure at all n locations
  Clone ID: LIB24-063-Q1-E1-E3
gctttcttcttcttcttcaataatcgatttaggtttttcaaagctaagtgtttgtgttgtgataatgactagtagcgaggaagtagttgaagtgacggtggttaaagcacctgaagctggcggaggaaagttatcacgtcggaagattcggaagaaagacgccggtgttgatggtttggtgaagtgggagagatttctcccgaaaatcgcgcttagagttttgctcgttgaagctgatgattctactaagacagattatccgctgctcttctcaggaaatgtagttacagagttgctgcagtacctgatggcttaaaagcttggggagatgcctaaaaggaaagcctgaaagttgttgatttgagaattaacagaggttgatctaacttcaatatccggatatgcncctgcc

SEQ ID NO: 10177 - DNA, 408 bp, Arabidopsis thaliana
  unsure at all n locations
  Clone ID: LIB24-063-Q1-E1-E4
aactccacaaagactcgatttttatagacggagataacagtagaagcgatttcaggcgagagacaatcaatctgatgaaagctcttctaaatcctgaatcttccttttgtctttcttcgatttcttcctcacagatcaagaggtctttacactttaacggattgagttcttcatgtctccggtttcctttaaccgattttgccggacgtttacggcggcggaagctcactgggtgggttgtgtataaaggcagttttggactctgcaatgatggagcagttagggcttaaggaatcagatgttaagaatccggctttatcttctacttatcggggatcggagattccgaagccaaaccttactgttcttgatgctcaagctangggtttgtacaggtccgactcagac

SEQ ID NO: 10178 - DNA, 401 bp, Arabidopsis thaliana
  Clone ID: LIB24-063-Q1-E1-E5
cacctacctccctccagcttcgtctcgctttgagctccggcgtgcgtcggaaatctcccgccgtttacttacgaccatcgcgattggctaggaaatcgggttatggaattgtctgtgtttcgcagaagcctgaagttgatgcgtggaccggatcggattcgtcaaagtcgtcggctgataatttggctgggtgggatgattccgataacgatgacaagaagtcttccagagttaagaagaagagtttgattgaaggtgtagttggggctggagtggctggaatcattttgtttcttgggctaagctatgcagcagcatcttttagcaagcgaacaaaaaaacaggaaatgcattcgttgacttctcagcaggaaagcatgattcaatcatctgatgaaatt

SEQ ID NO: 10179 - DNA, 403 bp, Arabidopsis thaliana
  unsure at all n locations
  Clone ID: LIB24-063-Q1-E1-E6
actctgcttgcacatgatcccgatccagctgctagctcatcgcagaaaacctttcaggttcgagttgatgaacaacaatttggcactttgggtataaactgctccattgctagacctaaacacgaagtgtccaccangacgcccttcatacctcactttcatggtggcgcattgggcgatggtatattcaaaggtgaattgcctgattgtctctcagatgatgctttgaatgcactgatggaggctgtctccaaagatgaattgcctgagcatgtcttagatgatgctttgtatgcacgggccggtggtatcttccaaggtgaattgcctgattggccctcagatgatgctttgaatgatggaaaacgattttacatgctgaaggaatcagagtggcaggcca

SEQ ID NO: 10180 - DNA, 416 bp, Arabidopsis thaliana
  Clone ID: LIB24-063-Q1-E1-E7
tttgttctttgagagacttatttctctctcggtttcttactcttttcggatcagaaatttaaaagcttttaacttttgtcttgctctgtttcatggacactgatttctcaattggtctctgtttttgttgagtgggttgagaagagagatggcgagaagtagatcgattagtggttatgggatatggaaatatttgaatcctgcgtattatcttagaagaccgagacgtttggctttgcttttcattgtcttcgtctctgtttctatgcttgtctgggatcgtattaatcttgcccgagaacatgaggttgaagtttttaagctaaatgaagaagtttcacggttggagcagatgttagaagagcttaatggtggtgttggcaataagcctttgaagactctgaaggatgccccaa

SEQ ID NO: 10181 - DNA, 403 bp, Arabidopsis thaliana
  unsure at all n locations
  Clone ID: LIB24-063-Q1-E1-E8
acgcgtccgatttctttccttatcgatttttctctccgcgaattgttcgttgttttcttctggcacctgattctcatcttctttcttgtggaatctgggttttgttgcggagttttcgaggttcctcatnnnnnnnnnnnnnnnnnnnnnnnnnnnnnnnnnnnnnnnnnnnnnnnnnnnnnnnnnnnnnnnnnnnnncaacctttaaatgccctaattttgaggttctagttgtggtttttaagattaggagcagaagccctttcgactaaagttcatgttagctgcaatttgctgaagtattcacaagttttgttctgttggaagctctatgtgtttccttctgtgattgaaacacagagagaatgattttaccanaagcagtattgttgcacacactcgc

SEQ ID NO: 10182 - DNA, 419 bp, Arabidopsis thaliana
  unsure at all n locations
  Clone ID: LIB24-063-Q1-E1-F10
acgcntccgattcacaaaaacttttcttcagattcacaatctcatcacaacccttcaaaaagagaaaagatctaaagaataaacaagagccctaatatcaaatcacaaccaaaaaaaccaaagaaagctaattaaagttttctctctagctattcctcttcttttcttgttcttgaaaactagggtttacttcaccaaaagataagatctttccccagaaaaagcaatacccaagtcatgtttctgtgtgtctgtatatagataaaacattacataccctaataaggttacacaaatagctataaaagagggaaaatangatagggattttttggggtgaggaaagatgggaagaggaagagtagagctcaagaggatagagaacanaatcaacagacaagtgacgtttgctaaaacgt

SEQ ID NO: 10183 - DNA, 407 bp, Arabidopsis thaliana
  unsure at all n locations
  Clone ID: LIB24-063-Q1-E1-F11
ctctcttttgttctttttttttcaacttcatcagtctcttaactcaccatcacaagaacaagaaagatgaagagaggatacggagaaacatgggatccgccaccaaaaccactaccagcttctcgttccggagaaggtccttcaatggcggataagaagaaggctgatgatgacaacaacaacagcaacatggatgatgagcttcttgcngttcttggctacaangttcgatcttctgagatggctgaagtancacagaagcttgaacaacttgagatggtcttgtctaatgatgatgttggttctactgtcttaaacgactctgttcattataaccccatctgatctctctaacngggtcnaagagcatgcnttctgaacctgaacaacccggnttcttcggatct

SEQ ID NO: 10184 - DNA, 407 bp, Arabidopsis thaliana
  Clone ID: LIB24-063-Q1-E1-F2
acgcgtccgatttatacaatatttatattttagttttgtatcctggcctgagaattgctggtcacgtagaaaatccctcagagatctgtaaacaaagtagaatagttgtccattagcgttttatcagtcctacggcaaggaagcttaatccgtcattcctcattgcctcttccatttttttaatgtttttatatgatcttgaaggtgtggtgctaggcagtcaggagatctagactcttctaatgaagaagcacttgacggaatacttggatttgggaaagctaattcttccatgatttcccagctggcctcatcagggagagtgaaaaagatatttgctcattgcttagatggaagaaatggaggtggtatatttgctattggacgtgttgtgcaaccaaaagtaa

SEQ ID NO: 10185 - DNA, 403 bp, Arabidopsis thaliana
  unsure at all n locations
  Clone ID: LIB24-063-Q1-E1-F5
acgcgtccgtaacaaattaaagtctacgttgagatatggctttaaaaacatggaagccattcataactgttgtttctctacaatttggatatgctggattgtcgatcatagcgaaattcgcactgaaccaaggcatgagtcctcacgttctagcgtcgtatcgccatatcgtcgctacaattttcattgctccatttgcctatttcttggatagaaaaatacggccgaagatgacgctatccatcttcttcaagatattgttgcttgggttattggaaccaacaattgatcagaacttatactacactggtatgaagtacactccgcccactttcacagctgcaatgacaaatgttcttcctgcctttgcctttattatgggcatgggatctttagacntgag

SEQ ID NO: 10186 - DNA, 489 bp, Arabidopsis thaliana
  unsure at all n locations
  Clone ID: LIB24-063-Q1-E1-F7
actgttgcccctgccggtacaagtccaaaaattcccgggttggatctaacccgacccgttaatccacttgtggaggcttttgacaccgctgctgagattagtgctcgccgtgccacggagcctatttacgctgtttggaaaacgaagcgtgtgttgaacgtgggaagcgagaggaagcttagggaagcgatcaggaccgtgcacgtgttggtctctgagattgtcagagctaagaagaagagtcttgagatcggaaccggagcagaagcaaagcaagatcttttgtccaggtttccaacccgccggccaacaancggcgaaagccagttgaggggacattggtttattagntttatcatgggcggggaaagaanatacaaacgtcaagcagccgatgaacgttggctggtttttgggtttgttgactgagaaacaattgacgttggaancngaaagattttagaaagaagttggacccngttggtgagt

SEQ ID NO: 10187 - DNA, 402 bp, Arabidopsis thaliana
  Clone ID: LIB24-063-Q1-E1-D5
tttgtctttcaatgttgtagttggacgggactttgttgtgcctgcatactcaaaggtttccctacttcaacagccaacgacagaagacagtgatgaagagctggaatatgctgatagtagcagcgggactgcggatcatttgtcaggcctaaatctgcaaatggagtccaaagcatctgagcttggtcctgatggagcaggttacatatgggaagtatgtgaaggggctcatgatgaggagtggaagcattctgttgcaccaatccccaaggataaactttctgagattactcaggccatagacgatgatgacacagatgatgaaagtgtcgtcccgacttctggagagttgaaatctgatgctgatagtattaacactgatgtgaatgatcccaatgatga

SEQ ID NO: 10188 - DNA, 410 bp, Arabidopsis thaliana
  unsure at all n locations
  Clone ID: LIB24-063-Q1-E1-A3
aaccaaacaagaccatatgggcactcgaatactccattttgttatcggctacttccactagcctcctccttcgctgcgtctcctgtttctcnacttcacgattactcgctagattcantgaagcagttgtgagttaagttggagaaaatggntgtgtttgggaatgtttctgcggcgaatttgccttatcaaaacgggtttttggaggcactttcatctggaggttgtgaactaatgggacatatctttagggttcccacttctcaagcgcttaagacaagaacanggaggaggagtactgctggtcctttgcangtagtttgtgtggatattccaangccagagctagagaacactgtcaatttcttggaagctgctaagtttatctgcatccttccgtagtgctcctn

SEQ ID NO: 10189 - DNA, 409 bp, Arabidopsis thaliana
  unsure at all n locations
  Clone ID: LIB24-063-Q1-E1-A4
tctctcactttctctattcatgcgacccaaaaaatggaatctttaatgagactcgtcttagttctgtttccgttcttcgtcgtcttcttcgtacctcttgatcacgtttcttcagaatctatcagcagagcaaattttccagatggatttgtattcggaacagcttcttcagcttaccagttcgaaggagctgtgaaagaaggaaacaaaggagaaagcatatgggacactttcacgaaggagaaaccaggaaagatactggattttaagcaatgcggatactacggttgatnaatatcataggtttcacaatggacatagacctgatgaaaagatctgagaatggatgcntacagattctctatatcttggncaagaatattccctaatggaacangggaagtaaacc

SEQ ID NO: 10190 - DNA, 418 bp, Arabidopsis thaliana
  unsure at all n locations
  Clone ID: LIB24-063-Q1-E1-A9
cganaatatttacctagagaggatcatgaagggttgcagcttacatcttcacctatctccaatggcctctacgcttcaatcttgtcatcaagattctacagttaatgatcgttcttcaaccataagatctanggaaatcantgcattttatagtgggagattaagtgagtacgatcttgtacagatccagatgagagcagtaatagagatggcgagcaaggatcgtgaagtaacagccgttagagttagtgccggtgagactggaatcaccgttaggatgttcggtgaagagatcngtgaaaaggttcttggagaacaggaagaagagaagcaagatcttttacacttacacctaattacacctcanggtacttcctcatcatcntcctctcntcataatttccaatcaataatttna

SEQ ID NO: 10191 - DNA, 413 bp, Arabidopsis thaliana
  Clone ID: LIB24-063-Q1-E1-B3
gaattcagagtcctcctcctcaccagtaaacgaagaagagaacagccagagaatctcaacactccatcaccaaaccatgccttccgatttaactcaagacgaattcacccaactctcccaatcaatcgccgagttccacacgtaccaactcggtaacggccgttgctcatctctcctagctcagcgaatccacgcgccgccggaaacagtatggtccgtggtgagacgtttcgataggccacagatttacaaacacttcatcaaaagctgtaacgtgagtgaagatttcgaagatgcgaagtgggatgcacgcgcgacgtgaacgtgataagtggattaccggcgaatacgtctcgagagagattagatctgttggaccatgatcggagagtgactgggtttagtataaaccg

SEQ ID NO: 10192 - DNA, 394 bp, Arabidopsis thaliana
  unsure at all n locations
  Clone ID: LIB24-063-Q1-E1-B4
tgttatcaaaccaatgcttgacttcttacgtgaaactggttcaagacttatgatcaatgtctatcctttctttgcttatgaaggaaactctgacgtcattcctttagattatgctttgcttagagagaatccaggaatggttgattctggtaatggtttgagatactttaatctcttcgacgctcaaatcgacgccgttttcgcagcaatgtcggctttaaagtacgatgatatcgaaatcattgtcacggaaactggttggccgtcgaaaggagatgagaatgaagtcggagctactctagctaacgcagcttcttacaacggaaacttaatccgtcggatcttgacacgtggaggtacaccgttacgtcctaaagcagatctaacggtcnat

SEQ ID NO: 10193 - DNA, 404 bp, Arabidopsis thaliana
  unsure at all n locations
  Clone ID: LIB24-063-Q1-E1-B6
tctctaacttcttcttcttctcctttcagaaacccagcgaccatcttcttcaccggttatggtgacttcggagggattagcaagcgttgattcttggttatatcgccaaggtttcaacgttgattcatggttgctttctgataccttctctcacgacaacgatttgctcgcaagagctctccataccaccgtcacagcccctcatactctcactccttcctctgctttcttcgattcctccgctgtttctcacccttcttccactaacacactctcctctaccgtctccggtgcttctgatccaagaaatcatcggcggaggagctaaacggaaacgtaactgccttcttaccgacggtaaagccgccaagcgccgcgctcgtgcttccaagaaatctcangac

SEQ ID NO: 10194 - DNA, 404 bp, Arabidopsis thaliana
  unsure at all n locations
  Clone ID: LIB24-063-Q1-E1-C10
tctctcatcttttatttttcttttagaaaccaaacttttcagatttctctctctccatttggcgatagaagaagtcatgtaccaatcatcatcctccangtcatcatcatcgcagagatcatcgcttcccggcggcggaggactgatccgttacggctcagctccgggatcgtttctaaactctgtggttgacnaagtcatcggnagangctcatcaaacgctcgtgacttcaccggctatcaaccgtcgtcggataacttcatcggtaactttttcaccggaactgctgactcatcctcgctganatncgattcgannacttgtggagtcaacanctcatccganggacagaancagctaggcaataacaataataacactagtaatagagatatcttcctct

SEQ ID NO: 10195 - DNA, 405 bp, Arabidopsis thaliana
  unsure at all n locations
  Clone ID: LIB24-063-Q1-E1-C11
taggcacgacgaattcagctgttgctgctatggaaggaggtaaaccaacgattgtgactaacgctgaaggtcaaagaactacaccttctgttgtggcttatactaagagtaaagatanacttgttggtcagattgctaaacgtcaanctgttgttaatccgganaatactttcttctctgttaagaggtttattggtanaanaatgaatgaanttgctgaacantctaagcaggtttcttatagagttattaaagatgagaatggtaatgttaagcttgattgtcctgctattggtaaacaatttgctgctgangagatttctgctcaggttttgaggaagcttgtggatgatgcttcganatttttgaatgataaagtaacgaaagctgtcatcactgtgcctg

SEQ ID NO: 10196 - DNA, 407 bp, Arabidopsis thaliana
  unsure at all n locations
  Clone ID: LIB24-063-Q1-E1-C3
agtgactcaaatcgttcttcccacacaaaaaaaatggttactgcgacagcatcaactccattttcactctcgtcgtccgtggttttcangcgccgtcgtaatttcanacgttttccantttgcgccagtctttctccggaggtttctcctcttctcagancagctcatcanactgtgganaantacgtaaagagtgggatgattattggtttaggatctggacaagcttcaagattttgctatacgttatttgggtcaacaacttggttcnggttctttacanaatgttgttggtgtaccaatgtctgctcgaagtgcnaagtgaagcagcanagtatggaatccccttggaaaattaccgggatggtgttcanattgattttgcatttcatgatgcagaagctgta

SEQ ID NO: 10197 - DNA, 401 bp, Arabidopsis thaliana
  unsure at all n locations
  Clone ID: LIB24-063-Q1-E1-C6
atcttctttgccttcnaaagagagagcttttaagtcgaggaatgatgagccttctcagcgtgtggcttttaaatcgaggaatgatnatccttcncaacgtgtggnttttaaatcgaggaangatgagccttcncaccgtgtggcttttanatcgcggaacnatgantcttctcaangtgatcgacctctttacagtgcagattgggcttgtccnaaatgcgactttgtaaactttgccagaaatgaaagatgccgagagtgcaatgaagtcgctgacagacnacctgttgctgctgttgtcaaggaaggtgacnggctangtcctgagtgtagtttcttaaacttcacaagaaaccaanagctgtctgaaatgcatggcanagggaccaaagaaaancttc

SEQ ID NO: 10198 - DNA, 400 bp, Arabidopsis thaliana
  unsure at all n locations
  Clone ID: LIB24-063-Q1-E1-C9
atnacataataatcctctaagttctcctctctattgaaaacccagaacanaagttgagaacttttcatatttcagatgggcaanaagaancngttgactggngggtcangcaaaactcatggtaatggtantanctacananatcctctgttgcagaatcaggaggataaaccgaaagcgaatggnagcgagaatggtttgaatgatcttgagcatggtgtacttgaggcggcanatgttggatttggcagagtcnttgcgttggcaaancccgatgcnggaaanntagtgattggnaccattgctttgttgataggttcaacaactaatctccttgttccaaagtttggtgggatgattatatacattgtatccagagatgtcaagacgcctgagcanc

SEQ ID NO: 10199 - DNA, 344 bp, Arabidopsis thaliana
  unsure at all n locations
  Clone ID: LIB24-063-Q1-E1-D10
agaaccatcggagaagaggaagaagatcagtgtanagctatcgggaaatttatctgaagaggaaactgaaattgagatcgaanttttgagtttgggtaaaaaatggtaggaggagtagaagaattgagtattgaacagttagcttcnagtatctctacctacaaagaananctcgaacaggttaggcagcttttgtcagaggatccnaggaactcggaatatgcagacatggnaaaggatgcttaagagaggtgattgcattgacagaggaagttcttgccncngcaaagcagantgaggatttctctancagatgccggnngttagngctgaagcaactcctg

SEQ ID NO: 10200 - DNA, 421 bp, Arabidopsis thaliana
  unsure at all n locations
  Clone ID: LIB24-063-Q1-E1-D11
gtcatgattttggttcgacatcttcatacggtccttggatagaatctgaggttgggattactgagtatgcaaaactaggaagcagcaacaaatctcaaggtcancggacattgaatccattggcccgtcagttctctcttgcagatgctaaacaaaanccatatggctatggtaaaaaccaagctgcagatgatttatcnctagtggtgaatactancggtttatacattccagctcgttatagggangaccataatgtattanatgcagacttagcacaatcctcagtaaatgtggagcgttttcttcccaacatgtcacatggcggttcttcacttataactccaaaggcagacagtaactttgggtctactaagtggattgcggtgggagccaaaccctacattttcaagtaaagggt

SEQ ID NO: 10201 - DNA, 424 bp, Arabidopsis thaliana
  unsure at all n locations
  Clone ID: LIB24-063-Q1-E1-D12
acgcntccgctcgtcnacatctttcncctttggtggcaaacacaacgacagatagagagaaacgatggcgtcgaactcgcttangagctgtggcatagccgccgtgtacccttcgcttctctcttcntccaagtcgaaattcgtatccgccggagttccactcccaaacgccgggaatgttggtcgtatcanaatggntgctcactggatgcctggcgagccacgatcagcttaccttgacggttcngctcctgntgactttgggtttgacccacttggacntggggaaagttccagcnaaccttgagagatacaacggagtcaagagctcatccactgttngatgggctangcncgcctgttcctgggattttggtaccagaagcattagnggtatgggaaacctgggttaaaggctcatgga

SEQ ID NO: 10202 - DNA, 408 bp, Arabidopsis thaliana
  unsure at all n locations
  Clone ID: LIB24-063-Q1-E1-D4
ttcagctccccttttcttatccggaaaccaaaaacttccggtgataaaacctccttcgtcatctctctacttcttggataaaatggcgtcaactttcactgccacatcttctattggttcaatggttgctccgaatggtcacaaatctgataagaaacttatcagcaagttgtcttcaagctcatttggaaggagacaaagtgtgtgtcctagacccagaagatccagttctgcaattgtgtgcgcagcaaaggaattacatttcaacaaagatgggactaccattaggagacttcaagctggtgtcaacaagctcgcagatcttgttggtgttacacttggacccaaaggacgaaatgttgttcttgaagagcaagtatggatcaccacnaattgttaatgatggtg

SEQ ID NO: 10203 - DNA, 379 bp, Arabidopsis thaliana
  unsure at all n locations
  Clone ID: LIB24-063-Q1-E1-A2
tnnnnnnnnnnnnnnnnnnnnnnnnnnnnnnnnnnnnnnnnnnnnnnnnnnnnnnnnnnnnnnnnnnnnnnnnnnnnnnnnnnnnnnnnnnnnnnnnnnnnnnnnnnnnnnactcctctcttttcttctccatcccctgtttttccatagacgaacagggtctagctctcctctcatggaaatctcagttgaacatctccggagacgctttatcttcttggnaagcctccgaatcgaatccttgtcaatgggtgggaatcaaatgcaacgaaagangtcangtctcggagatacaactccaagtcatggattttcaaggtccgttaccggcgacgaatctccggncagataaagtcnctgactttgctcagcntaacct

SEQ ID NO: 10204 - DNA, 496 bp, Arabidopsis thaliana
  unsure at all n locations
  Clone ID: LIB24-061-Q1-E1-D4
ctgtttacgcctgctngtaccggcccgaaaattcccgaagtcnacccacgcgtccgaagagagtcnaaacactgtggtataaaaaaatatagacttttagatatgtgtagtaaaataacattantgttaactttattttccanttatttcatatcaacagatgctgtgaatggatcatttcctgcgcttttggcttttggagattcaattctcgatactggcaacaacaattttctcctgacttttatganaggaaatatctggccatatggaaggagtttcagcatganaagggcgacaggaagatttggaaatggaagagttttctctgatatagttgctgaaggtttagggatcaagaagattttaccagcttatcgtaagttgttcaattctccaagtgaccttataactggtgtntgcttcgcatcaggtggtgcangagttgaccctgttacatccanattgctgagagttttaacgccaaagggtcaag

SEQ ID NO: 10205 - DNA, 437 bp, Arabidopsis thaliana
  unsure at all n locations
  Clone ID: LIB24-061-Q1-E1-D8
acgcgtccgaacagaggaaaaaaaacaaaaagctctacggtatttctctcaaacccttaacgacgagagccgtcgctaatcgacgacgtaattcttaggtcgaacggaaaactccgccgctacgtttagtcgaagagatgacttctacttccgctgcgaagatctcaatgtttggtgccaaatctggattcgttatccctaaaaacaaactatctggatcattgatcccaatttttcaacgtggaaacaaaaccctaggaagtgccgattcagacactggacctccgtcgaagctggggaagaaaagaaagactaaatgggctcctgatttgtcacaagatattgcagtcaagaaatgtcgatttttagcttaacaagaaacgcgtggatcaaattacacagcgattggnatctggactcctgaantggagactaat

SEQ ID NO: 10206 - DNA, 433 bp, Arabidopsis thaliana
  unsure at all n locations
  Clone ID: LIB24-061-Q1-E1-D9
attcccgggtcnacccacgcgtccgangcgacgtgctctccaagagtgatcctatggttgttgtatatcaaatgagaaaaagatgcaacactttcagaagttttccgcagtgaagttgttttgaactctttagctccgaaatggattaagaaatttatagtcgcttatcatttcgagactgtgcanacattggtgtttcgtgtgtatgatgttgacaccaagtttcaaaattcaagagaggagatgcttaancttgacgaacancagtttcttggtgaggcaacatgtgcattgtctgagataatcacaanatcaactaggacgagcacattacganctcaagcgcaaagatggctttgctccacaggctcagcctcaccacggaaagcttancatccatgcngaagagtcncttgcttcnaagatttcaaca

SEQ ID NO: 10207 - DNA, 490 bp, Arabidopsis thaliana
  unsure at all n locations
  Clone ID: LIB24-061-Q1-E1-E1
gttacgcctgcntgtaccggcccgaaaattcccgaatcgacccacgcntccgcttcaaaacaaaaagaagaaccatctcttgttaaacactccaaaatcagctacaatgtcaatttcaagagtttatctctgtctaatctttctcacattcgtcagttccccacttgtgctctgctctcgcagcccgaaactcgcagcagcatcagcagcaatagggaagaagcatgggaaagaacatgttcattctccgngcaatgcttttttctgaattcccgaaggttgattcancatcctccatgacacatattgatgagcctgcaacaaantctgcaatagccggttttttcaggtatagactaccattccagggatggcctttccacaagtatgctcctttcccaatgggtacacctacgaatccttccgttcctgntncttcaacaccgtcttctggagctgctgctgctgangaagaggaaaccngagaagt

SEQ ID NO: 10208 - DNA, 402 bp, Arabidopsis thaliana
  Clone ID: LIB24-061-Q1-E1-E11
aaatctctggatctctatgtatagcccaagcgttaaccatcactatcgtatctcgcgggacgtcgtaacctccgattttcatgtcgtccgtcggtgatcgagggattagaaacggcgccaccggaaatagccggaatgtttcggagacgacgttttggaggtaaggaagcactgcgatgtctgattcgtcgattagtcgatcttttccgatcttctcatcgatctccgatctcgccttctccagtacttctggatttctcagtagattcgccatcgcccactctaatgtcacagcggaggtctcaagttccggcgagcatcatcgacttcacaatttcaaaaacaatcagataagagcggttctagctcgatgtgaagtgaaatcgttgctttcgttgggag

SEQ ID NO: 10209 - DNA, 503 bp, Arabidopsis thaliana
  unsure at all n locations
  Clone ID: LIB24-061-Q1-E1-E2
aactgtttacgcctgctngtacggcccnaaaaattcccgaagncnacccacgcgtccggaggctcttcaaagcaattcaatnctcataagacaatattgccggagaaactctctcggggggtcgcttcttctgcattttctgcttcccaatggcttccanaattgctgattctctcttcnccttcacgggcccacagcaatgtcttcctanggttcctaancttgctgcttcttctgctcgtgtttctcctggngtatatgctgtgaagccnattgatcttctgttaaaaggacganctcatcgaagtagaanatgtgtagctcctgtgaaaaggagaattggatgtatcaaagcggtggctgctccagttgcaccgccttcagctgacagtgcagaanacagggaacagttaccagaaagctatggattcagacaaattgggagaagatcttcctgagaatgtcaccttaaaagatatcatgggctacacnttccaaagagg

SEQ ID NO: 10210 - DNA, 490 bp, Arabidopsis thaliana
  unsure at all n locations
  Clone ID: LIB24-061-Q1-E1-E4
gtaccgncccaaaaattcccgaagtccacccacggcctccgatcccttcaacgcctgagaaaccctcaaaaggtcccatgtggagaggagtcatcgttgcttacatcgtcgtagcgctctgttatttccccgtggctctcgttggatactacattttcgggaacggagtcgaagataatattctcatgtcacttaagaaaccggcgtggttaatcgccacggcgaacatcttcgtcgtgatccatgtcattggtaggttaccagatatatgcaatgccggtatttgatatgatggagactttattggtcaagaagctaaatttcagaccaaccacaactcttcggttctttgtccgtaatttctacgttgctgcaactatgtttgttggtatgacgtttccgtncntcgggtgggcgtttggcgttctttggtggattcgcnttttgccccancccanaatacttcctccccttgcngtcagttgggtta

SEQ ID NO: 10211 - DNA, 383 bp, Arabidopsis thaliana
  unsure at all n locations
  Clone ID: LIB24-061-Q1-E1-E5
agatcttagatcgatttctaaagnnnnnnnnnnnnnnnnnnnnnnnnnnnnnnnnnnnnnnnnnnnnnnnnnnnnnnnnnnnnnnnnacccatggctaatcgttatgatccaaatcctttcgctgaggaagaagaagtcaatcctttcgctaatgctagaggagttccacctgcgtcgaattcgagactttcgcctttgcctccagagcctgttggtttcgattatggtcgaaccgtacacattcctcttgacagagctggtacacaggatttgaanaagaaagagaaggaactccaagccaaagaagctgagctaaaacgacgagagcaggacctnanacggaaanaagatgctgctgcacgagctggaatcgtnatttgaa

SEQ ID NO: 10212 - DNA, 401 bp, Arabidopsis thaliana
  unsure at all n locations
  Clone ID: LIB24-061-Q1-E1-E9
acgcgtccgnnnnnnnnnnnnnnnnnnnnnnnnnnnnnnnnnnnnnnncttctggctctgtttccatttctagcgatcgtgatccaactcagctgttgggagctaggaacagatgcattaccgagcggtgggttcgtgaggacgaaaggtgttcagtttagtctcaatggctatccatattacgctaatggcttcaatgcctactggctcatgtacgtagcctccgatccatcccaacggtctaagatctccaccgctttccaagatgcttctcgccatggattgaccgttgctcgaacctgggctttcagcgatggcggttacagggctcttcagtattcccctggctcctacaacgaggatatgtttcagggtttggattttgcgttagctgaggcaag

SEQ ID NO: 10213 - DNA, 453 bp, Arabidopsis thaliana
  unsure at all n locations
  Clone ID: LIB24-061-Q1-E1-F1
tgttagcctgctngtacggcccgaaattcccgaagtcnacccangcgtccgcacaacttaaaatagaaccananagtaaacacttaagcaaaacaattttgtcctactcttaggttatctccantgaagaacttaangatggttttcttcaagatcctctttatctctttaatggcaggattagccagngaaaggatctaagatcaacgtanaagatctccaaaagttctccctccaccatacacagaacaacctccanaccataaagccttctattgtttcttgtcgttnttgtgtggatcctctacatgttaacccgacctaaacccgtttaccttgttgatttctcctgctacgcttccaccgtcgcatcncaangtcaagtatccanaccctaatgggacacgcaagacgtgcaagagatgcaggcatgtgttggnacaacatggagac

SEQ ID NO: 10214 - DNA, 475 bp, Arabidopsis thaliana
  unsure at all n locations
  Clone ID: LIB24-061-Q1-E1-F2
acgangcctgtaccggcccgaaaattccgaagtcnaccaaggcgtccggcgatagagaatctagnagagagagagaggatgggtcatcactcatgctgcaacaagcaaaaggtgaagagagggctttggtcacctgaagaagacgaaaagctcatcaactacatcaattcatatggccatggatgttggagctctgttcctaaacatgcaggtttgcagagatgtggaaagagttgtagattaagatggataaattatctaagacctgatcttaaacgtggaagcttctctcctcaagaagctgctcttatcattgagcttcacagcattcttggtaacagatgggctcaaattgctaaacatctacctgggaagaacagataacgaggtcaagaatttctgggaactcgagcattaaaaagaagcnnnnnnnnnnnnnnnnnnnnnnnnnnnnnnnnnnnnnnnnnnnnnnnnn

SEQ ID NO: 10215 - DNA, 497 bp, Arabidopsis thaliana
  unsure at all n locations
  Clone ID: LIB24-061-Q1-E1-F3
gttacgcctgctngtaccggccccgaaaattcccgaagtcgacccacgcgtccggttacctttttttttggtccgtacgaggaaaaatctaggagacagagcnatttgttcgaaagatgcancttttaaatagctgttgtggaaaaggatttgatgggaagaagaaagaaaaggaagagccatcttggagggtattttcactgaaggaacttcatgcagccaccaacagtttcaattacgataacaaactcggtgaangtcgatttggtagtgtctattggggtcagctatgggatggctcacaaattgcagtcaagaggttgaaggaatggagtaatagagaagagatagattttgctgtggaagtcgaagattcttgctcgtattcgtcacaagaatttgttgagtgttcgtggctactgtgctgaaggacaagaacgtcttcttgtgtacgagtacatgcanaattttgagcttggtttcacatcttcaaggnc

SEQ ID NO: 10216 - DNA, 501 bp, Arabidopsis thaliana
  unsure at all n locations
  Clone ID: LIB24-061-Q1-E1-F4
acgcctgctngtaccggcccaaaaattcccgaagtcnacccacgcgtccgnncacgcgtccgcggacgcgtgggattcagttcctttgtgttgaacttaagaccctagagataaagatttggatnggacaaccttagnacgggcgtggcaacaagtggattctttagctccaacacgatcccaaacttctccncnacctccactctctctccttgcgganttttccaatcaanagaatgcanaaacgtatcgagattgtnnagaacaaccctcncgcccatanncattcccacgcatatcctacgaccaagacccaaacggtagataattgaagtcatttcctttgaaggtcataagacatatccagaaacctgtcgggatcaaacttcagtggattctcccatacattcgggttccnatngattgcccacgcgttgatgaaaaccnttgaatcctttaagggatgggtgaanccgcccaccaaggtgggtttgttaaggg

SEQ ID NO: 10217 - DNA, 403 bp, Arabidopsis thaliana
  unsure at all n locations
  Clone ID: LIB24-061-Q1-E1-F9
aatcagcaaagcaaaattcgaagagacacaaaaaaaccttcgtttgtgtctcagaatttacaaagttttgagtcagtagagaaatggcgggaatcgtgacagagccgtggtcagtacctgagaacggaaacccaagcataacggcgaaaggatcgagcagagaactaagacttggaaganccgctcacaacatgtcttcttcttctttgaggaaaaaatcagacctccgagtgattcanaaggnttcatacaaaagggtcttaaagattttctctctaatctccaagaagtcattctcggaacaaagcttgccattctttttccggccattcctgccgccattatttgcacctattgtggcgtcagtcagccttggatatttggacttagcttgctagggact

SEQ ID NO: 10218 - DNA, 408 bp, Arabidopsis thaliana
  Clone ID: LIB24-061-Q1-E1-D12
acttctatttctccctctccttgtcacaaggaaagggcgtagaagaaccaaaacctaaacaaaagagcaataataactcattaaaaaaccaaaaccaaaaaaaaaacaaaatgggtgtcaaaatgttattaatctttggtctcttgatcttagctatggtagctaaatccgtcaatgcaacctaccctttaaccaaatcttgcatcaacgggcaaggttgcatcggggaagacgatgagctcgaatctctaatggattcagagacaaaccgtcgtcaactcgcaagaggacgtcgttacattggctacgatgctctcaaaaagaacaatgtgccttgcagtagacgtggccgatcctactacgattgcaagaagagaagaaggaataatccttacaggcgtgggatgc

SEQ ID NO: 10219 - DNA, 486 bp, Arabidopsis thaliana
  unsure at all n locations
  Clone ID: LIB24-061-Q1-E1-A4
acgcctgncggtacggcccgnaaaattcccaagtcgacccaggcgtcggcccacgcgtnngcatctgtccgtganagacattcccagccttcattttctcagacgtctgctccttctaacctacctggctatggaacatcagctatagtcgctatggatagaagttcaaatttatcatctggaggatctctttcttctgggttactcctttcgcaatcaaaggatgtcaataaaggttctgaacgtagtctggaaagtgtgttacaatcaagcaagcagaaggtcagtgcaattgaaagtatgctccgaggactgcatatatctgatagacaaaatcctgcagcccttcgttcaagtagtttggatctaggagttgaccctccatcgtctcgtgatcctcctttccatgctgttgctccagcatccaatagtcacacaagtagcgcagctgctgaatcaacacatagtatcaacanaggcagtaat

SEQ ID NO: 10220 - DNA, 444 bp, Arabidopsis thaliana
  Clone ID: LIB24-061-Q1-E1-A8
acgcgtccgtcatcatccttccaatggctattacttgagaactcttctgattaaacatagcaacaacaacaactcttcttctcctctctttctcacttcaatttagcgatggctgcaactgcaatctcttctctttccttcccagctttgggtcaatcggacaagatctccaatttcgcatcttctcgtcctctcgcctccgcaattcgcatctgcacaaagttttctcgcctttctttgaattcgcgttccacttcgaaatctcttattcactgcatgtccaatgttaccgccgatgtgcctcctgtatcagagacaaagtcgaaattcctaaaagcttacaagcgacccatcccgagtatctacaacacggttttgcaggagctcattgtccagcagcatttgatgaaggtataagaaagacttacgttaagatccggtttt

SEQ ID NO: 10221 - DNA, 404 bp, Arabidopsis thaliana
  unsure at all n locations
  Clone ID: LIB24-061-Q1-E1-B12
aatcgagttattttctctctcaattcatcccaaaccgtcgtaaccattctctttcgnttcgtttcgtttcttctcttttaaaaacctttcttcgaaaagatgacgatctctgttgagaagccgatttttgaagaggtttctgcattcgagaagagtggggacaatatcggagagttgaaattggacggaggattttcgatgccgaaaatggacaccaatgacgacnaagcttttttggctcctgagatgaatgcatttggncgccaattcagggactacgatgttgagagtgagaggcaaaagggcgtcnaagagttttacagattacaacacatcaaccaaactgtcngactttgggaaaanagatgagggctgaatangggaaattngataaaatgggtgat

SEQ ID NO: 10222 - DNA, 446 bp, Arabidopsis thaliana
  unsure at all n locations
  Clone ID: LIB24-061-Q1-E1-B3
tcccganatcgacccacgcctccgtctcnctctaatcactctctttcctctttctctcactanagaanaaactaggcgatcgagganaatcatcatcaagaagctactatcangagaaatcaaagccctacaacacannaatcaacatgggagctgangaagaaaccaataaggacatatcctcattggctaaaacctctgctacgagaaaagttctttgtacaatgcanattacacgcanattcacataagagtgaatgtaacatgtactgtttagactgtaccaatggtcctctctgttctctctgcntatctttccacaagngaccatcacgccattcagatctaagatcatcatatcacgatgttataancactgtcgganattcaganagtttctgggacataacaaggagttcagacatatggtgattaaacagttgctn

SEQ ID NO: 10223 - DNA, 495 bp, Arabidopsis thaliana
  unsure at all n locations
  Clone ID: LIB24-061-Q1-E1-B4
tacgcctgcttgtaccggcccgaaaattcccgagtcgacccacgcgtccgcccacgcgtccgcttccaggaagaacagacaacgagatcaagaacttatggaacactcatttgaagaaacgtcttttatctatgggtcttgatcccagaactcatgagccattaccttcatatgggttagctaaacaagctccatcttcaccaacaactcgccacatggctcaatgggaaagtgctagggttgaagctgaggcaaggctttctagagaatcaatgctctttagcccttctttttactctggtgtagtaaaaactgaatgtgatcacttcttacgcatttggaattccgagattggtgaagctttcaggaatctcgctccattagatgaatcaactattactaagtcaaagcccttgctcgagggcaacatcgacctcatctgcacttctgaagagctcaacanattcttgggggagggaaagaaggttaccgttg

SEQ ID NO: 10224 - DNA, 487 bp, Arabidopsis thaliana
  unsure at all n locations
  Clone ID: LIB24-061-Q1-E1-B7
ttacgcctgcccgnaccggtccaaaaattcccgggtcnacccacgcgtccggggtaagggattgatgacaatttgtggaactgaagaaactaggttagattgtttttcttatggggttagagagaggttctggaagaagaataatagaaaatatctagcagactcgggccaggattaccgcaagcacgtttatcttcccgatgatattctggaaatgtgtttgatgaggcttcctttgaccagcttattgaatgcacaccttgtttgcaagaaatggcaatccatggccaacactcagcggtttctccagatgagacgagaaggctcctttcaaacaccgtggttgtttctgtttgctgctcttaaagatggatgctcctctggtgatattcacgggtatgatgtttctcaggacaaatggcataggattgaaactgatctacttaaaggcccggtttatgtactccgtgacgagcatccatgangg

SEQ ID NO: 10225 - DNA, 453 bp, Arabidopsis thaliana
  unsure at all n locations
  Clone ID: LIB24-061-Q1-E1-B9
gaaaccggtccanaaattcccgggtcnacccacgcgtccgcaagagctcgatcttgctcaatctcgtgttaatgttactctctcccgcattgacgcgattgttgagcgagggaattgcatcgaaggcgtgaagactgctttggaatccgaggattacgaatctgctgcgaaatttgtacagagatttctccagattgatttgcagtacaaggattctggttccgatcagagcgaacagcttcacgcgtcgaaggagcagcttgaaggtattgcgaagaagaagctcttggcagcantagaccaagagagatcatcctacaattttgagattcgtgagactgtattccccactgggaatggagacagaaggtctacaagctttacgttggttacttgaaaaaggtcattgcgttgagaggaangatgggatatgaaaatgttgttgagctcatg

SEQ ID NO: 10226 - DNA, 402 bp, Arabidopsis thaliana
  Clone ID: LIB24-061-Q1-E1-C10
atcggtaccggtgttaggaaaatcaatccgtccaattcataattaatggcgaccaccggcgcggcggccaccaccgagattggtaatccagaatataaacagcctcgatcgatatttgacttgacggcggatttctttgactcgtgtcggttgtcgaatccttcggagactcaatcggcattcggaccacccaaaactttcgatccagaggaggcggaggaggataagagttccaaggacggcgtgattttggacagatggacctgtaatacttgtaaaattgagttcctgtctcttcaagatcaacgctaccacttcaagtccgatattcatcgccttaacatcaagctgagtgttgctgggcaaggctatattaaaagaggaagatgttgatgagttgac

SEQ ID NO: 10227 - DNA, 403 bp, Arabidopsis thaliana
  Clone ID: LIB24-061-Q1-E1-C11
aaaccaaacaagaccatatgggcactcgaatactccattttgttatcggctacttccactagcctcctccttcgctgcgtctcctgtttctctacttcacgattactcgctagattcattgaagcagttgtgagttaagttggagaaaatggttgtgtttgggaatgtttctgcggcgaatttgccttatcaaaacgggtttttggaggcactttcatctggaggttgtgaactaatgggacatagctttagggttcccacttctcaagcgcttaagacaagaacaaggaggaggagtactgctggtcctttgcaggtagtttgtgtggatattccaaggccagagctagagaacactgtcaatttcttggaagctgctagtttatctgcatccttccgtagt

SEQ ID NO: 10228 - DNA, 403 bp, Arabidopsis thaliana
  Clone ID: LIB24-061-Q1-E1-C12
ctcttggattcacgtggatgacttggtgaacttaatttacgaggccctcactaatccatcttataaaggagttattaatgggactgcgccgaatccggttaggcttggggaaatgtgccagcagctaggcagtgttcttagccgaccatcgtggctaccagttcctgactttgcactcaaagctttgctcggagaaggtgccactgtagttctggagggacagaaggtattacctgtaagagccaaagagcttggttttgaattcaagtataaatacgtgaaggatgcactcagagccattatgcaataaggtgacacacataagcatctttgtaaaattggttttgatcacagaaaatccccagaaaaacaagatattcttttcttttcgtctctatatctt

SEQ ID NO: 10229 - DNA, 495 bp, Arabidopsis thaliana
  unsure at all n locations
  Clone ID: LIB24-061-Q1-E1-C3
actgntaccctgcttgtaccggcccgnaaattcccgangtcgacccacgcgtccgggagaattgacatctttgtatgagtatattccacgtatgaggaagtcaaatccanaagaggcacaagataatattatcgccaacggggtttccagccagagaacattcaacatattggtatctctgagcggacacctatttgataagtttctgataaacgaagctcttgatatgatcgaagcggctggtggctcatttcatttggctaaatgtgaactggggcagagcgctgatgctgaatcgtactcagaacttgaagttggtgcggatgataagagagtattggatcaaatcattgattcattaactcggttagctaatccaaatgaagattatatatccccacatagagaagcanataagatctcactgaagattggtaaantccagcaagaaaatgagatanaagacaagcctganatgacgaacaaatcaagtgn

SEQ ID NO: 10230 - DNA, 450 bp, Arabidopsis thaliana
  unsure at all n locations
  Clone ID: LIB24-061-Q1-E1-C6
acgcgtccggtgatttcaaacaaacctttaccagctcttctacagcacggagagattcgtcggagatagcaaacatggagaagaaacgcgaaggagtaatcgaaggaatgagtcggatcgtatcagatccttactacttcctccatttcatggcctttttctcttacctcccgattcgtagctccgccgcaccgtacacttctcatcgactcttcgacagagaaatccangcatttctagcgtttcttatgttttccgccattaagatggtgagggaggaaacatgggaagctttcgttgctgatagtttactctatgctaagatctttcttattgcggtttcgttgattatggnnttatcgagtggcggtctggtttagtatcatattttcaagttatatancctaatancctcaacaaccagcatttagtaaactaaggaactgcgaa

SEQ ID NO: 10231 - DNA, 493 bp, Arabidopsis thaliana
  unsure at all n locations
  Clone ID: LIB24-061-Q1-E1-C7
ctgtttacgcctggnccggtaccggtccaaaaattcccgggtcgacccacgcgtccgcaaaaatggctatctcaaagcttattctactcttgtgctctttgttttgttctcttttgatgttagtgttgctcatccaggtctaggatttggatggggaagtaatagtcccattggaggatctttttactcaaatctttacccacaattttaccagttctcttgtccacaagctgatgagattgttatgacggtgctcgaaaaagccatagctaaagaaccaagaatggcagcatctttactcagacttcacttccacgactgcttcgttcagggctgtgatgcatcaatcttgttggatgatagtgcaaccataagaagtgaaaagaatgctggaccaaacaagaactccgttagagggtttcaagtaatcgacgaagatcaaagccaaacttgagcaagcttgtcctcaaactgtctcctgcgccgacattcc

SEQ ID NO: 10232 - DNA, 412 bp, Arabidopsis thaliana
  unsure at all n locations
  Clone ID: LIB24-061-Q1-E1-D10
ctctctgaatctcagtgaattctcataaaatgagagggatggtgagttttgccgtttgggctctctttgctgctttactctcacagcagctctttgcttctgttgcttccgtaaggtttgaggatgccaaaacatactacttatctcctccctctggctcacatggaactcctccatcacacactccaactccacacactccatcacacacgccaactccacacacccctccttgtaactgtggaagtccaccttcccanccttccangccttcacacccttccactccttcgcagcaancgcnatcacaccctccttctnggtgggatattactcatctcctccaancaaangaactccggttggttgtgactccaccatcacncattgttgattcaaggcacacccatca

SEQ ID NO: 10233 - DNA, 441 bp, Arabidopsis thaliana
  unsure at all n locations
  Clone ID: LIB24-060-Q1-E1-H8
ggggccgaaaccctaaatctcgacctcaaaccctgaaccatggctgaaggactcgtgttgaaaggcacaatgtgtgcccacactgatatggtcaccgccattgctacaccggtcgataactccgacgtgattgtaacttcgtcgcgtgacaaatcaatcatcctctggaaactcacaaaggaagacaagtcataccgtgttgctcaccgggaggatgactggtcactctcacttcggtcaagacgttgttctctccnccgattggacaaattcgctctctccgggatcntgggacggtgagcttcgtcnctgggatctcnctaccggagaatctacncgtcngtttcgtttgtcacaacgaanagatgttctctctgtttgctttcngctaacgataaccgttcagattgnctcctgctttctcggtgattntaacgatta

SEQ ID NO: 10234 - DNA, 492 bp, Arabidopsis thaliana
  unsure at all n locations
  Clone ID: LIB24-060-Q1-E1-F3
taccttgccgtgccggtccaaaattcangggtcgacccacgcgtccgaaaaaaaatggtgaactatgtgctcaaaatcaccgctgatctcgagaatctcactaatctccagccttccggtggctgcgacgattccaacttcccttacctcttcaagttgaaatgtgaaagatgtggagaggtgactccgaaagaaacatgtgtgactttgaatgagacttttactcctccgggaggtaggggtacttgtcatcttgttcagaagtgtaagttctgtggaagggaagggaatgtgactatgattccgggcaaaggtcgacctttaactctgggaagattctgaggctggagaaacatgcccctccttatgggtgtttgactgtcgtgggctatgaaaccaattgatttccggattttggtgggatattggaaagctcaagctgaatcctgggnaccaaattttgatgaagattgatttgtccaancggggaag

SEQ ID NO: 10235 - DNA, 433 bp, Arabidopsis thaliana
  unsure at all n locations
  Clone ID: LIB24-060-Q1-E1-F6
ttaaggatttgctcttctgatatgtgagtcttctcangagacttgccgatctttttctcccacanggtgaccatttcgttcatcgataaaatgttgttaggaggactaatgtagagggttttgttcagagtccttanatcatccaccgccttgatcatgaggaacatttttgtcgccaaagatganggccttgtctctagtatgagaaatgagaccanactcgaactgaantaacgtacgcaagtaanaaccggcagagcaattgctancaacgtaagtgtatggtattccttcagcttcaatggctctcctgatctgtaccttccctgcaaatnatgattttgcnggctcaaccgcactggtcntctcancgtctatcccaaactcagccggcaangaatctctgcangagcaaaaactatanatctagttt

SEQ ID NO: 10236 - DNA, 500 bp, Arabidopsis thaliana
  unsure at all n locations
  Clone ID: LIB24-060-Q1-E1-F7
antgttgacgcctggccggtacangtccaaaattcccgggtcgacccacgcgtccgcgcgcttcactgtgaattaatcgagagatctaaatatccgccatggacagagcacaattgatcttgttaggtctacctatattcttgttttgttcggatctcttcaacctcttcactcctccgcctcctaaacctcagcctcaccgtcctcatcagccaccgcatattcctcaccagcatcgtcctaatgcgatcatccccgaaaccctagactttccttcacagaagacaagtggcttangaggagcaattggatatgggaaatacagtagagatcaacttctgcgtctcctgttcttacaagggaactgcagtcaccatgaagaagatgtttagagacggcttttcccggtttaagatgtgattctcgcanatttacccaaccaacangcaccaanaacgccctcctannctaaggttgtgccggtttgttcaagatgggga

SEQ ID NO: 10237 - DNA, 463 bp, Arabidopsis thaliana
  unsure at all n locations
  Clone ID: LIB24-060-Q1-E1-G2
ttcaagggtcgacgnacgcgtccgagagagaagangaacaacaagaagatgagtaataatactaataatacagagatgaataatctagcgatggaagaagaggatgaaggagagattttccttggtgaatccgatgtcctccgnnnnnnnnnnnnnnnnnnnnnnnnnnnnnnnnnnnnnnnnnnnnnnnnnnnnnnnnnnnnnnnnnnnnnnnnnnnnnnnnnnnnnnnctctgttcacacattcactggtcacaaaggtgagctttatgcattggcttgtagtccancagatgctacacttgttgcaactggaggtggagatgataaaagcatttctctggaaaattgggaaatgggagaattgggggctgcngagccttcctggtcacaagggactccntctcttgntntagccntntagccaatggatgggncagtttactttgccttctggaaggntt

SEQ ID NO: 10238 - DNA, 502 bp, Arabidopsis thaliana
  unsure at all n locations
  Clone ID: LIB24-060-Q1-E1-G3
ctgttacgcctgccgtaccggtccaaaattcncgggtcgacccacgcgtccgctcttctctgcgattttagctctagggatcgatttcggcgtcaaacgtcgtcgttttcgaccatctcctacttactactactcagctgcttctgccttctagggttctttctccgttcaccctccgccgcacgagttgtccagctccgccgcattcttctgtctcccagatcaccggctttaagcaaatccggctgcttttcactctaattcgtaaaccacttgtgggatttgagcatcttttacattctccaaaatctctgctttctanggttttgtgagttttgggtgggatgagtagtgtgttcagttgattaagattctggatgataaaccccctaaactcaataagcagtcaacaagtccaaccgaaactcctggtcaacattggtgtataatcaatccggagcaaaagcagaatttgattcgttacgacatggggagaaaacaa

SEQ ID NO: 10239 - DNA, 422 bp, Arabidopsis thaliana
  unsure at all n locations
  Clone ID: LIB24-060-Q1-E1-G5
gttcctgttccttcatctattgatcctatcgttgcagcatcaatcatgctcaagggtatgactgcacagtttctccttcgccgttgcttcaaggtcgaacctgggcacacaatccttgttcatgctgcagctggtggagttgggtctctgttgtgtcaatgggcaaatgcgcttggagccactgtgattggaactgtctcgaccaatgagaaagcggctcaagccaaagaagatggatgccaccatgttattatgtacaagaacgaggattttgtttcccgagtcaatgacattacatcggggtaaaggagtaaagngttgtttaatgaactctgtgggnaaaagacacctttaaggggatcgttagcatggtttgaannagcccaaggatacatggtgaagcctttggggcaaatcctcaa

SEQ ID NO: 10240 - DNA, 449 bp, Arabidopsis thaliana
  unsure at all n locations
  Clone ID: LIB24-060-Q1-E1-G6
acgcgtccggtcttggtagactaaagaatgtagccggaaatgtgaatcagagttttgttcagtgcctccatttctgaggtatgggaagtactgtggactactttacagtggatgtcctggtgagagaccttgtgatggtcttgattcttgttgcatgaaacatgatgcttgtgtccaatccaagaataatgattatctaagccaagagtgtagtcagaagttcattaactgcatgaacaatttcagccagaagaagcaaccgacgttcaaaggtaacaaatgcgacgctgatgaagtgattgatgtcatctccattgtcatggaagctgctcttatcgccggcaaagtcctcaaagaaaccctaactatttatantatatttttccannattccaagttacaattgttccccttttttcccccctcaaggacatttggccttaatttaa

SEQ ID NO: 10241 - DNA, 504 bp, Arabidopsis thaliana
  unsure at all n locations
  Clone ID: LIB24-060-Q1-E1-G7
aantgttgccccgccggtacaagtccaaaaattcccgggtcgacccacgcgtccgcggttttcttatggaatgtttggttgatttgagaaagaatcttatgaaacgaggattgaatcttcttattagaagtggtaaaccagaagagattcttccttctcttgctaaagattttggagctcgtacagtttttgcgcataaagaaacgtgtagtgaggaggtagacgttgaaagacttgtgaatcaaggtttgaaaagggttggaaatagtactaancttnagctcatttggggaagtaccatgtatcacaaagatgatcntccttttgangtttttgacntgccnngatgtcnaaacccaanttccgaactncggtnggaaggctaaatgtangatcangaagnttcaaaccgcatttcaacgaatctcctagggccaanaccntcnngntgaagaantgggggaagaatggttccnactncttgaagaaaacttggggggttgn

SEQ ID NO: 10242 - DNA, 514 bp, Arabidopsis thaliana
  unsure at all n locations
  Clone ID: LIB24-060-Q1-E1-H1
ctgtttacgcctgcccgtaccggtccaaaattcccgggtcgacccacgcgtccgccgaaagcaaaactgccgataaaagttcgttaactcggaagctgaagcatgatgttatcgaaggagtgaatcaacttattcaagagattgctggttgtcatgagcagatcgctgaacaagctatagagcatatacatcaaaatgaggtgatcctaaccctgggtagctcaagaacagtgcttgagtttctgtgtgctgcaaaggagaaaaaaagatcttttcgtgtatttgttgccgaaggtgctccaagatatcagggccatctattagcaaaagaattggtanctagaaggtttgcagacaactgtgatcaaccgactcctgcagtgtttgctaaggatatcctcgagttgaatatggttaataaatttggagctcatgcanttgatgggctaatgggtggaagtttataagggccaagttnggtgtcaacattggctggctccttgcancacaaaaa

SEQ ID NO: 10243 - DNA, 444 bp, Arabidopsis thaliana
  unsure at all n locations
  Clone ID: LIB24-060-Q1-E1-H2
aaaaatcagaagaaacaacagcaacaaggnnnnnnnnnnnnnnnnnnnnnnnnnnnnnnnnnnnnnnnnnnnnnnnnnnnnnnnnnnnnnnnnnnnnnnattttgtaaaaaccaaagcttttctttttcataaatataatttatttcaacacttgtttactgttttttctctgtgaaaattgtcacggatccttcgtttttttttatanactcatagcaaaaataatctcatccccagatttcttacccatctatctatcttcttctctgtctcttaaggggttctgggttttagctgtttgggtttatttggttncgtttctcacttaatgttttgtccttttccaangancagggaacagtgaaagggtcggttttttgggtttccgatctgataatcaacaaggaaaaaanggtttgaanttaagtccggctngggtttga

SEQ ID NO: 10244 - DNA, 419 bp, Arabidopsis thaliana
  unsure at all n locations
  Clone ID: LIB24-060-Q1-E1-H6
acacgtccgcccacgcgtccggtaaaacctttacttctgagcaagacaagaaaaaagaagatattgagcgattatgattcgcgcagctgccaaattctccagagaagcagcggcaacgattcgtggccgcacgatctccgttagaggaaaccttattcgatactcgacgccattgagattgattcacggtgaaatcagcgttccaaacgcgaatcatgttgctattcagatggttaattacgctctttctcacgctaggtcacanaaatcagatgaatcttatgctcaagggatgctantgctntgagcagtgtcttgggaatcancctnacgatgatcanggtttctcatgattctaaagcaanaagtcttgccttgcnaangtcggntccttttagacgaaaagttgggaaatactn

SEQ ID NO: 10245 - DNA, 504 bp, Arabidopsis thaliana
  unsure at all n locations
  Clone ID: LIB24-060-Q1-E1-F1
acgcttgccggtggccgtccanaattcaangggtcgacccacgcgtccgcggacgcatgggcggacgcgtgggttgagactggcttgcttanccgcggagaactcagaactcattcgctgcaaacatggcaagaggtttgaagaagcatttgaagaggctcaatgctcctaagcattggatgcttgataaacttggtggtgcctttgcccccaagccgtcttctgggccacacaagtctagggagtgtttacccttggtccttatcatcangaacaggttgaaagtatgctctgacatacagagaagtganttcgatcttgatgcaaaggcatattcangttgatggggaaaattgaggactngacgaagaacttaccctgccggggttcantgggattgtttgttgtccaatcccccaaanacaaatgnagaaacttcccgtcnttntgtantgacaccaagnggaccgtttccgtctncanctccatcaaggggtngacgag

SEQ ID NO: 10246 - DNA, 407 bp, Arabidopsis thaliana
  unsure at all n locations
  Clone ID: LIB24-059-Q1-E1-C11
cttttcaccgcccttctcatagcanctctcgccgntcctgtgtaatcgggaatcggtaatcgtcagggtcggtttggggtacggcgacccgattttctgattattanggtttaagatctcgaggttgaggagagcttgaaaagttgtttgtcaacatggagcgcaagactattgacttggagcaaggatgggactatatgcagactggaattactaagctgaaacggattctggaaggattgaatgagccagcatttgactctgagcaatatatgatgctttatacgactatctacaacatgtgcacccagaaacctcctcatgattactcacagcagctttatgacaagtatcgggaagcatttgangaatatattaaaccaaacagttttgcccgcgttnaaggg

SEQ ID NO: 10247 - DNA, 357 bp, Arabidopsis thaliana
  unsure at all n locations
  Clone ID: LIB24-059-Q1-E1-C12
caatattacgatatatnaataacacaaantgaactcctaatcagggttcattttataaatttattatttagttattgcggataangaacactaataanatggggatgtcnaaaagtatcaaggttatcttanctcttgctctcgtagtgttcntggcccttgctgcaaccaaggttgaggccacaagntacataacttatcctgctancgatcgtggagatcatgctgtacattgtgacaaagcccaccctaacacctgcaacaagaaagaagcaaatccttaccaagagaggatgcgagaagatnantcgttgccgtggtggataggtggaaaacagtgaattaaccaacccnccc

SEQ ID NO: 10248 - DNA, 452 bp, Arabidopsis thaliana
  unsure at all n locations
  Clone ID: LIB24-059-Q1-E1-C3
aaaaatcccggaacnacccacgngnccganggtttaaancttcgaatctctccctttgcttcgtcatatatctaaatcaccccactcaagatttcaaattccctatatctttgtttttataaattctttctaattttattgtcacatataattgaagcctaataaatcacaccacactgtcttactctgtttttgtttcttctctactctgttttttttttttcccttcaacattgaagataaacttatcttttctctctcaaagactganantttancaaaatggtctcatcgtcntcatcattgttanctccatcttcatatacagagttaaaagatgcntgggaatccancaacaaacagcgaagcacancaggnatcaagctacnggtttaattggngggttatggatctgctgcatatgggtggntatagcgaactgtgatcanagg

SEQ ID NO: 10249 - DNA, 403 bp, Arabidopsis thaliana
  unsure at all n locations
  Clone ID: LIB24-059-Q1-E1-C5
aaacttcaaaccaaaaaaaataaatgggagaggaagannnnnnnnnnnnnnnnnnnnnnnnnnnnnnnnnnnnnnnnnnnnnnnnnnnnnnnnnnnnnnnnnnnnnnnacaagaaagtggatgctgagaaaaaaggagaagattctgacaagaagcctcaagaaggagaatctaacaaagattccaaagaagattctgctccggcggcgcctgaggctccagcaccgcctcctccgccgcaagangttgttcttaangtttacatgcactgtgaaggattgtgctagaaaaagtccgccgttgtctcaaaangcttcgaaggagtggaagatgtgatgactgattgtaaaaacggggaaaagttggtggtnaaaggttgagaaagctgattccaattgganag

SEQ ID NO: 10250 - DNA, 416 bp, Arabidopsis thaliana
  unsure at all n locations
  Clone ID: LIB24-059-Q1-E1-C6
acattcaactttgatttcttgctcttcaagtctctagtgcgtttggatctttccggaaatagtgtttcagtggttggtaccggttcagaaaatttgacacatctagacttgtcgagctgcaacatcaccgagttcccgatgtttattaaggacttacaaagattatggtggttagacatttccaataatagaattaaaggaaaagtgcctgagttgttatggactctgccttctatgctccatgtaaatctctcacgcaactcctttgattccttgggaaggtacgccaaaaataatcctcaattcgtcgatttcggagttagatttgagttcaaatgccttcaaaggatcttttcctattattccaaccttaagtcaacatcaatgggctgcaatcaaataaactaattcacngg

SEQ ID NO: 10251 - DNA, 412 bp, Arabidopsis thaliana
  unsure at all n locations
  Clone ID: LIB24-059-Q1-E1-C8
ataacatctgagagcttggactcagagaaagattcagattcttcaggagaaagttcttaccggcctcaaggcacagacttggcttcttcatctgtgaatgaaactgaggttcctagagagtactacgcggttgcggatgaggaagaacctcttctccaatctgttgagtgtcgtatttgccaagaggaagatagtactaagaaccttgaagctccttgtgcttgtaatggtagtttaaagtatgctcaccgcaagtgtgttcagcgttggtgtaatgagaaaggcgacataacctgtgaaatatgtcaccaagccttatcaacatggatacactgcacctccgcctcctcctcctgatgaaactataattcacatcggtgacgattggganaacggggtttcggttggncct

SEQ ID NO: 10252 - DNA, 506 bp, Arabidopsis thaliana
  unsure at all n locations
  Clone ID: LIB24-059-Q1-E1-D1
tgtttacgcctgcctntaccgggccaaaattcccggaacgacccacgcgtccgcncgacgcgtgggagactatatggcctcccattgctccatgagagtaatcctcctcagattctccaatggcgtctcttccagatccattctcaactccactaaccatcgtcttcttangtcttaccatgaccaacactctctcgtctctttcctcaatctctccccacactactanttcgcatttcacggctgcgtcacaacaatcagatgaccagaactgcttccgcaagcttcanactcagnnaaggatttcgatttcaactcctctttgtatgggtcgtcgttcttccaagatcgctgtccaaagggcnctcaaanatttcaaaggaaaggcgaagctatactgtanaaatttggnangggnngttngtaccctgcntgttcaaagaaanggggggtccaaaaaccaagttttaaaattacganctccgggctaactanttcttggagaa

SEQ ID NO: 10253 - DNA, 445 bp, Arabidopsis thaliana
  unsure at all n locations
  Clone ID: LIB24-059-Q1-E1-D10
ccgtcccggtccaaaaattcccgggtcnacccacgcgtccgcgagttttcgatagcgatgacgacagcgatgatgagatccggtatttggaaaagttgaaatataagagagtctctgtgtgtaatgaggatactgagtctggaaggaagcagttgacgccatctgggattacaaatggagaaaattccggcaagaagaaagctgtgtccgaacaggcgtccgaagacatggattgtgcggaggaaattgaaacggcgtctgatgaaaaagagattggtaatgataataagagggaatcaaccatgactagtcgtcagcgagcccttgcttctggcagatccagcgcgattgatttttcagatggattacctcctacatctaagaagtaagattttaatcctttgctactgccacataaatcttagcaattaagggtcataanggt

SEQ ID NO: 10254 - DNA, 417 bp, Arabidopsis thaliana
  unsure at all n locations
  Clone ID: LIB24-059-Q1-E1-D11
catctctcagtcttcttcttctgctataacgctcttctcaatcaccgtataatcgagtttcgattgtctccgacgaagagaagctgacacttctgggtttcgtcaatttctactgggataaagctctctactacctttttgctcagagaaaatggtttgattttcgaggatgataaaggcttcaggttgttgtagaggtgtttttgccagccttggtgctggtcatggattttatcgcttcttgttatttattatctggttatcaagcttccaagatgtagctgcgcatgataagcttaatgagcatagtagcagatccacaacctctgaattggcaaatccacctggtattgggagtatctggtcccattcaagtatcancgtccgtaatccccaaatatgcatccccggtccaac

SEQ ID NO: 10255 - DNA, 500 bp, Arabidopsis thaliana
  unsure at all n locations
  Clone ID: LIB24-059-Q1-E1-D5
cgccgnccagtaccggtccaanaattcccgggtcgacccacgcgtccgattaaatgcatggatgatttatctatggaacagcaaaagttccagtattactaccggaacctgtctcgtcagcaagcacaacagcaagcctggctccagaagagaagaacggagaacatggctcgtaaatcagctggagaggagcctttaccagaagaggatccttcaaacccaatctttaaggcgatccctgaaaccatcctaaggctagangagttccctcatcaacaaaaccaaagttcncaanactcctggtggccaaaatcaatnggagttggctnggcaaaaatttcangaagggcttaacctngacaaaagcaattgcacgaaccaactgatggnanaagaacaacccaagnttttggttttttgagtcnagaaaanntggaaagaacttgggngggaanaatgggttcctaaatttggtttttccgngggatgtttttgttttt

SEQ ID NO: 10256 - DNA, 408 bp, Arabidopsis thaliana
  unsure at all n locations
  Clone ID: LIB24-059-Q1-E1-D6
acgcgtccgagaaaaaatgtcagccatggaagcactgattctccagctgcatgaaatcggcgccgtgaaattcggcaatttcaagctcaaatctggaatcttttctccggtttacatcgaccttcgtctcatcgtctcttatccatccctcttaacacagatctctcaaactctcatctcttctcttccaccttctgcaaccttcgacgtcgtctgtggtgttccttacactgctctccctatcgccactgttgtctctgtttccaatggtatccctatgcttatgcggcgtaaggagattaaagactatggaacatctaaagctattgaaggaatcttcgaaaaggatcaaacttgtttgataattgaangatcttgtaactagtgggtgcttctgttctcgaaacn

SEQ ID NO: 10257 - DNA, 515 bp, Arabidopsis thaliana
  unsure at all n locations
  Clone ID: LIB24-059-Q1-E1-D7
tttacgccgnccagtaccgagtccaaaaattcccgggtcgacccacgcgtccgnggacgcgtgggctaaaggtttcgactttactgtttctattttcggaaagagagtgcaagattgaaatcgaagatgaaggcggcaacaaggccgatccacgccgtgacgacatgggttcgtcggcaaccaccaaaggttaaaggttttctcggtgttgtctccgccatgactgccctcgttttgttgagagtgattgttcatgaccacgacaatctttttgtcgctgctgaagctgttcattcccttggaatctcccgtcccttaatcctataaaactcaccaaaggaagagggactgtgcctgggattaanctcctcaaaggtcaacaaagaagctaaacaagctcctggttttttggccgggtgaagaactggtattggtagtttttggttgnatgggaantttgaanaattcaacaacgtttacntggacncggctacaattggggggactacactttt

SEQ ID NO: 10258 - DNA, 413 bp, Arabidopsis thaliana
  unsure at all n locations
  Clone ID: LIB24-059-Q1-E1-D9
tttgttgtcgagaataacttgtgggccattgggatgtctcacttgagagccacttctgaccccgagatttggaagaaaggtcctgcatttgggatgcctggtgttcatgttgacggtatggatgtcttgaaggtcagggaagtcgctaaagaagctgtcactagagctagaagaggagaaggtccaaccttggttgaatgtgagacttatagattcagaggacactccttggctgatcccgatgagctccgtgatgctgctgagaaagccaaatacgcggctagagacccaatcgcagcattgaagaagtatttgatagagaacaagcttgcaaaggaagcagagctaaagtcaatagagaaaaagatagacgagttggtggangaagcggttaatttgcaaaacccaantcc

SEQ ID NO: 10259 - DNA, 426 bp, Arabidopsis thaliana
  unsure at all n locations
  Clone ID: LIB24-059-Q1-E1-E1
cgaatctctcttagggcttcgcttatatcgcagatcgaagttcttgtttccaatcgccgaccgtataatctgataataaagtaagatgtctgctactccggaagaagacaagaagcctgaccaaggagctcacatcaatctcaaagtcaagggacaggatggtaatgaagtcttctttaggatcaagagaagcactcagctcaaaaaactgatgaatgcttactgtgaccgtcagtctgtggatttcaactcaattgctttcttgtttgatggtcgtcgtcttcgtgccgagcagactccagatgagcttgaaatggaagatggagatgagatcgaatncaatgcttcatcanactgggttggtggtgctaaaaatggcctgaagctcttctgcttttantggcgggttattttaaanggttttcc

SEQ ID NO: 10260 - DNA, 426 bp, Arabidopsis thaliana
  unsure at all n locations
  Clone ID: LIB24-059-Q1-E1-B9
acgcgtgggaaaatcaaaagtgttacgattcggtatcatcgtctctctcatttgtgattttgtcaaaccctgctctcttttctccaagtgctctcatggtgcttccgctcttccggcgcgctgcgatcgcccggacttcctcgcttctcagagctcgtcttttcgctcctgcctccgaattccattctcgcttttctaatggactataccacttggacgacaaaattagtagcagtaatggtgtgaggtctgcctctatagacttgattacaagaatggatgataagttctccaaagcccattctgcgatttggcgtgcaaaacttttcatctacaggacccatatcacaaacggttcttgcaatgccaaccttgtctcctaanaatgagtcatnggaaatgttgtaaaaatggntgaaaaaaaga

SEQ ID NO: 10261 - DNA, 415 bp, Arabidopsis thaliana
  unsure at all n locations
  Clone ID: LIB24-058-Q1-E1-G11
ttactcactctctctctctctctaaaaacagagctcaacaataatgatccactaaaaaagattctcttttctcttcttctccggtgatttacttacttaacaatcatggcgtcgtcggagggattagcaagcgttgatccttggtcattccgtcaaaacttcaacatcgattcgtggctactctctgattccttctcacacgacagtgatatactcgctaaagctcttcacagatccatctccaanttccancgaatcatcccctctttctccttcatctttcttcgactcttcaaccgccgccgtcgatttttctcctcctcaaactctctccaacgtctctttcggntcagattcaagaantccnccgncgctagtgctcttgggnctcngggaaacnaaaaacgttggtcct

SEQ ID NO: 10262 - DNA, 453 bp, Arabidopsis thaliana
  unsure at all n locations
  Clone ID: LIB24-058-Q1-E1-G5
acgcgtccgatcaatcatcttcaaaagtcaatttcagttctagggttttaatttgatacgaggtcagcgaatccggcgacgaatatccgccactagtaactctagctcaggtaaggatttgtgtccatggcagctttgcaaacgcttcgtgaatggatcggtatccagcagttcccacctgctactcaatctaaattgctcgagatccttgggaagtataaagaagaggatgtgagctcgctaacggtccttgtaatggggaaaggtggtgttggaaagtcatcaactgtgaattcagttataggcgaagaaagctgctgcagttagtactttccagtctgaaggactgaggcctaccttgggtctctcgcacaaagatcgggatttacattgaatatcatccgacactcctggtcctaatgaagggaaggtatgttgaatggttcaanccaa

SEQ ID NO: 10263 - DNA, 408 bp, Arabidopsis thaliana
  unsure at all n locations
  Clone ID: LIB24-058-Q1-E1-G9
ctctcgagactcgtgtatgttgatttacggtttgttcaagcaaagagaatgatgaatctaggatctctttcgttgagtacgagcaagtcgagtaagccaatggttagcatcagcttttggataccgtatttcactcactggggagagagcctgctggtctgtggctcggctcctggacttggttccgggaatgtgaaaaaaggtttgctgctaaagccatcccagcaagatgatcagctcatctggagtggctctgtctcggttccacctgggtttagctctgactattgttactatgtggtggatgactcgaagagtgtgttaaggtccggagtttgggatgaaacgaaaacttgtggtgcctgagacattgaccggtggagaatctgttcatcttcgtgatcccng

SEQ ID NO: 10264 - DNA, 425 bp, Arabidopsis thaliana
  unsure at all n locations
  Clone ID: LIB24-058-Q1-E1-H1
attgtagaaagtgcaatcaatataaaccgcctcgttctcaccattgttcagtctgtggaagatgcatactaaagatggaccatcactgtgtttgggtggtgaattgtgttggtgcaaataactacaaatcatttctcctattcttgttttacacatttcttgagacaacggtggttgcagtatcactattgccaattttcctcgtattcttcagcgatggagatggtgatataaccgtatcaccaggaagcctagcagccagctttgttgcatttgtattgaacatancatttgccctaagtgtcctaaggcttccctaataatgcacataatgttggtcgctcgtaacaacacaactattgaggcgtntganaaacatacagttaactgggcaatacaacgtttgggccgtaagacaaaatttn

SEQ ID NO: 10265 - DNA, 433 bp, Arabidopsis thaliana
  unsure at all n locations
  Clone ID: LIB24-058-Q1-E1-H5
acgcgtccgctgcttcgatggactctcactcttcccacctcaacgccgccaatcgttcccgcagnnnnnnnnnnnnnnnnnnnnnnnnnnnnnnnnnnnnnnnnnnnnnnnnnnnnnnnnacaaacgcaaactcgccgccaccacggcagcgaatgcagccgcttctgaagatcacgcccctccttcttcctctttccctccttcctccttctctgccgatactcgcganggggctttaacctccaacgatgaactcgagagcatctccgctcgcggcgccgatacagattcagatcctgatgaatcagaggatatagtcgtggatgatgacgaggacgaatttgctcctgaacaggaccaaggactcttcnatccgcacattcaaccgggcggctcgagtccattccaagctctggagtcaaagggtcnaag

SEQ ID NO: 10266 - DNA, 455 bp, Arabidopsis thaliana
  unsure at all n locations
  Clone ID: LIB24-058-Q1-E1-H6
acgcgtccgaagacagtcaaaaaatctctttttgtcttctcaaatttaaacctcacctttaatatttctccttacttttgaagctgtaataatattcttgaatctattcctttctttctctttctcatgtttaatcggtgaaggctttactctgtttctttcatcatgtttcaatcaaaagccttaactttttctttagctctttccattacaagagacctctagcttcatactttttataaaaattctctctttttctcagtttaatcctcaaagaaatgggttcaaagattggtatcaaatccggtgggaggttagcttcaanggagactcaacaaacgttgggacggcatggaaccgacaaatcccacgaatcatggccgttgctggaatcatgtcaaacatcgataatgactctaaagacactgatcnggtctcctaaaagatngtatcat

SEQ ID NO: 10267 - DNA, 416 bp, Arabidopsis thaliana
  unsure at all n locations
  Clone ID: LIB24-058-Q1-E1-H7
acgcgtccgcggacgcgtgggcgagaactgttctcgctgattctgtaatcatttctactggagctgttgctaaacgtcttagcttcactggatctggtgaaggtaatggtggtttttggaatcgtggtatctccgcttgtgctgtttgcgacggagctgctccgatttttaggaataagcctcttgtggttattggtggtggtgattcagctatggaggaagcgaattttctgactaagtatggatctaaggtttatattattcataggagggatacgtttagggcgtctaagattatgcagcanagagctttgtctaaccctaagattgaagtgatttggaactccgccgtggttgangctatggtgatgaaaatggacgtgtccttggaggattgaaagggaanaatgttgtta

SEQ ID NO: 10268 - DNA, 410 bp, Arabidopsis thaliana
  Clone ID: LIB24-058-Q1-E1-H9
aaaatgacagaactcaaatggatatgtatttcattctcactaacactcttgctaagcttagcagttgaaggagcctttaacataaaccagaaatggtctggtggaagtcattttggttacgagggcgggttctgttttcccggtctctgcattggaggatctggtggtagtagagtccattatggcagggaccattacggtggtggaagtcaatatagaggtggtattggttacagagagaccatgtactgcaaaccgttgacttgttatggtggctcatgtgatgcactccatttgcatttagacaaagggttatatgaatctctcatacgcaatactaagacagcgaaacaatcgtcgactgttgatttcaacatgccaagagacttgaaacacaatgtcatcaaaca

SEQ ID NO: 10269 - DNA, 426 bp, Arabidopsis thaliana
  unsure at all n locations
  Clone ID: LIB24-059-Q1-E1-A12
tgtttagttgcccgtcccggtccanaatncccgggtcnacccacgcgtccggattttctttttttcctccctctcttgattaatgcaaaaccaaaaagagtcactctacatatccctcttgtgcataatggtgcaaacttttatgacagcaaagttgtttctcttccactctcgtcaccccactcccagcgagggctagcgttcatggccgaaattcattttggctcccctcaaaagaaacaatttcttcacatggatacgggtagcagcctcacatggactcaatgcttcccttgctccgactgctatgcccagaagatttatccaaaataccgaccagcagcttcaataacatatcgcgatgcgatgtgtgaagattcccatccaaagtccaatccgcattntgcatttgatcctttgncgaga

SEQ ID NO: 10270 - DNA, 434 bp, Arabidopsis thaliana
  Clone ID: LIB24-059-Q1-E1-A5
acgcgtccgcaaaatcctctcggatctaaaagagtgtgtgataacataagatgtcgtcttctcgggaagagaatgtgtacttagccaagttagctgagcaagctgaacgttatgaggaaatggttgagttcatggagaaagttgcaaagactgttgacaccgatgagcttactgtcgaagagagaaacctcttgtctgttgcttacaagaacgtcattggtgctaggagagcttcctggaggatcatatcttccattgaacagaaggaagaaagcagaggaaacgatgatcatgtttccattatcaaggactacagaggaaagatcgaaactgaactcagcaaaatctgtgatggaatactcaatcttctgggattctcaccttgttcccactgcatctttggccgaatccaaagtcctttaactcaaaatgaa

SEQ ID NO: 10271 - DNA, 416 bp, Arabidopsis thaliana
  unsure at all n locations
  Clone ID: LIB24-059-Q1-E1-A7
cttatccggtgttgctcctccttctctcatacttccggtggccaaccaccgccgcgtgacaagtctcgagctccagagattggaaaatttgctacatctattggctactcagtagtcagaaaacctggggatcatcctcctttctccaaaattatacattcgtcttcacagcctaaggagcgacaaggaaagggaatcttacaaacgccatttgccagtgtgggatccttgacaagttttcagcttttgagggaattggggaggctcaaattaccggtgatggcantgtttgttgacaaactcccttcanatggctacactccttgaaagctttggctggctgagatatgtnaagcctggaagagctccaatgttcaagcatgcctaatttgttgcctggttgctccctaaatggg

SEQ ID NO: 10272 - DNA, 408 bp, Arabidopsis thaliana
  unsure at all n locations
  Clone ID: LIB24-059-Q1-E1-B10
acgcgtccgcaagcgaaccaaggattttacttgttgggactggacaacacttcaccaacatttgcttcctccatgcaaaactctgttcccgccattacctttctcatggctgctcttctcaggattgagaaagtaagaataaacagaagagacggtatctccaaaatcttaggaacagctctttgtgtcgccggagcttccgtcatcaccctctataaaggtccaaccatctacactccggctagccacctccacgctcatctactcaccacaaactccgccgtcttagcgccgctaggaaacgccgcgcctaaaaactgggacccttggttgcatctacctaatcggtcactgtctctcgtggtcaggctggcttgttttccaaagctccggttctaaatcctaanc

SEQ ID NO: 10273 - DNA, 485 bp, Arabidopsis thaliana
  unsure at all n locations
  Clone ID: LIB24-059-Q1-E1-B3
ggnggaatgttagccgccttacgggccaaaatcccgggacgacccacgcgtcnnnnnnnnnnnnnnnnnnnnnnnnnnnnnnnnnnnnnnnnnnnnnnnnnnnnnnnnnnnnnnnnnnnnnnnnnnnnnnnnnnntctttgtggccctctttatctcggccgtgttagtgagctcagtctccgcggctacaatggagtctccagcaccatcaccaggtgcttcctctgcctccaccgtagcttttccggtggttggctccattgttgctgcatcactctccgccttcttggctcttctcttgcagtagaaagacaagagtcctcaaaatatgagaaggagatatataacaaaactctttttttgttctgattttgttccttagaatctatggatgacanataacccattttgatgtanaatccccattgggtaanttattacactaatatataatggagtntntgataatnagtaagcactattt

SEQ ID NO: 10274 - DNA, 409 bp, Arabidopsis thaliana
  unsure at all n locations
  Clone ID: LIB24-058-Q1-E1-G10
aatgggaaattgtctctcagcttcgacacttcccaccgaaccaaatgctcccaaatcagtggaggagggtgtgaaagtcttcacggtggcagatctgaagaaagcgactaatgatttcggaaaccagatggaactaggagagagcttgggatacatcaatcccaaaacgttatctccggccaagaaaggtgttggcatggccgtcgcggtcaagaaaatttacttagccaatgaacaagcttttcaagattggcttgttgacgtanagtttctacnacataactctcatccaagcttggtgaagctaattggctactgttatgatcgtggatatgttgtttattgtttctgaatactttccaaatggaagcttangaagttacatcagtagagatagtccgtccaanag

SEQ ID NO: 10275 - DNA, 212 bp, Arabidopsis thaliana
  unsure at all n locations
  Clone ID: LIB24-059-Q1-E1-B5
aaaccctctctaattggaaagggaacatccagctgaatcagatcagcttgttctacatgagtatcaatcctaccatggctcttcaggagtacctcctcatcgtcttcaacaagctcagatatatccatagatttgtatttgtctgtacgaaagaagtctatgatgtaagagttccacatgaagaagtgaattacagangnaaaaaaaaaagg

SEQ ID NO: 10276 - DNA, 387 bp, Arabidopsis thaliana
  unsure at all n locations
  Clone ID: LIB24-059-Q1-E1-B7
cagcaaaactcgtctctcttgcactccaaaaagcaaccatgtctgcttttgtcggcaaatacgcagatgagctgataaagacggctaagtacattgccacaccggggaaagggcattttggcagcagacganagcacgggaactattgggaaacgattcgccaagcatcaatgttgagaacattgagtccaaccgccaagctctccgtgagctcctcttcacgtcncctgggcactttccttgccctctccgggtgttatccctcttcgaggaaaccctctaccaagaaaaaacaacgggatgggcaaaaccctttcgnttgagctcctcaatgggaaaacgggagttaatccctgggaatcaaaagttggacaaagggttgtnggg

SEQ ID NO: 10277 - DNA, 415 bp, Arabidopsis thaliana
  unsure at all n locations
  Clone ID: LIB24-058-Q1-E1-E10
aagactccattattctcctgcttcttcgtctcttcaattattttctctgagactagctttgattcaaccatggctaatgcagcatcaggaatggcaagtccatgatgactgcaagctgaaatttatggaattgaagacgaaaaggacacaccgtttcatcatttacaagattgaggagctgcagaaacaagtgattgttgagaaaatcggtgaaccgggtcaaacccatgaggaccttgctgcaagtcttccaagctgatgaatgccgctatgccattttcgattttgattttgtcaagttctgagggtgtcccaaggagcaggatttttttcgtggcatggtctccggacacagcaangagtgagaagcaagatgatctatgcgaagctccaaaggacaaggttcaagagagaa

SEQ ID NO: 10278 - DNA, 411 bp, Arabidopsis thaliana
  unsure at all n locations
  Clone ID: LIB24-058-Q1-E1-E11
acgcgtccgctctctaagactcatatcattacgtcatgagttcaatagcaagagaccgaaaggaacaaatggtgatccattcttcaatcgtcttgcttcaagaaagattcagacaacttcagagagcaagagagttaagagctgaacgagagctcctaaaccctaaacctaaccaccaagacaacatcttgcaatattacagcgaacccactantttcggtttctttcagtttctacctataaactctcaaacatcttcgtcacagcagctcctatccctctccttatgctcacactccacctctgaatccattgaaaagccaagcttttgtcatcagtggccaaataaagatgacaaagaagatgggtgggattgatcgatacgacgatgttgacacgtctctgcatctc

SEQ ID NO: 10279 - DNA, 472 bp, Arabidopsis thaliana
  unsure at all n locations
  Clone ID: LIB24-058-Q1-E1-E2
tccanaattcaaaggtcgacccncccgtccgggtgcatncactaataatcagatatgggtgactccatataaccggtcagaacaatatgccggaggagttctaatttaccagagccaaggtgatgacacactacaagtttggtcagaccgggaccgttcgatcgaaaacaaggacatagtactgtggtacacactagggttccatcacgtaccttgtcaagaagattatccagttatgccaaccgttgcggctagctttgaacttaaaccagcaaatttctttgaatccaatccgattcttgggtctgctcctttcttcgaaaaagacttacccggtctgtacaccatttgcttcatcctgaccggttctgttccgactaatactccaatagtatacaagttgagaaagattaaantatccgggtgttaccaaacacctggttggaagntnatttgcccggttttggcaana

SEQ ID NO: 10280 - DNA, 495 bp, Arabidopsis thaliana
  unsure at all n locations
  Clone ID: LIB24-058-Q1-E1-E3
gtaggcgtccanaattccanggtcgacccacgcgtccgcccacgcgtccgcggacgcgtgggaaatttttctccatattacaaaagaactaaagaagatggatcagtcatcatcaacgttgctcataaaccagagaaagtcatcatcgtctccgactaggatcccacctaagcagaagaggaagtcaacgactacgcacaaacccatcaaagtccgttacatatcaaatccgatgagagtcgagacttgtccttctaagttcagagagcttgttcangaactcaccggtcaagacgncgctgatctaaccaccgtcgcccaacaacttttaacggccgtanttntccaacggttccgttntgagtccgganaatgaacntagaagccgnttgggatgggnaaaggtccgttggagaagtattattcaccgttggatggaggaaantgtttnaatggcncctcaanatgtcggcaaggtctttccggttttttcnc

SEQ ID NO: 10281 - DNA, 431 bp, Arabidopsis thaliana
  unsure at all n locations
  Clone ID: LIB24-058-Q1-E1-E6
cgttggaacaatctatcttggtggcaaggagcatcgtgttaaaactgctagtggtgttgtgtctgtcattgtctatggagacagagaaaagccagcattgattacttatcctgatttagccctaaaccatatgtcatgcttccaagggttattcttctgtcctgaagcagcttcattgctgcttcataacttctgcatttaccatatcagtccacctgggcatgagttaggagctgctccaatttgtcctaatgattcagtcccttctgctgaaaacttggcagatcagatccttgaagttctcaactttttcggccttggtgttgtgatgtgtatgggagtgactgcaggtgcttatatcctcaccttattcgcgatgaaacatagagaacgggttcctggtttgatccntgtctcaacgttaagcaaag

SEQ ID NO: 10282 - DNA, 464 bp, Arabidopsis thaliana
  unsure at all n locations
  Clone ID: LIB24-058-Q1-E1-E7
acgcgtccggacgagtttaacaactctcgatctctctttcaacgatctctccggtagagtaccactcggtggtcaattcttggtgttcaacgaaacttccttcgccggaaacacttacctctgtctccctcaccgtgtctcttgtccaacacggccaggacaaacctccgatcacaatcacacggcgttgttctcaccgtcaaggatcgtaatcacggttatcgcagcgatcaccggtttgatcctaatcagtgtaacgattcgtcaagatgaataaagaagaaagaaacaagaaatctccccgcctgggaaaactaaacggccttcaagaaaactaagaattcaaatctgaaagaacgttcctccnaattgtcttaaagaagaggaacataatccggtaaanggcgganctggaattgtcnancgtgggnttaatgccaaacaacgtaaacgtcgcgattaaa

SEQ ID NO: 10283 - DNA, 425 bp, Arabidopsis thaliana
  unsure at all n locations
  Clone ID: LIB24-058-Q1-E1-E8
acgcgtccggttgggacaaaggacaagagttggagagcatgaagctatgaggaagattaagaatgagtttatgacacattgggatgggctaatgacgaaacccggtgaaaggattctcgttcttgcagcgacaaacagaccgtttgatcttgatgaagctatcattaggaggtttgagagaagaataatggtgggacttccttcgattgagagcagagagaagatcttgagaactttgttgtcgaaagagaaaacagagaatcttgatttccatgagcttgggcagataacagaaggctacagtggaagtgatctcaagaacttatgcatcacagctgcttatagaccagttagagagctgattcagcaagaaaagattgaaaagtnaggagaaggaagaaagagaagaaagaagcaaggaaaan

SEQ ID NO: 10284 - DNA, 413 bp, Arabidopsis thaliana
  unsure at all n locations
  Clone ID: LIB24-058-Q1-E1-E9
tgaagctctttgttcatctctctatcttcttctccatcctcttcatcactctcccatcttcttacagctgcaccgaaaatgacaagaatgccctccttcaaatcaagaaagcacttggcaatcctccccttctatcctcctggaacccccgaaccgactgttgtaccggctggaccggcgtcgaatgcactaaccgtcgcgttaccggtctcagcgttacctccggcgaagtctccggtcaagatctcgtaccagatcggcgacctcgttgacctccgtacactagatttcagctacctgccacacctcaccggaaacatcncacgcagcatcacnaaactcaagaacctcaatactctctacttgaagcanactaagtctctccggtncgattcctgattacatcaagngag

SEQ ID NO: 10285 - DNA, 454 bp, Arabidopsis thaliana
  unsure at all n locations
  Clone ID: LIB24-058-Q1-E1-F1
gtgtaaagttcaaaagagagagtgagcgaagggaactgggggaactctcacagtggcatgcacctgatggtagcctttgcccctctgctgttgatattaaacggaagatggaaatgttaccggttaagcaagaaggttactcagatggtccagccccgctaaaacttggaataaggaagaatcgtaatggcatttgggaagttagcaaacctaatacaaatggattatcttccaagtaataggcaagaaaaggttgggtatcaggagaagaatattataccaaatgagtantactgctactggaantngtanggatggtgatgatgcaagccgttaaccaaggattccnantggnactttgaccttgntanccaacggcaatggaaccttgattccaatttcaatgaatggttgaattcanggttaaaanctttccctgaaagnaaaccaatcc

SEQ ID NO: 10286 - DNA, 507 bp, Arabidopsis thaliana
  unsure at all n locations
  Clone ID: LIB24-058-Q1-E1-F3
cgttagccgnccgtaggcctccanaattccanggtcgacccacgcgtccgcccacgcgtccgattctttatacgtataataacatcccttgtgatcaaacaagtaaaccattcaaaagatgaaaggaagaattttgattttgagtttgctcataatgagtctggtcatggcacaagttcaagtagaagcaaagatctgctgcccttccaaccaagctagaaatggctatagtgtatgccgtataaggttttccaagggaaggtgtatgcaagtgagtggatgccaaaactctgatacatgccctcgaggttgggtaaacgccattctcgaaaactcaagtnatgctaccaaatgagcactgcaaagttaaggtgtgaaaccttctgtgtgtgggtgccaatgaacancccccaanaancnggangnaanntgaaatttgtaaanggnnctttcggaacaaatgttccaaaggaatgttccaattttccggtaccaaanagccaagtt

SEQ ID NO: 10287 - DNA, 408 bp, Arabidopsis thaliana
  unsure at all n locations
  Clone ID: LIB24-058-Q1-E1-F5
acgcgtccgaaaatcgataaaaaccaaaaaggaagaaaaacaacaacagggcttctagtagtagtagtagtagtaccactcatctcaatttcaacctccttcatattcctttctttttttttgcctttcttcttaattaaaatcttgtttttttttgttgtaaatgaaaagaaaaaaaaaatcgaaacttgaggattctacagcgaatcgcgtgcttatatccgcaggctggttgcatgattatcatatcccccagattttttttttgaggaaccacttgtgttgagaaggaatcganagaacctttacgaggaagctttgactcgaaatctctctgaagaagaagaggagaagacgaaactgttggcttagtttccgacgccgggaacgtcngaactccggtgaaca

SEQ ID NO: 10288 - DNA, 502 bp, Arabidopsis thaliana
  unsure at all n locations
  Clone ID: LIB24-058-Q1-E1-F7
cttncagccgccggtaacggtccaaaattcccgggtcgacccacgcgtccggcgcggcggagccatggttctcaagactgagctttgccgattcagtggccagaaaatttaccctggtagagggatcagatttatccgatcggactctcaggtgtttttgtttctcaactccaaatgtaagaggtatttccacaacaagttgaagccatctaagctttgctggactgctatgtaccgaaagcagcacaagaaggacgcagcacaagaggctgtgaagagaaggagacgtgcaactaagaagccttactcaaggtccattgtcggtgctactttggaggttattcanaaagaaaccaacaananaaaccttgaaattccgtgatgccgcctanaagaanctgccctacgttaagantcaagggagaagaatcaagaaanaccaaggacnagaagaaaggcaaagaangtccaantatgcatcaaagcaacaaaaattcncaag

SEQ ID NO: 10289 - DNA, 432 bp, Arabidopsis thaliana
  unsure at all n locations
  Clone ID: LIB24-058-Q1-E1-D8
gactctaaagacactgatctgtctcctaaagatcgtatcatcattgtagccaatgaattacctatacgagctcagnnnnnnnnnnnnnnnnnnnnnnnnnnnnnnnnnnnnnnnnnnnnnnnnnnnnnnnaaggttggaacttttcttgggatgagaattcacttcttctccaattgaaagatgggttaggagatgaagctattgaagttatctatgttggttgtttgaaagaagagattcctcttaatgagcaagaagaagtgtatcagattcttcttgagagtttcaagtgtgtgcctacgtttttgcctttggatttgtacactagatactaccatggattctgtaagcaacagctttggcctttgtttcattacatgttgccactttctcctgatcntggnagtaaggttgataaggactttgtggca

SEQ ID NO: 10290 - DNA, 489 bp, Arabidopsis thaliana
  unsure at all n locations
  Clone ID: LIB24-058-Q1-E1-F8
ctgtncagccgcccggtaacggtccaaaattcccgggtcgacccacgcgtccggagattgatctcaaaaccaaagctctcgtgctcttgtcgttgatgttggttgtgtagactttgtatacaatgatgaaaagtttggcgaatgctgttggagcgaagacggcgagggcttgcgacagctgcgtgaagagacgtgcacggtggtactgcgcggccgacgatgcttttctttgccagtcttgcgacagtttggtccattcagcaaaccctcttgctcgccgccacgagagagtccgtttgaagacggctagcccggcggtcgtaaagcatagcaaccactcatcagcttctcctccacatgaggtcgccacgtggcatcacgggtttactcgtaaagctcgaacgccacgtggctctggtaagaaaaacaattcgtcgatatttcatgacttggttcctgatattaagtaatgaggatnagacagacaac

SEQ ID NO: 10291 - DNA, 495 bp, Arabidopsis thaliana
  unsure at all n locations
  Clone ID: LIB24-058-Q1-E1-G1
aactgttaccctgccgtaggcgtccaaaattcccgggtcgacccacgcgtccggcgagctgagttcgtggtccttctacagagccggaatcgccgagttcatagccaccttcctgtttctatacataacagtattgacagtgatgggagtgaagagagcaccaaacatgtgtgcctctgttggaatccaaggcattgcttgggctttcggtggcatgatctttgcccttgtctactgtactgctggaatctctggtgggcacataaacccagcggtgacatttggtctgttcttggctcgtaagctgtcattgacgaaagctgtcntttacatcgtgatgcaatgtctcggagncatctgcggcgccggagttgtcaaaagcttccagccaaatcccttaacaaactctccggcggaggagccaacacaatcgctcacggggacactaaaggctcngggtttgggtgccgnaaaaaatccggaaccttcgncctt

SEQ ID NO: 10292 - DNA, 486 bp, Arabidopsis thaliana
  unsure at all n locations
  Clone ID: LIB24-054-Q1-E1-B7
cctttacgcnggccagtaccggtccanaaattcccgggtcgacccacgcgtccgnagtgagcancancaactccatctccggagctctagattcagatangaacaatggcgattccgatgcctactcgccagctattcatcgacggcgaatggagagaacccatcttgaagaagcgaatcccgatcgttaatccagctactgaagaggtcattggtgatattcctgcagctacaacggaggacgtggatgttgctgtcaacgctgctcgaagagcattatcaaggaataaagggaaatattgggccaaaggcacctggagctgttcgtgctaagtatttacgtgctattgctgctaaggtaaatganagaaagacggatctggcaaagctcnangcgcttgattgtggtaaaccattggatgaagcagtatgggatatggatgatgttgctggatgttttgaattttatgctgaccttgcccgaan

SEQ ID NO: 10293 - DNA, 453 bp, Arabidopsis thaliana
  unsure at all n locations
  Clone ID: LIB24-054-Q1-E1-C12
ttcccgggtcnacccacgcgtccgaaagtttcgttcaagtctgatccgatgttctcctctagctttctcagattgattcttttactctgtctcgtctcttcttccttctcctccaccacttcttcctccaactccactgccgccgatcaaactctccggccgcaagaagagctccagaagctaacactgattagacaagaactcgacaaaatcaacaagccggctgtgaaaactattcagagctcagatggagataaaatagattgtgtttcaactcatcagcaaccaagctttcgatcatcctctcttacaaggacaaaaaccattggatccgcctgagataccaaaaggatacagcgaagatgatggatcatatgaaaactcccagctttgggagtttatccgggtgagtcttgtccnggaangtacgattccggattaggaggacaaccg

SEQ ID NO: 10294 - DNA, 476 bp, Arabidopsis thaliana
  unsure at all n locations
  Clone ID: LIB24-054-Q1-E1-C2
aactgttacgcctgcccttaccgggccaaaattcccgggacgacccacgcgtccgagaataaagtgacgaggaagaagatgagtangaagaacgataccgccaccgtatctgctcgtatcgccgccattatcgccgccaagaaacgtcgcaagtctggcaaacgcagcatgtgtcagggaatgtgttttactcttcctacacttgaagatccattcaatgaaaggcaaggtaaagctgatattactnnnnnnnnnnnnnnnnnnnnnnnnnnnnnnnnnnnnnnnnnnnnnnnnccatctcctatgtctattgaaggtgttgagaagatggatggtccaccaaagtttctgatgttaaacttgaatgagattgagagctcatttcgtaaangatattacatacagtgaacaacatgataagtctttgtttactaagtagttgggggattgagttctggaaatgttactcctcnggg

SEQ ID NO: 10295 - DNA, 484 bp, Arabidopsis thaliana
  unsure at all n locations
  Clone ID: LIB24-054-Q1-E1-C4
actgttacgcctgccctttaccgggcccaaaattcccggancgacccacgcgnccgggaaaagctgncangagaggaacaagaagttcatggaaaagaaactcaacanactcaagagagagatggagttgtttggtccgcaagctgttgtcagctaataccgcgagtatggagaagataaggaagacgattatctatggtggttggncattttattactaaaaagctcagttcgagcaggcacttatgcaagagatgctgactgtttgtttttaaccgaaaagagcttattgatgttatcagtgctgtttaaagtgtatggggctatggtagattctggttttccgggagcatgaaatcgcagcatccgacaaagaaaaggtgagtaatttggtaccactaagttcctacacacggaatcatccaatcttctgaagcagagtattgtggtatttgttcaaatcccagttttcactgggccatcc

SEQ ID NO: 10296 - DNA, 420 bp, Arabidopsis thaliana
  unsure at all n locations
  Clone ID: LIB24-054-Q1-E1-C6
aaatcaaaacttttactttttatttctcctctctggatcttcctcttcaaagctcaaggccattagggtttatctgagctccaaaatcaccctaattctagtgtatttctcagcaagcaagcttcttctttttttgtcctgggtaactgtgattgttgcaggatcttgtgtagaaacagatcacaagaagatgaatgataactcggtggtgcggctttgattatcttcagagatttnagattctgtatccactctgttgcgatggggtcgtttgcaggcgcttgtgagattgtggaagagaaggatgatgaagtaagattgccaaaacattccgggagatatggtaaatcggttatgggatcatcaagtaaggatttggtggagcgtaagcaacgagagtatcaatgggtccccntgagt

SEQ ID NO: 10297 - DNA, 456 bp, Arabidopsis thaliana
  unsure at all n locations
  Clone ID: LIB24-054-Q1-E1-D10
atcggnccgtcacggtccanaaattcccgggtcnacccacgcgtccgaangacgcgtggggccaaagagaagcttgtcttgaatctttagctacggttttgaagaataatcctgaagctgtttctgattttgttggacttgagtctgggaagtattttaattcngtgactgagttaacaaaggatangtatccgangactangctgctttcttgtctttgcttanttgtcatatacaacacttctccatcttatttcataaacatgggaaccaaatcaagtttganaactactctgcttgagcttcntaatgaccctggtcaatctggagatgatgcngccttgggtttatcctgtctgattgcngaaaaagaggatttacnacagttancttacnaggccgatgcaatcaagaaatattgttgagatctttgaagacaggtagngaagctccagt

SEQ ID NO: 10298 - DNA, 462 bp, Arabidopsis thaliana
  unsure at all n locations
  Clone ID: LIB24-054-Q1-E1-D2
caaaattcncggaacgacccacgngnccgctcgncgtatntggcttgctttcaccgctctctctgctttttccgtttgttcaacctccaataaatcctcggttaataacggttcctctaaaccggtcgaagaanaagcattttcacgagctagtgataaagttacagagaaagagaangatgttgtgacagagaaggatttagagcatttgttgcatctgcttgaagctggaaatgcnagttttgagtggcaatctatgatggataagtctactccgantatgagctatcaagcttggcgtcatgagcctgagatangtcctgttgtttatccgtagtcgaactgtttttgaggatgtaacaccaagacattgttacnggatttccttctgggacgatgangtttcgacctaaatggggatactaagcctgccttacttcaaaacnttagagggaaattcct

SEQ ID NO: 10299 - DNA, 485 bp, Arabidopsis thaliana
  unsure at all n locations
  Clone ID: LIB24-054-Q1-E1-D4
ctgttaccctgccngtaccggtccaaaattcccgggncgacccacgcgtccggtgaatagaaatatgcgttattgccaatggggcgacaaagaaggaaattggccgagcaaaagactacattgttaagacattgggactggagcctggtcagtctgtggatttaggaactatacacgctggtgatttcatgagaaggttctgctccaaccttgcaatgtctaaccatgcggtgaaagctgctcaggaagctgtgcaaaaatctgaggaatttgatataaggaggagtcctatatcaatagcagcagtagtcatctatatcataacccagctgtctgatgacaagaagactctcaaagatatatcgcatgcgacaggagtagcagaagggacaataaggaattcatacaaagacttgtatccacatctgtcaaagatagcaccaagttggtatgcaaaanggaagaagatttgaaaaaacctgtcn

SEQ ID NO: 10300 - DNA, 420 bp, Arabidopsis thaliana
  unsure at all n locations
  Clone ID: LIB24-054-Q1-E1-D6
tgtggcatttgcaacattcacgagtcatagattcgccttggctgcaatgaatgagctaaatggtgtgaaatttgatcctcaaacaggatcaaatctacatatagaactagctagatcaaactctagaagaaaagaaaggccaggaagtggaccttatgttgtgattgataacagaaacaaggaaatttctaagtctcaggatgaccagagtgatgaaggggatagcgatccagatgaggtgcaggaacctggaaatagcgattctccaaaggaaaacgatactaccaaaagcgaagcggattctgagccagatagtaaagcaccatctgctaatgggcacttanagaaagcatctgaaggaggttctggtgctcgagcttgttcgaccttgtttatagccaatctaaggcctaaantgta

SEQ ID NO: 10301 - DNA, 479 bp, Arabidopsis thaliana
  unsure at all n locations
  Clone ID: LIB24-054-Q1-E1-E6
agccttacgccgcccagtaccggtccaaaattcccgggtcgacccacgcgtccnnnnnnnnnnnnnnnnnnnnnnnnnnnnnnnnnnnnnnnnnnnnnnnnnnnnnnnnnctccgatccacgtggtgtggtcatgggttaggagacaacctccgaaggtgaaggcttttctcgccgtggtcactggcatggcggctttggttcttctcagattcattgttcacgatcacgacaatctcttcgttgccgctgaggctgttcattccatcgggatctgtgtgctcatctacaaactcatgaaggagaagacctgtgccggattgtcactgaaatctcaggagcttacggcgatatttttagctgttaggctgtattgtagcattgtaatggaatatgatatacataccattcttgacttggctactttgggaacaactctctggggttaaatttaatgattccgtttcaagtttaaaanct

SEQ ID NO: 10302 - DNA, 394 bp, Arabidopsis thaliana
  unsure at all n locations
  Clone ID: LIB24-054-Q1-E1-E8
cattaaaccttcttccctctaacccaatcaaatttgcggctctttcttttatcttctcgcctcggttttagcaaaccctttagttatcttcttcctcaagcaatttttcttttggattagattggtgttttcttttggtttgtgtggtgatgatgagaaggcaacgagatgaacaacaatctagggttttctacgatctatcatctcttgttttgaatcttctccgttctcctcctatgccgatttctttacctgatcatttccccgatccgcccgctagaattcgtcctcccttttcttcgcatcgtttttcgtcttcttcgccttctttggctcanatttctccgtctggattcgcgtcgttgctggcntggtataaccngtgggtcctaat

SEQ ID NO: 10303 - DNA, 471 bp, Arabidopsis thaliana
  unsure at all n locations
  Clone ID: LIB24-054-Q1-E1-E9
agtcgnccggcacggtccaaactacccgggtccacccacgcgtccganctatctctctctctctttgaagcagtttgttacttcttacttttgtgtttcttcanattcttcagaagcaagcacaaggctagggatcnaaggaagcggcgatcactgatcgtatctcactacgatcacattaanggatagaatgtgtggtttccgctcgacggaagactattcgganaaagcgacgttgatgatgccgtccgattatcactctttgatttgttcaagcaccggagacaatcaaagactgtttggatncgacgaactcnctancgctttgtcctcggagttgcttccgcgtattcgaaaaactgaggataatttctctcntantgtcancaacatccaaaatcgcttctcagccnttgtagccncgcttactccaaacctacatcgagttccaaaaaggtgggancgcccaat

SEQ ID NO: 10304 - DNA, 471 bp, Arabidopsis thaliana
  unsure at all n locations
  Clone ID: LIB24-054-Q1-E1-F2
ngttaccctgccttaccgggccaaaattcccgggacgacccacgcgtccgcccacgcgtccgcccacgcgtccgtcggcttttatcatctctgaaaattgctttatttggttgaattcattggattgttgatcgaagattggtttactgattgatcgaaagtatggaggaagatcgtggggaagcgatcgttttagatatttcgccggagattaataatactccggcggtaatgatgagagttccacggaggattcgtgagaggcttttgtctgactgtagtaataagaagacagtatcttctgttcaagatattgaagacaagcttcttcatgcccatctacgaagacagcaattttatcataacgtttcgagaaaggctcgtgctaaacctagaagtccttcacgatcatctgatgaagaacttggccaacgaatcgaagcaaagacttctgggctgctgaacnaaaaa

SEQ ID NO: 10305 - DNA, 503 bp, Arabidopsis thaliana
  unsure at all n locations
  Clone ID: LIB24-054-Q1-E1-B4
aactgttacgcctgcccttaccgggncnaaaattcccgggacgacccacgcgtccgcccacgcgtccggtcatgagaacacatggagctaaacaacaacgcactgttatgaaacgaactccaaaggagcaactggagccagtatatgaggctttagatactctaggaaacactaaatggaagataaacaaaaaggtgttaagtttggtggacagaatctgggctaatggaggtcgcattggtggtctggttgaccgtgaagatgtacccattccagaagagccggaaagggaagaccaagaaaaatttaaaaattggagatgggaatccaaaaaagcaattaagcaaaataatgagagacattcacaaaggtgtgatatagagctcaaactcgaggtggcacgtaaaatgaaggatgaggaaggtttctactaccctcacaacgtttgantttccgnggggcgancaatttcccctancntccanatccttaaccaatctcgg

SEQ ID NO: 10306 - DNA, 405 bp, Arabidopsis thaliana
  unsure at all n locations
  Clone ID: LIB24-053-Q1-E2-F4
acgcgtccgcccacgcgtccgaccggattaaaatcggtttgcntaacaacgaccagagccgaaacaagcggtgttgacananaggagaaagtagtgattgttgggggcgggattggcggacttgccactgccgttgctcttcancggcttggaatccggtcggtggtgttggagcaggcagagtcgcttcggacaggaggagcatcnctgacgctanccaagaatgggtggcgtgttcttgacnccatctccatcgngacctcaactccgaaagcagtttcttgaaatgcaaggggtggtattgaagaaggaagatggaagagagcttcgttctttcaaatttaagngacaatgatcaaanccaagaanttcggggggtnnganaaggcgagtactccctggnaa

SEQ ID NO: 10307 - DNA, 416 bp, Arabidopsis thaliana
  unsure at all n locations
  Clone ID: LIB24-053-Q1-E2-F9
aaccagaattagtggagataaacttgacgcgtcccttcttcattctccgtcttcttcacgtcaccggaaaaacgacgaatctcattgcctgagattcttcatcggaattaaacctccggaggaattaatcacgtctcacattttttcaccatgtcgagtttggaggagccgctaagctttgacaagttgccaagtatgagcactatggataggattcagagattttcttccggtgcttgtcgccccagggatgatgtcggtatgggacaccgttggattgaaggaagagattgcactacctctaacagttgcattgatgatgataaaagctttgctaaagagtcattcccgtggagaaggcatactcgggaaattatctgaaggagagcataggttnaggaatatttcgtttgctg

SEQ ID NO: 10308 - DNA, 482 bp, Arabidopsis thaliana
  unsure at all n locations
  Clone ID: LIB24-053-Q1-E2-G7
aantgtttacgccgcccggnaccggtccaanaattcccgggtcgacccacgcgtccgcaccctgttgcttcttcgaagaagcaaccttctctgttagatgaacactttgaagctgtatcagatgatgacgagaacagtgattctgatgcatcacagccttcagatgacgaggccgacgatggagacgcaactaggccaagcaagaaagcgagaactccgaagttgtatgaagtgaaagatgagcggcatgccgcagcttatcacaaccgcacttcactggctaaagaagatagtcttcctatgggcgagcgtgtcaaggctatagagaaccggcgtggcaactttggaggctcgaaagatatcaaattcggtcctggaggatcacggggagttttctttcaaggcgaagagggtcatcaaagtacaaagaagatagaagacgatggagtatgaagatgggcaaaggaaaacaaagaaggaga

SEQ ID NO: 10309 - DNA, 418 bp, Arabidopsis thaliana
  Clone ID: LIB24-053-Q1-E2-G8
aaacatcctctgtttctcttgtccttgtccctttttccagatcttaaggttttccacattttatcatctgggtcctctccttaatgatttgaagacactcaattcctatttgatcggggactagaatttggattctgtttcagacaaaagtagatttccctgtctctttcccgtttgattttcaataagatgaatccggaggagcaaaagatggaatctgcatcggatctgggcaagctcttcattggcgggatttcatgggacacagatgaagaacgactgcaagagtattttggcaaggtatggagatttggttgaagctgtgatcatgagagaccgtactagcggacgtgcccggtggctttggggtttatcgtttttgcagatccttcgttgccgaggagagtcatcatggaca

SEQ ID NO: 10310 - DNA, 389 bp, Arabidopsis thaliana
  unsure at all n locations
  Clone ID: LIB24-053-Q1-E2-G9
cctgttgcttcttcgaanaagcaaccttctctgttagatgaacactttgaagctgtatcangatgatgacgagaacagtgattctgatgcatcacagccttcagatgacgaggccgacgatggagacgcaactaggccaagcaagaaagcgagaactccgaagttgtatgaagtgaaagatgagcggcatgccgcagcttatcacaaccgcacttcactggctaaagaagatagtcttcctatgggcgagcgtgtcaaggctatagagaaccggcgtgggcaactttggaggcgcgaaagatatcanattcggtcctggaggatcacgggagttttctttcaaggcnnagagggtcatcaaagnacactgaggataggagacgatngag

SEQ ID NO: 10311 - DNA, 414 bp, Arabidopsis thaliana
  unsure at all n locations
  Clone ID: LIB24-053-Q1-E2-H1
tgtcttccttcgcttccctcttctctcaccacaatccnnnnnnnnnnnnnnnnnnnnnnnnnnnnnnnnnnnnnnnnnnnnnnnnnnnnnnnnnnnnnnagctctttancaccattgtctcctttcttctctatgctccattgttcttatcttcaccagttcctgaccctgaatctgtcgttgaagaagttcacaagagcattaatgcgtcngttgcaggaagaaggaagttaggttacctctcatgtangaccggtaacccaatcgacgactgttggcgttgtgaanctcanngggaagcaacaccgtcancgtcncgctgactgcgccattgggnttcgcgcnaaaacgccatncgtggncgttacagtcggatctacgntggtcacccgnttaagaaacganaacccagtt

SEQ ID NO: 10312 - DNA, 425 bp, Arabidopsis thaliana
  unsure at all n locations
  Clone ID: LIB24-053-Q1-E2-H8
gtgatgctgaagatatctttgctgagtttttcggcgaatccggtgatgcttttggcggagggagtagcggaaggacacgtggagatggcggtgatggtggcggtcggagatttaaaagtgcagaancagggagccaggctaatagaaagacgccgccgacgaacaaaaaaacgacgccgccggcgaataggaaggctccggctattgagagtaaattggcttgcacattggaggagctctacaaaggtgcaaagaagaagatgcgaatttctcgcgttgttcctgatgattttggaaangccaangacagtccaagagatattgaagatagacataaaaccaggttgggaagaaaggcacaaaagatcacttttccanagaaaaggcaaccaagaacctgggtgtcactccngcggattcttata

SEQ ID NO: 10313 - DNA, 462 bp, Arabidopsis thaliana
  unsure at all n locations
  Clone ID: LIB24-054-Q1-E1-A10
tatcgcccgtaccggtcanaattcccgggtccacccacgcgtccgaactgttccttcaaaatcatttctttctcttctttgattcccaaagatcacttctttgtctttgatttttgattttttttctctctggcgtgaaggaanaagctttatttcatggagtctctgctctcnangttcttctcttgtttccgctgctggtgggttttgttggaagaancagaatctaaagctccactctttatcagaaatccgagttctgcgttgtgattcgagtaaagttgtcncaaaaccgaagtttaggaacaatcttgttaagcctgatggtcaaggatcttcattgttgttgtatccaaaacataagtcnaaatttccnggttaatgccactgcgggtcagccctgaggctttcgactcgaatagcanacanaagtcttttanagactcgttaaatgccttttan

SEQ ID NO: 10314 - DNA, 410 bp, Arabidopsis thaliana
  unsure at all n locations
  Clone ID: LIB24-054-Q1-E1-A12
atcnnnnnnnnnnnnnnnnnnnnnnnnnnnnnnnnnnnnnnnnnnnnnnnnnnnnnnnnnnnnnnccgtgagattcttcacggtctgttacggattccgtcaaccctacaaagtcctttgcgacggcactttcgtccaccatcttgtcactaatgagatcactcccgccgacactgctgtctctgaactcctcggaggtcccgtcaagctcttcaccaccagatgtgtgattgcggagttggagaaactgggtaaagattttgcggaatctctcgaagctgcccagacgcttaatacagcaacatgtgagcacgaggaggcaaaaacagcagacgagtgtttgtcagaggtaatangggtacaaaatactgagcatttcttccttggtactcaagaccccgagtttaagg

SEQ ID NO: 10315 - DNA, 494 bp, Arabidopsis thaliana
  unsure at all n locations
  Clone ID: LIB24-054-Q1-E1-A5
acgcctgccntttacgccgnccngtaccggtccanaaattcncgggtcgacccacgcgtccgnccacgcgtccgaaagaagacgacgttcccggcgctgactcactctcttcctcaactggatttnnnnnnnnnnnnnnnnnnnnnnnnnnnnnnnnnnnnnnnnnnnnnnnnnnnnnnnnnnnnnnnnnnnntttttccgatctaggtaatccggattccgatccgttaccgacgccggagattgatgagaaagacgttgtggttatcaaggagcgtaacttcactgatgtgattgagaataatcaatacgttttggttganttttatgctccgtggtgtggtcattgtcaagtctcttgctcctgagtatgctgctgctgccacggagcttaaggaanatggtgttgttttggctaagattgatgcgacggaggagaatgagttagctcaaggagtatcgtgttcagggctttccgnaccttcctttcctcg

SEQ ID NO: 10316 - DNA, 401 bp, Arabidopsis thaliana
  unsure at all n locations
  Clone ID: LIB24-054-Q1-E1-A8
ctctctctctttcctccatctctctgtgttcttcttacagacaccgagaatggcggatcctgatctgtcttctcctttgatccaccatcaatcctccgatcaacctgaagttgttatctctatcgccgacgacgacgacgacgagtcaggactcaatcttcttccagccgttgttgaccctcgtgtttcacgaggttttgagtttgaccatcttaatccttatggctttctcagcgagtcagagcctccggttctcggtccgacgacggtggatccattccggaacaatacacctgnagttagcggattgtacgaagcgattaagctcgtgatttgtcttccgattgctctgattagacttgttctctttgctgctaacttagctgttggttacttgggcn

SEQ ID NO: 10317 - DNA, 421 bp, Arabidopsis thaliana
  unsure at all n locations
  Clone ID: LIB24-054-Q1-E1-B11
ccgggnccacccacgcgtccgancacgcgtccgcggacgcgtgggagttggcaggtttagagaagaccaatcagctaatatccaaaggagtggcaattgtcgtcgggggaagcaatgatctgatcattacatattttggaagtggtgctcaacgactcaaaaatgacatcgactcttataccactatcattgctgattctgccgccagtttcgttttgcaattgtatggatatggagcaagacgtataggagtgatcggaacaccaccacttggatgtgtaccatcacaaagactaaagaaaaagaaaatatgcaatgaagagctaaactatgcttctcagcttttcaattctaagctcctccttattttgggtcaattgtcaanaaacccctaccaaattctacattcgtntatatggga

SEQ ID NO: 10318 - DNA, 407 bp, Arabidopsis thaliana
  unsure at all n locations
  Clone ID: LIB24-054-Q1-E1-B12
ccgggnccacccacgcgtccgangatatccgctctgaagcagaagaaaaggtaattctgaatgtctggaagaaaccggattcacagagatatccgagacagctatcatgatcatcgtgatttacctccggagagaccttttctccgaggccctccattgttacaacctccaccaccatctttgttagaagatcttcanatacaggagggtgaaatcagaaggcaggatgctgaaatcagaaggcttttgagtgataatcatggactagctgacgaccgaatggttctggagagagaactcgttgctgctaaagaagagcttcaccgaatgaatctgatgatttctgatcttcgtgctgagcaagatctgcaattgagggagtttaatgagaaaaaggcataaacntg

SEQ ID NO: 10319 - DNA, 426 bp, Arabidopsis thaliana
  unsure at all n locations
  Clone ID: LIB24-053-Q1-E2-F3
tgctctgccattggtccacanaacaacagaacagtgttagcacttgcaagcagaattgggatcaactatggaaaattaggcaacaatcttccttttccttaccaatcaatcaacctcatcaaaaccattaaagcaggccacgtcaagctctatgacgccgatccagaaaccctaaagctcctctctacgaccaatctttacgtcaccatcatggtccctaacaaccagatcatctcaataggtgctgatcaagccgctgcngataactgggtcgccactaatgtccttccttttcaccccgcaaacccnaatccgattcgtcctcgttggcaacgaggtcctcagctacaagttctgatcaaagacaagcaaatatggggctaatcttgtcnctgcnatgcgtaanagtantgaactcccttagag

SEQ ID NO: 10320 - DNA, 438 bp, Arabidopsis thaliana
  unsure at all n locations
  Clone ID: LIB24-054-Q1-E1-B3
ccgggnccaaaaattcccggancgacccacgcgnccgntcttatctcnntctctcatggcctcaccacaagcaaccaaattgtctcttataatccgatctcaaaggttggcttgttgggagcactgagacatcaaacatggtttcttctttctttcactcttaaaaaaaaccaatttagccctaaaaacctccttttagtttaatcccaaaagttcctcaaatctcttctattctctctctctctccattaagacccttcacaagcaaaaagctttgagctttaaatgagtttaaggtcctgcaaaaactgggtttttcctcgttgtacttgttcancttatctcctctgcataaacttcattganggaaaaagtcttttttattttgttgatctcttttaattaagatncttttgggttttaatttattaatctcca

SEQ ID NO: 10321 - DNA, 415 bp, Arabidopsis thaliana
  unsure at all n locations
  Clone ID: LIB24-053-Q1-E2-C5
acgcgtccggttgaacactgctagttctggtaataacagattgagtggtgatagttatgtattgtgctcttctgggtttcatgaacatagaggttatgctgataaatatgagttcttggaatcaaaaccactttgctctcaagatggcttctttgattacctcaactttgtttctgttctggtgtctggcttccatctgaatgtggcattcctatgatcagatatcttaaaatgggaatcggcaaaacggaaatcaatttcatgangattactttcagctgcacctaatcagcaaaaccaagtctaagcttatgcattatgttgctactttgagggaacagttggaacaactctcggaagagaagacccttgaagggcttcccagaagttacaaacgctaaggtgaatgantact

SEQ ID NO: 10322 - DNA, 414 bp, Arabidopsis thaliana
  unsure at all n locations
  Clone ID: LIB24-053-Q1-E2-C6
tgcaggcctgagtcaatgcacgagtataatttaaccccacactcgttgtatgctgctgtttccgttggtcttgagacagaaactatcatctctgttttgaataagctatctaagaccaagctacccggggagatcattgatttcatccatgcttctactgctaattatgggaaagtgaagttggtattgaagaaaaatcggtattttattgaatcaccattcccggaggtgttgaaaaggcttctcagtgatgatgtcataaatcgancaagatttacttctgagccatattatggtggtgatggatttacgatcggcaaaacaagtggtgaacttgangcaggacctggggagttgttgaatgaagcagaattggcanncagcagcagaagagaaagaaactcactcattttg

SEQ ID NO: 10323 - DNA, 411 bp, Arabidopsis thaliana
  Clone ID: LIB24-053-Q1-E2-C8
ccgccttgtccgattctgcttcacctctgcgcattccttgtctgatcctcgcaggaaactctactgtcagcaataggttgatgggttctgcagccagacagcctctcttctcatttggtgttattgctgatgttcagtatgctgatatttctgatggccgctcttttttaggtgttcctaggtattacagaaacagcatccttgtccttcaaagagctgttgaaacttggaaccaacatggtaacctcaaatttgttattaacatgggtgacattgttgatggcttttgtcccaaagatcaatccttggctgccactaagaaactagtccatgaattcgagaaattcaacggtcctgtgtatcatatgattggtaatcactgcctctacaatctcccccgcgaagagttgc

SEQ ID NO: 10324 - DNA, 485 bp, Arabidopsis thaliana
  unsure at all n locations
  Clone ID: LIB24-053-Q1-E2-D1
ctgttacgcctgcntgtaccggcccanaattcccgaatcgacccacgcntccgaagaaacccaaaagcanaagaagatggtggcgatatctatgtacagaggcaaccttcacaaagttcccgacgtacctcgccggtggataatgcctgaccgtaatctctctttcaaggatttcaaatctcttcttcatcgccgtaaaaaagccctttctcgtctcccccttaaccctaatttgaaccttagcgtcaagactgagttggttactgatcaggagaatccaattcttccatctgaagcgaacggttcttctgggaangcagaagctatttgaggtaaagagagaggagatttgtgggaatcggngttaagggagatgagaacaacgacaagaggttttgaaggagctcgatcagacggtgggngatcgtcccggggaagagtgacgggatcaaagggaaaccgaatgatgtgccacacaagtatgc

SEQ ID NO: 10325 - DNA, 344 bp, Arabidopsis thaliana
  unsure at all n locations
  Clone ID: LIB24-053-Q1-E2-D12
ccggtgccggtggaagaacaggacaaattgtgtataagaaattgaaggagaggtcggagcagttcgtggcaaggggtttagtgaggacaaagganagtaaggagaagatcaatggagaggatgaagtattcattggagatattagagatactgcatcaattgctcctgctgttgaanggattgatgctttggtcattcttactagcgctgttccgcaagatgaagcccggttttgatcctagtanaggaggaagacctgagttcttctttgatgatgggngcttatccaggaacaggttgactggattggtcatgaagaatcagatatacgctgntaagggtgc

SEQ ID NO: 10326 - DNA, 415 bp, Arabidopsis thaliana
  unsure at all n locations
  Clone ID: LIB24-053-Q1-E2-D5
ngccaacaaatcaaattttgtcaaaatggaggccaaaacattttttctcttcatgcttttcatcttttctcagtcttggctctcaacttctaaaaggatcctaaacaatccctctgttttctcatcgtctttgaatttttcgagtggnaatgcaganagacttataanatcattcaatctaatgcctaagtatgacgttaatgtcatcccaaaaggaagccttgatgctccaacgactcattganagacanattgattttctggcgacagccggttccaaaaacgcttccgttggtccttctgttcaagagtttggccactacgctggttattacagccttcctcattcanaatcaagccaagatgttcnatttcgtttttgaatcacggaacnanacaaccgattcgggtgtga

SEQ ID NO: 10327 - DNA, 417 bp, Arabidopsis thaliana
  unsure at all n locations
  Clone ID: LIB24-053-Q1-E2-D8
aaacagaggtggcagatggtcttgtcttagagaagacctcatcaccattaggcgtacttctgattgtttttgaatcccgacctgatgcacttgtacagatagcttcacttgccatccgtagtggaaatggtcttctgctgaagggtggaaaggaggcccggcgatcaaatgctatcttacacaaggtgatcactgatgcaattccagagactgttgggggtaaactcattggacttgtgacttcaagagaagagattcctgatttgcttangcttgatgacgttatcgatcttgtgatcccaanaggaagcaacaagcttgttacncagatancnaggatactacanaaatccctggtgctangtcatgctgatggaatctgtcatgtanatgtcgacaagggcttttgagtaccgn

SEQ ID NO: 10328 - DNA, 415 bp, Arabidopsis thaliana
  Clone ID: LIB24-053-Q1-E2-D9
aaataaaaaatcagtgagagagatggcgaggtcgagaagaaagtacaggaactctagggctaaagttcgcgttgctcttcctaagaagaaccctaatatctttaaaccagctttcaacttccctcccaagctccgcgctctcatgggagacgatgtccctgaatgggacgatcaagctagcgttatccagaactacaaatcctttggcgtcatctctaaccctaatttgcttggtatccgagctcgtaccgaccatatgattcaggatgattccctcaacgttcctccacctgtagagccaccgactgatgatcctattgctaaggagttccgagcccattgattctgggaagcgaacttgaggaagacgatcttaagacagcattggggaagcaaagaaaagatggaaagagtg

SEQ ID NO: 10329 - DNA, 484 bp, Arabidopsis thaliana
  unsure at all n locations
  Clone ID: LIB24-053-Q1-E2-E1
tgtttacgcctgcttgtaccggcccgnaattcccgaagtcgacccacgcntccgaaacaactcactccttatcttaacgagaagcttaaacgcacggtggaagttgttccggccaaaaaggatgacggagcaccagtggcagctgcagcggcggctccagctggcggtgagaagaangacaaagttgctggtgaaaagaaagagattaaagatgttggagaaaagaaagtcgacggtggtggtgagaagaanaaagaagttgcngttggcggcggtggaggaggangtggaggtggaggagacggtggtgctatggatgtgaagaaatcggagtataacggttacggttatcctccacagccgatgtattactacccagaaggacaagnttacggtcaacaacattacatgatgcaaaggtcaatcatcggcaatcngtntgtacaaggaaccgtattcnaaccaagggatacctncaacaaat

SEQ ID NO: 10330 - DNA, 423 bp, Arabidopsis thaliana
  unsure at all n locations
  Clone ID: LIB24-053-Q1-E2-E11
ccctttaatttctaatcaccgaccaaaattgatcggaaacctagagctcttcgtattgctccgccaccatgcatatccggcgccagatcttcgttaaatctcctgactgtcaaaaagtcgtcgctctgcaattggatcctgcncaatctctattaactctttcgggtatcacttccttactcgaatcgtcgcancgtatatcgttttcggcttgctcgattacnctagatgggaaacttttgaatggctcnacacggatccaagtancgaagcttccttctgtnnccatgctcaagtcctttccctcgcctccgtgngaggtggangagatggtggggcanncgggaagcgangtctcgcgnttgntatcncantaggtagngcgggggnaagaaagcttgacaaggttgattcctanatgga

SEQ ID NO: 10331 - DNA, 421 bp, Arabidopsis thaliana
  unsure at all n locations
  Clone ID: LIB24-053-Q1-E2-E2
atttcccattttctgctaattttctttcactttctcggctgattttcctgggaaaatactctttatctaaacgtcctaaaacactactcaaaaacgantgttttttttatgttanaacttatatttgtgtgactattttgatataactattattgcagatctgtggntcttaacacntctctaatgcntataatgacnangatctangcatgagaaggaanagataagaagctcatgacaagaatctgaagaaaattaaatttgtttttcacttatcnccgccantgttgttctacactgagcttagacagttgacaccgtgtnanccaaaattcaaaagtttancantggaaacatactcacgctttttacctanttatcatagctctgatanaagtatgagagtaggcgtttacaangg

SEQ ID NO: 10332 - DNA, 411 bp, Arabidopsis thaliana
  unsure at all n locations
  Clone ID: LIB24-053-Q1-E2-E3
caatcaaaatcatgaacattttaagttctcgcttggttggacttgttccaatgctgatcaaaattgatgctgcgaattccttgattgaggattatgccgcctgccttgagggacgacttgaagagggtgaagttgtagagaacagttgtgatgatctangggtccttattatgcancttcnggttganaatatcaaccggcctgccccaagtatcacacatttgcntctgaagtttgatcttgatgcccctgtggaaacggacagttttgcagccgaagtttcactacagttgtcgngnaggtcattcttgaaatgctggagaagcttccaaaccctgatataaacttcttactctttgantttggcttccagcttttgtgtgagttgaacttggatgcactaactagtgn

SEQ ID NO: 10333 - DNA, 378 bp, Arabidopsis thaliana
  unsure at all n locations
  Clone ID: LIB24-053-Q1-E2-E6
acgcgtgggttcagaaactgcaaacagtgtgctggaggtaaaattggaattgcacacagtccagcttggttcgaaccacaagaccttgagcatgttggaggttccattgaacgtgtgcttgatttcatccnaggatggcatttggctccaacaacttatggagattatccacaatcgatgaangatngtgtcggtcatanattgccaaaattcacagaanctgagaagaanttgctaaagggttctacagattacgtaggaatganttactanacttcagtgtttgcaanangaaattaancctgatcctaagagtccganttggacgactgattctcttgttgattgggatagcaaggagtgtggatgggatacang

SEQ ID NO: 10334 - DNA, 405 bp, Arabidopsis thaliana
  unsure at all n locations
  Clone ID: LIB24-053-Q1-E2-E8
anngannnnnnnnnnnnnnnnnnnnnnnnnnnnnnnnnnnnnnnnnnnnnnnnnnnnnnnnnnnnnnnnnttaagattgtgattaagtggttcactatatttaagttactttgaggagctactaatcatgggtcatcactcatgctgcanccagcaaaaggtgaagagagggctttggtcaccggaagaagatnagaagcttattanatatatcacanctcatggctatggatgttggagtgaagtccctgaaaaagcagggcttcaaagatgtggaaaaanttgtacattgcgatggataaactatcttcgacctgatatcagnagaggaaggttctctccataagaagagaaattgatcataagccttcanggagttgtgggaaacatgtgggctcatatngc

SEQ ID NO: 10335 - DNA, 392 bp, Arabidopsis thaliana
  unsure at all n locations
  Clone ID: LIB24-053-Q1-E2-C11
acgcgtgggctaaatcttgccttcctgactttctctctacgacagaatttttgaagcttctctctgcttatcgacacgatggttctcgaggcgactatganatgtatcgacaactccgagtggatgcgaaacggagattactctccgtctaggttacaggcgcaaacggaagctgttaatcttctttgcggagccaaaacccagtcgaatccggagaanacggtggggattttgacaatggctgngcaaaggagttagagtattgactacncctanctctgatctnggcaaaattctggcctgtaggcacgggcttgatgtgggaggagaagatcancttaanngcagctatccagatcgncccaactagtctcttaagcatcgccaangac

SEQ ID NO: 10336 - DNA, 379 bp, Arabidopsis thaliana
  unsure at all n locations
  Clone ID: LIB24-053-Q1-E2-F10
aaagagatttcggtcccatgcatgagtgtttttgatgttggtggaaacagcttatcgggtgtaatccctgattttctcaacantaccacaagccattgtcctcctgttgtttactttgacaggttttctattgaatcttacancgacccgtcgtctgtttatctctccttctttaccgagaaggctcaagttggaacttccctgatagatcttggaagtgatggaggtccggccgtgtttcataattttgcagacaacaacttcactggtactctcaagtctataccacttgcacaggagcggttgggaaagcgagtctcttacatattttcngctggagggaatcagttgtacgggcaatttccgggaaatctgtttg

SEQ ID NO: 10337 - DNA, 412 bp, Arabidopsis thaliana
  unsure at all n locations
  Clone ID: LIB24-052-Q1-E2-B12
gggctgaagtgttggctcatctctttccagattccggcttcgaaatttgggagataagcgatggcaaacgccaatggaaaagctgcgactagtttaccggagaaaatctcggctaaggcgaatccggaggccgatgatgctacggagatcgctgggaatatcgtctaccacgccaagtacagtccacatttctctccattgaagttcgggcctgancaagctctctacgctacngcanagagtcntcgcgatcgtcncattcangctgtggaatgagacttatgttcattttaacaagagttgatcnaaaacaaacttattacttgtcaatggagtatctcaagggtcgtgctttgacccaatgccatttgggaatttgaacccttcaaggtccatatcccgatgcactgcg

SEQ ID NO: 10338 - DNA, 499 bp, Arabidopsis thaliana
  unsure at all n locations
  Clone ID: LIB24-052-Q1-E2-B5
tgccccnaaaagtccgaaattcccgggtngncccacgcgtccgctantagtgtatatggttctccaggaagcacacctcttcatttagcagctagaagtggatctatagattgtgtcagaaagttgcttgcttggggtgctgatcgtcttcaacgagacgcttctgggagaataccttatgtggttgcgatgaagcataagcatggagcatgtggagccttacttaatccgtcctctgcagagccacttgtttggccatcaccattaaagttcatcagtgagcttaatgacgaggcgaaacttctcttagagcaggctttaatgggaggctaacagggagagagagaaaaccatcctcaaaggaacagcttattccttaccatcaccctctttctctgacacggatgataacatgtccgaggtgagtgatacgggaactgtgnctgcatttgcctttgagcaagtatgtacaattgangttgagngactgtggtcacca

SEQ ID NO: 10339 - DNA, 420 bp, Arabidopsis thaliana
  Clone ID: LIB24-052-Q1-E2-B9
aaacatgaccgtaatgcaattctgcgagcaagatgttgtgaatatgcattgttaacacttgaacattggcctgatgctccagaaattcaacgatcagttgatttatatgaagatctgattagatgctgtgttgcagatgctatgagtgaggtgcgggcaactgctagaatgtgctacagaatgtttgcaaaaacttggccggatcgttctcgccggttgttttcgtcctttgaccctgtcattcaaaggctaataaatgaagaagatggtggaattcataggagacacgcctcaccatctgtccgtgagagacattcccagccttcattttctcagacgtctgctccttctaacctacctggctatggaacatcagctataagtcgctatggatagaagttcaaatttatcatccgggag

SEQ ID NO: 10340 - DNA, 465 bp, Arabidopsis thaliana
  unsure at all n locations
  Clone ID: LIB24-052-Q1-E2-C1
acgcgtccgcgaaggattagtcctgttgctgcaacagctatttcaaccattcagtcgatgccactctcgggatttggaaacagcaatgtttcttcgttttctagctatgatgatgggttttcttcgcagaagtctgctgagtctgcacccctaaactaccagctctacagttgggaaaattttgagccagtaggtggtatgctacctcagccagaatggacggcatgggaccaaacagttgaatactgtgcttttgcttatcancaatacatggtcatatcgtccttgcgccctcagtatagatatccttggngatgttgccattgcacatgcnncnggagctgtttggcatcgcanacagctgttttgtggntacaccaaccacnanttgaatgtgnttttggggangcgggagtttcccanattngatacagacnaccnggaaggatcgaaaggaagaaatng

SEQ ID NO: 10341 - DNA, 487 bp, Arabidopsis thaliana
  unsure at all n locations
  Clone ID: LIB24-052-Q1-E2-C3
aatcccanatcgacccacgcctccggaanatctttactataactgaaacactactcgaggccaagttgctttagccgtaatcgtcgtcgtccctcttcccgatattatctcttctctgttcttcgatttcgaaaccctaacctcctctcnttaattcgcgttttctggatcgaagatggtggcggctggtaaatccgacctttccttgcccaaaactttcgcctgcagtgccttcgctgcttgcntcggtgaggtatgcacaattccattggacactgctaaagttaggcttcagctccaaaagtctgcncttgctngtgatgttactctgcctaaatatcnaggattgttgggaactgttggtancataccaaggggaataagggttacgttcacnanggaaaggtgttgtacctggaattncatcgtcaatgcccaanttggagggtcntaangattgggnatgtatgagccggtnaaaaacttg

SEQ ID NO: 10342 - DNA, 482 bp, Arabidopsis thaliana
  unsure at all n locations
  Clone ID: LIB24-052-Q1-E2-C4
ccctgtgctacgccccgganattcccgaatngacccacgcgtccggcgctctcgctgtcggcatgttctcctccactccgccgcactcgtcgtgccggttttcgaacaagctgctcgatcttcgcgaatccagcacagcgagccaagaggaagctgcttgagctgatctccgaggaggatcgaggtctgagaacccagaaagaccccaagaagcgagatgaaatcgtgaacgccatcgaatccatgacggttatcgnggcgcatctccatcaccacagacgactctctatctgccacgtngcggctcttgtggacgaccgagaangaacagttgttcatcataggaaaaaggnaggcttgtttgggacgaccgccggagacntttttgcangttatngatgtgaataanacggattctcnataacgtcgtcnactttcncgccngacggggttttcttcggtacgctccgaatatcnaatat

SEQ ID NO: 10343 - DNA, 418 bp, Arabidopsis thaliana
  unsure at all n locations
  Clone ID: LIB24-052-Q1-E2-C9
aaaatatgtannnnnnnnnnnnnnnnnnnnnnnnnnnnnnnnnnnnnnnnnnnnnnnnnnnnnnnnnnnnnnnnnnnnnnnnnnnnnnnnnnnnnnnnnnnnnnnccgctggacgtcgaaacaacctgcctcgtccaaacctcagaagacgatgtaaggtcaccgcttcacgggctaatattgaacaagaaggtaacacagtgaaagaacccattcagaatattaaagtaaagggatacataacggcccaagaagagtttctggagggcataacttggtcgagaggtctcgatgacattgctgatatccgcggcagatcattgctcgtcgagcttattagcgccaagactgaccagcggattacggtagaagactacgcacaacgtgtatgggccgaagcccctgatgagaagtacga

SEQ ID NO: 10344 - DNA, 468 bp, Arabidopsis thaliana
  unsure at all n locations
  Clone ID: LIB24-052-Q1-E2-D6
acgcgtccggaaactcaatccaatctcaccaaacnnnnnnnnnnnnnnnnnnnnnnnnnnnnnnnnnnnnnnnnnnnnnnnnnnnnnnnnnnnnnnnnnnnnnnnnnnnnnnnnnnnnnnnatgaaatttggactcaactcgcctgcagttagagtagaaggatttgattgcttgaaccgtgaccgtcaaaactcgagcatccctgccatggcttagtagacaaacaacatannaacaagtgtacatagagattccggaatcgttcgttcgncaatgcctaacagaggaggatttgattactactgctgcaagctattactactaccatttttgaaagtanngaatatgtttttgtttttcatcttcncctaaggagagagagagagggaagaggaacggaggaagatgaaagatcagttaccgtngccggtcacggtttaactgttttattcacggttangtgtttg

SEQ ID NO: 10345 - DNA, 394 bp, Arabidopsis thaliana
  unsure at all n locations
  Clone ID: LIB24-052-Q1-E2-E11
cgacatcaacgtctgacttcgcttctcctctcacatggctctacctaaccaacaaaccgtagattatcctagcttcaagctcgtcatcgttggtgatggaggcacagggaaaacgacctttgtgaagagacatcttactggggagtttgagaagaagtatgaacctactattggtgtggaggttcatcctttggatttcttcacaaactgcggaaagatccgtttttactgctgggatactgctggacaagagaaatttggtggccntanggatggatactacatccatggtcaatgttgcgataataaatgtttggcntcacagcaanggcncagatacannaatgttccggacatgggcgatcctngatctttgccggggtgttgtgaaana

SEQ ID NO: 10346 - DNA, 420 bp, Arabidopsis thaliana
  unsure at all n locations
  Clone ID: LIB24-052-Q1-E2-E12
agaacaaagcgacgcatccgattttatttgtttgataagttcgtgtcgtcttcgtctctctaacccaattctgtggtgtctgaagaaagcagaatcaaatccatgtcnttcangaggacttagcaggccaaatgcaatatctggaatgggtgttgcagatgagagcaaaaccacatttctagagcttcaaaggaaaaaaactcatcgctatgtggtcntcaagattgatgaatccananaagaanttgttgttgagaaaactggaaancctacagagaagctacgatgatttcttagcttcacttcctgataatgactgcaganacgcngtttangacgttgatttcgtnacntctgaanaagtggcanaagagcnnaatccncntcnttgcctggntcnccttcgacctcngggaaatc

SEQ ID NO: 10347 - DNA, 512 bp, Arabidopsis thaliana
  unsure at all n locations
  Clone ID: LIB24-052-Q1-E2-E3
ctacgnccccggaaattcccanatcgacccacgcctccggtgctactcatttcaggccaaaattgattgttgctgggtgcaagtgcttatgctagattgtatgactatgcccgcatcagaaaggtctgtaacaagcaaaaagctgtaatgctaagcagatatggcacacatcaagtggtttggttgctgcnaatgtaatcccttcaccgttcgactatgctgatgttgtaaccaccacaactcacaagtcacttcgtggaccccgtggagccatnattttcntcacaaagggtgttaaggaaattaacnaagcaagggaaanangttttgtaccattttgaagatccngatccanccaaactgtcntccctggtcttcaangtggtccacacaaccncactatcacangactagctgttgcnttnaaacanggcaactacttcangagttcaaaagcataccncngaacaagntcctgngtaacantngcaaagttttgctcagactccnaa

SEQ ID NO: 10348 - DNA, 469 bp, Arabidopsis thaliana
  unsure at all n locations
  Clone ID: LIB24-052-Q1-E2-E6
acgcgtccggcaactgtggaagcctaacatcggtgtgcttgagctaggggtcttaaatgcgaccggtttaatgcccatgaaagctaaagaaggtggtaggggaaccacggacgcgtattgtgtggcaaagtatgggcagaaatggatcagaactcggacaattattgacagctttaccccaagatggaacgagcaatatacttgggaggtttttgatccgtgtactgtagttacagttggtgtgttcgataactgccatctacacggtggtgacaaaaacaacggaggaggaaaagattcaagaattggaaaggtgaggataaggctctctactctcgaggctgatcgagtctacacacattcatatcctcttttggtgctacatcctantggagtcaagaacatngganaagattcacttagcngtnaggttacttgctccttcattgcctcaacatgatgttatatn

SEQ ID NO: 10349 - DNA, 514 bp, Arabidopsis thaliana
  unsure at all n locations
  Clone ID: LIB24-052-Q1-E2-E7
aatggccgcctggncctagaaagtccgatnattcccgggtggncccacgcgtccgccnacgcgtccgaaannnnnnnnnnnnnnnnnnnnnnnnnnnnnnnnnnnnnnnnnnnnnnnnnnnnnnnnnnnnnnnnnnnnnnnnnnnnnaccgtcgtcaacaactgtcccttcactgtctggccagccattcaacccaacgccggccaccccgtcctagagaaaggtggcttcgctctcccaactttcactcancgctccttcaacgttccaaccacacactggtccggtcgcatctgggccagaacntggtgtgcccactacaacggaaaattctnctgcctcaccggagactgcggaaaccgcctggaatgnaacggtctcggcggggcaccacnaagcttctctagctcagttcgacctcnaccacggtggtcaggacgacntcncctcgtanggtggtctctctcgttgaangttanaatgtnccgacggacggtggactcctnagggaagg

SEQ ID NO: 10350 - DNA, 416 bp, Arabidopsis thaliana
  unsure at all n locations
  Clone ID: LIB24-052-Q1-E2-B11
acgcgtggggttttccttccaagtgcatgagaaatcaatcctgatgccttttctctccgcaacactattagctctcaaactacctgaccatttcagtcatttaacctattacgctctcttctcgatgttccctcttctttgccgtgacaaactcttgatcccttacttaacactatcttttctcttcaccgtcatctatcattcacccgggaatcaccatgcgatacagaaaaccgacgtttcatttttctcctttaaaaacttcccgggttatgttttcttactacgaacccatttcttcatctccgtagttcttcatgtcctctatcttaccattaaacctcctcagaagtaccctttcctattcgaangcactgatnatgaatctctgtttctcatacttantaatggttggc

SEQ ID NO: 10351 - DNA, 419 bp, Arabidopsis thaliana
  unsure at all n locations
  Clone ID: LIB24-052-Q1-E1-E4
aaatgcngaatgtacttcgaaattctaacctgacccttgccgttttganttgctttgtcntgatagcttcaaagctatgttccgtcgattcctctgtgtatgacccacacaaaaccctgaagcagcggttcgagaagtggcttaaaacccacagcaatanatggaggaanggatnagtggatgctacggtttgggatatatcagtctaacgtccagttgattgactacatcaactcnctccacttgccctttaagctaacggataatagatttgcanatatgaccaattctgagtttaangcccattttctcgggttgaacacgtcttccttgaggttacacnaggangcagagaccagttttgtnanccagcaggcaaaggtcccggacgctgttggacctggaagantcaaggtgct

SEQ ID NO: 10352 - DNA, 433 bp, Arabidopsis thaliana
  unsure at all n locations
  Clone ID: LIB24-052-Q1-E1-F3
aagcttaagtgacgaagcagaaaaaaaaatggcgaaatctcagatctggtttggttttgcgttactcgcgttgcttctggtttcagccgtagctgacgatgtggttgttttgactgacgatagcttcnaaaaggaagttggtaaagataaaggagctctcgtcgagttttacgctccctggtgtggtcactgcaagaaacttgctccagagtatgaaaagctaggggcaaccttcaagaaggctaagtcngtgttgattgcaaangttgantgtgatgagcaaaagagtgtcctgtactaaatanggngtttagtngggntacccaaccanttcagtgggtttcccnaaaaggatttncttgannctcngangntntgaaggggtcccacgccattgcnggaaagcttnggnctgaaaaccttaaacaaggga

SEQ ID NO: 10353 - DNA, 447 bp, Arabidopsis thaliana
  unsure at all n locations
  Clone ID: LIB24-052-Q1-E1-F4
acgcctgnctgtaccgcccanaaattcccaaagtcgacccangcgtccggcagagggaaggcgaagaattatgataacctctcatcaacgataagacaaaatccataaactagtantatcatccaatcctctcacttcttccttattccctcactttcactctcactatctgttgacttcacatggcttccaccgccgcaactgcagctctttcgatcatcaaatccaccggtggcgccgccgttacacgctcctcccgcgcctcctttggacacattccctccacatcngtctccgcacgtcgccttggnntctccggccgtcgtngactctcgtttctcggtccangtggcgtccaaggtccacgcccgntgcncnggaaagggccgccagggggagtgnattacgatngcgaangaagagtgttggggatntggaattctggtg

SEQ ID NO: 10354 - DNA, 441 bp, Arabidopsis thaliana
  unsure at all n locations
  Clone ID: LIB24-052-Q1-E1-F7
acgcgtccgaccgttcctaaaacgtctcccgtcttcttctaatggcgatcaatcgtagctccgatcatgaatccgacgaaaacacccgtctttaccatccttaccagaactaccaggtcccgatcaaatctcagtatctatacaagcttccgacttctccggaatttctattcacggaagagtctctcaagcagcgtcgatcatggggagaaaatctcactttctacacagggacgggttatctagccggctctgtagccggtgcttcagctgggatcntctcnggtatcangagtttcgaaaatgganacacgacgaagctgaaaaatcnacaggattttgaactcgtctggtcaggcaggtccgacttggggtaaatangggtttgggattgttggggttgatctngccagnggattgaaaactggtgtgggtggcngg

SEQ ID NO: 10355 - DNA, 496 bp, Arabidopsis thaliana
  unsure at all n locations
  Clone ID: LIB24-052-Q1-E1-G2
tgttacgcctgnctgtaccgccccanaattcccaangtcgacccacgcgtccgcccacgcgtccggggttatggcctgagattgctcgaggatgtacgagaggggcaattcctaattgaatatgttggagaggtgcttgatatgcaatcctatgagactcgccaaaaagaatatgctttcaagggtcagaaacatttctatttcatgacactaaatgggaatgaggtaatagatgctggtgcaaagggaaacctanggcgtttcattaaccatagctgtgaaccaaactgccgtactgaaaagtggatggtgaatggtgaaatttgcgttggaatattctccatgcaagaccttaagaagggtcaagaattgacatttgactacaactangtcangggtttttgggtgccngccgccaaaaaagtgcgaantgttggatcaancacattggcacnanggttatatttggngggaanattctcctgaaatngtgaat

SEQ ID NO: 10356 - DNA, 446 bp, Arabidopsis thaliana
  unsure at all n locations
  Clone ID: LIB24-052-Q1-E1-G4
caatttccattgctactaaaaatatcttctttccaaaacaattcacgcatttacgtttttctcaatctttacatatatggtaaccaactcttattccattcctctgtaactcacacaaattcctgtccaaaaattagttttttcttttcatgtgatgtgagaatttgggttacgagaaagatgaanactattagtggattaggtattgggttaagtttaatgtttgggtttcttctattagcacttgttggagaagtctactatcttcnaaagatgtaagaagcacaagaaggagagtcataagccaagagagtgaagaagaganagaagaagaacaacaacaaaacggatacgctaaagaacnaatccagctcttctgcntcaaaaaaactcaatctntgcagcaagacaaatgggaggaacgagaaaggtgaaagtccccantg

SEQ ID NO: 10357 - DNA, 355 bp, Arabidopsis thaliana
  unsure at all n locations
  Clone ID: LIB24-052-Q1-E1-G5
agacccaagagttgcagttgttactggttccaacaaagggattgggtttgagatttgcaggcaactagctaacaatgggataactgtggttttaactgcgagagatgaaaacaagggtcttgctgctgtccaaaagctcaatactgagaatggtttttctgatcaagccatctcctttcancctcttgatgtctccaacccagacaccatcgcttctcttgctgcttttgtcaagacccgcttcggcaaactcgatattctggttanaatgccggaattggaggggcgaatgttaatgttgantgttcncaaanctcagattggctgaangctggtgcgccaaactgatanttcc

SEQ ID NO: 10358 - DNA, 442 bp, Arabidopsis thaliana
  unsure at all n locations
  Clone ID: LIB24-052-Q1-E1-G7
acgcgtccgtttatctgaaaatatctaaagaaaatggtattgaactttagagataagtcctgcatttttctggcaattctttgttgtttatcattgagttgtatagtaaaagcatcagtctcttatgatcgtaaagctgtgatcatcaatggacaaagaagaatccttctctccggttccattcactatccacgaagcacccctgagatgtggcctggcctaatacagaaagccaaagaaggaggcttggatgttattganacttatgttttttggaatggccatgaaccttctcctgggacaatattattttggagacangtatgatttggttaagttcatcaagttggtgcaccaaagctggtcnctatgttaatctcaagaattggcccttatgtttgtgctgaatggaantttggggggaanttcccggtttggctca

SEQ ID NO: 10359 - DNA, 413 bp, Arabidopsis thaliana
  unsure at all n locations
  Clone ID: LIB24-052-Q1-E1-G8
tccttcatctctcaggtaaaaaaactgagtcgagatttggtgacgtgatgaatcatttggtgataatctctgtgttcttgagctcagtattgttgttatatagaggagaatctggaatcacaagtagttttattcgatctgaatggcctgcggttgatataccatttgatcatcatgttttcaaagtcccaaaaggatataatgcaccacaacaagtacacataactcaaggtgattatgatggtaaagctgttatcatctcttgggttacacctgatgaacctggttctagccaagtacattacggtgcggttcagggggaaatatgagtttgttgctcaagggacntaccatancnacacntntttacaaagttaaaagtcctgggctttagtcatcactgccttgtcncc

SEQ ID NO: 10360 - DNA, 421 bp, Arabidopsis thaliana
  unsure at all n locations
  Clone ID: LIB24-052-Q1-E1-G9
cctaacaaaagcttcagacttcaattctttagctacctctctcccatggcagtaagtgttttctttccttctttccttctcctcttcttcttatttaggtctagagctttctctcagattatagtttttgtttcgattccgtcaatctctgaccctttttttggaggatttgtagaaagttgagtcttaatctatttgcatttatggttcttcctattgagataacatttctatggattgcgatgtctattantattcanntttatgattctgatttgctttagataaganaagggttttatgaaagttactatttttatggtaaagtttctanttttgcttaagcagagatttcancnttagcatttgtacttggtcganatccgataancncaatttggaggttgttcggtttnggatt

SEQ ID NO: 10361 - DNA, 403 bp, Arabidopsis thaliana
  unsure at all n locations
  Clone ID: LIB24-052-Q1-E1-H10
aaccgagagttgcaattaatgcgactaatggaccatccaaatgtggtttccttgaagcattgtttcttctctacaacgactagagatgagctcttcctcaatctcgttatggagtatgtaccagagacattgtaccgggttttgaagcactatactagttcaaaccagcggatgcctatcttctatgtcaaactttananatagcaaatcttcagaggcntggcttanatccatactgctcctggtgtctgccacagagatgtgaaaccananantcttttggttgatcccctcacccatcactgtaagctctgtgattttgggaagtgcaaaagtactggntgaaacgtgaagcnnacaanatcatatagccgcncncggtagttaccgaactccagaacnc

SEQ ID NO: 10362 - DNA, 291 bp, Arabidopsis thaliana
  unsure at all n locations
  Clone ID: LIB24-052-Q1-E1-H3
gtaccgccccaaacattcccnaggtcnacccacgcgtccgnatgtgtgggagagaggctgagacatttctggggattgatggagatgaaaggagataaagagagttttcagatgtaattaannagaaaacagatcttttggattttagggtttatatccaacaaaagctaaccaaaaactaataattcaagattggtgcttcggaagaagacgcanaagtgtattttcttgcagttgcaaaactgttacnaaatttttaaagttttccnaaaaanaaaaaaaaanaaaagg

SEQ ID NO: 10363 - DNA, 444 bp, Arabidopsis thaliana
  unsure at all n locations
  Clone ID: LIB24-052-Q1-E2-A12
aattcccgggnccacccacgcgtccaattagagtggagtggagctttgaattggatgatcattatccatgtcgattctacttaggccgtcgtcctctccttcactctgttcttctctcaagcttttccgattatcctctccggattctttaatcgacgcagctgtcctcaggaacaggacaaagccgtcgcagtcgtttcgaatggaggtcgtttcgagtaattccacgtgtctttcgagtattancgtcggtgaagattttccatcagaatatgaagcagtggctaccggttccggatncaganagcangaagaanagctgngcgttttgctacacncgacgtcntttcgtggtcctcatggnatnggtnatctcgggagaagaaggccttccgggncanncnangtggcnttcagtcgaacgggttgctccgtttgggangg

SEQ ID NO: 10364 - DNA, 408 bp, Arabidopsis thaliana
  unsure at all n locations
  Clone ID: LIB24-052-Q1-E2-A8
aaaccgttcccaggagctgctttgatttggtttatcgttgatctgtgaaaatggggacgaatgatctcgacatcgaagaagggactctggagatcggcatggagtatanaactgtttctggtgttgctggaccattggtcattcttgacaaagtgaagggtccaaagtaccaggagattgttaatattcgcttagganatggatcaacgagacgtggtcaggttttggaagttgatggcganaaagcagttgtgcaggtttttgaaggaacatctggaattgacaacaagtttacaaccgtgcaattcacaggagaggttttgaaaacacctgtatcattgngacatgcttgggcgcatatttaacggttcaggaaagccgatttgataatggccctcctattctgcn

SEQ ID NO: 10365 - DNA, 409 bp, Arabidopsis thaliana
  unsure at all n locations
  Clone ID: LIB24-052-Q1-E1-E3
ctactcttttcaggccaaaattgattgttgctggtgcaagtgcttatgctagattgtatgactatgcccgcatcagaaaggtctgtaacaagcaaaaagctgtaatgctagcagatatggcacacatcagtggtttggttgctgctaatgtaatcccttcaccgttcgactatgctgatgttgtaaccaccacaactcacaagtcacttcgtgngaccccgtggagccatgattttcttcagaaagggtgttaaggaaattaacaagcaagggaaagaggttttgtatgattttgaaagacannatcaaccaagctgtcttccctgntcttcaaggtgggccacacanncacactatcacanggactangctgttncctttggaaanaatgcaacntacttcagaagta

SEQ ID NO: 10366 - DNA, 416 bp, Arabidopsis thaliana
  unsure at all n locations
  Clone ID: LIB24-052-Q1-E2-B10
tctcgaacttcgccggagaatgatggaaacagctctgctccggtactgcgtcaacttttccggtcacaagaaaatctctgctcatcaaagaagtaatagtgagattccgaaaacgagtccgggaggatgcgaagacgagtggtgtgctagggttttgagtagaagatcggtaatggcgtcagggttggtctcctcgacgacggctttagcatttccaagggaaggattggctgtcgttaaacaaggtcttctcgctgggagagttcctggtctgtccgaacctgatgaagaangttggagaacataccgtagaccaagacgaagaagtcagganggcatggtgttggttggagtcctattatcccttacgccttttcggttcctcaagattggaatgangtacctgtatcgatcgc

SEQ ID NO: 10367 - DNA, 473 bp, Arabidopsis thaliana
  unsure at all n locations
  Clone ID: LIB24-051-Q1-E1-G9
acgcctnctgtagcctccaaaattccaaggcnnaggaggaaatattttcgatanttccattttcagatgatgaagaaaatggacccgtatctgggcgctcactgaagttttcgattaaaggtttggtggaaaaatccccaaagaaaagcaaggagtatgggaaacactcttcaagtaaaaagcatgctagtaaaaaaggtagtcacactaanttggagcctgaagttcatcaggagattggatctgagagacnccgactaggtggtgttagaattgataatgtgggttttcagataaacgaacaagcgggncgttaattcttctgtanctggaatttgctcaacacatgaacctnanattgtaaaacacaaganggttgatgatgtnatggtgactgangaagaaaagccgtccanggatanttngaataaangtgtaccaaagcntcctgaagtctgaataatcgagggant

SEQ ID NO: 10368 - DNA, 415 bp, Arabidopsis thaliana
  unsure at all n locations
  Clone ID: LIB24-051-Q1-E1-H6
acgcgtccgaaaaagaanaaaaacctaatttcaagaaattcaataaatatcatcctccggataagttgttattgtacgtttaccaaattcaagaacaagaaaaaacttttcctttgaaacaaagaaacatggatttcttcaccgatcaagtaaagaataaattctccgacangaaaccggagagctctgatccggagccaaaccacancaaanacnaacccggtcacacggagccaacancacataaacccggtcacggcgagccaacaanacataaaccggtctccaacaccggatccaacaacanacagaccggctacgaagcgctgagctcatggctngtgcnaagatcgtangcggaagctgctcaanccggctgctcgtcacgagtcagacaagcttgacataggcanag

SEQ ID NO: 10369 - DNA, 365 bp, Arabidopsis thaliana
  unsure at all n locations
  Clone ID: LIB24-052-Q1-E1-A12
agagtggagtggagctttgaattggatgatcattatccatgtcgattctacttaggccgtcgtcctctccttcactctgttcttctctcaagcttttccgattancctctccggattctttaatcgacgcagctgtcctcaggaacaggacaaagccgtcgcagtcgtttcgaatggaggtcgtttcgagtaattccacgtgtctttctagtattagcgtcggtgaagattttccatcagaatatgagcagtggctancggttccggatccagagagcaggagaagagctggcgttttgctacacccgacgtcgtttcntggtcctcatgggnattggtgatctcggagaanaaggccttccggt

SEQ ID NO: 10370 - DNA, 434 bp, Arabidopsis thaliana
  unsure at all n locations
  Clone ID: LIB24-052-Q1-E1-A2
tacgccccanaattcccaangtcgacccangcgtccgcccacgcgnccgctttctttctcagattaatcgctgagaagaagcaaccacctggagacggcggagatggcagggtacagagtggaagatgactacgattacctcttcaaagttgttcttataggcgattctggagttggcaaatccaatctcctttccatattcactaaaaacgagttcaatctagagtctaaatccaccattggcgtcgaattcgccactcgtaccttaaaagtcgatggnaaagtcgttaaagctcagatttgggacactgctggtcagngagangtaccgtgccatcactagtgcatattacccgtgganccntgggtgcaactcctaggtatangatgtaactccncccgtgnancatttgngnatgttcatcggtgggtta

SEQ ID NO: 10371 - DNA, 430 bp, Arabidopsis thaliana
  unsure at all n locations
  Clone ID: LIB24-052-Q1-E1-A8
gaaccgttcccaggagctgctttgatttggtttatcgttgatctgtgaaaatggggacgaatgatctcgacatcgaagaagggactctggagatcggcatggagtatagaactgtttctggtgttgctggaccattggtcattcttgacaaagtgaagggtccaaagtaccaggagattgttaatattcgcttaggagatggatcaacgagacgtggtcaggttttggaagttgatggcgagaaagcagttgtgcaggtttttgaaggaacatctggaattgacancaagtttacaacccgtgcaattcacaggagaagttttgaaaacacctgtatcattggacatgccttgggccgcatattttaacgggttcaangaaaagccgaattggataatngcccctccgaattctgccaagangccataac

SEQ ID NO: 10372 - DNA, 474 bp, Arabidopsis thaliana
  unsure at all n locations
  Clone ID: LIB24-052-Q1-E1-B4
gtaccgccccaaaaattcccaaggtcnacccacgcgtccgnannatcagtccgatccgagtgaagacagactctgaggagctattgcagttagatggaaagagtatatctgagtgggtgagtgaaatagatgcantttccaaagaagtanaggcagagttacgtctcacgagatatcggctgtcacttggttcaagttcttgaagctgtaaatanagttctcttcgatctganaggcttcaanaggacatctaantactttagacccggagaattcctagcttcacnctgtacttaactgtanatgcagcactgcgtttctgattaagtgtaaganacattgaagtttgtaagcgcctgaatgtaccaattggttggatctccagttggggggaanatntttcngganttggcctaaaancgggagtatcctggagggaactctttaanaccaacttcaangacagagcttgtt

SEQ ID NO: 10373 - DNA, 497 bp, Arabidopsis thaliana
  unsure at all n locations
  Clone ID: LIB24-052-Q1-E1-C2
ctgttacgcctgntgtacgccccanaattcccaaagtcgacccangcgtccgaaaaaaccttgacgccgttttcttcttcgatcttcttcttcctccagagaaaacaacatggccatggcaacaaggactctaggctttgttttgcctacgagcttatcttcccagccttccttcgaccgtcgcggcggtggatttagggtttctgtcatccgttgctccacttctccactcacttttcccacttctggtgttgtggagaaaccttggacttcgtacaatgctaggcttgtgttagaacatggttctatctggcctgctaagtcttttgggtgctcctggaacccgtattgctgaantgggtgtttaacacttccttgagagggtatcaagaaattttaactgatccnagttaggctgggcagtttgtgcnaatgacaaagccananantgggtaatnactggngtcaannccctgaatgaatngaagaatccgggg

SEQ ID NO: 10374 - DNA, 428 bp, Arabidopsis thaliana
  unsure at all n locations
  Clone ID: LIB24-052-Q1-E1-C7
cgataaaaccgaaacatcaagcaaacaaaaaaaaaagagaagagaaattatttttttttgttttcgttttcaaaaacaaaatctttgaattttatggcaacccgtcttctccgaacaaactttatccggcgatcttaccgtttacccgcttttagcccggtgggtcctcccaccgtgactgcttccaccgccgtcgtcncggagattctctcctttggacaacaagcaccggaaccacctcttcaccacccaaaacccaccgagcaatctcacganggtctcgatctcnccgatcaagcccgtcttttctccnctaancccanagcncnggatctcccnccgttccanngcccgtgtttgcatgcnggggcgataggtcccnatnggtcgaaccttaggggacgtggggtcagtgagccccgaaantt

SEQ ID NO: 10375 - DNA, 414 bp, Arabidopsis thaliana
  unsure at all n locations
  Clone ID: LIB24-052-Q1-E1-C9
aaaatatgtannnnnnnnnnnnnnnnnnnnnnnnnnnnnnnnnnnnnnnnnnnnnnnnnnnnnnnnnnnnnnnnnnnnnnnnnnnnnnnnnnnnnnnnnnnnnnnccgctggacgtcgaaacaacctgcctcgtccaaacctcagaagacgatgtaaggtcaccgcttcacgggctaatattgancaagaaggtaacacagtgaaagaacccattcagaatattaaaggtanagggatacataacggcccacgaagagtttctggagggcatnacttggncaagaggtctcgatngacattgcnganatccggcggcaggattaattgctcnncngagcttaattagcgccnagaactgaccaacgggagttacgggnagaacgactacgccancaaaggtggtangggccgaa

SEQ ID NO: 10376 - DNA, 445 bp, Arabidopsis thaliana
  unsure at all n locations
  Clone ID: LIB24-052-Q1-E1-D6
acgcgtccggaaactcaatccaatctcaccaaacnnnnnnnnnnnnnnnnnnnnnnnnnnnnnnnnnnnnnnnnnnnnnnnnnnnnnnnnnnnnnnnnnnnnnnnnnnnnnnnnnnnnnnnatgaaatttggactcaactcgcctgcagttagagtagaaggatttgattgcttgaaccgtgaccgtcaaaactcgagcatccctgccatggcttagtagacaaacaacatagtgaacaagtgtacatagagattccggaatcgttcgttcgccaatgcctaacagaggaggatttgattactactgctgcaactattactactaccatttttgaaaagtaaatgaatatgtttttgtttttcatcttctcctaangagagagaagagagggaacaggaaggaggaagatgaagatcanttancgtcgccgggtcaccggtttaa

SEQ ID NO: 10377 - DNA, 442 bp, Arabidopsis thaliana
  unsure at all n locations
  Clone ID: LIB24-052-Q1-E1-D8
acgcgtccncttcgttatattccttgagataacaacaaagcatcgttcttcacctttaccnnnnnnnnnnnnnnnnnnnnnnnnnnnnnnnnnnnnnnnntttataggatcaatcgatcaaggaaccaccagcaccagattcatcatttacgaccacgatgctcgtcctgttgcttctcatcaagtcgagttcactcagttctatcccgaagctggatgggtggaacgatntnatggaganaccgggaaagtgtgtgaatgtgcantncanaaaggctctcgacaaagccactgccgatggacacaacgtcgacggtggcttgaaggccattgggcttacagatcagaggagagactactgttgtttggagcaaatccactgggccttcctctccacaaaggctattgtctgggatggatgctcgtaccanctccatcttgc

SEQ ID NO: 10378 - DNA, 498 bp, Arabidopsis thaliana
  unsure at all n locations
  Clone ID: LIB24-052-Q1-E1-D9
aactgtttcacgccgcccngtaacggtccanaaattcccgggtcgacccacncgtccgnccacgcgtccgaagattttgatgtggttgatcttgacccatatggtgcgccgtctattttccttgactcagctgttcaatcagttgccgatggtggtttgctgatgtgtacagcaactgacatggcagtgttatgtggagctaanggcgaggtctgctattccaaatatggctcttatccactgaaagggaaatattgtcatgagatggctttgaggatcctcctcgccagcatcgagagccatgcaaatcgctacaagcggtatattgttcctgtnctatcggtcnaaatggatttcnacgttcgtgtttttgtccgcgtctacncntcnngcgangtgcaatgaagaatacnccactaaaagctcncatangtctaccaattgcaattgggntgtgattcccattcaatcttcagtccggtttggaaagatttcctc

SEQ ID NO: 10379 - DNA, 505 bp, Arabidopsis thaliana
  unsure at all n locations
  Clone ID: LIB24-052-Q1-E1-E1
tgtttacgcctgcnggtaccgcnccaanaattcccaaggtcgacccacgcgtccgcgcagtctcccactgattcagcangctctttgaactactcttcgacaatggccgaacgtggtggagaacgtggtgttgagcgtggtggagaacgtggtgatttcggacgaggattcggaggccgtggaggtcgtggagatcgtggagggcgtggacgtggaggccgtggtggtcgtcgtgganggcgtgccactgaanaagagaaatgggttccagtgaccaancttggtcgtctcgtggcggctgggtcatatcaagcagatanagcagatcnatcttcantcactcccggttaaggagtaccagattcattgatatgctcatcggtccaacnattgaaangatnaaggtaaattgaaanatcatgccgggttcaagaaancaaanccaanggctggtcaaaacggactagattcaagggcctttggttgtcgtttggaganggtaaat

SEQ ID NO: 10380 - DNA, 422 bp, Arabidopsis thaliana
  unsure at all n locations
  Clone ID: LIB24-051-Q1-E1-G3
tgacttatggtactgttggtggaagatttgtcaaagggcagaatccgttttacgaagaggcgtatcagcgggtagctcttgatcagcttctgagaatcgctgggattactgatgatgacttgttgttaatgtctgatgtcgatganattccaaanttagacacaccnttaacccttttgaagaatggtgcgatgagatncccgaagatacttcatctgcgcctcaagaactatctttactccgtttgaattccttgttgataacaaaagctggaaaagcttccatccacagatatgagacgggtaaagacacggtangctcattatcgacagtctgatgnaatcttggcngatcaaggatggcattngtancttttgcntccgacgaatncagtgagtttanattcccagatgaaagctata

SEQ ID NO: 10381 - DNA, 429 bp, Arabidopsis thaliana
  unsure at all n locations
  Clone ID: LIB24-052-Q1-E1-E2
atttanacagtcttccaaaggctcagtatatctctgtttgcaaggatgggaagccatttacattttctagcagatccgggaattctcaaggtcaatcagcgacaaaggatctgttgccgggagcaggcgaggctgttgatactaaatgtactgcaggatcagctaataacgacttgaaggatggaatggttactacaccacacgaaaaggctacagattccaagaaaagtggtaccgagtcaaactctcagccaattgtaggagactcaagctatgaaaagaagtaaagtangagatanagaangaganagtgatagacagaaagaacgaagtaganacagggacagggggtaaggtctcacagangcaganantcctgacanagacaagttgatagggaagaagagaccaactcaaaggatnggaatt

SEQ ID NO: 10382 - DNA, 443 bp, Arabidopsis thaliana
  unsure at all n locations
  Clone ID: LIB24-049-Q1-E2-D7
acgcgtccgcccacgcgtccgctgaagcttctactggggaatcgatgaagctcttgcatcngatattcttattagctttgactactggaatctctgctgttctaatctacattatcggcgtctctaatctctacgagtctaatcgttttaccaatgaagatttanaggcgttgcagtctttgcagaacggattccagaagtgcgtaagtgcaaatggtttgggactacaagctgctatgggtagagattattgcaaagtttctataaacttccctaaggatactgtccccaaatggaaagatcccaagtctggagagcttgaaggattgtcatatgagtttgacctgtgtgaagcagtagctacatgggaacaagtcangaatanctctacaatactcaccaanggaatacatttaatggccttaacaaatgggtggggaagg

SEQ ID NO: 10383 - DNA, 477 bp, Arabidopsis thaliana
  unsure at all n locations
  Clone ID: LIB24-049-Q1-E2-E11
cgtttacgccgncccgtaccggcccaaaaattcccgggtcnacccacgcgtccgcaacaaagtggaagctcaaggaggaaatggtgganaaacattcgacgatggtgtttttgatcatgtaagaaaggtttatgttggtcaaggtgagtccggtgtagcttatgtcaaattcgaatatgagaaagatgggaaaagagaaacaagagaccatgggaaaatgacattgttaggaacagaggagtttgaggttgattcanatgattacatcacatcaattgaagtttctgtcgacaaagtctttggttataacagcgaaatcgtcactgctcttgtgttcaagactagtaagggtacaacctcaccgccttttggaatggtgactgagaagaaattcgaacttaaagatggtaacggaggaaaacttgccggattccatgggaaagctagtgatgttctttaagctcttggtgcctantt

SEQ ID NO: 10384 - DNA, 397 bp, Arabidopsis thaliana
  unsure at all n locations
  Clone ID: LIB24-049-Q1-E2-E2
acgcgtccgcccacgcgtccgtggcgatttcagaagaagaagccaaactcgaaaggttcctagattggcttcaggtgaatggaggtgaattaagaggctgcaacatcaaatattctgactccctaaaaggatttggcatattcgcttccacctccactcaagcttccgatgaagttttgcttgttgttccgcttgatctggccattacccctatgagagttcttcaggaccctctcctgggccctgagtgtcagaaaatgttcgaacaaggacaagttgatgaccgctttctcatgattctgttcctcactttgggagcgtcttcgtatcaattcttcttggaanccgtatcctgatatgcttccnaanccatttgggcaaancctccttggggttt

SEQ ID NO: 10385 - DNA, 441 bp, Arabidopsis thaliana
  unsure at all n locations
  Clone ID: LIB24-049-Q1-E2-E5
acgcgtccgagggaatggagagttgctgtcggagcgtcatagcttcaaggacgtttcatctgcggtcaagtggccgtctatttccctctcttagcttaactcatctcaagggcaagctatctctctccatcaactcgttttcctccaagattcagtctcatgctctccgaggagttggtataggcgagtcagataagaaaaatcccctgccgcgaggggccggagaaggagtcaaggaagatgcgaggagtaagctgcttcatgtagttttggtctctcctcagattcctgggaatacaggttgcattgcaagaacatgtgctgcctcagctgttggtctgcatttagtcgggccattangttttcaagtggatgacgccaganttaancnaanctggnttggnataatgggccctttggtggtnttcaaaccccaaaccc

SEQ ID NO: 10386 - DNA, 422 bp, Arabidopsis thaliana
  unsure at all n locations
  Clone ID: LIB24-049-Q1-E2-E7
ttatgaagctactggtcttaaagggatgcttgtctatggcgtcgaacacgccgatgacgctgtatcttgtgatgataacatgcaacaattcattcgaaccattgaagctgccaaatctttaccaacatctcactttagctcagtggttgtgaagataactgccatttgtccaattagtcttctgaaacgagtgagcgatctgctgcggtgggaatacaaaagtccgaacttcaaactctcatggaagctcaaatcgtttccggttttctccgaatcgagtcctctctaccacacaaactcagaaccggaaccgttaaccgcggaagaagaaagggaactcgaagcagctcatggaanggattcaagaaatctgtaagnaatgcccaagantccaatggtncaattggttgnattgatggcgg

SEQ ID NO: 10387 - DNA, 397 bp, Arabidopsis thaliana
  unsure at all n locations
  Clone ID: LIB24-049-Q1-E2-E8
acgcgtccggtaaggctcggaggaaaacctaattcgtccggagaatctccacctcactctcgccaaacgcatctctgttgtagcttgtgatggatccaacacagaacacaagtgcagggattggtgggagcaatggtacaatcagatatcaaaccaatgatgggacttcaactgtgaccgttgctgatgattcaaaggagaatctttcccaagtcataaactctattgagaaaactttaggagtccttcatcagttacaccttaccgtcacttctttcacacccgcgtctcaactccatctcctccagcgccttaactctcttgtgatggagctagataacatgactaaagttgtctgagaaatgcaacnttcaaatccccaaggagggtcctaanc

SEQ ID NO: 10388 - DNA, 421 bp, Arabidopsis thaliana
  unsure at all n locations
  Clone ID: LIB24-049-Q1-E2-F10
acgcgtggggcctttatgttcttcggacggaacaaaacaacagtacgagtggatttgtcgagaaacatgtttaatttcgatctcgtcaaggttaagttcgctagaagcatagtttcgttggatctgagccagaaccatatctacgggaagataccaccagcactgactaaactacacctcgagcatttcaacgtgagcgacaaccatctctgcggaaaaatcccaagtggcggtctacttcagacctttgaaccatctgccttcgctcacaacatctgtctttgtggaactccccttaaggcttgttaatttggtttaatcttggcggaagaataaaaataatgttgaatatgttatgatgatgtgttcattatcaccgccaaaccaantttattgtttccttgttatgaatttaaantta

SEQ ID NO: 10389 - DNA, 433 bp, Arabidopsis thaliana
  unsure at all n locations
  Clone ID: LIB24-049-Q1-E2-F11
acgcgtccgggcatgtcactctgttgataaacaagactgatctggataatgctccacctggtccaaaggttgttcttgcttccatggctagtctcgaagccggttttgctcgagagatattcgtggagtgggcaaatgatcccagaaatttagtcctctttactgaaacaggccagtttggcactttagcncgtatgcttcagtcagccccacctccaaaatttgttaaagtcaccatgtctaagagggttcctttggctggggaagagttaattgcatatgaggaagagcaaaacangactgaaaagggaagaagctttgcgagctagcctcgttaaagaagaggaaacaaaagcttcccatggatccgatgataattcaagtgaacctatgatcatagataccaagactactcacgatgttantggttctc

SEQ ID NO: 10390 - DNA, 420 bp, Arabidopsis thaliana
  unsure at all n locations
  Clone ID: LIB24-049-Q1-E2-F4
aagaagaaagaaggaagacgatgatgatgctcagaatccgaagcagagatggactggagagagtcacagcggagggagctcatatcactgtttcccagctcaaaaccttgatcgcggatcagcttcagatccctctccataagcagaccttatccaccaatcgtgatctcctcctcgccaaaactcccgctgatctactcgccttcaccgacctcacggacccaaacctccccctctcctctctcaacctcggccatggctctatgctctacctcgcctacgatggcgaagcgctccattcctggagctcctcccgttactcctgccggattcttcgggaggaagatgaccgtcgatgaattgattgccccgccaaatgcgcgtcaatcctcagggggnngtttcaatggngaatcccgt

SEQ ID NO: 10391 - DNA, 397 bp, Arabidopsis thaliana
  unsure at all n locations
  Clone ID: LIB24-049-Q1-E2-F8
acgcgtgggtgctgatggaaattcttgtacatgtgctgaggatgaaagtggcgtctcgaaacgccagcaaattaggactgaagttgtacagactggtaaaagagcatctaatttagcagctggactagctgggaagtatattaccagtagaggctggtaaaccgctggtggtcccaaagacggttgagcatttcacccggccatcgcttcttccgcaacatgtttcctcccctgctttgccagggaaagcaagattcnggtaatcaatgcttcctgctattattaaagaagacctgggggtacctaattggnggatcagatattcanggctggtgtaaattcttcaaatgtngaaagtcatcagaaanagnncaccttgccaaaantccaacccaag

SEQ ID NO: 10392 - DNA, 483 bp, Arabidopsis thaliana
  unsure at all n locations
  Clone ID: LIB24-049-Q1-E2-G10
ctgtttacgcctggnccgtaccgngtccaaaaattcccgggtcgacccacgcgtccgcngacgcgtccgcccacncgtccggccccactgcttggagatttttacagatatcttggatggctcttgctcgtgtaattagcagaaatcctaatctaaaaaccctcaaagccaggggatgtaaaaatctactccaattataagttgacggcagaactgacaatttctctccgttggtttctggtcaagaggtgtttaaatgtttaagcaaggggagtggattggaggagcttgagattggttgggggttttcttatttctcttttgagtctttgagacctgcagcttcgttcctacgagttataagtgtgggtttgggtgcttccttaggtgaagatgttttaaagcttctaccttcaacttgtcctttgctagagtctatcgtcctccattttcangaaatatctgattctgcctttgacaagt

SEQ ID NO: 10393 - DNA, 438 bp, Arabidopsis thaliana
  unsure at all n locations
  Clone ID: LIB24-049-Q1-E2-G2
acgcgtccgctgtgacactctagcaccttcagttccgtacaacaatggctctccaagctgcctattctcttcttccttctaccatttcaatccaaaaagagggcaaattcaatgcttctctaaaggagacgacttttactggttcttcattttcaaaccatcttagagctgaaaagatatccaccctgttgaccatcaaggaacagagaagacagaaaccgcgattttccaccggtattcgtgcacagacagttacagccacgccgccggcaaacgaagcatcgccggagcaaaagaagactgaagagaaaaggcactgcagtgatcactgggagcttcgtccgggtttaagtttaactacnggcaaangctttancagncacnggggaaattgcntggtgnttnatggcttngaaggaacttncccaagggccaaaa

SEQ ID NO: 10394 - DNA, 411 bp, Arabidopsis thaliana
  unsure at all n locations
  Clone ID: LIB24-049-Q1-E2-G3
gagtttgtcgccggcgaattgttcaaatcgtcggagtcgaagaaactgctccctcttttagtcaattctcgcttcactccctcaatataatgcgatttctcaaccggaatatctgaatctctcggtggttacctctgatatatcgccaggaactgaactcctactcgatctctatcaacaatgccgtccttgtagaactttggatccaactctctgattccgtcaatttccattaanatcagctcagcgaaggaactttgagtagaagaagataatgtcacattcatgggatggtcttggggagattgcgtcagtggctcagctgactggtttagatgcggtcaagttgattggtctcataatcaaaagctgcgaatactggcttggatgcctaagaagaaattgccgtcn

SEQ ID NO: 10395 - DNA, 406 bp, Arabidopsis thaliana
  unsure at all n locations
  Clone ID: LIB24-049-Q1-E2-D5
atctccaagacaagcaccagcatcagattttctgcatccttaaagatctcgttgcggtttttgtcggaattgtttcgatttgttgtggttctcaataagctctcgcttgtcagagaaacaccggcaacgccgttgaaatagtcaccggagaccattttgcatcgtagagttcgccttttatggcgttcacgtggggatctgctctccggatttctgttctccttatccttgtagctgcaattgtcttagcttgttattttctccctgttgagaagctattgaaggattttttgttatgggttgaacaagatctagggccttggggaccttttgccctaactgttgcgtacattcctctaacaattttggctgttcctgcctcggttctcaaagccccngtgggtgg

SEQ ID NO: 10396 - DNA, 476 bp, Arabidopsis thaliana
  unsure at all n locations
  Clone ID: LIB24-049-Q1-E2-H1
aactgttaccctgccgtaggcgtccanaattccagggcangatctggtcgttgttagccacaacgtaatcactgtgttcaccattgtgttgtttgtcattcttgttgtcccaatcttggttccaatcatgacaagtttcttcacggagacaaacgagcctgatgacacaatanaagaacctcttgtcccaaaacgagaagaccaagaaccaggactgcaaacacctgatctaatcttgagtgaagtggaagatgagaagccaaaagatgtagatttgcttcctgcctcagagagacataagagaattgcgcatttgcaagcacagctaatgcaggcagctgcagaaggggcggttcgggtgaatagacggagagggccgcatanangggaaggatttcactctaacgcaggcactggtgaaagccgacttctggggtcaatttcctctncctgctgccttggtccgggtccggntt

SEQ ID NO: 10397 - DNA, 483 bp, Arabidopsis thaliana
  unsure at all n locations
  Clone ID: LIB24-049-Q1-E2-B7
tcagccgncccgtaacggtccaaaattcccgggtcgacccacgcgtccgcttgttagggcttctatacatcaccggcgatattggtttacgcgtcggagagatggttggtgagtgttattgatgacacgagatttcaattctcggcggtgtaacgtgaagtcttaacaatttcattgtccaatggtggaatttacagagagagaggaccgagtttctttggaactcagcgaagaaattatacagagcatggaacctggcgccgttttcagagactataattgcaggatcagctcaattgactttcacaaaacttcgacttgtatggtgacagctagcgacgatgactcaattcgtctctatgatgttgccaacgccacatgtctgaagacaattaatagcaaaaagtatggtgttgatcctgtttgcctcacntctcaacctantaangtcanccaatcntccaaaaaccgggntggaaaaaa

SEQ ID NO: 10398 - DNA, 478 bp, Arabidopsis thaliana
  unsure at all n locations
  Clone ID: LIB24-049-Q1-E2-B9
ctgttacgcctgncctgtaccgggnccaaaattcccgggcntcttctaccttgggtaactccgtctctccgttactttcttcctccgatcggtggttcagttctccaaagtatctaatctactcctgttgtttcagttctgagagaagatataagttgaatcgcgtgaccggagacatggagactcaaaacaaattgatgaatgaaactaaaagacatgttaaatccagattgtgcagagtttctggttcgatgacggagatgatggaaattcaagctgagaatcccacattccatgtattgtttattccgggaaatccaggagttgtgtcattttacaaggactttttggaatctttatacgagtttcttggtggaaatgcttctgtaattgctattggggcaaatatctcacacgagcaaggactgggagtctgggaagctattttcatttcaagaacaaattgatcataagattg

SEQ ID NO: 10399 - DNA, 386 bp, Arabidopsis thaliana
  unsure at all n locations
  Clone ID: LIB24-049-Q1-E2-C1
ttccanatactaatggggaggtttcataaatttcctctcctaggtttagttctgttcctcggtctgaccggctcacttatcgccgccaatgagtatgcctgttctagtaccgatatacactttactcgtgccaatttccctaaaggtttcatttttggtaccgcaactgctgcttttcaggttgaaggagctgtaaatgaaggatgtagaggtccaagcatgtgggacgtatacaccaagaaattcccacataaatgtaattatcacaatgccgacgttgctgtcgatttctaccatcgttacaaggaagatatcaagttgatgaaaaatctgaacactgatggctttagattttccantgcatgggccaaaatattcccccangg

SEQ ID NO: 10400 - DNA, 484 bp, Arabidopsis thaliana
  unsure at all n locations
  Clone ID: LIB24-049-Q1-E2-C10
ctgtttacgccgnccgtaccggtccaaaaattcccgggtcnacccacgcgtccgatcagtggtataaatttgatgatgaacgagtaaccaaggaagatttganaagggctttggaggagcaatatggtggtgaagaagagctaccacagactaatcctggtttcaataataaccctcctttcaaattcacaaagtactcgaatgcttacatgcttgtatatatccgagaaagtgacaaagataaaatantctgcaacgttgatgagaaagacatagcanaacatttaagggtgaggctaaagaaagagcangaagaaaaggaagatnnaagaagatacaaggcacaagctcacttatataccataattaaggttgcaagagatgaagaccttaaggaacaaattggggaaggatatatattttgatcttgtggatcatgacaaaagttcgcagtttccgtatccaagaaacangacaccatttc

SEQ ID NO: 10401 - DNA, 421 bp, Arabidopsis thaliana
  unsure at all n locations
  Clone ID: LIB24-049-Q1-E2-C11
agtctttactcnnnnnnnnnnnnnnnnnnnnnnnnnnnnnnnnnnnnnnnnnnnnnnnnnnnnnnnnnnnnnnnnnnnnnnnnnnnnnnntctaaatccattagcagtgactcatcttcttcaacacacactaagaagcttatgcatccatgagaactctcaatgggtttatgctgttttctggaggatcttgcctagaaactatcctcctcccaaatgggatggtcaaggagcttatgatagatcaagagggaacaggagaaactggatcttggtttgggaagatggtttttgcaactttgcagcttctgccgcggaaatgagctccggagaaggtagtggtggcggtggtggctcagcggcttatggaaatagtgattttcaacaataccaaggggcttcagcctgaattgttcttcaa

SEQ ID NO: 10402 - DNA, 495 bp, Arabidopsis thaliana
  unsure at all n locations
  Clone ID: LIB24-049-Q1-E2-C4
ctgttagccgnccgtagccgtccaaaaattcaagggtcgacccacgcgtccgctggagaaatttctaatcaacttaacttttaatttgtgtgggtttgttcccttaacattgttatagattagaattcatcctttgctttgtttatttgggtgtttatctatcgcaggaattagggtttttggtctgcttcgatggatatggatcaagagataggtcaaaattctcctggatttgatggtgaatcagtagtgtcaatgagtaatagaagcaaggagactgaaccagtcccggttgagaatgactattatcgggaaaacggattcaacannnnnnnnnnnnnnnnnnnnnnnnnnnnnnnnnnnnncagaagctccttcactgatttgaatcaactcccggcgattccgccaacttctantgggtcaanggtttgccgtttgcacctgtccaatttcccganccccgggcnatttttggacnttgaaaaatttgga

SEQ ID NO: 10403 - DNA, 413 bp, Arabidopsis thaliana
  unsure at all n locations
  Clone ID: LIB24-049-Q1-E2-C7
atataataacaacaacnnnnnnnnnnnnnnnnnnnnnnnnnnnnnnnnnnnnnnnnnnnnnnncaagcgcttctttaatggcggctgttcaatgtctcactttcctcttcttgtttcttctccaaaacgcgacgtcagcttcacctctccctctcttccggcggccgatccaaagcaaccacagcaacttcgtgaagcatcctcgccgaagtcaggtggttttcccggtgaatcatagtagttgtgatctgttcgccggcgagtgggtgcgggatgagacttacccactttaccggtctaaagaatgcggccgaggaatcatagatncgggattcgactgccagacttangggagacctgantccgactaacccaagttccggtggaaaaccttcaaangggaaggtccccta

SEQ ID NO: 10404 - DNA, 446 bp, Arabidopsis thaliana
  unsure at all n locations
  Clone ID: LIB24-049-Q1-E2-C8
acgcgtccgaaaaacttttccttcttcttcctcaacctttgcttcaatcttcaacaactttctttttataaagattttgcaagttaagtgtaaacctacaaaaaccaaacatggtggttttgccacagccagtcactttagataaccacatctccctaatccccacatacaaaccggttccggttctcacttcccattcaatccccgtcgtcaacctagccgatccggaagcgaaaacccgaatcgtaaaagcctgcgaggagttcgggttcttcaaggtcgtaaaccacggagtccgacccgaactcatgactcggttagagcaggaggctattggcttcttcggcttgcctcagtctcctaaaaancgggccggtccaacngaaacggtacggtaanggaataaaacggattggacnaaacgggtaactttggttggattgant

SEQ ID NO: 10405 - DNA, 532 bp, Arabidopsis thaliana
  unsure at all n locations
  Clone ID: LIB24-049-Q1-E2-C9
ctgtttacgccgggccctgtaccgggcccaaaaattcccgggggtcnaacccacgccgtccgngtttacgaacatcaaaaaggaaagaaaccccccctggtttttggggaaagttggccggtaattaaanttggtggtccaaagaaaacaagttttaaacnttggtggggttttgtggnccattcgggtgaagctattgatgctcctgggtgcacattttgcccctcttcctgctcccactccanctccccgccgcccgcgcccgcgcccgctccaagctccagctccctcgcccgctcccgcttctgcgcccgttccaagctcccgcacccacgcccgctccaagctccaagctcctcctaacaaaagtggaaagctctagggaggaaatgggtgggaaacaatatttgacgatggtgctttccgatcatgtaaagaaagggtttatattggtcaaaggtgattcctggtgtagcttatgttgaaaagttccgaaatacaagaaaaaaggatggggaaaaaaagaagaaga

SEQ ID NO: 10406 - DNA, 360 bp, Arabidopsis thaliana
  unsure at all n locations
  Clone ID: LIB24-049-Q1-E2-D10
tctggtggattctgtagaagaaaaaatttcaatctttgttggattttctgggaaaaactcagatgggtttgctctgaatcgattggaaaatcaaaccggtgtggactctgcaaagttggttgatatgaacagtcttgtgagaagaaaacaagttgattctgttcatcttatcaaaaacgatggacctcatcagcttgccaagaaactatccgccgttgatcttgttgctattggagttgggacaacaattggagcaggagtgtatattcttgtgggaacggtagctagagagcacacaggacctgctcttgctgnatcattcttcattgctggagtagctgctgctctctcctgccngtt

SEQ ID NO: 10407 - DNA, 479 bp, Arabidopsis thaliana
  unsure at all n locations
  Clone ID: LIB24-049-Q1-E2-D11
ctgttacgcctgcntgtaccggccccaaaattcccgaagtcgacccacgcgtccgggcagacccaagagttgcangttgttactggttccaacaaagggattgggtttgagatttgcaggcaactagctaacaatgggataactgtggttttaactgcgagagatgaaaacaagggtcttgctgctgtccaaaagctcaagactgagaatggtttttctgatcaagccatctcctttcaccctcttgatgtctccaacccagacaccatcgcttctcttgctgcttttgtcaagacccgcttcggcaaactcgatattctggttaataatgccggagttggaggggcgaatgttaatgttgatgttctcaaagctcanattgcctgaagctggtgcgccaactgatatttccaagataatgagtgatacatatgagatagtcgaggagtgtgttaaaacaaactactacggcgttaagc

SEQ ID NO: 10408 - DNA, 420 bp, Arabidopsis thaliana
  unsure at all n locations
  Clone ID: LIB24-049-Q1-E2-D12
ctttctcctctacaacaaaataaaataaaattaatggcttcttcacttatcacctccgcagtcattgtcgtggttttaagcctagtgcttggatctgtagagcaagtgagtggactacgtcacgttcccaagtcccctaagaccactgatgtcaaacaccctgactttcttgtaaccattgagcccaaaccaactattctcattcccggtgttggaaggttcttgcttcctcccaaatgcaagaagccgttctacccttacaatcctgtcaccgganctccacttactggtgggggaatcccatcatataatggtggacaangggccggacctcacacccaactccctggtggcgatgatacgcttgtcccaaaccccggatttgaagcngcaacccgaacattggagctggcaccggna

SEQ ID NO: 10409 - DNA, 515 bp, Arabidopsis thaliana
  unsure at all n locations
  Clone ID: LIB24-049-Q1-E2-D2
cgtttagccgncccgtaggctccanaaattccanggtcgacccacgcgtccgctggctcattattgaagcagcagttggaattgcagttatagtgcgtgtatttgttaataagcagaccatggaaactgaaattgtcaatagacttggaaatagtttctctcgtgcacctttggcggcagttgttggtctttgcactgctgttgccattttcgcatgttttccactgggtgaacttctctttttccacatgcttctcattaaaaagggaattacaacatatgagtatgttgtggcaatgagagccatgaacgaagcgccanatggaacatctgttgacgaagaaattcagaatgtgctctaatctcccactgggtctgctanaaaccgggctttaaatggttggaannccnctcgggttaacaataaaangggggggtcngggtgnnacnccaacctaaaaanggtttggaaaatccagggatgaaagtccattccccaaattnaaaccccttgg

SEQ ID NO: 10410 - DNA, 421 bp, Arabidopsis thaliana
  unsure at all n locations
  Clone ID: LIB24-049-Q1-E2-D4
acgcgtccgttttcatggtagacccaactctctcatttcttactctctgattcatctctctctctctcttcatttccatggaaggaaggtgatgagctttctcaatctctctttactgattcttaatgaaagtcatctcctttctctttggtatcccttttcttcttctctgcttaattcctgaccaaaaattgtgacaagatctttcaatccaaaagctatatacattaagagctcaggtcactatctgacgggatccgtgacaatagtggttactggagtcaaaagcagctccttgaatcttgagtgttaantagataggtaaggtaaccgttcatggcctcgaagtatggttctggagttctcccanaaaatnagaangaaaaaggngatnaggaaaaccccggaaanattctaatcc

SEQ ID NO: 10411 - DNA, 447 bp, Arabidopsis thaliana
  unsure at all n locations
  Clone ID: LIB24-049-Q1-E2-B6
acgcgtccgggcttaaacacagaaatggcttctttaccgttcggagtttcgaatctatgcagaaatcaggaggttctgtctgcgtctgtaaggcttcttccggttgggcgacaaaccacaggattcggagctgcgaagaaagtcttatatagattcgagggacatagattgtcatcatcagtagaaaagggagagaaacagagaatgagatgtagagttagctcaaactctactgaaactgaagacgattctgctacaaaaaccaagacgacgccgtttggttacacgaggaaggatgttatattgataggagtgggagtgactgcacttggtatcgggctagagagtggacttgagtatgtgggaattgatccgttgcaagccggggaatgcantacagctgaaactggtgccttggtttngacctttgggtttggattccnactt

SEQ ID NO: 10412 - DNA, 522 bp, Arabidopsis thaliana
  unsure at all n locations
  Clone ID: LIB24-049-Q1-E1-G2
tcctgcgcctncgggtcgaaaatccggggtcgacccacgcgtccgcccacgcgtccgctgtgacactctagcaccttcagttccgtacaacaatggctctccaagctgcctattctcttcttccttctaccatttcaatccaaaaagagggcaaattcaatgcttctctaaaggagacgacttttactggntcttcattttcaaaccatcttagagctgaaaagatatccaccctgttgaccatcaaggaacagagaagacagaaaccgcgattttccaccggtattcgtgcacaagacagttacagccacgccgccggcaaacgaagcatcgccggagcaaaagaagactganagaaaaggcactgcagtgatcactggagcttcgtccggtttaggtttaactacgggcaaagctttannaagacncaggggaaatggcatgtgatnanggnntncncggaacnttcccaagggccganaaaggnaccaaatntgnntgggaagttcaaagggaaattcn

SEQ ID NO: 10413 - DNA, 453 bp, Arabidopsis thaliana
  unsure at all n locations
  Clone ID: LIB24-049-Q1-E1-G3
gagtttgtcgccggcgaattgttcaaatcgtcggagtcgaagaaactgctccctcttttagtcaattctcgcttcactccctcaatataatgcgatttctcaaccggaatatctgaatctctcggtggttacctctgatatatcgccaggaactgaactcctactcgatctctatcaacaatgccgtccttgtagaactttggatccaactctctgattccgtcaatttccattaatatcagctcagcgaaggaactttgagtagaagaagataatgtcacattcatgggatggtcttggggagattgcgtcagtggctcagctgactgggtttagatgcggtcaagttgattggtctcatangtcaaagctgcgaaatactgcttggatgcataagaagaattgtcggcaaatcgctcaaacatctcaaactcaantgggaaattgccttaa

SEQ ID NO: 10414 - DNA, 526 bp, Arabidopsis thaliana
  unsure at all n locations
  Clone ID: LIB24-049-Q1-E1-H1
ttcctgcngctaccggtccanaantcccgggcaagatctggtcgttgttagccacaacgtaatcactgtgttcaccattgtgttgtttgtcattcttgttgtcccaatcttggntccaatcatgacaagtttcttcacggagacaaacgagcctgatgacacaatagaagaacctcttgtcccaaaacgagaagaccaagaaccaggactgcaaacacctgatctaatcttgagtgaagtggaagatgagaagccaaaagatgtagatttgcttcctgcctcagagagacataagagaattgcgcatttgcaagcacagctaatgcaggcanctgcagaaggggcggttcgggtgaatagacgggagagggccgcatagaggggaaaatttcactctaacgcangcactgggtgaaanccgacttctggctcantttcntctccctgctgcctggntctgnggtcgggtttgnccantaaatgnnaaatcctgggcnaatnaatnaatccccctgggtanggaaaa

SEQ ID NO: 10415 - DNA, 466 bp, Arabidopsis thaliana
  unsure at all n locations
  Clone ID: LIB24-049-Q1-E1-H3
acgcgtccgcttcacaccgaacttgaatctactccaccgagttcttcaagcttgcatccgttaacaccgactccacaaacgctgtcttaccgtgttaaggaagagttgtgtccatcttcctccttgccaagtcctaaaggccaacaaccaagagttgaggttagattaagagaaggaaaggcagtgaacatacacatgttctgtggacgtagaccaggtcttttactttccaccatgagagctttggataacttaggattggatgttcaacaagcggtgattagctgtttcaatggttttgctttggatgttttccgcgctgagcaatgtcaagaagaccatgacgtgttacctgaacaaatcaaagcagtgcttttagatacagcaagttacgctgggtttggggttgaatgccaaacagaangggaagcatctgtgtngaaaanagctagatntaaatcccctg

SEQ ID NO: 10416 - DNA, 532 bp, Arabidopsis thaliana
  unsure at all n locations
  Clone ID: LIB24-049-Q1-E1-H4
ccgccgccancggtccaaaatcccgggtcgacccacgcgtccgtctgaaccggagacggtgtcacgggacgaatctaatcgccgggaaaccgtttttttttttctctcggaaaatcgatttgaatctccggcgatctgatcgggatgagtaacatcgatctgattgggatgagtaaccgcgatctgatcgggatgagtaacagcgagcttctcaccgtcgagcctctcgatcttcaattcccttttgaattgaagaagcagatctcttgctctctctatttgacgaacaagaccgacaataatgttgcctttaaggttaagacgacgaatccgaaaaagtattgtgttaggcctaatactggagttgttctcccgaagtctanttgcgaaagttcttgtgaccatgcaaagctcaaaagggganctccttccngaaatgcanttgcaaagggcaantttcccgcttcnaaggggttgnnaaaccaannccngggggtnncanngccaagggaatttnaccccgggaaatttt

SEQ ID NO: 10417 - DNA, 444 bp, Arabidopsis thaliana
  unsure at all n locations
  Clone ID: LIB24-049-Q1-E1-H7
acagggtgctcgcaaggaatcttaggacaagtgtctgtggaacaaggattttgcagaggacttgttcgactgttgtgacacatgatgtttctacttcttgttccaatgagagcaatgcattaaataattccactgacgatggtccacaacatgacattgctattgttggtggtggaatggttggaatcgctttanctgcttcattggccagcaagccattgacaaagcacttgaatgtcgctattattgacaataatcctcttttggggagaagaaatatcatagagaaagggcatcaacctgatcccanantcagtacagtcacacctgcancaatatccttcctcaaagatattggtggcctggcaaatacctttgngcaaacaagcgnatgcgnaatttgnntaagangcnaggtatgggactaatccagggccttggngt

SEQ ID NO: 10418 - DNA, 462 bp, Arabidopsis thaliana
  unsure at all n locations
  Clone ID: LIB24-049-Q1-E2-A11
taccggcccnaaattcccgaangtttgttgagatgtttgtcggtgttggtgcctcgagagtccgtgatcttttcaagaaagccaaggagaacgctccttgcattgtctttgtagatgaaatagatgctgttggtaggcaaagaggaaccggaattggtggaggtaatgatgaaagagaacagaccctcaatcagctcctaactgagatggatggttttgaaggtaacactggtgttatcgtagttgctgcaaccaatagagcagacattcttgactctgctttgttgaggccaggacggtttgaccggcaggtaagtgttgacgttcctgacgttaaggggagaacagatattctcaaggttcatgccggcaataagaagttcgacaatgatgtttcacttgaaataatagcaatgagaacacctgggatttancggagcagatntcgctaaactccttgaa

SEQ ID NO: 10419 - DNA, 454 bp, Arabidopsis thaliana
  unsure at all n locations
  Clone ID: LIB24-049-Q1-E2-A6
acgcgtccgggagtgaggaaggaaggagatgggaggggtgacgtcatcggtggcggcgaagtttgccttcttcccgccgagtccaccgtcttacaaggtggtgaccgacgagctcaccggactgttgcttctcagccctttcccccaccgcgaaaacgtagaaatcgtaaagcttcggaccaggagaggcacagagatcgtgggcatgtacgtgaggcatccgatggctacctccacgctcctctactcccatggcaacgccgccgatctgggacagatgtatgaagctcttcattgagcttagcanccatctcaaggttaatcttangggatacgattactccgggtatggacaatctactggaaagccgagtnangcctnacangttatgcctganatcnaagntggtttaaaaagtngtcnttaaagaaaccctttgggccctaanccagg

SEQ ID NO: 10420 - DNA, 417 bp, Arabidopsis thaliana
  unsure at all n locations
  Clone ID: LIB24-049-Q1-E2-A7
actcaaaaaagtctgcgtggatctccagccgttttcagacacttacccacaaaatattcctctcggcgatgatccctttctgctgaatttttggtcctttgtcgctcgactgttttcttcgtctactatttgttccttttggatattcttcggacttttcgttgatttgattttcaagagagagagtttgaacaaggaaggattgaactatggaagatgcatcagagactagctactggtgtcacatgtgctcccgatcggtgattccattgattcaagacgaaatcatcaaatgcaatttctgtcaaagtggttttgttgaagaaatggataataatgatgaccatcaggctgctgattctctctggaccctancttnatggnggatgntgaacnacaatcaggaaccaacantct

SEQ ID NO: 10421 - DNA, 459 bp, Arabidopsis thaliana
  unsure at all n locations
  Clone ID: LIB24-049-Q1-E2-B1
taacctgnccgtatgctccaaaatccaggtcnacccacgcgtccgatgttcaatgatgatgtccagggaactgctggtgttgcactggctggactattgggaactgtaagagctcaaggtcggccgatatccgactttgtgaaccaaaagattgttgtggtgggagctggaagtgctgggcttggtgtaactaagatggcagtacaggcagttgccaaaatggcaggtatcaccgagagtgaagcaacaaaaaacttttacctgatagataaagatggtcttgtcaccacggagaggacaaaacttgacccaggagctgtactttttgccaaaaatccagctgagatacgccagggagcaagtatcnttgaagtggtgaaaaagtnaggccacatgttcctcctggnttaacctggaatttgggtgggaacctttaatggaaaaatttcccaaaggnga

SEQ ID NO: 10422 - DNA, 414 bp, Arabidopsis thaliana
  unsure at all n locations
  Clone ID: LIB24-049-Q1-E2-B10
gggcggacgcgtgggtggcgatagaaaccgctgatgaaggtttaagttaggactgaattctcagccggaaagtcaattcttgttcttaatggtgccggangagtancggagtcttgtgattcagttggcgaagcacgtgtatggaagcttcaaaagtagctgcaactgcgagtacagaaaagctagagctagtgagaagcttangtgctgatttagctattgattacannanggagaatanaggaagacttgcctgacnagtacgatgttgtctttgacgccattgggatgtgtgataaangcngtnaacgtgattangggaaggacggaaagttgtggcattgactggagctgtcacgcctcctgnttttcnattcgtngtnacntctaatggcaagtttttgaangaaactt

SEQ ID NO: 10423 - DNA, 215 bp, Arabidopsis thaliana
  unsure at all n locations
  Clone ID: LIB24-049-Q1-E2-B12
gagatgactgaaaaggaantanaaattttcttctaggagagacattgaagtgaagaagacnttgtcactctgtaattttgcaccattagttgttgtttcattanttatgacgttgaaatgattcangcgagagataaaacatttgttgttccttacggtgagatttaattttaacttcaaggaagttttcatgaaaaaaannaaagaaaaaanng

SEQ ID NO: 10424 - DNA, 436 bp, Arabidopsis thaliana
  unsure at all n locations
  Clone ID: LIB24-049-Q1-E2-B2
cgttagcctncgtagcctccgnaattccaanggtcgacccacncgtccgcccacgcgtccgaattcaccggcgagagagaatgaatacgccgatgtcactctcggcggcgcgtggccgtatgctaccttttttagagaaggagaaatcagaagaagagtctgaaactctggaatcgagtctcttacagctaatcgacgacaatcgtcgatcatcgttacagctccgggaaaaaaccgagagatcgagaaaggaagcaatcaggcacgcggcgagaacggcggatctgctagtgaaggcggtgaacggaggagtanaggaatgtttcgttaacgagaaacggattgagtcggagattaggaatcttgccattacggtggcgaaattcggcaaacaaacngattcagttggcttgcccgtcacgcaangccgttaaaa

SEQ ID NO: 10425 - DNA, 484 bp, Arabidopsis thaliana
  unsure at all n locations
  Clone ID: LIB24-049-Q1-E2-B4
aactgttagcctgnccgtagccgtccaaaattcaanggtcgacccacncgtccgctcattttcgactttanaaatggcgaccaacgcagatccagctccgacgaagaaaccaaggaacagtagaaaggcgttgaagcagaagaatgagctcgtggagacgccaccatcgcctgtctccgtcaaggggaagtcagcgaagtctttcgagcaagatctgatggagatgcagacaatgttggagaagatgaagatcnnnnnnnnnnnnnnnnnnnnnnnnnnnnnnnnnnnnnnnnnnnnnnnnnnnnnnnnnnnnnnnnnnnnnnnnnnnnnnnnnnnnnnnnnnnnnnnnnnnnnnnnnnnnnnnnnnnnncttcaagaagatgaaggaattcaaaccctaacatgacttttgccttgcggtcaatcatctctcaaaacaaggctgagccagaanagggngaattaggaagaagganaaagggtt

SEQ ID NO: 10426 - DNA, 401 bp, Arabidopsis thaliana
  unsure at all n locations
  Clone ID: LIB24-049-Q1-E1-G12
cnctggcgactaaagattgctgagaagacacgtcgtctctgtgagaactttttctttttcttctggtatattctggagacagatattgttttttcttctgattagagaataatatgacggaagtgattagcaaaacgagtttgttcttaggagcttgtggtaatcatcaccgtgttgatgatttcnctttctctccggtgagttttggtgggtttggtttgaaaaagagtttctcttgtcggaagcttaagagtcatgaagcctctnagaaatgtnctttacggaaaacanatcgttttcggagattctcaagacgagnagcttcangangatnatcanctatcacagctcagacaactttgaggattgggacagctcagaaggtgggtgngagaaaaggc

SEQ ID NO: 10427 - DNA, 174 bp, Arabidopsis thaliana
  unsure at all n locations
  Clone ID: LIB24-048-Q1-E1-G2
ttattatgatcaagaatgggtttgttgtgtcgatgcataattaaaattagttaatgatagttatgaggaaagtcacgtatgttgcttatctttcttcttcttgttaaaacaaagccaatcttaatgcataatatatcttggttgtcnnnnnnnnnnnnnnnnnnnnnnnnnngg

SEQ ID NO: 10428 - DNA, 407 bp, Arabidopsis thaliana
  unsure at all n locations
  Clone ID: LIB24-048-Q1-E1-G3
acaaactctcgcttctcgcatcgttgattctccaaaaccagttttcactctctattgccgattctcgtttcgtttgatatcttaggaatctataaacaaaggttgaacaatgtttctcaaagtccaattaccatggaacgtgatgattccagctgaaaacatggatgccaaagggctgatgttgaanagagctatactagtagagttactaagaggcgtttgcttccaangaaagcaaccaaggagcttggctactacgtggcagtcacaactttggacaagattggagaaggcaaaatcagggagcacaccggtgaagttttgttcccggtaatgttcancgggaatgactttcaagatcttcaaaggagnagataattcacggngtgggtgcacaacgtgtttgn

SEQ ID NO: 10429 - DNA, 488 bp, Arabidopsis thaliana
  unsure at all n locations
  Clone ID: LIB24-048-Q1-E1-G8
gtgttcacgccngccggtaacggtccaanaattcccgggtcgacccacgcgtccgagctggtgcaactgcagctaatcaacttcgactttggaataagggtgtcgattcagaaagcttcaatccccgtttccgttctcaagaaatgcgtataagactgagtaatggcgaaccagaaaagccactagtgattcatgtaggtcgcattggcgtagaaaagagtttggagcttttaaagagtgtaatggacaaattacctgaagctcggattgctttcattggagatggaccatacaaagaggatcttgagaagttgtttaccggaatgccagcggttttcactggaacgttacaaggcgatgaactctcacaagcttaccaagtggagatgtgtttgtgatgccatcagagtcggagacacttnggccntgtgggntctgaagcantgtcttcanngacttcctgtcgtcgcgggcccgttcccngtgga

SEQ ID NO: 10430 - DNA, 380 bp, Arabidopsis thaliana
  unsure at all n locations
  Clone ID: LIB24-048-Q1-E1-H3
acgcgtccgcccacgcgtccgcccacgcgtccgcccacgcgtccggatttactcttaacttacagctgattacaattcactgtaatctctcaagaaccctagattcttttttttccttttcaattgtgatccgtcagcaatgcttgatctttaaatttactgatatctgaagatcgaattanggttctgatctacttgatatttatttgtttgggcttttattcagcagctcgatcttgggctgaagctatggctcagagtaattgggaagctgacaagatgcttgatgtttacatatatgagntatttggtgaagaagaaacttcatantactgctaangtcgtttatgactgaaagggaaaggtttctcctgaatcca

SEQ ID NO: 10431 - DNA, 424 bp, Arabidopsis thaliana
  unsure at all n locations
  Clone ID: LIB24-048-Q1-E1-H6
ttatttcgaagagagagagagaagaagacggaagctagaagaaatcgtttttgatcggagatagtgtatgagctagttgtttgtaatttgacggctctcgggaactgatctatctccggtgtctctgctttgtcggtagctacaggagtgaagagagtttctacaagggttttaatggaagatgatgactctccttcttctcgggatttggatgcacagaacccttatgatcgattgcttgctctagatacaagtaccgtagatccaaattgtaacttggattcggtttctgccatttatctaacgatgaangagntctaagctgggatgtgtttgacgagcgtgggtcaanattcccttaatacttcggtatngcatnggagggatgaaganggattaangaagctcgatgaagttgatcctn

SEQ ID NO: 10432 - DNA, 507 bp, Arabidopsis thaliana
  unsure at all n locations
  Clone ID: LIB24-048-Q1-E2-A1
ctggccgtacggtccgaaatcccgggtcgaccacgcgtccgcaaacacacacagatctcttcttcatcacattacttctggctttacatcttttttcttctccatgaggaaagggagaggctcttccgtcgttggacccgcccttccagtaaccgccggtggatctgtgaaggagccgaggtatagaggcgttaggaagagaccttggggtcgattcgcagctgagatccgtgatccattaaaaaaatctcgtgtctggctcggtactttcgattccgccgtagatgctgcacgcgcttacgataccgccgcacgtaacctccgtggtccaaaggccangaccaatttcccgatcgattgttctccttcntctcctctcnaacctctcacctacctccacaatcaaaacctctgttctcctccggtgantcaagaaccagatcgatccgtttaatggaccatcggttatacggcggaggtaatttccaaggagcaaccagcaagcca

SEQ ID NO: 10433 - DNA, 502 bp, Arabidopsis thaliana
  unsure at all n locations
  Clone ID: LIB24-048-Q1-E2-A4
gtagcttgncgtaccggtccgaaatcacgggtcgacccacgcgtccgggagaaaatcgtgtgtgtgtgtgtcaatggcggctttaagcatctcactagctttctctgttgattctctcaaaccaacccaatcaacgaagtttggcttctcgtcttcttcacatagatatccattactctactcgtgtaaatctcaccgctccaatctcagattcgctttccctccttcttcagtttcgacagctacagaaactggagaagaaaactctaaatcgaccgggaattacgcgtttctaagaggaatcgtttcgtaccgggaggtttttgaagtaacgatgagttaagagaagcttaaaactcttgaaggatttgcgtattttcaagagcttgaatctggatcgatgtgggttcgagttatgagacatgaagagatggattcaacggtgcatctattggctgaagtcatttggtgaatcgatgttattaccttcctggttaacaat

SEQ ID NO: 10434 - DNA, 488 bp, Arabidopsis thaliana
  unsure at all n locations
  Clone ID: LIB24-048-Q1-E2-A5
nccaaaatcccgggtcgacccacgcgtccgatgaaaatttgagattaattcgttcatcactgtcggaggctgttgaatcctgtattgatgccgctggacatgaatttgatgtaactcgtcagagggctctgttacgagcggcaagttatggacaagctttctgcagcaattttcagcgtgaacgtgtccaagagacttgtagaacgttacgggttttaaatgcggttcgtgatcctgctattggcatacctcttagcattcagcagtacaagttactgacaccagtggttttgattagtcgccttattaatgctaattgtcaccttcttgctctgcggatatctgaagtacttagatatgaataaagaagtggtgataatgcattgggcatgtgcaaagataactgcttcaccatcaactccaaattctcatcttcttgaaattttacntgataagctccaaactatgcaaaaggaatatcgtatgcn

SEQ ID NO: 10435 - DNA, 502 bp, Arabidopsis thaliana
  unsure at all n locations
  Clone ID: LIB24-048-Q1-E2-A6
tgttacgcctgccgtaccgantccgaaaattcccgggtcgacccacgcgtccgcggacgcgtggggttcgggcgtacaagcatatactgcaggctgttgtagcagctgttgaaaacaccgctgatgtggccacctcaatagcaacatgcttaaatgtcctattggggacaccgtctgacactgagagtgtatacgatgaaaagattaagtggacctgggtggaaacgttcatttccaagaggtttgggtgggattggaagcatgaaggctgccaggaactgagaaaattttccattcttagaggactgtcacacaaggttggactggagcttgttcctaaagactatgagatggacacgtcttatccttttaagaagtttgatattatcagtatggttcctgtgtataagcacgtagcatgttcatccgcagatgggcgcactttgttgggaatcatccaaaacctccttanataaaggcaaactggangatgctgtcaatt

SEQ ID NO: 10436 - DNA, 509 bp, Arabidopsis thaliana
  unsure at all n locations
  Clone ID: LIB24-048-Q1-E2-B3
atgtttnccgtgccggtccgaaaattaacgggtcgacccacgcgtccgtagagatcgatgaaggattaaagacgatcaataacggagatagagatcgattacaataatggatgaagagtatgatgtgattgtccttgggactggtcttaaggagtgtatccttagtggcctcctctctgtcgatggcctcaaggtactacatatggatagaaacgactactatggaggagaatcatcctctcttaacctcactcagctatggaagcgttttaggggaagtgacactcctgaagaaaatcttggagcaagcagagaatacaatgtcgatatgatcccaaagtttataatgggctaatggactcctttgttcaaaacccctaatccaanacccgatgttaccaaactatcttaactttaagggcgtttgatggggagctttgtccaccagaaaaagcaacgatntaacaagntccaagccactggatgtngaaagccccgaaatcgnccat

SEQ ID NO: 10437 - DNA, 503 bp, Arabidopsis thaliana
  unsure at all n locations
  Clone ID: LIB24-048-Q1-E2-B4
actgttccttggccgtnccggtccgaaatcacgggtcgacccacgcgtccgcccacgcgtccgcccacgcgtccgcccacgcgtccgggcgagaattgaaagacgcttcgagagagatagatcatctccgttaaaccctagcgattggaatacggatatactccaaatggctttcttaagtaaagttggaaggttattcagtcagaccagcagccatgtcactgcctctagctcgatgctacagagcatccgttgcatgtcttcatcaaaaatctttgttggaggtatctcctacagcactgatgagtttggcttaagagaagcttttagcaaatatggagaagttgttgatgattattgtggaccgtgaaacaggcaagatctaggggctttgctttcgtaacatttacttcgactgaggaggctagtaatgccatgcaattggatggacaggaccttcatggtcgaagaattanggtgaattatgcaactgaaagaggaag

SEQ ID NO: 10438 - DNA, 501 bp, Arabidopsis thaliana
  Clone ID: LIB24-048-Q1-E2-B6
tgttacgcctggccgtaccgagtccgaaaattcccgggtcgacccacgcgtccgcaattttctcctttctcttcctggacatctgtctgtttattacattttcttgtaatctctttttggggttttacaatatctatcccctaaagtttcggaaaattctgtttttctgttctcattcttcgtgatctttttcactttcttcaaaaaaaaaacatgtgtggaatacttgccgtgttaggatgttccgatgattctcaggccaagagagttcgtgttcttgagctttctcgcagattgaggcacagaggacctgactggagtggcttatatcaagaacggagataattacttggcccatcaacgtcttgccgtcatcgatcctgcttccggtgatcaacctcttttcaacgaggacaagaccattgttgtcacggtgaacggagagatttataaccatgaggagctgagaaaacgtctgaagaatcacaagttccgtactgg

SEQ ID NO: 10439 - DNA, 428 bp, Arabidopsis thaliana
  unsure at all n locations
  Clone ID: LIB24-048-Q1-E2-C1
acgcgtgggaaaagcaaanaaagatgcanatcttcgtgaaaaccctaacggggaagacgatcactctcgaggtcgagtcctctgacaccatcgacaatgtcaaggccaagatccaagacaaggaaggaatcccaccggaccaacagcgattgattttcgccggaaagcagctcgaagacggacgtaccttagccgattacaacatccagaaggaatcaacgcttcaccttgtccttcntctccgtggaggtgctaagaaanaagaagaagaagacctacaccaaagcctaagaagatcaancacaaagcacangaaagtcaaactcgctgttcttcaantctacaangttgattgttcangtaanggtcanccnttttgaggaaggaatgncctaacgcaaacctgtggtgctgggactttcatggng

SEQ ID NO: 10440 - DNA, 433 bp, Arabidopsis thaliana
  unsure at all n locations
  Clone ID: LIB24-048-Q1-E2-C2
acccttttgatcaaaacatggcttccatttccagaatcttaccaacagatggcagattaagtcaatgcagaatcaacacctcgtgggttccttctacaaccaagaactcaaactcacttagattttcccaagttagtttctgttaagtaactctgggataagtttgaggattcaagaatagtaaacctattagccctgtctttgctcttgaagcaacttcctccaaggagggttgtttgcaaagctgctgctggtgtgtcaggtgacttacctgagaagtactcctaaggaacttagtcagtatgaagaagattattgagcttttgacaaccctttttccactttgggttaatttgggaacacttgttgggcatcttcaagccatccttggttacatggttggaaacagatttctttactctangtcctggat

SEQ ID NO: 10441 - DNA, 417 bp, Arabidopsis thaliana
  unsure at all n locations
  Clone ID: LIB24-048-Q1-E1-G10
ctgcctataggtgtgctgttgttctccgtgatttgattatgccgtacctcctccgccgtatgaaggccgatgtaaacgcacatcttacaaaaaagactgaacacgttctcttttgcagtctcactgtggagcagcgatctacctacagggcattccttgcaagctccgaagtagaacacgatttttgatggcaacaggaattcgctttatgggattgatgtgatgcgtaacgatatgcaaccaccctgatctacttgagagagaacattctcaccaagaacccagattatggnaacccangaacgcagtgggaaagatgaaggttgttgcngaangtgctcaaggtctgggaaacagnannngacaccgtgtacntctgttttcacangctcagcaaatgcctgacatncctccgag

SEQ ID NO: 10442 - DNA, 418 bp, Arabidopsis thaliana
  unsure at all n locations
  Clone ID: LIB24-047-Q1-E1-H6
agatagagagatagagttatggctttggcgatgatgatccgaaacgcagcttcgaagcgaggaatgactccgatctccggtcatttcggtggtttgagatctatgtcttcatggtggaagagcgttgagcctgctcctaaagatccgatcctcggagttaccgaagcttttctcgctgatcctagtcctgaaaaagttaatgttggtgtgggagcatatcgtgatgataatgggaagcctgttgtcttggaatgtgtcagagaagctgagaaaaggcttgctgggagcactttcatggagtaccttcctatgggaggaagtgccaaaatggtggacctaacattgaagcttgcctatggggacaatagtgaatttatcaaagatanaagaattgctgcagttcanactccgtccgggc

SEQ ID NO: 10443 - DNA, 370 bp, Arabidopsis thaliana
  unsure at all n locations
  Clone ID: LIB24-048-Q1-E1-A11
caacaaaaataatctcagactctcggtcaacggaatcgaagcaaaactctgcctctagttccgtagaattcaccggagactgaacaaaaatcccgtgagttttttagttttccgttacattctctgtctcaattctgaaacttttcacatgggttgtgctcaaatttcctttttaatggttgtcgangatttatcnataaagtcaatgatcngggtttgatcaaagtctcaatctttctcttaaatttcgaanatttgatgatcccacgagttagtctctcnaaatctgatctggctatgcttaatcngccacattgttgcnntcaagctctggatttgattggtntcantgaaaagttatccanttgga

SEQ ID NO: 10444 - DNA, 380 bp, Arabidopsis thaliana
  unsure at all n locations
  Clone ID: LIB24-048-Q1-E1-A6
gcatatactgcaggctgttgtagcagctgttgaaaacaccgctgatgtggccacctcaatagcaacatgcttaaatgtcctattggggacaccgtctgacactgagagtgtatacnatgaaaagattaagtggacctgggtggaaacgttcatttccaagaggtttgggtgggattggaagcatgaaggctgccaggaactgagaaaattttccattcttagaggactgtcacacaaggttggactggagcttgttcctaaagactatgagatggacacgtcttatccttttaanaactttgntattntcagtatggttcctgtgnataacgcacgtaancatgttcatccgccagntggggcgcactttggttggaanc

SEQ ID NO: 10445 - DNA, 416 bp, Arabidopsis thaliana
  unsure at all n locations
  Clone ID: LIB24-048-Q1-E1-B3
ccacgcgtccgtangagatcgatgaaggattaaagacgatcaataacggagatagagatcgattacaataatggatgaagagtatgatgtgattgtccttgggactggtcttaaggagtgtatccttagtggcctcctctctgtcnatggcctcaangtactacatatggatagaaacgactactatggaggagaatcatcctctcttaacctcactcagctatggaagcgttttaggggaagtgacactcctgaagaaaatcttggaagcaagcanagaatacaatgtcgatatgatcccaaaagtttatagggcctaangggactccttgtncnaacccctaatccaacaccnantgtttaccaaggtanccttaactttaaagggcccgttgatgggnagcttttgtccacaa

SEQ ID NO: 10446 - DNA, 396 bp, Arabidopsis thaliana
  unsure at all n locations
  Clone ID: LIB24-048-Q1-E1-B6
ttttctcctttctcttcctggacatctgtctgtttattacattttcttgtaatctctttttggggttttacaatatctatcccctaaagtttcggaaaattctgtttttctgttctcattcttcgtgatctttttcactttcttcaaaaaaaaaacatgtgtggaatacttgccgtgttaggatgttccgatgattctcaggccaagagagttcgtgttcttgagctttctcgcagattgaggcacagaggacctgactggagtggcttatatcanaacggagataattacttggcccatcaacgtcttgcngtcatcgatcctgcntccgngtgatnaacctcgttncancganngacaaagaccaatngtgtcacgggtgaacgggngagattt

SEQ ID NO: 10447 - DNA, 430 bp, Arabidopsis thaliana
  unsure at all n locations
  Clone ID: LIB24-048-Q1-E1-B7
acaaacaaaaaatctagtgttcggctctaacacgctcgacgaccatggcggtctcgtttaatacaacgcttcaccagccttctctgantccgagctgtagcatcaagctttattctgggttaaagcctcaatctgcaagctttttggcaagtgggtatcagaatttgaacaaggagttctatggaagagtttataagagtctgcaatctgggactgggaaagcgagcaggtcacgggtaaagatgatgccaataggaacaccgagagtaccctacagaanccgagaagaatggacttggnaatgggttgatanatgnaaatgccctttatcgagagcgtgtnntcttcantggacaaaacnttgaatgaagagtttagcangcagnatntnaccaancatgttggtnccttgatacgccgtgatgnactc

SEQ ID NO: 10448 - DNA, 427 bp, Arabidopsis thaliana
  unsure at all n locations
  Clone ID: LIB24-048-Q1-E1-C2
acccttttgatcaaaacatggcttccatttccagaatcttaccaacagatggcagattaagtcaatgcagaatcaacacctcgtgggttccttctacaaccagaactcaaactcacttagattttcccaagttagtttctgttagtaactctgggataagtttgaggattcagaatagtaaacctattagccctgtctttgctcttgaagcaacttcctccaggagggttgtttgcaaagctgctgctggtgtgtcaggtgacttacctgagagtactcctaagggaacttaagtcaagtatggagaagatattggagcttttgacaaacccttttttccaacnttggggttaactttgggggaacacttgttgggnatcntcaaggccatccttggggttacaagggtttggaaacagatnctctt

SEQ ID NO: 10449 - DNA, 427 bp, Arabidopsis thaliana
  unsure at all n locations
  Clone ID: LIB24-048-Q1-E1-C4
tctctttctctcttaaacggagcaacgcctttgaaatcgaattcgctccacaaatctagactcactccacttcatcttcgaactatctcttgttctagactatcttactctccctcgagtcgcgaaatttctctcaaaactcaatctactgttcctatttcgtgtaggcgtagtaggtttgacttcgttcctcgttgcggcatttcgtcgaacgatttgcctactgagaaaaagaagagctttggggagtgggttgagtttgtgggaaaggcggtttcgacggcgtttccgatatgggtttctctggggatgcttgntgggactgatgaggaccanagtantttcaaatggggttacccaaatttggnccattgtncgncttacnaatcannaaggcnttgggaatgggaatgacctttgncccctg

SEQ ID NO: 10450 - DNA, 450 bp, Arabidopsis thaliana
  unsure at all n locations
  Clone ID: LIB24-048-Q1-E1-C7
acgcgtccgcatctttctcctttggtggcaaacacaacgacagatagagagaaacgatggcgtcnaactcgcttatgagctgtggcatagccgccgtgtacccttcgcttctctcttcttccaagtctaaattcgtatccgccggagttccactcccanacgccgggaatgttggtcgtatcagaatggctgctcactggatgcctggcgagccangaccagcttaccttgacggttctgctcctggtgacgttgggtttgacccacttggacttggagaagttccagcgagccttgananatacaacngagtcagagctcatccagntgtnntatgggctatgctcgctgttcctgnggattttggtaccangaacgcgttaggaatatgcgaaactggggtttaacngctccangaaanggngganncactaccaaggggctcaagcc

SEQ ID NO: 10451 - DNA, 400 bp, Arabidopsis thaliana
  unsure at all n locations
  Clone ID: LIB24-048-Q1-E1-D6
atacacaacttgtaacttcaaatagattactttcnnnnnnnnnnnnnnnnnnnnnnnnnnnnnnnnnnnnnnnnntttccagtagtagacttgtccaagctcaatggggaagagagagaccaaaccatggctctaatcaatgaagcttgtgagaattggggcttctttgagatagtgaaccatggattaccacatgacttaatggacaagatcgagaagatgacaaaggaccattacaagacatgccaagaacanaagttcaatgacatgctcaagtccaaaggtttggataatcttgaagacagaagtcgaacattccattgggaaagccactttcctangttcgtcacctcncncantccactcncaattgncatttcagatggtgtctgattgaana

SEQ ID NO: 10452 - DNA, 447 bp, Arabidopsis thaliana
  unsure at all n locations
  Clone ID: LIB24-048-Q1-E1-E1
attccagggtcnacccacgcgtccggaggtaccaagaagaaaaccagagaagaatcttctttagagagatgggtgtggtanaagaagctcacaacgtgaaggtgattggttcaggagaagccacgatcgtgttaggtcacgggttcggcacggaccagtcagtatggaaacacttggttccacatctggtcgacgattaccgcgtcgtcctctacgacaacatgggagccggtacgaccaaccctgactatttcgacttcgatcgttactcaaatctcgaangctactctttcgatttgattgcaatcttggnagatctcaagattgagtcttgtatctttgttggccactctggtttctggccaaggattggtgtcttggcttctccttaacccgtcctgatctcttcncnanaantcgtcatgatccctgcctctccgagnataa

SEQ ID NO: 10453 - DNA, 501 bp, Arabidopsis thaliana
  unsure at all n locations
  Clone ID: LIB24-048-Q1-E1-E4
tgttacgcctgccngtacggcgtccaaaattccagggtcgacccacgcgtccgctcactctgaagtatccaatcgaacatggtattgtaagtaactgggatgacatggaaaagatatggcatcacactttctacaacgagcttcgtgttgcccctgaggagcacccagttctactcacagaggcacctcttaaccctaaagctaacagggagaagatgactcagatcatgtttgagacattcaatgtccctgccatgtatgttgccattcaggccgttctttctctctatgccagtggtcgtacaaccggtattgtgctcgattctggtgatggtgtgtctcacactgtgccaatctacgagggggtatgctcttccncaatgctatccttcgtcntgatncttgcggggtcggggatntcacagactcactccatggaacnattctcactgaaganaaggtttacatgttcagcaactaccggcaggnacgggaaaattt

SEQ ID NO: 10454 - DNA, 475 bp, Arabidopsis thaliana
  unsure at all n locations
  Clone ID: LIB24-048-Q1-E1-F1
gtangcctccaaaattccaaaggtcnacccacncgtccgaagagccaaaggttgagaatgtgactcttggaccagctgttcgtgaaggagagcaagtctttggagttgttcacgtctttgcttcattcaacgacactttcattcacgtgactgatttgtctggacgggaaacacttgttcgcatcactggtggaatgaaggtgaaagccgacagagatgagtcctcaccttatgctgctatgcttgcggcacaagatgttgctcagcgatgcaaggaacttggaatcactgccatacatgtgaaactccgtgccactggtggtaacaagaccaagacccctggacctggtgctcagtctgctctaagagcccttgcccgttcctgggcatgaaaattggtccncattganggatgttgactcccaatccccaaccnnacnattacccgcagaaanggggtgggaanaaagaggaa

SEQ ID NO: 10455 - DNA, 453 bp, Arabidopsis thaliana
  unsure at all n locations
  Clone ID: LIB24-047-Q1-E1-H4
cccggtgccngtcaaaaagtccaannggcccnggacgcgtncgnaccacnccgattcatcnttatcctctctctcatctcgtccgttgttgcataagtgctatggatctcgcgtcgaatcntggtgggaagatcgataaatccgatgttctcaccgncgtcgaaaagtatgagcaatatcatgtcttccatggatggaaacgangaagagagaaaagccaattataccgacatggttaatangtactatgaccttgctactagcttttatgantacggatggggagaatccttccattttgcacaaagatggaaanganaatcgcttcgagagagtattaagcgacacgagcactttcttgctcttcaagcttggnatccaaccaggacaaaaggtactgggatgtangatgtgggaattggtggancgttgagggaaattgcaagantcagc

SEQ ID NO: 10456 - DNA, 407 bp, Arabidopsis thaliana
  unsure at all n locations
  Clone ID: LIB24-048-Q1-E1-F6
cagattgggtttgggatcaagtgggcaaaccaatatggatccttctccgatcgctcagggaaatgacgatgacacaccggcgccggggaatcagtttgcccaattcggagctggatgtttctggggtgtcgagctggcgtttcagagagtcccaggggtgactcagaccgaggctggatacacccaagggaccgtagacaatccttcatacggagatgtttgttctggtaccacaggccattcggaggttgttanggttcaatatgatcttaacgattgcacctatgagtctctgctttgatttgttctggtctaggcatgatcccaccactttgaaatcnccagcggaaatgncctgggaancccaattcagattcnggaantataccttctacncaccccgaacc

SEQ ID NO: 10457 - DNA, 473 bp, Arabidopsis thaliana
  unsure at all n locations
  Clone ID: LIB24-047-Q1-E1-F1
tacgtttgccggtgccggtccnannattaacgggtcgacgcncgcgtccgcatcatnctcgatcagtggttgttacctgagaaaccctagatttcaattcccaacaccttaattttgttcgacaaacccaagaagattcgatgggtaagaacgattttctaaccccaaaggcgattgcgaatcgaattaaagccaaaggacttcaaaagcttcgatggtattgtcagatgtgtcagaaacaatgccgagacgagaatgggttcaagtgtcattgtatgagcgaatctcaccagaggcagatgcaagtttttgggcagaatccgactcgtgttgtcgatggttactctgaataattcgagcagacgtttctcgatctgatgaggcggagccaccgtttctctcgtatcgctgccactgttgtctacaatgangtatattaacgataggacatcatgttcacatgaattcgacng

SEQ ID NO: 10458 - DNA, 453 bp, Arabidopsis thaliana
  unsure at all n locations
  Clone ID: LIB24-047-Q1-E1-F10
ngtaaaggtccataaattcccgggtcnacccacgcgtccgntctcatctacggaccagctctgttacgtccattgcagcttctgcgacactgtccttgctgtgagtgttcctccgagtagtttgttcaagacggtgacggtcagatgcggccactgttcgaaccttttgtcggtgaccgtgagcatgagagnnnnnnnnnnnnnnnnnnnnnnnnnnnnnnnnnnnnnnnnnnnnnnnnnnnnnnnnnnnnnnnnnnnnnnaaatcttttggaggaaatgcgaagcggagggcagaatataaacatgaacatgatgatgagccatcacgcttcagctcaccacccgaacgaagcatttggttatggcgactcgcaacggaaagatcagtggatcatctacaagagatgcctcggccaccaccagccaatagacccccaagaagaagcgacaan

SEQ ID NO: 10459 - DNA, 411 bp, Arabidopsis thaliana
  Clone ID: LIB24-047-Q1-E1-F11
ttttttgttgtagtatttaaagcatcttgcttacgacactgcaaaaacaggttggaatgttgttattagcaaccatagaggattgggaggagtttctgttacttcagattgcttctataatgctggatggacagatgatataagggtagttcttgattatcttcaacacaaatacccgagggctcctctctttgctattggcactagcattggagcaaatgttctggtaaaataccttggggaagagggtgaaaagactcctctgagaggtgctgttgctatctgctctccatgggacctcttgattggtgacaggtttatctgtcggactttgaaacaaaagctctatgacaaagctctcaccatcggactccaaggttatgcccaattgtatgtccaccaagaactgcc

SEQ ID NO: 10460 - DNA, 441 bp, Arabidopsis thaliana
  unsure at all n locations
  Clone ID: LIB24-047-Q1-E1-F12
attcccgggtcnacccacgcgtccgancacgcgtccgcccacgcgtccgggactgtcaagaaagtcagcttcatacctaactacttgggtccaaaggagcttcctatgggtgttcttgttgagatggagaatgaagagatgacacaggctgttatctctactgtctcacagttacctttcatggttgctggtatgccaaggcctgtgagagcttgtgctgctgagcctaatatgtttgttgataaaccgaagaagcctggtagaacggtccgttttcgctggattaagcctaacgatcctgatttcgacaaggccaggagagtcaagcggcttgctcgtaagcatagtgctgaaaattcgttcatgctcaagcttgaggangcagagaagctgtcganacagcaagctgagacngcggtaacacatcacaagaagtttgag

SEQ ID NO: 10461 - DNA, 432 bp, Arabidopsis thaliana
  unsure at all n locations
  Clone ID: LIB24-047-Q1-E1-F2
acgggtcgaggcccgcgtccgactgcancaagtanaaagcctacgaaaatagcatcngancaaangacaaactcaccgagtaaacatacncaacctgtcgtgtaagtaaaaacaatttgatagtgatctctctatgtttggtggaggaagagggcctatgggtggcggcggaggtatgttacgcgccgccggtcgtgcgatgacgangaccggtgtanccaacggtggtattcaagatncctttgcttcttcatcatcatcgtccacgtcgtctccggctggaaacgcctctgtttcgcatgtccanaaacanagatcttcttcttcngggtcganataatctgacgtattccgcggcttctgggttgttgttgaatccttccggtggctgcaanctccggatggagccagcggcggtccttnttccctttg

SEQ ID NO: 10462 - DNA, 413 bp, Arabidopsis thaliana
  unsure at all n locations
  Clone ID: LIB24-047-Q1-E1-F5
acgcgtccgcggacgcgtgggggagatcggaagctaacacgggaagatttagccggaagaaatggcttcgttaggtttcaacctcggcttcaccttctccaatgcacaaattcagcagcatcgaaaagtttccggaggtggaagagctcgcgtnnnnnnnnnnnnnnnnnnnnnnnnnnnnnnnnnnnnnnnnnnnnnnnnnnnnnnnnnnnnnnnnnnnnnnnnnnnnnnnnnnnnnnnnnnnnnnnnnnnnnnnnnnnnnnnnnnnnnnnnnnnnnnnnnnnnnnnnnnnngcaaaggctgtgagtggagataagcttctcagaagcattatgcaggataacaaaattgaactctacgctgcttacgggaaagtgatgaactgtggtggtggangaagctgtggaacttgc

SEQ ID NO: 10463 - DNA, 417 bp, Arabidopsis thaliana
  unsure at all n locations
  Clone ID: LIB24-047-Q1-E1-G11
acgcgtccgcacaaacaccataaaaagttgataaccccacccattttatatccactttatctcatcaaaaaacttccaatcaccaccgttggattagtaaacaatggcgtcatcactctccgattgtttcatcgancgaatattatcagggatgtattaaatcttccgtgcgccttaccgcatatgantaaaccatttgaccacatnagacaaatgcaaaagaactaaaaagagtctggtttctgttctgtcctaatttctctctggcgaaagctaagaggtttcggttacggtccncatctccgatnaaatcacnaaggtttctatcgggaattttcagtgatncataccgtcaggagatttccttacgangagaattgtcgccgncatnctaaagcaagagttttgggtgggaaa

SEQ ID NO: 10464 - DNA, 438 bp, Arabidopsis thaliana
  unsure at all n locations
  Clone ID: LIB24-047-Q1-E1-G2
gggtcgaggcncgcgtccgnccacncgtccgcccacgcgtccgtcttcttcctcactctcttattaggttcagttccttttcgattcttcgtgtggatcgctgtcggtagatttccgatttctttaggttctgctcgaaatcgtggtttagtgtttattatcatcgattcagaaaacggtgggtaaacttgtagcggaagatgaggcggtggccggtggatcaccggcggcgaggtanaaggagattgtcgagttggatatggtttctccttggttctttctctgtcgctggtttagttctcttcatcgttcagcattatcaccatcaacaagatccatcccagcttttacttgagagagacacganaaccgaaatggtatctcctccccatttaaacttcacggaagaggtcacaagtgcttcctccttctctaggc

SEQ ID NO: 10465 - DNA, 476 bp, Arabidopsis thaliana
  unsure at all n locations
  Clone ID: LIB24-047-Q1-E1-G3
ntgtttacgcttgcccggtgccggtccaaaattaacgggtcgacncacgcgtccgnccacgcgtccgcccacgcgtccggtcacggtcgacataaaaacatcttttccatccaatatttaccggtttcgtttcaccggatttgggctctccggcgacggagaatagccaccatctccgtagaaaacagtatacttgatagctgaggaacaagagaagtgacaagggtgattgaaaagttgaaggactcagatgggaagcagaagcggagaacaaggaaagcgaatggcggaactgagcaaaaatcttaaagaaggtgagaggattctggagcccacacgtagacctgatggtactctccggaaacccattcggattcgacctggatatactccagaagatgaagttgtcaaatatcagtccaaaggttctctgatgaagaaggagatggcctcacaagggcctccaggttatgaac

SEQ ID NO: 10466 - DNA, 431 bp, Arabidopsis thaliana
  unsure at all n locations
  Clone ID: LIB24-047-Q1-E1-G4
cgcgtccggttaggcattatcacgcctctggcttgggctaaatggtgcaggaggctgcctcggcttgtggctacgatgcatagaatgagagatttcnacatggngatcactttccatttcgagagttctgttatacctttcatttctagagtggcgccttcggatacttataanatttggnagaggggtgcgaatcttannagcggatatgacactggctgggtttgatggtttcaggattcaaagatcggatcaagactatactttttcttggagatgggtcagaggatggtaaagttccttccggttctcttcttatgatatcacataaggataangagatcatgaatgctctanacggtgctggagctgccgcatcagaagaagaattcgtcaagaagtggctgcaatgtccaaaacaagcattttca

SEQ ID NO: 10467 - DNA, 413 bp, Arabidopsis thaliana
  unsure at all n locations
  Clone ID: LIB24-047-Q1-E1-G8
gggtttagctcgagagctggaaatcagaacgactcggaggagagaagacaaagaaagcaattctttttactaagggtcttgcttcgattccacagaacccaaaacctctatttctctatcttcatccacaaaaatgccagcttctgaagatagaagagggaaatggaaaaggaagaagagaggggggttatcggcggcgaggaaaccgaaacaagaggaggaagatatggaggaagaagacgaagagaataacaacaacaacaacgaagaaatggatgacgttgaaaatgccgatgagcttcagcaaaacggcggcgcaactcccgatncgggacttggtattggcgaggtagttgaagattctggttcgcgcatctctgatttcccggcagtggttaagcgtgttgtgatcc

SEQ ID NO: 10468 - DNA, 412 bp, Arabidopsis thaliana
  unsure at all n locations
  Clone ID: LIB24-047-Q1-E1-H11
acgcgtgggcgacgatgcctcaggcaccgatgccagagttctctagctcggtgaagctcaagtacgtgaaacttggttaccaatatttggttaaccatttcttgagttttcttttgatcccgatcatggctattgtcgccgttgagcttcttcggatgggtcctgaagagatccttaatgtttggaattcactccagtttgacctagttcaggttctangttcttccttctttgtcatcttcatctccactgtttacttcatgtccaagccacgcaccatctacctcgttgactattcttgttacaagccacctgtcacgtgtcgtgtccccttcgcaactttcatggaacactctcgtttgatcctcaaggacaagcctanagancgtcgagttccaaanggagaatcctt

SEQ ID NO: 10469 - DNA, 415 bp, Arabidopsis thaliana
  Clone ID: LIB24-047-Q1-E1-H12
atggctatctcaaagcttattcctactcttgtgctctttgttttgttctcttttgatgttagtgttgctcatccaggtctaggatttggatggggaagtaatagtcccattggaggatctttttactcaaatctttacccacaattttaccagttctcttgtccacaagctgatgagattgttatgacggtgctcgaaaaagccatagctaaagaaccaagaatggcagcatctttactcagacttcacttccacgactgcttcgttcagggctgtgatgcatcaatcttgttggatgatagtgcaaccataagaagtgaaaagaatgctggaccaaacaagaactccgttagagggtttcaagtaatcgacgaagatcaaagccaaacttgagcaagcttgtcctcaaactgtc

SEQ ID NO: 10470 - DNA, 417 bp, Arabidopsis thaliana
  unsure at all n locations
  Clone ID: LIB24-047-Q1-E1-H3
aaaaaagtcttcttctttttttacaagtctgagaattttctacagaaacaaaaatctgattgtttttcccactttgcatctgttttgaggatgccagctacggattttcaaggatcatttggaaggtcgttgctaagtttacggcgagaccaagttgactcatcaacagtcgtctccggaagtagtanccaccacgagccaagcaccatggaggttgagctanattcgtttcaagagacaagtcgctgagaaattcatcgatctcaacgcttcttcaaacgaccttctctctctcgaatggatcggaaagcttcttgattctttcctctgttgtcaagaagagtttcgagctatcgtattcaaccaccgatctcagatctctaaatctccgatggaccgtttgatttcagattactt

SEQ ID NO: 10471 - DNA, 454 bp, Arabidopsis thaliana
  unsure at all n locations
  Clone ID: LIB24-047-Q1-E1-E9
agtccanaaattcccgggtcnacccacgcgtccgaaaaaatcagatggacaggacatcgatattaggagatgccatagattacatgaaagagcttttagacaaaatcaacaaattacaagatgaggaacaagaacttggaaatagcaacaattcacatcactctaagctcttcggtgatctcaaggatcttaatgcgaacgaacctctggtcagaaactcaccaaagtttgaaatagatcgtagagacgaggatactcgagttgatatatgctgctcgccaaaaccgggattgctactatctactgtgaatacattagagactctaggcttggagattgaacaatgtgttataagctgctttagtgatttctctttgcaggcttcttgttctgagggagctgagcaganagatttcataacatcaagaagatataaaaacaagcattantcaag

SEQ ID NO: 10472 - DNA, 451 bp, Arabidopsis thaliana
  unsure at all n locations
  Clone ID: LIB24-046-Q1-E1-A2
ttacttgccnggcccggtccanaaataaacgggtcgagcncgcgtccgnttctntctagctcacactcacaacactctctctctcctgccataactcagcctgagatgtctccggaagcttacgttctgttctttaacagttttaacctcgtaaccttcgaagcctttgcttcagtctcacttatcatagccacagttgctttcttgctctcaccaggtgggctcgcatgggcctggaccgggtcatccaagagtcgggtttcgattccaggaccatctggttctctttccgtcttctccggctccaatccccaccgtgttctcgccgctcttgctaaacgcttcaaggcctctccgttgatggcgttctcagttgggttttcgcgtttccgttatctctagtgaaccggagacggctaaagagattttgagcagctctgcttttgctgaa

SEQ ID NO: 10473 - DNA, 414 bp, Arabidopsis thaliana
  unsure at all n locations
  Clone ID: LIB24-046-Q1-E1-A4
gcncgcgtccgaacacacgtccgcccacgcgtccgctctctctttctctctcacacacaaaattgcagaagaagaagagtcatgaatggtgaagaaagctttgtagaagattgctctgtttttgttgagattgatccttctggaagatatggaagatacgatgaaatacttggcaaaggagcttcaaagacagtatacagagcatttgatgagtatgaaggtatagaagtagcatggaaccaagtaaagcttcgaaatttcacaaggaatcctgaggaattagagaagtttttcagagagattcatcttctcaagactttgaatcatcaaaacattatgaaattctacacttcttgggttgataccaacaatttatcaatcaattttgtcactgaactcctcaactcctgggan

SEQ ID NO: 10474 - DNA, 417 bp, Arabidopsis thaliana
  unsure at all n locations
  Clone ID: LIB24-046-Q1-E1-A5
gcatccgancgtttcccaagaatttgggtcgccattgattcgcacctcgcaagatggaaagcactagatcagatccagagcttgatgatgactttagtgaaatctacaaggagtatactggtcctgcaagtgctgtgaccaacaacaatatccaagacaaagacaaacctgtcaaacaacgttctgaagaaagatgtgatgaagaagaagagcaacttcctgatcccaactctgtaccaactgatttcactagccgtgaagctaaggtttgggaggctaaatccaaagctactgagaggaattggaagaagaggaaagaggaagagatgatctgtaaaatttgtggcgagtctggtcattttactcagggatgtccatctacacttggtgccaataggaagtctcaagaattccttg

SEQ ID NO: 10475 - DNA, 449 bp, Arabidopsis thaliana
  unsure at all n locations
  Clone ID: LIB24-046-Q1-E1-A6
ccagntcggtaccagtcacggaattcccgggtccnacccacgcgtccgaacacgcgtccgcccacgcgtccgcgaattctaaatcggagactaaacctgactccgatgagcctaaaggatctggtttcgatcctgagtcattggaaagaggtgctaaagctcttcgtgaaatcaatagctctcctcattccaaacaggtgtttgatctaatgcgaaagcaggagaagactcgattagctgaattagcggctgagaaagaacataatgaagctattcaagctagcaaggacattgaaagacagcggaaattggcagaggatcagagaaatttagtgcagcaacaggcccaagcgaaagcgcaaaatcttagatatgaggatgagttggccaggaagagaatgcagacagataatgaagctcagagacggcataatgctgaattggtttcc

SEQ ID NO: 10476 - DNA, 411 bp, Arabidopsis thaliana
  unsure at all n locations
  Clone ID: LIB24-046-Q1-E1-A7
cgtgnaaagtcaccaaattcccgggtccacccacgcgtccgaangacgcgtgggatcaaatctgatctaatctccgtaaattaatggcgagtagttgcgagctttgctgcgagatcttcatcgcaattcttcttcctcctgtcggagtttgtctcaggcatggctgttgcactgttgagttcttcatttgtttgatactgacttgcttaggctacttaccaggaataatatacgcaatttacgcaatttgtttcttgcaccgcgatgagtattttgatgaatacagacgcccaatctactatgttgcttgacctcttgattgattcttgctcttgagcacacatattgtactttaaagtgtaatttacttgtatcctggagataataataccatttttttttaagaaaana

SEQ ID NO: 10477 - DNA, 354 bp, Arabidopsis thaliana
  unsure at all n locations
  Clone ID: LIB24-046-Q1-E1-A8
tttggtcggttcttcacgttttgtttatggcggtgattacgtgatgaaagtcaccggaaagccgtattcgacggcgacattaccggcctttgagtcggataagaatctcttctctcacggtccagatctcagagctattcaaagagctactactgtcactaaacgtcgagctaggaacccgagtttgactcgtcagcgaagatccggtccttctggtggcagacgaagccggccggagactcctttattgaaatggaaggtggaggatcggaataaagagagaagcggcgttgtagaagacgacgattacgaggatgataatcaccaggttgcgaggtcagagactactcgcan

SEQ ID NO: 10478 - DNA, 463 bp, Arabidopsis thaliana
  unsure at all n locations
  Clone ID: LIB24-046-Q1-E1-B12
gtggccgtccatnaattcaagggnccacnnacgcgtccgaaaagccntttgcttcattctcacttccttcctcatccaaaaaagctcctccatttcaatggcgacagcatcagctctctcatcactctcttcactctcactccacacccgaacctcttctctcatctcctcttcctccacaaaatccatcgtctctttctcctccttcctcaaccgncgcttctcatctctcactctcgtcaaagcctcatcgaccgataccganaccatcttcttcgangacgaagcaccaggaaataancgcaaatgtcgtcttcgacccancaattgctcccgaaggattcgtctctcctccgtatttcgacgaaggaagcgacgaanacaagaggaagagatcgctancgcttttgaaggagctctatggacctgcgtanagttggtgagagtatgcttgggaaaagat

SEQ ID NO: 10479 - DNA, 403 bp, Arabidopsis thaliana
  unsure at all n locations
  Clone ID: LIB24-046-Q1-E1-B5
acgcgtccgcgccgtaagattccggaatttcgccgcttaattgattgctgaaggtgataatcttctgaagttttcttctgtagcacaaatacggcggcaattcaccggagaatctgttcgtcgagacatcgaattcagagatttctgagaatttcccgagattccttggtaacgtccccgtgaaactgttgttgaagattttgaattcaacgagattaggattcaaagctacgacatctggtaatcctccggtgaagaaattatcattgagattgaaagagataagttgcagagcagcgatcttttccggtagttcaccggttagattattctgcgagacatcaaaattcctcaattcggttaaatttccgatactctccggtaattttccanataaccggtt

SEQ ID NO: 10480 - DNA, 434 bp, Arabidopsis thaliana
  unsure at all n locations
  Clone ID: LIB24-046-Q1-E1-B7
attcccgggtcgacccacgcntccgntttccgtctctgttttttcttgcattttccccagaattccttcacattctctccttttcctctttttaattcctcaccacctcaaattcttcacaaacaaatccacttctgcatggntggganaatctgttaggagaatttttgttgttgttgggttcagatttggaaaatttcctttttttcgagtttcttctgaattattcatcgtggagattctcggatcgggaagggntgcganaggtggttttcacngcggggatagattcatcttctgtcttcncctgagggggtagccgangctccggnctcggcggtttttaaacccctacctttacaaattctgggaaattagaaaaaaaaaggtttgatttttcaatttttgctccgttccgtcctctcngaaaagtt

SEQ ID NO: 10481 - DNA, 450 bp, Arabidopsis thaliana
  unsure at all n locations
  Clone ID: LIB24-046-Q1-E1-B8
acntttgccccgcccggtacaagtccaaaaattcccgggtcgacccacgcntccggttggatctttggaatctgatcaaactctttcaatggccaccttaancgaaaaactcgacatcttatctgacgacttcgatccaaccgccgtagtcaccgaaccgttacctcctccggtaactaatggaatcggagctgataaaggaggaggaggaggagaaagagagatggttctcggtaggaatatacacacaacgtcactcgctgtaacggaaccggaggttaacgatgaattcaccggagataaanaagcttatatggctangtgttcttgctcgttaccgggaaactttggttgaacgaaccaaaaaccatttaggttatccttataacttgggatttcgactatggtgcgcttgggtcagttacaacatttttcgattaagaaancgtg

SEQ ID NO: 10482 - DNA, 463 bp, Arabidopsis thaliana
  unsure at all n locations
  Clone ID: LIB24-046-Q1-E1-B9
ctagccgtccanaaattccaanggtccacccacccgtccgnaagggaggagagtgtancagatcggcgaaaatgacaaccagattcaagaagaacaggaagaanagaggtcacgtcagcgccggacatggacgtatcggtaagcaccgtaagcatcccggaggtcgtggtaacncnggaggtatgcntcaccacaggatcctcttcnacaagtaccatccaagttacttcngtnaanttngtatgacgtatttccacaagctgaggaacaanttcttctgcccaatcgttaacctcgacaanctttggtcactcgtccctgaatatgtnaacgcgaaatcaaccantgacaatgttccgttgatccatgtgactcaacatngtttcttcaaagtttgggtaaaagtcatttgcctganaataanncgttcgttgttgaacgcgaaancttattccaaagaccg

SEQ ID NO: 10483 - DNA, 451 bp, Arabidopsis thaliana
  unsure at all n locations
  Clone ID: LIB24-046-Q1-E1-C10
cgtccanaattcaagggtcnacccacgcgtccgggaaattatccatatacctgaaaagccttcattgtcacctgaccatcagcccactgtgaaggtatatgctagcctaatcaaacccagatttgccaatacgatagtgaggcatttatgtaagattgctcctctagaagatcttcgtcatgttaaaagggtgaagaagaagattctgccagattgcggtatcccattgtgaaactcagttgactgtcatcttatgtctagcacctgagcacaacgatcagttgagtgacatgccacctgatgtgcananactcgttgatccctatgagttgagtccttttattacacaagtatgcaaatatgctgcggtatccaaagaagagtgggaagaacaaagtaagatatggcctacttcatttcatccaccaacctacaatatagatggcatcgg

SEQ ID NO: 10484 - DNA, 402 bp, Arabidopsis thaliana
  unsure at all n locations
  Clone ID: LIB24-046-Q1-E1-C2
ttacgctgttgacgcattcagaaactgcaaacagtgtgctggaggtaaaattggaattgcacacagtccagcttggttcgaaccacaagaccttgagcatgttggaggttccattgaacgtgtgcttgatttcatcctaggatggcatttggctccaacaacttatggagattatccacaatcgatgaaggatcgtgtcggtcatagattgccaaaattcacagaagctgagaagaagttgctaaagggttctacagattacgtaggaatgaattactatacttcagtgtttgcaaaagaaattagccctgatcctaagagtccgagttggacnactgattcncntggttgattggggataggcaaganttgtggaatggatacaaaaattggtaaccaagc

SEQ ID NO: 10485 - DNA, 405 bp, Arabidopsis thaliana
  unsure at all n locations
  Clone ID: LIB24-046-Q1-E1-C3
gaggctccgagacaaaagcgattgtctgtgtcctcacggatagaattaggatctctaatcaatgggtttcgcatttgtctttcgctggtctacttggtgttgctggtttcgtatttgcccaacagcacggtctattccgcaacttaaacaacttaaaactcttctccggtagagaaaaagactccggagacgattcttttctcgtacctggccttcaaaatctcggaaataactgcttcctcaacgtcatcctccaggctctagcgagctgcaaagattttaggagttttcttcaatgggttctagaggatgcgaagaggttcgttagcaggagaacaagaggaacagcttcctcttacttttgctttgtctgctttattacaagagctccggcacagtttgnaa

SEQ ID NO: 10486 - DNA, 454 bp, Arabidopsis thaliana
  unsure at all n locations
  Clone ID: LIB24-046-Q1-E1-A11
gtataagtccanaaggcccgnggcccnncacaaagtcgcaatgggcggacgcgtgggcggncgcgtgggtgaaggatttgcaaggagcccctcttttaatattggcaaacaagcaagacctcacaaatgctgtatcggctgaggaactggaccgataccttgatttaaagaaattggntgaaagagtgtacatgtttgaagcagtttctggatatgatgggcgaggaatcaaagaaagtatagaatggctggttggagtaatggagaaaagcaagagaaccgaatcattaagagcccgtgcagggtacantcctgtgccaaattcatangacacgangaaaggactcgcaaactcaactctccagtcaactgggnttcctttgaaatacatttgtagataagaacagaccacaatcctttgcatcaattttngntagcatcaaattcccctnga

SEQ ID NO: 10487 - DNA, 418 bp, Arabidopsis thaliana
  unsure at all n locations
  Clone ID: LIB24-045-Q1-E1-E9
gagtcgatccataatcgccactttcagatttccagattctggggaaacatctctaaactcttcaacgatggcgactgagaatctcaccgataagaatgttgttttcagaaagctgaaatcaaaatccgagaacaaggtttgctttgattgtagtgcgaagaatccaanatgggcttctgttccttatgggatcttcctatgcatcgattgttctgctgttcatcgaagtctaggtgttcatatcaggcttcgtcaggtcaacgaacttagactcgtggagtcctgagcagctaagaacaangatgtttggagggaanantcgagctcangtgttttttangcaacatggatgggaatgatggtggntaagattngaggntaagttatacttcaagagctgcctgacnatgtatagaac

SEQ ID NO: 10488 - DNA, 490 bp, Arabidopsis thaliana
  unsure at all n locations
  Clone ID: LIB24-045-Q1-E1-F1
gaactgttacgcctgccgtaccggttcgaaagcccgggtcnacccaangcgtccgcnacntcagtatcagaaagcttggaacaagaggttcgcgacacaaagatcaaatttcttgggaatctaaaacaagaaactgaggaagagcgttcagagtggagaaagttgtgtacctgtctcaagtctgaatacccagactatactccattactagctaagatcctggaaggtttactgtctcggtctgatgctggggacaaaatcagccatcacgaagagattatagaatgctgcaaacgaagtagtacgcagtgttgacgtagatgagctagcaagattcttgctagacaaaactgaaccagaagatgatgaancaagagaaattgaagaaaaaaatggaggtgacacgtgatcaactggcggatgcactataccaggaaagggttagccatgggcgagaatccagaatcctgaaagggttngaaaggaaggt

SEQ ID NO: 10489 - DNA, 411 bp, Arabidopsis thaliana
  unsure at all n locations
  Clone ID: LIB24-045-Q1-E1-F11
cttttctgtgtaaattaaagagttcttttttgaaggaaataggcaatctcatcctgagaatcaaacaaccggaaaattcaataaatgaaacgcctttaattgttttttcttacaaaacttctaagcagattactttggcggagacccatctgattggtatttttgcagatattccgttcttggagtaccaactggcctggagctacattccttagcctggagtaaataataggctgaccctttgaaatcaacatggtttcctcaagaacttaataacttttcgctggtttctgtcctggagcgttgttgtgtgtttggtcagnggtatnaataagtccaangcagggtccacgangcactggngattcatccgactggaataaattatgcagatggagaacccatcctgtn

SEQ ID NO: 10490 - DNA, 457 bp, Arabidopsis thaliana
  unsure at all n locations
  Clone ID: LIB24-045-Q1-E1-F4
acgcgtccgggcanaagaaaatggatttataggatcaatcgatcaaggaaccaccagcaccagattcatcatttacgaccacgatgctcgtcctgttgcttctcatcaagtcgagttcactcagttctatcccgaagctggatgggtggaacacgatccaatggagatactggaaagtgtgaaagtgtgcattgcaaaggctctcgacaaagccactgccgatggacacaacgtcgacggtggcttgaaggccattgggcttacagatcagagagagactactgttgtttggagcaaatccactggccttcctctccacaaggctattgtctggatggatgctcgtaccaactccatctgcaggagactagangaaagaactctcgggaagaagatccaatttgtggantccttgcggctttccaataagcaaaanacttcccggcaangaagcctg

SEQ ID NO: 10491 - DNA, 435 bp, Arabidopsis thaliana
  Clone ID: LIB24-045-Q1-E1-F5
acgcgtccgtcacctacgtagaccggtacgtgacgagatggagaggttcgtcgttagcgcggagctacttaaccatccggttttcatcggtttactaaaccgatctgctcaagagtatggttacgagcaaaaaggagttctacaaatcccttgccatgtccttgtcttcgaacgaatcatggaatcgcttcgtcttggacttccggtaccgattgatgttcaggatctaatcggtgacgggactatttgaagaagaagcttttattggaaggaatcttggtagttagagaagtttttttttcttctagatctggttgtttttgttcagatactactgagtcatcatacttcgtcgtcgtgtcgatgtaaataggtatataatttttccaggatccaaaagtggaaagaaggagacgcatttaagggattttcttt

SEQ ID NO: 10492 - DNA, 396 bp, Arabidopsis thaliana
  unsure at all n locations
  Clone ID: LIB24-045-Q1-E1-F8
acattttgggattcttagctcttgaagttattttggtggtggctatcattcttattacgctctttgcgcttaagggtgattttgttaagcaaacatttgttggtgtgatttgcgatgtcttcaacattgctatgtatggagctccttcattggccattattaaagtggtaaaaacaaagagtgttgaatacatgccattcttgttgtctttggtctgtttcgttaatgctggaatttggactacttactcgctcatcttcaagatcgattactacgtcctcgcaagtaatgggattggaacctttttggcactttctcagttgatagtgtacttcatgtactataagtcaactccaaaagagaagacggtgaagccatcanaagttgagatttctg

SEQ ID NO: 10493 - DNA, 446 bp, Arabidopsis thaliana
  unsure at all n locations
  Clone ID: LIB24-045-Q1-E1-G1
angcgtccgcntttttttgtttttcaaagtggtggagctaancatgaaatcgactcaccatcacagagctccactaatatctgcttcttcctcatcttcatcttcttcccaaaaccattcattcgtctctaggctcctccttctccttactctacttccagtttcccttgcttgtctcgcctttatcctccaatggcgaggcggtggtctcgccgatcctgcctctgcttctgttcgttcctctacgtcggttcctggcggctccgatctcaatcacgaggtctttcccggcatggagactgtttcatctgtctccccaaagtctcancaatcctcctccgactgctcaaatctagctcgcagctcttctccttcttttccttactatgctgattgggaatttggtgttganactagcntaaagcccaaagatatgtntcacgaac

SEQ ID NO: 10494 - DNA, 423 bp, Arabidopsis thaliana
  unsure at all n locations
  Clone ID: LIB24-045-Q1-E1-G3
cagggagagcaaaacaaagatcggagaagatgaagacgattctttcttccgaaacgatggacatccccgacagtgttaccatcaaggttcacgctaaagtgatcgaantcganngacctcgcgggaagcttgttcgcgatttcaagcatctcaacctcgatttccagctgatcaaggatccagagactggaaagaagaagcttaagatcgattcgtggtttggaacacgcaaaaccagcgcctccatcanaaccgctcttagccacgtcgataacttgatctccggtgttaccaagaggtttccgttacaagatgaggttcgtgtacgcccattttcccatcaacgcctccatcngcggtgacngaaaagtctanccaagattcgtaanntcccttggcgaanaagaaaggnaaggaaaggtt

SEQ ID NO: 10495 - DNA, 435 bp, Arabidopsis thaliana
  Clone ID: LIB24-045-Q1-E1-G5
acgcgtccgtgctcctttccctcttcttcaccttcatcacatacgtatggcattacggcagcagaaagaagtacctatgcgaccagcacaacaaggtccctatgaaatcaatactaagccttggcccgagcctcgggatcatcaaagtccccgggatgggtcttatctacacagagctcgccagcggtgttcctgccacatttaagcactttctaacaaacttaccggcgttctaccaagttgtcgtctttgtctgctgcaaaactgtccctatcccgtatgtgccgcagaaagaacggtaccttatcggccggattggaccaaaaacatacaggatgtaccgatgcattatccgagctggctacaaagacgtgaacaaagacggagacgactttgaagacgagctggtgatgagcatccgccgagtttatccag

SEQ ID NO: 10496 - DNA, 425 bp, Arabidopsis thaliana
  unsure at all n locations
  Clone ID: LIB24-045-Q1-E1-G6
catatccaaagacccgaaagtgcttgcagagctcaagcgtgagcataaggcaattgtagacaacagaaaagataaggaanctggngttagctgggaagaatatagacacaacatgactttcaccaacatggttagcaatgaggtgcttcgcctagcaaacacgacccctttgttgtttcgaaaggcggtgcaagatnttgagatcaaaggatatacanttccggctggttggattgtggcngttgcaccttcagcggttcattttgatcctgcaatctatgagaacccatttgagtttaatccatggagatgggaggggaaagaaatgatttggggatctaaaacgttcatcngcntttggatatggcnttagnccttgnctcgtcatatttttcaccggttttaaatggaatccttccccnaca

SEQ ID NO: 10497 - DNA, 479 bp, Arabidopsis thaliana
  unsure at all n locations
  Clone ID: LIB24-045-Q1-E1-H2
ctgttagcctgccgtaccggttcaaaagcccgggtcnaccnacgcgtccggtcnccgaaaccctaaatctcgacctcaaaccctgaaccatggctgaaggactcgtgttgaaaggcacaatgtgtgcccacactgatatggtcaccgccattgctacaccggtcgataactccgacgtgattgtaacttcgtcgcgtgacaaatcaatcatcctctggaaactcacaaaggaagacaagtcatacggtgttgctcancggaggatgactggtcactctcacttcgttcaagacgttgttctctcctccgatggacaattcgctctctccggatcttgggacngtgagcttcgtctctgggatctcgctaccggagaatctactcgtcgtttcgttggtcacacgaaaaatgttctctctgttgctttctctaacgataacccgtcagattgtctccgcttctcgngattcgtacgaatt

SEQ ID NO: 10498 - DNA, 454 bp, Arabidopsis thaliana
  unsure at all n locations
  Clone ID: LIB24-045-Q1-E1-H4
acgcgtccgagnagaagttgggagattgaaatgtgagaatggtagattggtgaaggagaggaagaagagagaggaggtgattgagaggggtaatagggagaggagtgaattggtggagagccttgaggagaaggttagggagattgatgttttgaagagagaaattgaaggagttgtgaaagagaagatggaggttgagatggtgagacgtgatcagagggagatgattgtggngttggagaaaaagctgggagatatgaatgagattgtggagagtttgactaaggaaagggangggttacgtggtcaggttgttgggttggagaagagtcctgatgaggttacggaggaagcgaaagcgagagctgagcagatcaatgaacttgtgaaagagaaaactgttaagggaatctgaaccttgaagggtttaatgggtggagaaccaattcnatta

SEQ ID NO: 10499 - DNA, 413 bp, Arabidopsis thaliana
  unsure at all n locations
  Clone ID: LIB24-045-Q1-E1-H8
aagtttgatttatttagagagataagttaaaaaaaaaatggtcggtatggatttgttcaaatgtgtaatgatgataatggtgttggttgtctcttgtggtgaagctgtttctggagctaagttcgatgagctttatcggtcaagctgggctatggatcattgtgtcaacgaaggcgaagtcacaaaactcaagcttgacaattactctggagctgggtttgaatcaagaagcaaatacttgtttggtaaagtctctatccagattaagcttgttgagggtgattcagcaggaacagtcactgctttctacatgtcttcagatggtccgaaccacaacgaattcgattttgagttcttaaggaacactaccgggcgaagccttacatagnccaagaccatatccacgttnaacg

SEQ ID NO: 10500 - DNA, 439 bp, Arabidopsis thaliana
  unsure at all n locations
  Clone ID: LIB24-046-Q1-E1-A10
acccacgcgtccgnaaaaaggctgggaatcatggtgttaaaaactctggacgtgagaaagcaatcantgattgttacaatggtgatctttctagaaagctgatacttgggtacgcaaccaanaccaagaatttgaagccgccacatgaatacgtaccatgggtcacactcaanngcaagccactcgatgacagcgtacanagtacggatgatctcgtagctcanatctgcantgcatacaaanggaaagactactctcccaaaagtttgcaattcatcccgcctcaaatgtctaaantcgcctgagaaggaaatggaagcttcaagtctccttatgccaataaagctaccaattattaagttaactatcaaacttcgtantgaactaagatggatttaagctttaagttataagtggaatgatgaataaaggcctgttc

SEQ ID NO: 10501 - DNA, 413 bp, Arabidopsis thaliana
  unsure at all n locations
  Clone ID: LIB24-045-Q1-E1-E6
gagtaccctgaaacagatctttcgtataatcagtgacgtagagatcgaagacgatgatgagctctgcatccgccatgaaagctgttggatttttgcttctgcttaccattctaacattagcttatgcgaagaagtcaggtgatgtgacagagttgcagattggtgttaagtanaagcctcacgaaatgtgatctccaggctcacaaaggggataagatcaaggttcactatcggggaaagttaactgatggaactgtctttgattcaaggttttgagagaggtgaccctattgagtttgangcttggaactggtcaagtcatcccaggatggggaccagggtttattgggagctngtntaggtgagaagagaaagttgancatccatcnaagcttggttatggtgatnagcgg

SEQ ID NO: 10502 - DNA, 469 bp, Arabidopsis thaliana
  unsure at all n locations
  Clone ID: LIB24-045-Q1-E1-C1
ctggtaccctgccgtancggttcgaaagcccgggtcgacccaaacgtccgggccccgataagttccttncttgtccgacaaactacttcttctccttcgataagccaattctgcgccatagatttttgaaatctactgccggaaaggctgcatgcgatttcaactcccttttcccgggacaattcgcaagcttgtgaagaagatcaagaggtgaactctgagtgatgagtgagccaaaggtcaggcgttgggttggcaaatatgaggttggaagattgatcggtgaatgtaattttgggaaactgcggagtgctgttgacacagagacaggagaccctgtggctttgatgatccttgataaagacaaggttctgaagcataagatggctgaacaaataaaggagagaaatttcnattatgaagctgattaaccatccaaatgtnngtgcagctttatgaagttttggcn

SEQ ID NO: 10503 - DNA, 412 bp, Arabidopsis thaliana
  Clone ID: LIB24-045-Q1-E1-C11
atattctctacctcaagattcagaagaaaatagaggatcagtcggccaaagtgctggtcagagtagcactagtgtcgttgatcaggtccggtcgccagctgatgatgctggtgtcacttcttcatccaccatatgtccagctcctgtttgtaggcaattttggaaagctggaagctataatgatgaattgagttcaaagtctcagcagccaaatggaaaaaattatcttcatgtgcaccctatgttccttcactccaatgctacctcacataaatgggcttttggagctgttgcagaattgcttgacaatgctgttgatgagatccaaaatggggccacttttgtcattgtagataaaaccacaaatccaagggatggtgcaacagctttgctaaattcaagatgatggtgg

SEQ ID NO: 10504 - DNA, 464 bp, Arabidopsis thaliana
  unsure at all n locations
  Clone ID: LIB24-045-Q1-E1-C5
gtaccggtccanaaattcccgggtcnacccacgcgtccggtcaattttggcttattcagaatgaccacgatccatcaaagttaatggctgagacaccgtgcaagttgatgaggtatttgatttccgacaacagcaatattgacgctgatacgccttatgccgaagttgaggtcatgaagatgtgcatgccacttctttcacctgcttcaggagttatccattttaaaatgtctgaaggacaagccatgcaggctggtgaacttatanccaatcttgatcttgatgatccttctgctgtaagaaaggccgaacccttccatggaagtttcccaagattagggcttccaactgcaatatccggtanagttcatcagagatgtgccgcaacattaaatgctgcacgcatgattcttgctggctatgagcataaagtagatgaggttgttcaagacttacttaattng

SEQ ID NO: 10505 - DNA, 423 bp, Arabidopsis thaliana
  unsure at all n locations
  Clone ID: LIB24-045-Q1-E1-C7
tagggtttcttggtcgacgtgatgagtcatcggcgagattacggcagtgatgcagttcacgtgagaatcacccacgaccctccgcctgagaattgttttccaaattccggcgacagttccgtctgggccactgaggatgattacagccgtgtctgggccataaactctgatggcgcagagtctccgagcaagaagacacgatcttcctcctcctccgagatcgggaaatcgttcttcaagacgaagctttgcttcaaattccgcgccggaacttgtccctactccgcgagctcttgccactttgctcacagcgcggaggagctccgtcttcctccgccgccgccgnccaattggnaggagacngtgacagangcttcangaaacagagaaagctttgcggttagtttaggccctcngtgggaa

SEQ ID NO: 10506 - DNA, 439 bp, Arabidopsis thaliana
  unsure at all n locations
  Clone ID: LIB24-045-Q1-E1-C8
acgcgtccgctattgtttgtaagttttcaaggaaggtaaagaaacagagagatctaacttcgtctgcagggtttaagcagaggttggtttgtggattcttcgatttcttcttcagatttagtctacaatgaagtgagaatttctaaagataaacaaagaaaaacttgagactttagcaagatggagactgtgagaccaatggttgttgctcctaagggtaacaaactcagacgcaagtttgctaaagttcttaacattcataagctaacgggtgttgctccagaaggagaaatgaagaagataaagttcgattccaaaaccgctaagttgtctgagtcgttctacaagcttgaggaagagtatgagagaagtcagggattggaagctcttcttgcgaagctttttgctacggtttcttcgatnaaagcggcttatgcgc

SEQ ID NO: 10507 - DNA, 495 bp, Arabidopsis thaliana
  unsure at all n locations
  Clone ID: LIB24-045-Q1-E1-D1
gttacgcctggccgtaccggttcgaaagncccggggtcgacccaangcgtccgcggccgcgtgggcggacncgtgggctgactcactactctcactctccggcgctttaaacttacgttctccgtcgtttactctgttgtaaaaatgagttctagggctggtccaatgtctaaggaaaagaacgttcagggtggttataggcctgangttgaacagttggttcaaggtttggcagggacgagactggcttcttcacaagatgatggangagagtgggaggtcatttccaagaanaacaagaacaaaccaggaaacacttctggaaaaacttgggtttctcanaattcgnatcctcctagagcttgggggtggtcagcaagcaangggagangtaacaacgtatctgggagaggaaacaatgtatccggggagaggttacggcaatgggtccgggggattcaangctaacatatnctggtccgggggacganccgt

SEQ ID NO: 10508 - DNA, 408 bp, Arabidopsis thaliana
  unsure at all n locations
  Clone ID: LIB24-045-Q1-E1-D2
ctgcgcgactctcantgttgcagaggtttaggaagaaaggaatggttcgatcgtgactttgaattgggatattgtgtgtaaaatgtgggtgcctacattgagctcaagctcatgttcaaagtgatganagggatgagagcagtggagaagccgcgcttacgccggtttatctcaatgtctatnatctaacgcctgtcaacaattacctttattggtttgggattggcattttccattctggtantgaggctcataatttgggnatattgctatggagctcacgaantatccaacaaagtggggtatatgaggtggaaccnagggaactgtccaaggttcanctttangacggtcnggttttactggggaaactaccancatgtccccgttcagatttccgctcanaca

SEQ ID NO: 10509 - DNA, 423 bp, Arabidopsis thaliana
  unsure at all n locations
  Clone ID: LIB24-045-Q1-E1-D5
ctccagaaaaaaacaaaacttttttcttttctctctcaacttgcagaagaagcgatttacacaaggttttgtgattcttctcacttatatataatcttctgtatgcttggaattggtatcaaaatcgattcttttaatctgtcattgaaggaactgggtttatacatttatctctcaagtcatagaatctgcatttgtcccaagttaagaagagaatcttgtactgctccttatctatgttttgctctctttaccaattgtttcaatgttatgaacaaaacccatatctctaaatagcaacaatagtgatttcatttaataatggattttgnctcctggtcccaatttatntagtaancatggagcgggctgatttctcatcctcctctcangatcgtctcagaccttgatcacaccaaggtt

SEQ ID NO: 10510 - DNA, 401 bp, Arabidopsis thaliana
  unsure at all n locations
  Clone ID: LIB24-045-Q1-E1-D7
tattgcagagcaggttacctggataaagccagagatatattccatacaataccttacgagccatcaagtgctatgtgtgctactctactgaaagcgtgcctcatccacgggaacacaaacattggggagtgggctgcagataagttactactagaaacaaagccagaacacttaggtcactatatgttgcttgcagatatgtatgcagtaactggttcttggagcaagcttgtaacggtgaagactttactgagtgacttgggcgtgcaaaaggctcatgagtttgctttgatggaaacagattcggagttagatggagagaataataagccgatgaacgatgattctgtcatcaatcaggagcaaagttcagatnaanaacgtcctgtagaantaggata

SEQ ID NO: 10511 - DNA, 442 bp, Arabidopsis thaliana
  unsure at all n locations
  Clone ID: LIB24-045-Q1-E1-D8
tctctgattggcttaatccgagagaatcaaggaattgaatggccagtgaatcagatgcatcgagcattgctactctttcctgtgctcgctgcgagaagcctgcacatcttcagtgtccgaaatgcatagacttaaagcttcctcgtgaacaagcctctttctgcactcaagaatgtttcaaggcagcttggagctcgcacaaatcagtacatgtgaaagctcagctgtcttcaatcggtgatcaagaactctgatcttatttctcaaggctggctctattgcgtcaagaaaggccaggctagaacacctaagcttccacactttgattgggactgggcctctaaagcaatatcccatatctaccaagcgtgttgtgcctgctgagattgagaaacctgactgggcaattgatgggactcccaaagttgaaccgnataggtga

SEQ ID NO: 10512 - DNA, 494 bp, Arabidopsis thaliana
  unsure at all n locations
  Clone ID: LIB24-045-Q1-E1-E2
ctgttacgcctgccgtaccggttcgaaaatncccggggtcgacccacgcgtccgangaaaatggagctctgcaccaggtctaccacaatcatcactcatctccctgcgagcttcaacggccatggatatctagcgggaaaatctgttgatagaatctcacttcctctccagcgaaacgttgcgtctctcgttcttcaatcccgcacgttgcgttgtagtagaaagtttccaggagaaacagttactgaagaaacatcaacaggagtcaatgagtttggtgtggaggatcgtgatggagtagttgttgcagccgaagagaaaaactcgaatagtgaagctcctcaagctgaangatgaggaaactcaagccctanagtttttgnacgatattaaagctggactcaagncanggacatantcaatnctgcctctatgggaagttggtngngatagtttggntctctaacttaacgtcctggcaanccggcaagttc

SEQ ID NO: 10513 - DNA, 456 bp, Arabidopsis thaliana
  unsure at all n locations
  Clone ID: LIB24-045-Q1-E1-E3
acgcgtccggaanngagttgctaaatctcaaatgattgtaaaacagagagaagatagggcaaatgaaagcgataagattatcaagcaaaagggaaaagaactggaagaggcacaaagaagattgatgctgctaacctcgctgtgaagaaactagaagacgatgtcagttcgaggataaaagatcttgctttaagggaacaagaaactgatgtgttgaagaaatccatagagacaaaagcgcgtgagctacaagctctgcaagagaaactggaagccagagaaaagatggcagttcagcaactagttgatgaacaccaagctaaattgggttcaacacagcgtgagtttgagttggaaatggagcaagaaaagaaaatcctattgatgacagccttgaagagcaanggttgcagaagtgggaaaagaaggaagctgaattggaagcaccttggaggg

SEQ ID NO: 10514 - DNA, 493 bp, Arabidopsis thaliana
  unsure at all n locations
  Clone ID: LIB24-045-Q1-E1-E4
ngttccctgccgtaccggtncgaaaattcccgggtcnacccacgcgtccggagaaatacaactgccgatcaattctcatatatacatagacgtgctttaactctgatgggttgtactgtgagggagaagcatgttagaccaaaccggaagaccagatccgtgaaacccgaattcgatccgtgttgtttgctcgacaggacggctctatcgaaatcgattgttgaatcgagtcttaagcatcttgtttatcatccgggtcttctcgattcgtgtccagagtcaaaccctagtggcagttttgaggataataatggttggggttattgtacggaggagcaattagaggatattttgttgaaacatttggagtatttatacaatgaagcgatttcgaagcttgtgggttctggttatgatgaggatgtggcgttgagaactgttcctagtaatgggtaatgttaatggtngaatggatgttaagaacnaataatcc

SEQ ID NO: 10515 - DNA, 419 bp, Arabidopsis thaliana
  unsure at all n locations
  Clone ID: LIB24-045-Q1-E1-E5
acgcgtccgacttttcatatatatacatacatcgtctccactctcgttggctcatttttcattcaccgccacgaagcaagaggagattcgtattagccaccatgtcttanacctaacgctaagactgaggttcgccggaaccgctacaaagtggcggtggatgctgaggaaggaagacggaggagagaggacaacatggtcgagatccgtaagagtaagcgtgaagaaagcttacagaagaagcgtcgtgaaggccttcaagctaatcagctacctcaattcgctccttcttcggttcctgcttcancaactgttgagaagaagttggagagtttgcctgctatgggttggtggtgtttggtcagatgatagaagtttacagcttganncgactantcagttccggnaattggcttcca

SEQ ID NO: 10516 - DNA, 493 bp, Arabidopsis thaliana
  unsure at all n locations
  Clone ID: LIB24-045-Q1-E1-B3
acgcctggccgtaccgtgtncgnaaattcccggggtcgacccangcgtccgcnccgcgtctctcgttccttctctggtggcgttttcaccatgccgaagcattacanaccaacggggaaaaagaaggaaggaaatgcggctaggtatatgaccangtcgcaagctcttaaacatcttcaagttaacttgaatctattcaggagactatgtattgtcaaaggtatatttccccgagaaccanagaagaagattaagggaaaccatcacacttactaccatgtcaaggacattgctttcctcatgcacgagcctcntcttgagaagtttagggaaatcaaagcataccanaagaaggtcannaaagccaaacgccaaaaaaaacgaggagcttgcacgccttctgctcacccgccaacctacttacaaagcntgatanattgatccgnnnaaggtatccaacatttattgatncactgccaaacttggaangacc

SEQ ID NO: 10517 - DNA, 487 bp, Arabidopsis thaliana
  unsure at all n locations
  Clone ID: LIB24-043-Q1-E1-D8
cgcctggnccgtaaaggtccanaaattcccgggtcnacccacgcgtccgggttgataaaggggctgatattcatgacgtttatcgcaattattgtgatattgatcacactggctcacatgacgatacaagacataattgtgtgtatccttgcctttatgcccacaggttgggggatgctcttgattgcgcaagcgtgtaagccggtggttcatagagcaggattctggggatcagtgaggaccctagctcgtggatacgagatagtaatgggactgttgctgttcacgccaagtggcgttcttggcatggtttccatttgtgtcagagttccaaacgcgtatgctctttaatcaagctttcagtagaggtcttcagatctctcgtatccttggaggtcatcgtaaggatcgctcttctcgaaacaaggaatgattcatctcttcattgtaatgacagggaanggatcttaantttacccctttttaa

SEQ ID NO: 10518 - DNA, 452 bp, Arabidopsis thaliana
  unsure at all n locations
  Clone ID: LIB24-043-Q1-E1-E10
gtaccgctccanaaattcccgaggtcnacccacgcgtccgnggaatctaatcatcaaaaaccgggacgattctaaccggtgtaccagataatgtcatcacgacgtcagcatcggaagctggaccggtagaaggagtcttcgtcggagctgtatttaacaaggaagagagtaaacacatcgtaccgatcggtacgcttcgcaattcccggtttatgtcttgtttccggtttaagctctggtggatggcccagagaatgggagaaatgggccgagatattccctacgagacgcagttcttattggtcgagagcaacgatgggtcccaccttgagtctgacggagctaacggcgtcgaagtgtaaccagaaagtttacaccgttttcttgccgttaatcgaaggatctttccgttcgtgtctccaagggnaacgttaacgaatgaggttgancct

SEQ ID NO: 10519 - DNA, 471 bp, Arabidopsis thaliana
  unsure at all n locations
  Clone ID: LIB24-043-Q1-E1-E12
acgccngctcggtacggctccaaaaattcccaaggtcgacccacncgtccgnggaatctaatcatcaaaaaccggacgattctaaccggtgtaccagataatgtcatcacgacgtcagcatcggaagctggaccgggtagaaggagtcttcgtcggagctgtatttaacaaggaagagagtaaacacatcgtaccgatcggtacgcttcgcaattcccggtttatgtcttgtttccggtttaagctctggtggatggcccagagaatgggagaaatgggccgagatattccctacgagacgcagttcttattggtcgagagcaacgatgggtcccaccttgagtctgacggagctaacggcgtcgagtgtaaccagaaagtttacaccgttttcttgccgttaatcgaaggatctttcccgttcgtgtctccaaggaaacgttaacatgaggttgagctctgtttggagag

SEQ ID NO: 10520 - DNA, 509 bp, Arabidopsis thaliana
  unsure at all n locations
  Clone ID: LIB24-043-Q1-E1-E4
agtgtttcgccangncgtaggcctccaaaaattccaaaggtccacccacgcgtccgcacctaaagaggatgaagcacctccaaaagaaagattcaatacagcccgcattgggaaatgcatcggtgattatatgctgtattggtgctagcgagaaagagatctccgatattaccggtccttacaggatcgattacctagccaccaaaaaccttgttgatgctgcaacatcagcaaaagttaataacttcattttggtgacatccttggggacaaataaatttggatttcccgctgcgattctcaacctattctggggagttctttgctggaagagaaaagctgaagaagcattgattgaaagcgggcttaattacgcaatagttagacctggangaatgggagaagaccgactggatgcatacaaaagaaactcataatctcactcctgctctagacgatacattgtttgggtggtcaagtctcaaatcctccaaggtttgcaaaagttg

SEQ ID NO: 10521 - DNA, 496 bp, Arabidopsis thaliana
  unsure at all n locations
  Clone ID: LIB24-043-Q1-E1-F3
ctgtttagcctgcccngtagccgtccaaaattcangggtcnacccacgcgtccggtcccggagctagaaactgaaatcgtatttcaccaagagcatgacgacgggaagaattgcatcgtcttcttcgacggagaacaaggttctgagtcagctggtgccatacctgatgctcatgaggagtctcaaactgctgacttgaatggggagcaaacgcagttagaacctgaaaacggttcaacttctgaggataacgaaagatctcgtgaaattgaagaagtactagatggtgatgtctctaaagacttggatgctgttgatccactcgctgggtgangtgatagaggaggagggtggacttcgaagatgttgaatatcacgatgtggagaatatgatggataagcaagagacacatgatttgtactgtccaaactgcgattcttgcatcaccaaaaagggttatcctcaaaagaagggaaacggaagattcgtcntcat

SEQ ID NO: 10522 - DNA, 493 bp, Arabidopsis thaliana
  unsure at all n locations
  Clone ID: LIB24-043-Q1-E1-F7
aactgtttccgccgnccgtaaaggtccaaaaattcccgggtcnacccacgcgtccggagaatttcatggcgacatctgaagcggaatatgagagtgatcccgaggagctgaaccgctccttggcgacgaggaggagagaagcgagnnnnnnnnnnnnnnnnnnnnnnnnnnnnnnnnnnnnnnnnnnnnnnnnnnnnnnnnnnnnnnnnnnnnnnnnnnnnnnnnnagaagttggtactgtgaagtatgataatgacgaagatggggaggatagttatgaggatgatgaggaggaaagtggtggaggaatcgataatgataagagtggtgtggtgaaggaggctggtgatatgaatggagaagaaggaagaaaccgcggcaccacgcaaaangcaaccgagacgtgataattagaacangattttaaagtagttttcgangatgtgaaagaaaagttcaaatttatttttcngtttttggggtttgggttgna

SEQ ID NO: 10523 - DNA, 413 bp, Arabidopsis thaliana
  unsure at all n locations
  Clone ID: LIB24-043-Q1-E1-F8
agtttgggattactcctcgtgttaggactgtctctgccgatttcagtagaaatttccctaagtacaggaagcaattcagtgcattcttgaatacaccgcttggtggaagttttgctactattttcttcctttggtttgctctctctggatggctgttccgagttataataatcgccacttgggttcttccaattgctggccctcttctcattggtgcagtcgccaacaacttttgtccatcaagggagaatgcccancatgtaangangcaatttataaggtacaagaaccaaatcatcanatgtnaaggatgttggaacatantngtngcaaccacaaagcnaattcctcccaaaagatgcaacaacnacnaccaaccantattannacaaaagggaaaaccctaaaaangc

SEQ ID NO: 10524 - DNA, 477 bp, Arabidopsis thaliana
  unsure at all n locations
  Clone ID: LIB24-043-Q1-E1-F9
tntacgccgggtcgtaccggcccnangaattcccanagtcnacccaggcgtccgancacgcgtccgtgaagctctttgttcatctctctatcttgcttctccatcctcttcatcactctcccatcttcttacagctgcaccgaaaatgacaagaatgccctccttcaaatcaagaaagcacttggcaatcctccccttctatcctcctggaacccccgaaccgactgttgtaccggctggaccggcgtcgaatgcactaaccgtcgcgttaccggtctcagcgttacctccggcgaagtctccggtcagatctcgtaccagatcggcgacctcgttgacctccgtacactanatttcaagctacctgccacacctcaccggaaacatcccacgcaccatcaccaaactcaagaacctcaacactctctacttgaagcacactagtctctccggtcngattcctggattacatcagcg

SEQ ID NO: 10525 - DNA, 449 bp, Arabidopsis thaliana
  unsure at all n locations
  Clone ID: LIB24-043-Q1-E1-G11
attcccangtccacccacgccgtccgaacaaaagccaaactgtttangtttcgtcgtcgacgcgctctcatcaacaaagtcccatacgannatttaaccaaaactatatatcgagggacgaagcgcgtgacgttagatcggagatctcaccgagatcgccggtgaattagggtttctacttcctttgttcttgttaacgttatatgaaagtttggaagtgatgctcaacctgtngtaaatacggtccantnnnnnnnnnnnnnnnnnnnnnnnnnnnnnnnnnnnnnnnnnnnnnnnnnnnaattaccttgtactgtcaaactcagaatgtggtcgcatgacatcaaagacccatatgcacaactgaaatccganagatgtctatttacaataccggcatgccgtccnttgcagtgaaatgggaagctcattattncgccaaggtgggg

SEQ ID NO: 10526 - DNA, 488 bp, Arabidopsis thaliana
  unsure at all n locations
  Clone ID: LIB24-043-Q1-E1-G4
gtangcctccaaaatccaggtcnacccacgcgtccgcncacgcgtccgtatttggttctccattgtcgctaatgtctctattgctgctatgaacttcagtctcatgctcaattccgttggcttctaccaaatctcgaagctgagcatgattcctgtggtatgtgtaatggaatggattctacatagcaagagatactcaagagaagtgaaaatatcnnnnnnnnnnnnnnnnnnnnnnnnnnnnnnnnnnnnnnnnnnnnnnnnnnnnnnnnnnnccaaaggttttatctgtgcttgtgttgcgattttctcgtcatccttgcagcaaattttaataggttctctacagaagaaatattcaattgggtcctttgagttgttgagtaaaacagcgccgattcaagctttttcgcttcctggttgtccgtccctttagttgattaaccntccctaagtgggaaattcaattatgaaagtttaaaaaggcc

SEQ ID NO: 10527 - DNA, 432 bp, Arabidopsis thaliana
  Clone ID: LIB24-043-Q1-E1-G5
agatcgatcaatcaatcatcaaactctctgtgtgccacatgcattactactgttgacttgttcaataaaggtaaagtaagatcaatccggcgaatcttctttcgttttccggcaccgatctcggtggatctccgattcacatggcggcggataatgcttatctgatgcagtttgttgacgaaacctctttttacaaccgaatcgttctgagtcatcttttgccggcgaatctatgggaacccttacctcattttctccagacatggctccgaaattacctcgccggaaccctactatacttcatctccggtttcctctggtgcttctacatctattaccttaaaatcaacgtttaccttcccaaagatgcaattcctacaataaaggctatgcgtttgcaaatgtttgtggcaatgaaggctaagccaaggg

SEQ ID NO: 10528 - DNA, 402 bp, Arabidopsis thaliana
  unsure at all n locations
  Clone ID: LIB24-043-Q1-E1-G6
anacaagctcagaggaaacctagcctcnagtacctgaaccggatcggagcaacaggcgggaaaatcccactgggattgaaacgcaangggctaanagtggntgtgaccggtggngctggattcgttggntcncatctcgtggatcntttgatggctanaggagatactgtgattgttgttgatantttcttcactgnaaggaaagagaacgttatgcaccatttcagtaaccctaacnttgagatgatccgtcacgatgtggttgagccnattcttcttgaggttgatcagatctaccatttggcttgccctgcttctcctgttcattacaaattcaatcccgtcaagacnatcaagacnaatgtggttggaacattgaacatgcttggtttggctaanccg

SEQ ID NO: 10529 - DNA, 481 bp, Arabidopsis thaliana
  unsure at all n locations
  Clone ID: LIB24-043-Q1-E1-G8
gtaacggtccanaaattcccgggtcnacccacgcgtccggattctggaatctaggtttaaagtttagacctttgagatcacactatatcaaaaatggagctcaatttctcttcaatggctataacacacccnaaaatcccttctttcggttttacacccaccggnatattcctaaacccatcaaantcagtgtgtttggcttcacatcatcggcttccgagagtttcatgctctgtttctactactactgattctcccaagctagtgacttcaacaaaggtgacggcaatggntggngtgagctctanagacttggagatgtcgaatttaacggcgttatcgcctttggatggacgttattggggtaaagttaaggacttgggcttcttctttgagcgagtttggattgatcnanttccgagtttttgtcgagatnaaatggcttcctaaggttccaatnatccnggaggtcccgaagttc

SEQ ID NO: 10530 - DNA, 424 bp, Arabidopsis thaliana
  unsure at all n locations
  Clone ID: LIB24-043-Q1-E1-D7
ccgcccacgcgtccgcaataagctcacggatttctcctcaaaatcctaatccaatcatttctccaattctccaaggagtttggtaatacacaaataacatggaagacgttagaagaagaaacagaggacatcctctgctcagatccaagaagagaggagaaggctacaaccatggcttctcaccgtctcagattcaatctcttgccgtcatctgtcaaactttcctccctccggagaccacgtcggaacagcaagctgttaattccttccacgtagcctcctctactcaaccaccattcactgatgaggtggcggagatgatagtgaaaaacggacgatcagaagcagtcaaagttttgagaatcatattgatgattttgtcattcagatttgggaactttgttgccttgtgggtcccnccgtc

SEQ ID NO: 10531 - DNA, 392 bp, Arabidopsis thaliana
  unsure at all n locations
  Clone ID: LIB24-042-Q1-E1-G7
acgcgtgggcngacncgtggggccngtgaccattgtaatccgacgannnnnnnnnnnnnnnnnnnnnnnnnnnnnnnnnnnnnnnnnnnnnnnnnnnnnnnnnnnnnnnnnnnnnnnnnnnnnnnnnnnnnnnnnnnngccggcaaaatctctccaacatttcatccttcgaattgagagagttgcaagtcataattacntgtttgagccgctattatcatcatctgcatgataaatggttaaatgganaagtggatacatgttgctagaatgattgatgtctgttgngtaagaattggatacaattaccgaatggaaggctcatagaagtnacaagaaactaatcagtcttctttccaanctanactaaangatggattacaataacanac

SEQ ID NO: 10532 - DNA, 419 bp, Arabidopsis thaliana
  unsure at all n locations
  Clone ID: LIB24-042-Q1-E1-H11
catttcgaaaagaagatgaaggtgatagataagatccagtcattagccgacgaaggcaaaacagcgttttccttcgaattcttcccaccaaagacagaagatggagtcgacaatctctttgagagaatggatcgaatggttgcttatggtccaacgttttgcgatatcacttggggagctagtggatctaccgcagatctaacgcttgatatagcttcgaggatgcaaaacgttgtttgtgttgagagtatgatgcatcttacgtgtacnaacatgcctgttgagaaagattgatcatgctcttgagactattagatctaatgggantcagaatgtgcttgctcttagaggtgatcctcctcatgggtcaagataagtttgttcangttgaaggtggttttgaatgtgccttggatcnt

SEQ ID NO: 10533 - DNA, 440 bp, Arabidopsis thaliana
  unsure at all n locations
  Clone ID: LIB24-042-Q1-E1-H2
nacaaacccgggtccgagccacgcgtccganctnattctgatccattcttctctcaagatctaagatttactgattttgaagtggagaagaaattagttgtctcgacaaaccccactagaaactttgtttagtgtgtcttcttaaagcctgcaagatgcagagaccacctcctgaagatttctccttgaaggagacgagacctcatctaggtggaggaaaactctctggagataagcttaccagtacttatgaccttgttgagcaaatgcagtatctctatgttcgtgtggttaaggcaaaggagttacctggcanggatatgactggtagttgtgacccttatgttgaggttaagcttggaaactacaaaggcaccactangcatttcgagaagaaatctaatcctgagtgggaancaagttttcgccttttctaaaga

SEQ ID NO: 10534 - DNA, 431 bp, Arabidopsis thaliana
  unsure at all n locations
  Clone ID: LIB24-043-Q1-E1-A7
acgcgtccgcccacgcgtccgcagaatcaaacctctgaagacttttcaccaaaatgacattactttcctctctcggaagagcctctcgatctgctccacttgcctctaagctcctcctcctcggcactctcagcggtgnnnnnnnnnnnnnnnnnnnnnnnnnnnnnnnnnnnnnnnnnnnnnnnnnnnnnnnnnnnnnnnnnnnagtagttgtgcttgggactggttgggctggtataagtttccttaaagatctcgacataacttcctacgatgttcaggttgtgtctccccagaactactttgcctttacgccattgttacctagcgtcacttgtggaactgttgaagctaagaagcattgtggagtctgtccgtaatataaccaagaanaaaaatggggaaatttgaattggtgggaagcagattgt

SEQ ID NO: 10535 - DNA, 444 bp, Arabidopsis thaliana
  unsure at all n locations
  Clone ID: LIB24-043-Q1-E1-A9
acgcgtccgnaccatanataaataaatttagagaaatatctaagtttggttcttccctgtgtctacccaccgtgatcatcataaaatggattgtgatttctgatttgtgagtctatctttctctactccattagcttcctctcccttggatggttacgtcactttctccgagctnnnnnnnnnnnnnnnnnnnnnnnnnnnnnnnnnnnnnnnnnnnnnnnnnnnnnnnnnnnnnnnnnnnnnnnnnnnnnnnnnnnnnnnnnnnnnnnnnnnnnnngacaaaatgggacatttctcttccatgttcaacggtatagctagatccttctcggatnaagaaaagcgaagaacatcaacaagcaggcaaaaagctacgctaaaggaagccacagatgaanatggcgaagagagggngaaggaaagaagggacttattttgagatnc

SEQ ID NO: 10536 - DNA, 471 bp, Arabidopsis thaliana
  unsure at all n locations
  Clone ID: LIB24-043-Q1-E1-B1
ctgtaaanggtccaaaaattcccgggtccanccacgccatccgaacaggngggctcntcnaaattttcttcctgcctgagatttttagttcagcannagacttttgatgaatggtttcaaatttctggtgagaatgaccagcaagaagttgtgcancaactgcacaaggttcttcgnccatttcttcttcgaagactaaagtcagatgttganaaaggtttgccaccgaagaaggagaccatacttaaagttggnatgtctcagatgcagaagcaatactacaangctttactgcanaangatcttgaagcggttaatgctggtgganaacgcanacgtctgctaaacattgcaatgcaactgcgtaaatgctgcaatcacccctatctcttccagggtgcagaacctggtcccccatataccacaggagntcaccttannncaaatgcnggtaagatggttcctcctggg

SEQ ID NO: 10537 - DNA, 476 bp, Arabidopsis thaliana
  unsure at all n locations
  Clone ID: LIB24-043-Q1-E1-B10
gtttacgccgntcgtaccgcctcnanaaattcccgggccttcttctctcactcatactctgtctttcttcatcaggaccaaaaacaaaccctaatttctcagctcgatttctctcttactccatttctcaatccttcacaaaatgcaccaacttccatttccgagatcgtaaaaaagcttgtggtactttctgataatagagagggaaaaaacgagagagagagaaaacacaaaatgctggaagctccggtgaacaagtcaagcatcctcaatggaggaggaggaggattctctcagctacagagttgcttcggcgattgcagtagcgaagaagaattgtcagtgttgccacgtcataccaaagttgtcgttactggaaacaaccgtaccaaatctgttctcgtcggtcttcaaggcgtcgttaagaaagccgtcggactcggtggttggcattgggctgggttttgactaatgga

SEQ ID NO: 10538 - DNA, 483 bp, Arabidopsis thaliana
  unsure at all n locations
  Clone ID: LIB24-043-Q1-E1-B8
ntgttacgcctggccggtacnggtccaaaaattcccgggtcgacccacgcgtccgcttcttcttcttcttcttcaaaatctcttgtncgcaaataatccatgagaaactagggtttaacttgagatctctcttccgaagtattaccatcaatggcgacttcttcttcttcatcgtcgtctctgcttttaccaaacatcaatttcaactcaagacaatctccaacaatcactcgttccgtttcaatcgccgggatcttcttacccagaaaccgattaagctacaatcacaatctccggattcgtacgagattaatcagagcttctaaagacgataatgtcgctgttgaagatcgtgataatgcagtgaagatcaacggtgattacaacggaagtgcacgtttaaacggtaacggctctgcgagaaaatccgtcaacggagattttaacggaagtgctcgtttgaacggtaaagggtagtttggn

SEQ ID NO: 10539 - DNA, 453 bp, Arabidopsis thaliana
  unsure at all n locations
  Clone ID: LIB24-043-Q1-E1-C10
gtaccgcctctntgaattcccaaggnccacccacgcgtccgantccaaactcccgaagaagaagaaaataactacaatgagtcaacaacctcctgctgttggtgttcctccttctcatgcttatccggcggaaggaccacccaaggacgcttatccacctccgggacaaccctatcctcagcaaggatatcctcctccgcagggatatcctcaacaaggttatcctcctcaaggttatcctccgcaggggtaccctgaacaaggatatcctcaacaaggttacccacctcagcaacaacagcaacagaaacacagtcctggtatgcttgaangatgtattgctgctctgtgctgttactgtgtcttggacgcttgcttctgantngaagtctccgcttgaagctgcaagaattggcttataccgatgatctcattctcattctctttcgtttc

SEQ ID NO: 10540 - DNA, 452 bp, Arabidopsis thaliana
  unsure at all n locations
  Clone ID: LIB24-043-Q1-E1-C11
accgncccaaaaattcccaaagtccacccagggcntccgatggacagntatgaagaaaagccatccctttcttgagaaagaagttagagactcagtaatcatcgaagcaaatacgcggaaagagaggatgagaaaacgcaatgatcagaggatatattcgcagctatacgaagcaatggaagcacttgttcatatatgcagagatggntgtaaaacaatanggccacacgataaagatttcaaaccgaaccatgcaacgtgtaactatgaagcttgcaagggattagaatcactgatccggcatttcgcangctgtaagctaagagttccaaggaggttgcgtgcattgcaagagaatgtggnaactccntgaactgcattcacgtgtttgcgcangttctgatcaatgtccaagtccctctatggcagaaaccttaaaggagnaagatgga

SEQ ID NO: 10541 - DNA, 471 bp, Arabidopsis thaliana
  unsure at all n locations
  Clone ID: LIB24-043-Q1-E1-C12
tacgccggntcggtacgcctcaaaaaattccaanggtcgacccacccgtccgnctgaaggaaccgcnattgaagaccttttcatgcctgaccgtgtcctcatcggtggncgtgaaacaactgaaggctttgcanccgtcaaagccttgaaanacatttangcccaagtgggtccctgaagagagaatcctcaccaccaatctatggtctgccgagctttccaagcttgcagctaatgccttcctagcccanagaatctcatcagtcaatgcaatgtccgctctctgtgaggcanctggngccaatgtctcanaggtctcttatgctgtgggcanagactctcggtattggtcccaagttcttgaactctagtgttgggttcggaggatcttgtttcnagaaaagatattctcaacttagtctacatctgcgaatgcaacgggttacccgaagttgctgagtactggaaaca

SEQ ID NO: 10542 - DNA, 436 bp, Arabidopsis thaliana
  unsure at all n locations
  Clone ID: LIB24-043-Q1-E1-C5
ttcttcggatcgtcttttactttgtgaacgatggaccaacaaccggagaggcgagaaggccggagttttccggagcgtaaaggacagaagcggaagctanaggaaggagccgccgccgtagaanatcgagagatctctgccgtcagcaccgacggaggccaagcgcttcttancgaggttgctgctcaagtctcggtactaaactctgccttctcttggcaagagtccgatcgcgctgctgccaagcgagccactcaagttctggctgagctagccaaaaacgaggatttagtgaacgtgattgtcgacggaggtgctgttccagctcttatgacgcatctacaggcnccaccatacaacgacgggngacttggctgagantcccgtacgaaacacgaaagttgaaaaagggaagcngcttttgcgcttgggtcct

SEQ ID NO: 10543 - DNA, 435 bp, Arabidopsis thaliana
  unsure at all n locations
  Clone ID: LIB24-043-Q1-E1-C8
acgcgtccgctctctctttttctctctatatacgtcgccattgttgttgcattcgaagcttttatagaagaagtaatctctctttttctctatttctctgtattactttctcttttttttttcgtgatggagaaaaacacaccggtgaggaaaccacacatgtcgacggcggatctactcacttggccggagaatcaaccgtttgagtctcccgccgccgtatcttctcgctccgccgccagatcgcaccagccgtcggatggaataagcaaagtcgtatttggaggacaagttacagatgaagaagttgagagcttgaacaagaggaagccttgttcaaattacaagatgaaagagatcacagggagtggaatattctctgtgtatgaagaaaatgatgattctgagttagcaagtgctaattcccgcnacaaa

SEQ ID NO: 10544 - DNA, 464 bp, Arabidopsis thaliana
  unsure at all n locations
  Clone ID: LIB24-043-Q1-E1-C9
tgtaccggcccaaaaattcccgagtccacccacgcntccgnnccatctttgattcctggcatgaaggagatgttcgataggtctgcagatctcggggtagagaacatagttatcggtatgccccataggggtcgacttaatgttttgggtaatgttgttagaaaacctctacgccaaatattcagcgagtttagcggtggtactaggccagtagatgaagttgggctttacaccggaacaggtgatgtgaaataccacttgggtacatcttatgatcgtccaactagaggaggcaaacatctccacttgtctttggtagcaaatcccagtcacttggaagcagtagatcctgttgtgataggtaaaaccagagcgaaacaatattacacnaaagacgagaacaagaacaaagaacatgggtattttgatccatggggatggtagctttgccggacaaggagtgg

SEQ ID NO: 10545 - DNA, 408 bp, Arabidopsis thaliana
  unsure at all n locations
  Clone ID: LIB24-042-Q1-E1-G5
acgcgtgggcggacgcgtgggcgagaagcttctctcgaatatgttttctgacgccggcggaggcgcaaatcgtcggcgtcgggacttagctcttccgatcaatttgctttggttacttcttatgcttttgtttacaacttctgtccgctactcgaaaactctgtttcaaccctctcnaatcatttctccttcaccggttttcaacggcggccaaaaaaccagctacggaggaagacgatgtggtccggcgtttgccctcctgttccaccctcttctcgcaaattcttcgccaaaatctttcttttccagcgatgcaatccctcaatcagaagcttttatcatctctccgccttttatttacagatctagattcggtttcaagcaccccaagagaatactcacaccggg

SEQ ID NO: 10546 - DNA, 417 bp, Arabidopsis thaliana
  Clone ID: LIB24-042-Q1-E1-E12
cagcataactcaaacacaatggtactcgcaaccaactctgactccgacgagcatttgcattccacttttgcttctagatatgtccgtgctgttgttcccaggttcaagatgcctgaccattgcatgcccaaagatgctgcttatcaagtgatcaatgatgagttgatgcttgatggtaatcccaggcttaacctagcctcctttgtcaccacttggatggaacctgagtgtgacaaactcatcatggattctgtcaataagaactatgttgatatggatgaatatcctgtcaccactgagctccagaaccggtgtgtaaatatgatagcaaacttgttccatgctcccgttggagaagacgaggctgctattgggtgtggaactgttggttcatctgaggctataatgcttgctggg

SEQ ID NO: 10547 - DNA, 465 bp, Arabidopsis thaliana
  unsure at all n locations
  Clone ID: LIB24-042-Q1-E1-E2
tctttagcccggnccccgtgtccaaactaacccgggtcgncccacgcgtccgacaaagcaatagaacaacaagaacaagaanacagagaaaaanacaatggctgccttgtcggataagttagcggatgcttaccagaacgcaaggccgagatatccgatcgattggttcacgaaacttgctgctcgaaccggtcagcacaaatcancttgggatgttggtactggcaacggtcaancagctattggtcttgcagagtatttcgagaaagttacagcanccgacataaacgaagcacagttaaaacgaacggtaaaacacgaaagaatcagttaccatcacactcccacaacantgtccgaagaccaaatggttgctctaagtcggcggagataactccgttgatctaatccgtggcagcacaagccgttcactacgtcgatctcgcaccattctacancgttgga

SEQ ID NO: 10548 - DNA, 408 bp, Arabidopsis thaliana
  Clone ID: LIB24-042-Q1-E1-E5
acgcgtccgatggcataattgtgaactctctccgagctaggagtatgtttacttgcttcatgcaagaaccttttcaaatctttgcctcttatttgggtcatcaatgaagaaactcttgctgttcggtctagacagtacaactcaacagggcagactgaactcctcactgactggaaaaagattttcagccgggcatcggttgtagtcttccataattatctccttccgatactctacaccgagtttgatgctggcaacttctatgtgattcccggatctcctgaagaagtatgtaaagcaaagaatctagagtttcctccacagaaagatgatgtggtcatttccattgtgggaagtcagttcttgtacaagggtcaatggctgggaacatgccctgcttctgcaagc

SEQ ID NO: 10549 - DNA, 419 bp, Arabidopsis thaliana
  unsure at all n locations
  Clone ID: LIB24-042-Q1-E1-E8
acgcgtgggcggacgcgtgggctcactctttcctctccagaagaaaccctagacatctcatcgccaaaatgttcagatctatgctcgtccgatcttctgcctccgcgaagcaggcggttatccgccgtagcttctcctccggctccgtccccgagcgtaaagtcgccatccttggtgccgccggtggaattggtcagcctcttgctctcctcatgaagcttaatcctcttgtctcttccctctccctctacgatatcgctaacactcctggagttgctgctgatgttggtcacatcaacaccaagatctgaggttggttgggatacatggggcgatgataaacttgggccaaaaagctcttngaaaggagctgatctccgttatcattccagctgggtgtaccaaaggaagcctggtat

SEQ ID NO: 10550 - DNA, 481 bp, Arabidopsis thaliana
  unsure at all n locations
  Clone ID: LIB24-042-Q1-E1-E9
ctttagcccgnccggtaccgntccaanaattcccgggtcgacccacgcgtccgcttcaacaaagattgtctagttcggatcttgaaacgagcgatgatgagtgtgttgtaacgtatgggtttggttatgatgaatctgaagatgactataaagtggttgcgttgttgcaacaaagacaccaagtgaagatagagacaaagatctactcaacgagacaaaagctatggagaagcaacacaagtttcccatctggagttgttgttgctgacaaatcaagatccggaatctacatcaacgggacactaaactgggcagccacttcctcatcatcgtcatggacgatcatatcgtatgatatgtcacgcgatgagttcaaggagcttccagggccagtttgttgtggcagaggatgttttacaatgacgcttgggagatttaagaagatgtcnttcgaatggtgtgttaatgcaaaaggagctaa

SEQ ID NO: 10551 - DNA, 419 bp, Arabidopsis thaliana
  unsure at all n locations
  Clone ID: LIB24-042-Q1-E1-F10
gattgcggttctcggtttcgcattcaagaaagacaccggtgacacaagggagactccagccatcgatgtgtgcaagggtcttttagaagacaaagcaaggctaagcatttacgacccacaagtgactgaggatcagatccagagggatttatccatgaacaagttcgactgggaccatcctctacatttgcagccaatgagcccaacaacagtgaaacaagtgaccgttacttgggacgcatacgaagcaactaaggacgctcacggtatctgcatcatgaccgagtgggatgagttcaagaaccttgatttccagaagatctttgacaacatgcagaaaccagctttcgtgttcgatggaagaaacattatgaatctgcaaaagctaangggagattgggttcattggttacccaatg

SEQ ID NO: 10552 - DNA, 422 bp, Arabidopsis thaliana
  unsure at all n locations
  Clone ID: LIB24-042-Q1-E1-F11
acgcgtccgcccacgcgtccggccacagtttcttagggttcttccgcattgtttctccgaattgcaatcccctcattctccacaataaacagatagctaatataattgagtttggatactcgcaagtgaaaatatgtcggtcacagcgggagtgagtgaatctgcaattgctgtaagggagaaactaaaaggtggtattggacagactaaagtgcgaaggtattggccaggaaaagctccggagtgggctgaggaagctgaagaagatgatgatgttaggatgcagaaggtttctgttttggatagagcttttccaaagaatgatgatttgggtgttgctaaggaangatgatccaaggctgcgccgtttagctaagactaaagttgaaaaccgtgacgaagttagagctgatcatcggcgg

SEQ ID NO: 10553 - DNA, 432 bp, Arabidopsis thaliana
  unsure at all n locations
  Clone ID: LIB24-042-Q1-E1-F12
anaaattcccgggtcaagagatccttanngtttggaattcactccagtttgacctagttcaggttctatgttcttccttctttgtcatcttcatctccactgtttacttcatgtccaagccacgcaccatctacctcgttgactantcttgttacaagccacctgtcacgtgtcgtgtccccttcgcaactttcatggaacactctcgtttgatcctcaaggacaagcctaagagcgtcgagttccaaatgagaatccttgaacgttctggcctcggtgaggagacttgtctccctccggctattcattatattcctcccacaccaaccatggacgcggctagaagcgaggctcagatggttatcttcgaggccatggacgatcttttcangaaaacngggtcttaaanctaaagacgtcgacatccttanc

SEQ ID NO: 10554 - DNA, 409 bp, Arabidopsis thaliana
  unsure at all n locations
  Clone ID: LIB24-042-Q1-E1-F4
angcgtgggccagaatctgccgtcaccttttttcggtttttgcgtcttcctcaaaaattcgataacaatggtgaaacggaatcgagttccgccggcagaacaagcattacccatcgaagaagattgcaaatcgttgataaaaaagcttgcttcgtgtaagcaatcaatccgcgacagatccttgcgaactgttcttcgtacttggctcccagaacaaactgaaatctccgatgaagatatgaagaagctatggcaaggaatcttctattgtgtctggcacgctgataagtctctttaccaatcaagaacttattgatcgtctctcttctgctcttcaatcacttcctcttcctttgtctatccattacttcaccgtcttcttgttcaccatgcgtcgtgagtggtctcg

SEQ ID NO: 10555 - DNA, 407 bp, Arabidopsis thaliana
  unsure at all n locations
  Clone ID: LIB24-042-Q1-E1-F5
acgcgtccgcaacaatggcaacggnnnnnnnnnnnnnnnnnnnnnnnnnnnnnnnnnnnnnnnnnnnnnnnnnnnnnnnnnnnnnnnnnnnnnnnnnnnnnnnnnnnnnnnnnnnnnnnnnnnnnnnnnnnnnnaaagcttccagaaagcaagtagagatagtgtttgatcctgatgagaggcttaataagataggtgatgatgttgacaaagaagctcctttgtccaggcttaagctcttctcaccttgcaagatcaatgttttcttgaggatcaccggaaagcgagaagatgggtttcatgatttagcctctttgtttcatgtgattagcttaggagacactattaaattctcattgtcaccatcaaagtctaaagatcgtttgtctactaacgttcaaggagtc

SEQ ID NO: 10556 - DNA, 406 bp, Arabidopsis thaliana
  Clone ID: LIB24-042-Q1-E1-F6
acgcgtgggttgggtgtgaataagatcggtcatgagtactgtaatcttcgtttccttttcattagaggcaaatatgttgagatgtataaaagagatcctcatgagaacccagacattaaacctataaggcgtggtgtcatagggccgacaatggtgattgaagagctaggacgtcgaaaagttaatcatggggatgtctacgttataaggttctataaccggttggacgagtcaaggaaaggagaaattgcttgtgctactgctggagaagccctgaaatgggttgaggcttttgaggaagcaaagcagcaggctgaatatgcactatcgagaggcggaagtacaagaacaaagttaagcatggaggccaacatcgatctggaaggacatcggcctagagtacggc

SEQ ID NO: 10557 - DNA, 412 bp, Arabidopsis thaliana
  unsure at all n locations
  Clone ID: LIB24-042-Q1-E1-F8
gataaaaaaaaaaaaaaaaactctctcagatctgagaannnnnnnnnnnnnnnnnnnnnnnnnnnnnnnnnnnnnnnnnnnnnnnnnnnaaacaacaatggcgacaccaggagcttcctcagcaagagatgaattcgtatacatggcgaaactcgccgaacaagcagagcgttacgaagaaatggttgaattcatggagaaagtcgcgaaagctgttgacaaagacgaactcaccgtcgaagaacgtaatctcntctccgtcgcttacaaaaacgtcatcggagctcgtcgtgcttcgtgggagaatcatttcatcgatcgaacaaaaggaggagtctcgcgggtaacgatgaccacgtttcgttgatccggtgactacaagaagcaaaatcgaaaacggaactttctgata

SEQ ID NO: 10558 - DNA, 422 bp, Arabidopsis thaliana
  unsure at all n locations
  Clone ID: LIB24-042-Q1-E1-G11
aaattaggttagttcacctttttgtcnattcctcttgcggagagatgcaatcgattcgtggcagtacacggttgcttcagaggcatcgtttctccatctccaacactcttcgtttcacttcttcttcttcttgtggaagctggtctgaaaatgaatccagaaaactanggtttgattcttgcccttctagcagagctgcgacatatctcattagctcgttgaaaaatgcaggcttttcctcttcagctatacctaancaaaactttacgtatgcgtccgaggtgtttttccaccactggagattcttcctgttcaaggatctcctgagtcagantgtgttgtgnctcaganaaatcacgtttaaagccggcttgataananccnctaangcatataaatgcagattgtagacaaggaagcng

SEQ ID NO: 10559 - DNA, 418 bp, Arabidopsis thaliana
  unsure at all n locations
  Clone ID: LIB24-042-Q1-E1-G12
acgcgtccgatctgaagcagccatggagatagccgccgttagcactgtctccgtcgcgccacaatcgcgcagagtgtcgaatgcgttctccaggaatctaggatccgtatcttctctttcgtttggtttctttgagaaagaatattgctttaagagccctagccttcgtgtgtctgcagcagcttccatggacgccgtcacagctgagaaattttctccggcgagttttctagacaaaaaagaaaccggagttcttcactttgtgaaataccatggcctcggcaatgacttcattttggtcgataacagagactcatcngaacctaagattactcaagaacaggcggcgaagctgtgtgatcgaaacttcggtgttggtgccgatggagtgatttttgcaatgccaagagtcaatngg

SEQ ID NO: 10560 - DNA, 412 bp, Arabidopsis thaliana
  Clone ID: LIB24-042-Q1-E1-E1
aataaaagacagcgattgccatatagtcctgctgaattggctgccacagaggtgagggctatggagtgtattaggcagttacttctcagatctgcagaagcccttttcctactacaacttctttctcaacatcatgttgctagattagttcaggagcttgatgcaaatctaaagcaagctttagttcagttgacattccatcagctagtttgttctgaagagggtgaccaaattgcaacaaggctcatatctgccgtgatggagtattatactggctcagatggcaggggaacagttgacgatattagcccgcgactacgtgaaggttgcccaagttacttcaaggagtctgattacaaattctacttagctgttgaacgccttgagagagctgctttaacctcaagatgct

SEQ ID NO: 10561 - DNA, 410 bp, Arabidopsis thaliana
  unsure at all n locations
  Clone ID: LIB24-042-Q1-E1-G3
actgccaccggaaaaacgccatgaaacctcgttttcctcaaaatgtctattttttggctcgctattcatatctccgccgctttcagcatagtcaacgtcgaaccttcagctctttcctcaacaatatccgttcgaattattccggtgctcgtgcttcgcctctcggcggcagcagcggagccggagccggagccggaggaggtggaaccggagattccaaaggcaatgcttttcttgtgcccggagcaacaatggctactatccttatgcttggagctcttcatgctcgccgcctctatgaagacaagaagatcgaagagaaacgggagaagggaatcgaacttgagttccacccagatatcaaagcctcgttccttggagttctgcctctgcgatnaatctcaagagct

SEQ ID NO: 10562 - DNA, 465 bp, Arabidopsis thaliana
  unsure at all n locations
  Clone ID: LIB24-039-Q1-E1-G3
gtagncgtccaaaattccagggtcnacccacgcgtccgattcctcnccttccgtcgtcgtcaagaagatcaatttcattgaaatcgagagagtgtgcttgaatcacagcttatgcagacgctacaccagtcccaacttctccagaatccggccgaggcggcgaacaatcagtctgaatcggacgcgccgccgaaacaggtggctcaggccatggaacgactcaatcaagcggntatggttatcgccgatatccgcctcggcgctgaccgtatccttgaagctatgttcgtggcttcgcaacctcgtcacacagacatgcctcttcagctctttctcanagaagacgcctccatgcgtcaacatcttcaggatcttcgcttaatacggaagaaattggaaagaatctgggagtgttaactgaatcacttaggtcaagaataactcttgggggtctcacatgccttt

SEQ ID NO: 10563 - DNA, 422 bp, Arabidopsis thaliana
  unsure at all n locations
  Clone ID: LIB24-039-Q1-E1-G5
aaatnnnnnnnnnnnnnnnnnnnnnnnnnnnnnnnnnnnnnnnnnnnnnnnnnnnnnnnnnnnnnnnnnnnnnnnnnnnnnnnnnnnnnnnnnnnnnnnnnnnnnnnnnnnnnnnnnnnnnnnnnnggccaaaggcagagattctagcgcttataaacctgagaagtggaatggaaccaaggtaccaagataatgtacctaaaggacttctatgggaagagatctcaacttcaatgaagagaatgggatacaacagaaacgctaagagatgtaaagagaaatgggaaaacataaacaaatactacaagaaagttaaagaaagcaacaagaaacgtcctcaagatgctaagacttgtccttactttcaccgcctcgatcttctttaccgcannaanagtactcggtagtggcggtggttccna

SEQ ID NO: 10564 - DNA, 422 bp, Arabidopsis thaliana
  unsure at all n locations
  Clone ID: LIB24-039-Q1-E1-G6
acgcgtggggagaaaacttcgtctctcttctctgcttcgccctctcatttcctgtgagataaaggcggagtctctctccagttattttgctcatccatcgattcttagagttcaaaatggttgatcaagttcagcaccccacnattgcgcagaaagctgccgggcagttcatgcgttcaagtgtttccaaggacnttcangtgggntnccagaggccttctatgtatcaaagacatgcaanctacggaaactactcnantgctgcatttcaatttcctccgacatnccggatgttggcaanaaatgcntctcccgtgtttgtccaaaccccattgagagaaggggttcactaaatttgcccttgacnttctgatgggtggtgtttctgctgccgtctccaacgactgntgctgctcctattg

SEQ ID NO: 10565 - DNA, 185 bp, Arabidopsis thaliana
  unsure at all n locations
  Clone ID: LIB24-039-Q1-E1-H10
ccttgcgnttccgaactgtctagaactcncgggcccacccacgcgtccanaaaaaggtccttcattgatgaagagaatccaagatgcaatattcttcaaagccacattcaatgttcataaaacccaatctgagattggataatagaaagtataattaaaggtttgaaaaaaaaaaaaaaaaaagg

SEQ ID NO: 10566 - DNA, 485 bp, Arabidopsis thaliana
  unsure at all n locations
  Clone ID: LIB24-039-Q1-E1-H3
aacttcctgccgcgtcgtangccctcctgnaattccaagggcccacccacncgtccgaaagacgcntggggtttaataatatctgacactctctttctttgaccgtcgccgccgcattgaccgtcggatttttagctttgcaaggttctttcaatgagcacatcgcggctctgcggcggctcggtgtccaaggcgtcgagattaggaaggctgaccagcttctcaccgtttcttctcttatcattcctggcggcgagagcaccaccatggccaaactcgccgagtatcataacttgtttccggctctacgtgagtttgttaagatggggaaacctgtttgggggacatgcgcaggtcttatattcttggcaagacaagagcagttggtcaagaaagagggaggtcaggaattagttggtggccttgattgcaccgtacataggaacttcttcggtagccagattcaaagttttgaagctgatatc

SEQ ID NO: 10567 - DNA, 447 bp, Arabidopsis thaliana
  unsure at all n locations
  Clone ID: LIB24-039-Q1-E1-H4
nccacgggtccgtccgaattactgattcttcattgacggtaggagtcaccacttttggcggcgattccttgttctctattttttttgcacaagcaacatttagcttctgcaaactccagttcatctctcaaccctcatatcgccgtgttttctcgctctagtaccgcgagctcggacgaaccaggaagcaatccgttaatctagaagcggtgttgagaagatgacgattacatcaaatatctctgtacagaacgataacctcgttgttcaagggaagactatccttaccaaaatccctgacaacattatcctaactccggttaccggtaatggattcgtttccggttcatttatangcgcgacgtttgaacaaagcaagagtcttcatgtgttccccatcggtgtattgggagggtcttcggttcatgtgctgtttccggtttaaac

SEQ ID NO: 10568 - DNA, 441 bp, Arabidopsis thaliana
  unsure at all n locations
  Clone ID: LIB24-040-Q1-E1-A11
gacccgggccntccgcaaganttaacagtatttgaaaaaatacaaaatggcgaaaatctaccggaagttgacaggctacggtggtgaaggagggcgtgaatgggacgatgatgtatatgagggtgtaagaaaagtgtatgtatgacaagatatcaatcgtatcacttacgtcaaattcgangtatgtgaaggaagacggccaagtcgtaacaactgaatatgggaaaatcattcaacaacccaaanagtttgtacttcaatatccggacgaacatatcatancggtggaaggaaactatcgcggagtggctctatgtgccacagnagtgatcacaaacctcgtcttcaagacctcaaagggtaganaagtcaccactgtttggtncaaaacttgccttggaattacgaccnggtncaaagnttccgtaattggagggntgg

SEQ ID NO: 10569 - DNA, 384 bp, Arabidopsis thaliana
  unsure at all n locations
  Clone ID: LIB24-040-Q1-E1-B12
ttaaatatcaaattcattagtcgatatgtagcaggtggtccctctaaacgctcaagttatattaaaccttctggattcatatttacttttaaatatttgtgactttttttccttcggtattaatttagcgcaatgtgaaagcaaaatttaatagttaaaatanattaangtttggataataaatggagcatganaattgcagatacnactcgctgcaccacacgcagttccggaccaactactccctcntcatgcccttgtatgactacatctacggcacaatggatgannagcacggatacgttgtacgagaaanctcnanannagaggagatgatatagtgggangtggtgcacntaactcacctgacggacgccagaancc

SEQ ID NO: 10570 - DNA, 464 bp, Arabidopsis thaliana
  unsure at all n locations
  Clone ID: LIB24-040-Q1-E1-B9
gaaactgtttacaccgntcgtacgnncccanaaattccaaggtcnacccangcgtccggncaatcgngggaagaaaaaaattcancggccgtctggttactgtcttgcttgcttccgacgatctatcttccccgagtagatttgaaatggctgctcctcctgctacagctcgtgctgattangattacctcattaaacttctgctgatcggagacagcggtgttggtaagagttgccttctcttacgtttctcannatggctcgtttaccaccagtttcattacaactattgggattgattttaagatacgggnctattgacctcgatgggaagagaattaanctgcaaatctgggatactgccggacaggaacggttccncacaatcacaactgcgtactaccgtggagccatggggattttgcttgtgtatgaagtgactgatgaatcatctttcaacaacn

SEQ ID NO: 10571 - DNA, 411 bp, Arabidopsis thaliana
  unsure at all n locations
  Clone ID: LIB24-040-Q1-E1-D11
attttctctgtaaaaatgggaactaggttccaatcattcttgctcgtgttcttgctttcatgtttaatcctcatatcaactgcctcgtgtgagcgaaatggtgatggaacgattagaattggattgaagaagaggaaactanaccggagcaacaggctagcttctcagctttttttgaaaaaccgagggtctcattggtctcccaaacactattttcgcctgaacgatgaaaatgcggatatggttccgctgaaaaactatttggatgctcaatactanggtgacattaccattgggtactcctcctcagaagttcactgtgatctttgatactggtagctccaatctctggataccatctactaaatgttacctatcggttgcntgttatttccaacccaaagttacaag

SEQ ID NO: 10572 - DNA, 460 bp, Arabidopsis thaliana
  unsure at all n locations
  Clone ID: LIB24-040-Q1-E1-D12
tacggcctccaaaattcccaaggtcgacccacgccgtccgagtcactttcgcttcgctttaccccggttgcatcgcctccacaggtttattccgagagcacattcctctcttccgtgccctcttccctccctttcagaagtacatcactaaaggatatgtctccgaaacagagtcaggcaaaagacttgctcaggtggtgagtgatccaagcttgacganatcaggggtttattggagctggaacaatgcntcggcttcttttgagaaccagttatcannaagaagcaagtgacgttgaaaangctcgtaaagtgtgggaggatcagntgagaagctcntgggcttggncnaataaacttgaantctgttaaatttgatgacacctctcggtaccaatcganagaaatctaagtgaatttccggggatttttagatatctgattccgttgccgangtttt

SEQ ID NO: 10573 - DNA, 467 bp, Arabidopsis thaliana
  unsure at all n locations
  Clone ID: LIB24-040-Q1-E1-F9
aactgtttacgcctgttcgtacgcctccaaaattccaaggtcnacccacgcgtccgcncttggangggttcttctttctgtaacaggtactgaagccatgtttgcaaatcttggccatttcacctcggtctcaatcagagttgctttcgccgttgtcgtgtacccctgtctggtggtacaatacatgggccaggcagctttcctgtcaaagaacctcgggtctattcctaacagtttttacgattcagtcccagatcctgttttctggcctgtctttgtcattgccacacttgcagccattgttggcaagtcaggctgtgataaccactacgttctcaataatcaaacaatgccatgccctagggtgcttcccacgcatcaaagtagtccatacttcgaaacatatatatggacagatctatatcccggagatcatcangatccttgatgatccttactcttgcaat

SEQ ID NO: 10574 - DNA, 451 bp, Arabidopsis thaliana
  unsure at all n locations
  Clone ID: LIB24-040-Q1-E1-G11
gtangcctccaaaattccaaggtcnacccacccgtccgcncacgcgtccgaacaatggatgcttcggtggtgagattttcccaatcgccggcaagagtgccaccggaatttgaaccagatatggagaagattaaacggaggctgctcaagtacggtgttgatccaacccccaaaatcctgaacaatctccgaaagaaagaaattcaaaaacacaaccgtngaaccaagcgcgaaaccgagtccgaggcggaggtgtatacggaggcgcagaaacaatcaatggaggaagaagctcgttttcaaacccttagacgggaatacaagcaattcacgacgtcaatttctggaaaaaggggcggcgatgttggtttgatggttgggaatccatgggaaggaatcgangagagtgaagctgaagganctcgttagtggcgttcggagaagaanaggt

SEQ ID NO: 10575 - DNA, 410 bp, Arabidopsis thaliana
  unsure at all n locations
  Clone ID: LIB24-040-Q1-E1-H11
tttccannnnnnnnnnnnnnnnnnnnnnnnnnnnnnnnnnnnnnnnnnnnnnnnnnnnnnnnnnnnnnnnnnnnnnnnnnnnnnnnnnnnnnnnnnnnnnnnnnnnnnntcccataccttaccgctgtatcaacgtatttcagctacggcttgcttttcgcgtttggtcagcttcgcgattactctcgcctaatcttcgattggtggcgcaccaacaatctccagggatacgctccgatctgcttggcgcatgaggatttctacatccgacgattgtatcatcggattcaagactgttttgggacgtcccatttcaagtgcacctgatgcttgggattgatgtggttgangagagtctctgacgataacaacaagacgttaaaagcgaactacaaagactagcaggtgcc

SEQ ID NO: 10576 - DNA, 473 bp, Arabidopsis thaliana
  unsure at all n locations
  Clone ID: LIB24-039-Q1-E1-G2
tacgcccccaaaattcccaangtcgacccangcgtccgggcaaagcacttttaaacggacctgggaattattccttcaacaaggctactgatgactctaaggaagcagagtcaggtaatgggtggaaagaaaattcagaggagaagccacaangtgaagaccctgaagcagcaactgaggacagtgtccctggtgttttgtatgatttactacagaaagaagtagtttctttgaggaaagcctctaatgaaaaggatcaaagcctcaaagacaaanatgatgccatcgagatgctagcgaaagaaggtggaaacattaacaaaggcaatgngaggttgaagcaaaagaaagatgagacgggaangtagctgcaatggaaaaagaagttctgcaatgcntgtggagaaagatnaggacgccagagccaaaaggttttcaaatagcaaggagcccatncaacaccggccaagttc

SEQ ID NO: 10577 - DNA, 426 bp, Arabidopsis thaliana
  unsure at all n locations
  Clone ID: LIB24-041-Q1-E1-A3
acgcgtccgantgggacaaaacccaattagccggagatggccgcaacatccgccgctgctgcagctgcttcttccatcatgggtactcgggtggctcccggtatccatcccggttcangtcggttcacagccgtgttcggtttcggaaagaagaaggcagctcccaaaaanagtgccanaaagacggtgactacngaccggcctctttggtacccangcgccatttctcctgantggcttgatggntccttggttgganattacggttttgatcccttcggtttangcaaacggnncgagtatcttcaaattcngagatccattcactaagaccagaatctggctaagnaacttggcccggagacntgattcggnancccgttacggnaagcctgccgacgcccaaatcgacgccggtttcangcc

SEQ ID NO: 10578 - DNA, 465 bp, Arabidopsis thaliana
  unsure at all n locations
  Clone ID: LIB24-039-Q1-E1-C2
tagcctccaaaattcnaaggtccacccncccgtccgncttcttcatcttctatgggcttccacgcgactacgcctgccaaaatcattctacaggaancatgaagccagtcttctgtgggaactttgaggtatgatgcgcgcgaaggtgacctggaacgactattcaggaaataccgcaaggttgagagggttgatatgaaagctgggtttgcttttgtatacatggaanatgananggatgcggaagatgccatccgancacttgaccgctttgaatttgggcgtaagggacgcanacttcgtgttgantggacaaagagtgaacgtggaggtgataaaagatctggtggtggttcaaggagatcctcatccagcatgagaccttccaaagactctctttgtgattaactttgatgcggataatactaggacccggggatctaganaaacactttgagccttatg

SEQ ID NO: 10579 - DNA, 479 bp, Arabidopsis thaliana
  unsure at all n locations
  Clone ID: LIB24-039-Q1-E1-C4
acgcctgtccgtacgcctccaaaaattcccaaggtcnacccacgcgtccgcaaaagccatcaaaaatatatccataagaagcttcatcgaaatggcgaatcaagcagctgctgcagcattcttccttttcgctttagccgtcttctccaacttggagctctcagcttcttcacttgtcagtggcaagatctcttgccttgactgccaccgcgatttcgacttctcaggcattaaggtcctccttaaatgcgacggagagaagaaacaaataaccgcggtggcagctgcagacggatctttccggtcagtgcttccaacggctgacaaaaaaggctccataaattgtcttgcaaagctcttgggaggccctgagcaactctatgctcacaaacacaacttggtctctgaattggtcaaatctaaacacgattcccaaagttttaactacctcaaacccacttgccttcntctctctcctg

SEQ ID NO: 10580 - DNA, 391 bp, Arabidopsis thaliana
  unsure at all n locations
  Clone ID: LIB24-039-Q1-E1-C9
acgcgtccgcacgaagccaaagaacaatttctccgtcactatcataaccatggcggtgctttcatctgcagatcgagctagtaatgagaanaaggtgaagagttcatactttgatttgccacctatggaaatgtctgtagcatttcctcaagcaactccagcctctacatttccaccttgtacttcagactattatcatttcaatgatctactgactccggaagaacaagctatccggaangaaagtgagggaatgcatggngaaagaagttgctccaatantgacangagtactggggagaaangcagaatttcnttccatntcactccaaagcttggggcctatgnggtgtttcnggtgggctccgatcaaagggttanggatgtcctg

SEQ ID NO: 10581 - DNA, 453 bp, Arabidopsis thaliana
  unsure at all n locations
  Clone ID: LIB24-039-Q1-E1-D2
acgcctncgtagcctccaaaattcaaaggtcgacccacccgtccgnnnnnnnnnnnnnnnnnnnnnnnnnnnnnnnnnnnnnnnnnnnnnnnnnnnnnnnnnnnnnnnnnnnnnnnncttgggaganaatatttctcaatgtctcctctcncaatcttccatcgtcttcctcacgccacgttctcttcctttctcctcgcactgtctcaagctggaagttctaaaacatcaagtggcattccctcaatgccttcanatcaagaangatatcattgctcgaaantggactanggtgggcagcttataagggctgttgtacgttggacctgtcntcaagttcctggtgcttctatgtttggtcaatgtcggtcaatgttccttcgttgaggttatgtacatgggaaatcgttgttttgtatgtcacgctgntcaaggagaangccaggagaaatt

SEQ ID NO: 10582 - DNA, 467 bp, Arabidopsis thaliana
  unsure at all n locations
  Clone ID: LIB24-039-Q1-E1-D3
agncctccgaaaattccaaaggtcgacccacccgtccgaaagaagagcgtcttcataaacgcccttcgtcttcttccctgcaaatctattttctagatctttctttcttccgcgaaacgacaatgagagagtgcatttcgatccacattggtcaggctggtantcaagtcggaaatgcttgctgggagctttactgtcttgaacatggcattcagcctgatggccatatgcctgntgacaanactgttggtggnggtgatgatgctttcaacaccttcttcagtgaaaccggtgcaggtaagcacgtcccaacgtgcngtctttgttgatctgagccaactgtgatcgacnaggtccaggactggtacttaccgtcagcttttccacctgaanaactcaacaagtggtaaaagaangncgcctgctaccaatttcgcccggtggtcattacaccattgggaaaagag

SEQ ID NO: 10583 - DNA, 407 bp, Arabidopsis thaliana
  unsure at all n locations
  Clone ID: LIB24-039-Q1-E1-E10
tcacagagctttattcttgccctagagataccgagcgggagattccagattgagagcagcttcgagtctctctctcctcgccgttccttttcgcttcttcaagtttcgttgccagagagattctaggtattgaagttatagaatggactttgatgagtatgagtacttagagaagacagttgaaaatcctcacctggagaatgaagttggtaatggtggtggtgatgagaaagtcaaatctgaagggaaagagaggagtaggagctcaaggcataggggtgacaagaagaaggagagggatgaagatgaggatggtcggcgttctaancgngtcgagatcgcatcacngttcacgttctacgggacaganagagggataggcatngaagtagcagggagcacagana

SEQ ID NO: 10584 - DNA, 464 bp, Arabidopsis thaliana
  unsure at all n locations
  Clone ID: LIB24-039-Q1-E1-E3
gtagcctccanaatccaaggtcnacccacgcgtccgancacgcgtccgggccatttcagtccaattacatcgtccctaaaaccaccgtcacgccaccggcgattcctacaccacaatttgtcccccaaaacaccccttcaatcttctcttatcaaattcggcgccgaaaactccgaacctcaacctccacggccgttgccggaaactgattgtcccgttccgccggagcagcagccaatcaacgagtatcaatctctctccacctctttccctttctcctgggcttcaggagatctaatcgagtactctaccagacttttcttaaccggcgcttctttcgcatttttcgtcgggttacccgtttcctggttcggatccatcggacccgaatatgaacctgttaagaggattctcgccgccaagctctanncgggatcttcgttgtcacgccttgctgtcgtaan

SEQ ID NO: 10585 - DNA, 448 bp, Arabidopsis thaliana
  unsure at all n locations
  Clone ID: LIB24-039-Q1-E1-E5
attcccgggtcnacccacgcgtccggttgagattgagaaagcagcaagggaagttcttgatgtacttggtttactcactacactgagctatgccgagattttgaaagaaatgaaactaaaaacactaataagagcagaaattggagaagaaggtatttcgcagttaatagaagaaaggataacagccaggaagaataaagatttcgcgaaaagtgatgagattagagagaaactgacaagaaaaggaatagcgttaatggacattggcaaagaaactgtatggagaccatgcttcccttctcaggctgattccaagcacttgagcttagagcagagtcatggagatagttaacggtttcttcatttctctaactcttcttctttagccttttgtttgaggctctttctttataactccgtttttggaattgtgcaatgacttcaaaat

SEQ ID NO: 10586 - DNA, 432 bp, Arabidopsis thaliana
  unsure at all n locations
  Clone ID: LIB24-039-Q1-E1-E6
acgcgtccgcaaatattattcaagtgccgagtcaaaattagtgttgagaatttgctgcttctgatcagtgagtgaagaaagtttgaagctttgagtaactttgaaacaatggaggtatttggaaaatctcatgtggttgttggctctgctaatgttatttacttatctgctatattgggtcacgaaggacccaatcacaaatgtgattggaaatgcgagaatgagaatgtgtgtgggaatatgtaccgttgcaaactaactgggttgactcatgtttgtgacaagaactgcaaccaaaggattttgtatgataatcataactctttgtgtcgagctagtgggtcggattttcccgctttctttggttgaggaacacgcggttaaangagtgaggaggaagcttgatgatgagagtcaacaancaaccttctg

SEQ ID NO: 10587 - DNA, 447 bp, Arabidopsis thaliana
  unsure at all n locations
  Clone ID: LIB24-039-Q1-E1-E7
attcccgggtcnacccacgcgtccgnaaaatatgagcgaagaactaagtcaaaagccatcatcagctcagtctctgtcactgagagagggcagaaataggtttccttttctgtccctgtcacagagagagggcagattttttccttctctatctctttcagagagagatggaagaaagttttcttttctcagtatgttctcttttctcatgccactgttggaggttattaagattattattgcttctgtggcctccgtaatcttcgtcggtttcgcctgtgtaaccctcgctggttctgccgcaagcattagtcgtaagcaccccggttttcatcatatttagtcctgttctcgtaccagctacgatagccacggttgtcttggcgacaggattcacggccggtggctcttttggagcgacagcacttggtctcatcaaggtgggct

SEQ ID NO: 10588 - DNA, 417 bp, Arabidopsis thaliana
  unsure at all n locations
  Clone ID: LIB24-039-Q1-E1-F10
agatgcgtcgatcactatgtgcagtaataagttaattgattggaaaattaagtacgagaatactgttagtgagcaaaaagctgttacagagaagatagcggcaatggagganaagttaaagcaagcttcanccacagnagatggcttgagagctgagttctcccgtgttttggatgaaanggagaagntaatcacagaganagctgcaaagcttgcgactttggagcagcaattggcctctacgcgtgcggaattaaangaaaantgcgttgaaggtggaccaatgttcntcanaagcanaagacgtgaggcttcaaatgtcgctcctgaatgagaantatgaatctgtgaaatccgcatctgagttacttgaaactgagacaggagacgttaaagccgaagaggaangatgattgg

SEQ ID NO: 10589 - DNA, 473 bp, Arabidopsis thaliana
  unsure at all n locations
  Clone ID: LIB24-039-Q1-E1-F2
gtctcgtacgcctccanaattccaaggtccacccacgcgtccgcacacgcgtccgctttcatctctcaacatccanaactctccatcactgcttctcctccattgttccatacccaaacaaccaaacccatctctgtaaaacggaaaatcataactctagcagctccagagacactcaccgctgaaacagtcaccggaattgatacttccgacaacactccacaacaaacaataaaggtggtgaagccagatgagaaatcaagagtggtactcaagtttgtgtggatggagaagaacataggattaggattggaccaacatgtacctggacatggcacaatcccacttagtccttacttcttctggcctangaaagatgcttgggaagagcttaagtctactcttgaagctaaaccatggatctctcagaaagaagatgatcattcctctaaaccaagccactgatatcatca

SEQ ID NO: 10590 - DNA, 490 bp, Arabidopsis thaliana
  unsure at all n locations
  Clone ID: LIB24-039-Q1-E1-F4
gggaactgtttagcctgctcgtacgcctccanaaattccaaggtcnacccacgccgtccgnagattctctctgcgtttcttagatcgagcgagcgaagcgagagatcatggaangtggagctgctctctacaatcctcgaactgtcgaagaagttttcanggatttcaaaggtcgtcgtactgccattgtcaaagctctcaccaccgatgttcaagagttttaccaacaatgtgaccctgagaaggagaatctttgcttgtatgggttaccgaatgaagaatgggaagtgaatttaccagctgaagaagtgcctcctgagttaccagagccagctcttggtattaactttgctagggatgggctctctgaaaaggaatggctttcgcttgttgctattcacangtgacgcttggttactgtctgtctccgttttactttgggctcaaggttttctttccacaaggaaagagatgaaacgtttgttcaaca

SEQ ID NO: 10591 - DNA, 463 bp, Arabidopsis thaliana
  unsure at all n locations
  Clone ID: LIB24-039-Q1-E1-F8
gtaacggtccanagttcccgggtcnacccacncgtccgagaaaccagttttcgcttcattcgcgtgactacgtttctcaaacgcactaattactacgacaagttgtcttccaagaaatatgcaatcagagtttcttgaattgcgtcaacggattaaggaatcgattaggacgaagatgcaaagcggagatactattattgctccaacctcacagacacagttacatcagagcaaaagtaatcttccgtacgactttggttccttttttggtccttctcagactgttattgcttcaagagtcttacaaganagcaagcctcttttagaaaacgagacatcagcagctaaaatgttaaactctattcaaaacangaaaagttctgttccaatgaatgatgcttcanggactaagaatgccgaatgaggtcaaacgaaangctgaaaaaacttaagggatggaaga

SEQ ID NO: 10592 - DNA, 405 bp, Arabidopsis thaliana
  unsure at all n locations
  Clone ID: LIB24-039-Q1-E1-C10
acgcgtccgcttgatcactatatcttgaaggaattaagaagatgaatggtgaggcacggtcaagagtagtcgaccaagaagctggctcaactccatctactttgagagatgaagatcatccctcgagacaaaggcttttcggatgtctcccttatgatatagatctcaatcccctangcattgtaatggcggaattggtggggacattcattctaatgttcagtgtgtgtggggtcataagcagtacccaattatccggnggccacgtgggattgctagagtangcccgtcaccnctggattatctgtggtgggcgtngtttactcaatcggannnatctctggngcncatcttaanccttccancannattgcnttcgccgtcctttggcgggattcncgtggg

SEQ ID NO: 10593 - DNA, 451 bp, Arabidopsis thaliana
  unsure at all n locations
  Clone ID: LIB24-038-Q1-E1-G10
attcaangggtccacgcacgcgtccggtgaganggatctaccaaacgaagcaacaatggtgaagttcttgaagcagaacaaggccgtgatccttcttcaaggacgttacgccggaaagaaagccgtcatcatcaaatccttcgacgacggtaaccgtgatcgtccttacggacactgcctcgtcgccggactcaagaagtacccgagcaaagtcatccgcaaagactcagctaagaagacagctaagaaatctagggttaagtgtttcatcaagcttgttaattaccagcatctgatgcctactcgttacacactcgacgtggatctcaaggaagtggcgactcttgatgctcttcagaagtaagggataagaaggttgctgctcctaangaagctaaggctaagcntgaggaanaggtttcnaaaaccggtnaagaacagattggttctt

SEQ ID NO: 10594 - DNA, 456 bp, Arabidopsis thaliana
  unsure at all n locations
  Clone ID: LIB24-038-Q1-E1-G2
atctgnccgggaccgcgtcaaacanancgggtcnngccacgcgtccgcaaggagatcattttttttattatctcattcaaatcttgcacatgcatatttattatagtactaggtataatataaatatggaaatttgttgtanacatattaaatgcgtgagtcagtgttgaagaatacgcatacatattgtaatttttgtttttgagaacaaaccagagtattcgcttcatanttctgtttttcgaggtgaccaaattttttttcattatctaattaaaancntgcacatattgacatgcatatgcatatatagtactcctttgaccaaaaatgagtacaatctctttatttgntttaaatttgtaaagtggtgaattgtgatcctgctatatacacagaatttatttttgantnaaatagaggagaataancatatttgcgtgtanaaatacatta

SEQ ID NO: 10595 - DNA, 456 bp, Arabidopsis thaliana
  unsure at all n locations
  Clone ID: LIB24-038-Q1-E1-G6
taaantcgccggtccacccacgcgtccgaaatcatcgacaagtgggtcccggagtgagcaatcaagtgatcagactggaaattcatcaggatgggacattctcaggtcaatttctaaggcaactagttatcatgtttcaactcctaattttgagagaatctggtgggacaaaggtggtgatcttcgaagacctgtctcaatatggaggcctgttccacgtcctggttttgcaatattgggtgatagcataactgaaggattggagccaccttgcactgggaatactcttcaaagcagatgactctgagattgctgcaaaacctgtacagttcaataaagtcgcacatattgtggggaaaggtttcgatgaagttttctgctggtttcctgttgcacctcctggttatgtttcncctaggatgtgttctcctccaaatttngaatgaaagcgcctca

SEQ ID NO: 10596 - DNA, 441 bp, Arabidopsis thaliana
  unsure at all n locations
  Clone ID: LIB24-038-Q1-E1-G7
atttagcccgnccgtaccgnaccanaaattcccgggtcnacccacgcgtccggggagttcttccgttcctgggatcaggttanctggtgttaccaatacggtgcattcttatggatattctcactaggaagtggacaaggcttaaaccggctggtgagcctccgtctcctagggctgctcacgccgcacctgcanttggcaccatggtcngtttttcagggtggcattggaccggcggggcattctactgatgatctttacgttcttgacatgactaatgataagttcaagtggcacagggtggtggttcaaggggatggtcnaggccctcgctatggccatgttatggatttagtttctcanaggtatcttgttacagtcacccggaaatgatgggaancganctctttctgacgccttgggcactgggttacagctcaa

SEQ ID NO: 10597 - DNA, 439 bp, Arabidopsis thaliana
  unsure at all n locations
  Clone ID: LIB24-038-Q1-E1-H6
gctctcaagataattttgttctctcaatttcattcttaaaccctagttcttcgattttttccgatctacgacaatggcggacgctgaaacctttgctttccaagctgagatcaaccagttgcnttccctcatcatcaanaccttttactctaacaaggagatcttcctccgtgaactcatcagtaactcttctgangctttggacaagattagattcnagtccttgacggacaagagcaagctcgatggtcancctgagctcntcattcacatcattcccgacaaagactaacaacaccttgaccattattgantagtggtattggnatgaccaaangctgatttgggtcaacanccttgggnacaatttgcaangattctgggannccaacngaagtcaatgggaagcacngggctgctggaagccggatgtnaacca

SEQ ID NO: 10598 - DNA, 470 bp, Arabidopsis thaliana
  unsure at all n locations
  Clone ID: LIB24-038-Q1-E1-H9
gtgccggtccanaattaacgggnccacgcacgcgtccggactaantgaacacagctgcaaagatcaactatttacatggaggaaacctaacgacaagggagaatttgaggaggttgagatcacagtgctcaattactataaagagcgtaacattgaagtgcgttattcaggtgacttcccttgcatcaatgttggtaagccgaagcgtcccacttacttccccattgagttctgtaatcttgtgtctctacagcgatacacaaaatcgcttaccaattttcagagggctgccctanttgaaaagtctaggcagaagccacctgaaaggatggcctcggctaaccanaggtctgaaggacagcaattacaatgcccgaccccggtattgccaaatagtgcgtgttagcattnatcaccaaattttanccaaanttnaannggccgttatcctaaccagagcnccaaattgc

SEQ ID NO: 10599 - DNA, 409 bp, Arabidopsis thaliana
  unsure at all n locations
  Clone ID: LIB24-039-Q1-E1-A11
cattccattagatcttcttgatccctaagcaagtctcttcgttaacttttgtctttctccttaaaatggctacagaggagatagacatgagttattgggacgtgtcatggggaganttcaatgaagacaagaactcgtctatcttctgcgagtcacaccctcacatagtaaattcgcacgggatatgggaggttatgactttcangagagggatgaacttctgggaatatccgctcccgaatcncgagatcttaancttttctactttttttatatggcggcttcnccacatctcattcaacaagaattgggtcttcgaggtacctagnttcanatatatgatgatcggcaagggataantttagngtcaaactttgccanttcagcancaagtcgtggatccatgnca

SEQ ID NO: 10600 - DNA, 439 bp, Arabidopsis thaliana
  unsure at all n locations
  Clone ID: LIB24-039-Q1-E1-A4
gtccanaattcccaaggtccacccacgcgtccgcaagacgcgtgggttcgcaagctgcctccttttcgtttgccactttttgatcaagcgaaactccaaaacacagagccatgccgccgaagttggacccgaagccagatcgtcgatgtgtacgtccgtgtaaccggaggagaagtggganccgccagttctctagctccaaagatcggtcctctcggtctcgcaccaaagaagatcggagaagacatcncgaaagagacggccaaagaatggaaaggacttcgtgtcaccggtgaagctgacggttcanaaatcgncaangctaancgtaaccggtggntccatctgctgcagctctcgntcancaanggcnttgaaggagccagagagagaccnnttnaggaaagtgaaganacattaaagcatancggtaacatct

SEQ ID NO: 10601 - DNA, 409 bp, Arabidopsis thaliana
  unsure at all n locations
  Clone ID: LIB24-039-Q1-E1-A6
ctctctcagatcaaaaaaaaccttcgtgtgcgtctctcgtcctctaaattgtcgaaaatgctggctaggctcgctgcgaagcgtcttctcgagatccgtcaagttttccgtcaaccaacctctcaggtgactcgtagcttatcgacggccttaaactaccatctggattctcctgataacaaacccgatcttccatgggagttttcagaggctaaccaatctaaggttaaggagattctctcttantanccatccaattacaancagtccgcagttattcctctcgnagatcttgcacaacagcagaatggaggctggctccctgtttcagcaatgaatgcggttgcnaaaagttatagaacttgcccctanccggtgttttatganggtgcaancattttactcaatg

SEQ ID NO: 10602 - DNA, 390 bp, Arabidopsis thaliana
  unsure at all n locations
  Clone ID: LIB24-039-Q1-E1-A8
gnatttgctacggggatgtctgatggatttcccaagtttaccangtccgaaggatacagangcttgtataanggtcttgctccactctggggacgtcagattccttacactatgatgaagtttgcttcctttgaaaccattgttgagatgatttacaantacgcaatccccaacccaaagagtgantgcagcaaaagtctgcaactcggagtgagttttgccggaggttacgttgccggagtgttctgtgccancgtttctcatccagcagacaatctaagtgtcattcctcaacaacgctaagggagcaaccgttggngatgcggtgaagaacantggtatggtgggactgttcacaagaanggcntccttcttagaantgtgatgatc

SEQ ID NO: 10603 - DNA, 433 bp, Arabidopsis thaliana
  unsure at all n locations
  Clone ID: LIB24-039-Q1-E1-A9
ttgctggctttaatcacaaattgaggatcttgctggaagctgtcattcaaaagatagcaaaattcgaagttaaacctgacaggttttccgttatcaaggaaacagtcacaaaggcataccaaaataacanattccaacaaccacatgaacaagcancgaattactgctcactagtnttacaaggatcanatttggccttggacagaggaactagatgctctttctcatttggnagctgaagacttggctaatttcgttccgatgctantatcaangacatttgtttgaagtgctanatagcaagggaatgtttataaggacgaacctgagtcaatggtcaaagcataattgnagaatgttcctttttaccngactcnaaaanctatttggccgnccgttanttncaatcccagttcctggacaaataagggnt

SEQ ID NO: 10604 - DNA, 410 bp, Arabidopsis thaliana
  unsure at all n locations
  Clone ID: LIB24-039-Q1-E1-B6
gttagttatcctccgaatagatttccgattctctgtttcttctagattgaatttaaaaaccctacttttgaattttcacatgggagaacaatcaccttctcaaccatcgactcaatgccaaagtcatccacaatcacccaaacccgatactcataacctaatcccaccggaatccaccgatgaatgtctcgattcagctggagtttcaggctcaatcgtctcatctaccacaatcgacgctcgacggatcactgaactaggcantgtatcgtctccgccgtccaaaatccctctccgccctcggaaaatccggaaactcacactcgacggagacgtctccggtganagatnanaangcgggaggatatcnncncatctcaagntaaactctcggctcgcnaacggatgga

SEQ ID NO: 10605 - DNA, 417 bp, Arabidopsis thaliana
  Clone ID: LIB24-039-Q1-E1-B7
acgcgtccgacgggatctagtagatccgagtctgataacttttgagctcgacataggaacgatggggaaaagaggaagggcttgtgtagtggtacttggagatcttggtcgaagtcctcggatgcaatatcacgctctttctcttgctcgtcaggcatcatttcaagtggacattgttgcatatggaggttctataccccatgaagctgttctaaatcacccatcaatccacatccataccatggcgcagcctcgattcattcagtactttccaaagatactttatcctgtaactctcttgctcaaggcatttattcagtttacaatgcttctctggtttcttttcgttaaagtaccagcgcctgacattttcttggtccagaatcctccttccgtcccaactctaattgctgttaa

SEQ ID NO: 10606 - DNA, 479 bp, Arabidopsis thaliana
  unsure at all n locations
  Clone ID: LIB24-039-Q1-E1-B8
ctgtgtccgccnggccggtaanggtccaaaattcccgggtcgacccacgcgtccgcggacgcgtccgcccacgcgtccgcccacgcgtccgcggacgcgtgggttccttctgcgcttgaaaagtaatgtcgaattctaggatgaatggtgttgagaagctaagcagcaaatccacaaggcgtgtcgcaaatgccggaaaggcaacactgcttgctcttggcaaagccttcccaagccaagtcgttcctcaggagaatctagtggaaggatttctacgagacaccaaatgtgatgacgcgtttatcaaagaaaagctggaacacttgtgcaaaacgacaaccgtgaagacgcgatacactgtgttgacgcgagagatactggctaaataccctgagctaacaacagagggttcaccaacaatcaagcaaagacttgaaattgcaaacgaggcggttgtgggaaatggcattggaagccaa

SEQ ID NO: 10607 - DNA, 496 bp, Arabidopsis thaliana
  unsure at all n locations
  Clone ID: LIB24-038-Q1-E1-F7
cgtgtagccgnccccgtaccgaaccanaaattcccgggtcnacccacgcgtccgnnaagcagctaaaatactgtgttctttgtttcttccatcgaaatcgaaaaaagctaagatctttgcgttttgaaacgatggcggaagaacataagcatgatgaatctgtgatcgctcctgagccagctgttgaggttgtggagagagaatcgttgatggataanatatcggagaagatccatcacggtggtgattcttcttcgtcttcntcatcttctnnnnnnnnnnnnnnnnnnnnnnnnnnnnnnnnnnccctcttctccttcgtcttctatgaaatcgaaagtttaccgcttgttcggacnagagcagctgttcataangttctcggcgggtggaaagccggctggatanattcatgtggaaagancaacgaagatgtcnggtngtgtnaccttngatggtgnctananctggcntgggttgttgtttgaatttgaaa

SEQ ID NO: 10608 - DNA, 503 bp, Arabidopsis thaliana
  unsure at all n locations
  Clone ID: LIB24-037-Q1-E2-B8
gtaccgagnccgcaaattcccgggtcgacccacgcgtccgagaaaatggagattttgagatttttgctttctctctttatatattttcttttgttgaatctttctctttcacattttccttcgatttcagctcaaaggactaaccatgaaaacttcctcaagtgtctctctcaccgaatcaacgaggacgactcaagaatcatacacacatcaaaagatccttcgtatttctcaatcttgaattcttccatacaaaatccaagattctttgttctcgaaacacctaaaccggtttcaatcatcactccggttcaagccaccgatgttcaatctacgattaaatgcgcacggcttcacggtatacacatcaggactaggagtggtggtcatgactacgaaggttnancttacatggctaaaagcagaccgtccgttgtcattgatttganaatccnccggtccaatacattagaatgttgataaccgggaccgggttgggttca

SEQ ID NO: 10609 - DNA, 510 bp, Arabidopsis thaliana
  unsure at all n locations
  Clone ID: LIB24-037-Q1-E2-C10
aactgttacgcctggtcggtacngcctccganaattcccaaggtcgacccacgcgtccgccaatctcnctcaaaactcataancatattgcnctcctttgttcatttctgggtttacgcttctttcgactttaagggtttcggagcttagttttacnacaatttcgtttggaaaagagctcttatttgatgttcatggcgtctctctccttcagccaattcttatcattccccagatgcaatgcanatgttccttgtctgctccagtcgcatggttttgtgaagtttagaggtnaaagatggaatgggaaacatagcttttctatggctgctgggtaagagaaagttatcagaagtcngcaactcttgaaagaagaaggtaatgatngganacggtgccggttgtngggaaaagaaaccatccaaaaagtgnttacaagaaccaaccaangancaaaggttgtnggttaaaggatgaaccaattaggangaaaatttcctgaanttttgg

SEQ ID NO: 10610 - DNA, 506 bp, Arabidopsis thaliana
  unsure at all n locations
  Clone ID: LIB24-037-Q1-E2-C11
ctgtttacgccgntcgtaccgcctccnanaattcccnaggtcgacccacgcgtccgaaagtgagcaatgtcnaattaagcgaggatcctcaggctgcacagcttcaagctaaatcaagtgagaaacccaatagaaagaagattcanaanggtaaggaaataaaaagctctccagctgatggtaagctgagtgggaagatgaagaagaganaagagaaagtaggcaatgttgatataagcgaaccgattctggaagctatttcaactgnnnnnnnnnnnnnnnnnnnnnnnnnnnnnnnnnnnnnnnnnnnnnnnnnnnnnnnnnnnnnnnnnnnnnnntcttcagtcgaagatctgaaaagagaaagcaagtttaagaaatcaaataagaaagaaaaaagattgacattgacctcctaanaaaagagaacaaaatttgaagaagganggaaagatgtttaacaaatttcctcaaggcgatnaaggantgcacaaggggaatgaaaa

SEQ ID NO: 10611 - DNA, 522 bp, Arabidopsis thaliana
  unsure at all n locations
  Clone ID: LIB24-037-Q1-E2-C2
acgcgtccgatttatttagagagataagttaaaaaaaaaatgggtcggtatgggatttgttcaaaatggtgtaatgatgataatgggtgtgggttgtcccctggtnggtgaaacctgttcctgggagctaaantttcgaattgagcctttatcgggtccaagcctggggctaatgggattaattgtgtcaaacgaaagggcgaaagtcacaaaactcaagcttgacaattactctgggagctggggtttgaatcaagaagcaaatacttgtttgggtaaagtctctatccagattaagcttgttgaggggtgattcagcaaggaacaagtcactgctttctacatgtcttcaagatgggtccgaaaccacaacgaaattcgattttgaagttcttaagggaaacactaccgggcgaagccttacataagtcccaagaacaatatcctacgttaaacnggagtttggnaacagangaacaaaagactcaancctttggtccgattccaacaactgaantttca

SEQ ID NO: 10612 - DNA, 483 bp, Arabidopsis thaliana
  unsure at all n locations
  Clone ID: LIB24-037-Q1-E2-C4
acgcgtccggcacttagctcacaacgagagaacangcaaaaggaaagaatgagagattctatcgattcataaaggaaaattgtacctctccaattctctgcttccgtcatcgtagatccatgagatcttcagcgggaaagcttctctcccattctctacggagaaaccgcgggaaacttggtgatggattttggattccggctacgaggtctcagaagatgtggaattcgacggtaccgtcagatgaaaatcctgatcaaaattcgatcgatgcaggatcttcaatgcggaaaccaattagcttatggcctggaatgtatcattctccggtgactaaatgcgctttgggaagctcgtcgtaatatgttcgaaantccctaaccggagacgacgcttctcagtcaaaattgacggctaaatctccgttcngaancccgaaagttcaatccnctataagnttttcctccngaattttggtcctcc

SEQ ID NO: 10613 - DNA, 473 bp, Arabidopsis thaliana
  unsure at all n locations
  Clone ID: LIB24-037-Q1-E2-C7
acgcgtccgcccacgcgtccgcccacgcgtccgtctgcctctgcctcagcctcctctcagtcgccggagacggcaatgattaggtcgtattcagacaaaaggtctacttcgaggtctttttcttgcaggacaagtaacgagtggtggttcgacgatatgtcaattctcgggccaaaaatcattgaaaagctgataaatacacttggtgcgcatgataagaacaatgacagcttggtcctcacaaaatttcttctccattacctcaagacaaaggtcccaaacaagtcaaccaacaagctcgagtattcaggtttagctgatacagcggttcaaggaagtggttttcgcaacgaaaaccgcgttttcatgcagaaaaatgttctgggttctgcgagttttatcgggatttagcataagtnaagaatcaagaaattggttaagagaaggttataggagaaatgcnggatttaagc

SEQ ID NO: 10614 - DNA, 486 bp, Arabidopsis thaliana
  unsure at all n locations
  Clone ID: LIB24-037-Q1-E2-C9
ctgtttacgcctgntcgtacngctccaaaaattcccaggtcgacccacgcgtccggcctgaccgaactcctcatccagcactccatgaggttaagcattgttaccaaccaatcaaggtttcattgacggatggcatgataaaggttgcaaacacttactttttcaacacaacagaagaattggagtttagctggacaattcatggggatggtcttgaacttggatctgggactctctctattcctgtgataaagccacaaaatagttttgagatggagtggaagtcaggtccatggttttctttctggaatgactcaaatgctggagaattgtttctgacaataaatgccaagcttttaaatcttactcgttcgcttgaagccggtcacctttgtcttcaacgcagattccttaccagcaaaaggacaaattataccgcaaggcataaaaaagacagacactatatcacttgtgaaactgttggag

SEQ ID NO: 10615 - DNA, 614 bp, Arabidopsis thaliana
  unsure at all n locations
  Clone ID: LIB24-037-Q1-E2-D10
aactgtttacgccgttcgtacggcntccaaaaattccanggtcgacccacgcgtccgggatcgggtcggatcttttgaagttcttcaatggcgcagatactttcccctgtttgtacggatcttttgaagttccagaactcagctcttagctccagatcaggtgcgtcgccgcggttctcggcgaagaccaccggtgcttcttcatcttggtacttacctcggtacgcangaaagaggcgaaccgattcaatcggaagattgagagttgcaactgaaggatgcctcctctccttccaacggtgatgtcccccgatgaattaactaatgccgttccccgggactccctttccaagaatgcctaangccaagggaagggaagaatttaaaggaaaaagcccttaaccnaannaacctgggtaatggaaaaantccgnttggcccaattcccannnaacccttttaaatttggggccaaatgggaacccccccggaaaaaccccancnaaaaantttttcccnggccaatngggtttccaanttttaaanccgaaatnantcccnaantggaangaaaatttcccccaaanttttgaaccccccctgggnttttccaa

SEQ ID NO: 10616 - DNA, 498 bp, Arabidopsis thaliana
  unsure at all n locations
  Clone ID: LIB24-037-Q1-E2-D5
tgttagtagcgaaaccgntgatcccgggtngncccacgcgtccgattatgttctccgcaatgcgtgttgttgatcatgccgtctcacctgatacctctgtgctaagtgttgtactcaaggcttgtggtcaaagctccaatattgcatatggagaatctttgcatgcttatgcggtgaaaacttcgcttctcagnnctgtatatgtgggaagttctttactggatatgtataagagagttggaaagattgataagagttgcagagtctttagcgaaatgccttttagaaatgctgtaacatggacagcnattattacggggttggttcacgctggtcgttacaaggaanggtcttacgtacttttctgaaatgtcgagatcggaacaactatctganacntatacctttgctattgcctgaacgcttgtgctggnttacgtcaagtnnaanacnggtnatggcgattccatacgcangntcatactnagaacggcttgt

SEQ ID NO: 10617 - DNA, 498 bp, Arabidopsis thaliana
  unsure at all n locations
  Clone ID: LIB24-037-Q1-E2-D6
tangaaccgacattcccgggtngacccacgcgtccgtgtatgttcaagctcccattcttgtggccttcacgcttcaggaacaaagaccagtatctctctgaaagactacttctcggaaattttcgtctccatggcacccgtgagggggattcttggcttgcaaagggcagtgtccatttggaaggaaagtaacagactgactccagctttgagatcattcagcactcaagctgcatccacttccaccactccacagcctcctccacctcctccgcctccggaaaagactcatttcggtggtctcaaggatgaagatcggatttttactaatctctatggtctgcatgacccatttctcaaaggcgcgatgaagagaagtgattggcataggaccaaagatttggtgctcaaagggtactgattggattgtcaatgaaatgaanaaatctggaactcctggnacttggtgtgctgggttcccttccgggtctnaattgt

SEQ ID NO: 10618 - DNA, 483 bp, Arabidopsis thaliana
  unsure at all n locations
  Clone ID: LIB24-037-Q1-E2-D9
cgccgntcgtaccgctccaaaaattcccnggtcgacccacgcgtccggaaaaaagagagccatggaaatcgcttcttgttcaattcttaacaatcttcaaatttcttgtacaaagacttctattttcactcagtatttgagcgagcgttcttcacacgacactggaagacgcaatttcttgcctttttcaaatttccctggaaaatctcagattctcggaaaatgcttgcgattgcagagattctcttcgatttgcttatcagctagcagagaagacgtaaacccatctgaagaattcgctgtgatacttgaggttgataagggttatgattgatacatggtcaaagtaatcgccaagcgttcaatgtagctttcaaaagcttgggctagatgtgcaaaattggcctgaaccagttaatcagacttgttgagaaaaagggctgctgatgaaagaaaaaatgttgcctttgnaattcaaccaaa

SEQ ID NO: 10619 - DNA, 536 bp, Arabidopsis thaliana
  unsure at all n locations
  Clone ID: LIB24-037-Q1-E2-E1
tngccgtccggaaaatcaagggtcgnnnnnnnnnnnnnnnnnnnnnnnnnnnnnnnnnnnnnnnnnnnnnnnaagacaatgtctcctttcaaaatatcctccttaacaatccttccctngcgggntttcaatgtccggtgntgatttcaacactgacgtcaacgtancttggggaaatgggcgtgggaagatactcaacaacgggcaacttcttactcccnccttagacaaatcctccgggttccgggtttcaatccaaaacanaagtanttgtttgggaaagaatgggtatgcanattaaagcttgttccctggtaactccgcagggaacaagtcaccaactttttacctaaaaatcccgaaggattcaacttgggaatgagaattgatttngagttccttgggggaaataatgaantgggngattccctaaaactttttnaacacccaaangtttacaanncaanggtaaanggggggcaaagaggcaacaaanttccaaccnctngggttgnacccnaaccggccaaatttcc

SEQ ID NO: 10620 - DNA, 487 bp, Arabidopsis thaliana
  unsure at all n locations
  Clone ID: LIB24-037-Q1-E2-B5
ctggccctaccgaaccgganattcgcgggtngacccacgcgtccgccaaaacctcgcaagtaactctcatcctcgctgtactgatcagaagaaaaaactctgaaagatgtcgaccggaggaccccaaaaattagaagcacaaggaggaaaagaaggcaaagaatgggatgatggagccgaacacgatggtgtgacgaagatatacgtagcagctggtggtcttggaattgaacaaatcagattcgattatgtaaagaacggacaaccaaaggaaggatcttttcatggtgtgaagggtanaagtactatttctacgattgagattagccatccagccgagtatcttatttccatggaaggttggtacgactctaccaatatcattcaaggaattcagtttaaatccaacaaacacacttcccagtactttggatatgaatttttgggaaatggtacacaattttcacttcaagttaatgacacanga

SEQ ID NO: 10621 - DNA, 419 bp, Arabidopsis thaliana
  unsure at all n locations
  Clone ID: LIB24-037-Q1-E1-F9
acgcgtgggatcctcgtaatcctctcctttctccttcagacccctcctagttgctgtttaaacaaacaaaaaaagactgcttctctttcttatttctctcatcatcatcatcaatggttttatgagatttatatcaaaaaacattgaggagctagagagaaagagagagtgtgtgtgtagaaaaagattgaaacatcatcaagattgatggagcaaggaggaggtggtggtggtaatgaagttgtggaggaagcttcacctattagttcaagacctccctgctaacaacttangaagagcttatgagattctcaagccgccnnnnnnnnnnnnnnnnnnnnnnnnnnnnnnnnnnnnnnnnnnnnnnnnnnnnncttccttcntcatcgggaaatcgatggccgagagaagaaacttta

SEQ ID NO: 10622 - DNA, 372 bp, Arabidopsis thaliana
  unsure at all n locations
  Clone ID: LIB24-037-Q1-E1-G11
tctccctcaaaactcataaacatattgctctcctttgttcatttctgggtttacgcttctttcgactttatgggtttcggagcttagttttactacaatttcgtttggaaaagagctcttatttgatgttcatggcgtctctctccttcacccaattcttatcattccccagatgcaatgcagatgttccttgtctgctccagtcgcatggttttgtgaagtttagaggtgaaagatggaatgggaaacaaagcttttctatggctgctggtaggagaaagttatcagagtcagcacctcttgaagaagaangtaatgatggaaaccgtgcggttgtgtggaaaganaccatctaanagtgttaagagaaca

SEQ ID NO: 10623 - DNA, 481 bp, Arabidopsis thaliana
  unsure at all n locations
  Clone ID: LIB24-037-Q1-E1-H10
aacctttccgnggccccgtacaaagtccanaaattcccgggtcnacccacgcgtccgaaacggagagaggcggagaggagaaggaagacggcgtgaagcaatggtgtcgctgaagatccagaagcggctcgccgcatccgtaatgaaatgcgggaaaggaaaagtttggctcgaccccaatgaatcgggcgatatctctatggccaattccaggcagaacattaggaagcttgtgaaggatggtttcattatcaggaagcctactaagatccactcacgttctcgggctagggctttgaacgaggccaagcgaaagggtcgtcactctggatacggtaagagaaanggtacaagagaggcaaggctaccaaccaagattctttggattaanggagaatgagggtgtttaaggcgtttcttngngcaagttcccgtgagtcaaaacnaagaattgatanggcacatgtccatnacctgtaca

SEQ ID NO: 10624 - DNA, 407 bp, Arabidopsis thaliana
  unsure at all n locations
  Clone ID: LIB24-037-Q1-E1-H11
acgcntccgtaagaacaaccgcgttacaaacttctctcgtctttcctggaaatttctgtccacaaatattagtctttaattttcggtatgaacactgacccttccttgatctattgatctttgtcgcagtatttattangattttatctctatnagacggctcttttgattaatatttttccgactcttatttcttatcttctttgctcanaaacttctctcaggcgaattcaagtttcatagttttggtctangtttttgtccaccgatctanctctttaggtgagttttgtttaanttttttcggctttatagtttgtcnacgcttcatgttgttgttgttattanaancttgtgtttgaattgaggtctttgatctcgtttccnttnctgaatttagatatgtg

SEQ ID NO: 10625 - DNA, 422 bp, Arabidopsis thaliana
  unsure at all n locations
  Clone ID: LIB24-037-Q1-E2-A11
cccaaggtctacgggtcgtccacncatccgtccgaggatttcnctgttgttctctttagccttagttctagccatcgggtccgtcttggctcacccacctacccacaagaaattacaaaagaccttgtgtccatctactttgtccaaagttcaagctttcccttaccttgaagtctctagcttcgtcgagaagaaggttcagttcgcaccaaaaaccattgcgttcaagtctttgttctccatctgcaagagctacatcgactttcttgggggcgttaagttttctgcctccagagatgtgtttcacgtcgttcatgtcaaaatcactttgatgaccaaggcnatggttattgcacaagcacaaattgggaatttaaagganaccccccggttaaatttgggcaaaactaancgttaatggc

SEQ ID NO: 10626 - DNA, 524 bp, Arabidopsis thaliana
  unsure at all n locations
  Clone ID: LIB24-037-Q1-E2-A2
tgncctgccgtccgaaatcaagggtcgacccacgcgtccgctgnagagttttcgtgtagaacaaatccttctctgagaaaaaacaacagattccgaatttaaccttnaatcaacccggaaaaaatggagaaagcgatcgagaagacaacgcgttctccttgagcatctcccgaaccntcntcttccttcttcgcacaatttacgaaggcttctcctatcctgccttctgcttgcntggctgggggacagtgctgcatatcaagaggacctctctctatggaagatgatgttgtcattgtcgcggcacatangactccactatgcaagtccaaacgtggcaatttcaagggatacatatcccgatgatttgctcgcanctgttttgagggcattgatanagaagacgaatctaaanccaagtgaagtangtgacattgttgtgggtactgttttggcaactggatntcanagagccaatgaatgcaaggatggctgcgttccnaagctggnttccctgaaaacgt

SEQ ID NO: 10627 - DNA, 485 bp, Arabidopsis thaliana
  unsure at all n locations
  Clone ID: LIB24-037-Q1-E2-A3
ctgggcctagcgaaatcnaaggtcgacccacgacgtncggttccggcaaaaaaatgtcatttcatcatctatgttcctctccctcgtctcttctacatgaccctcttcctctctgcaatcttctctcagtgtatcccaaatccacaccaagaagtttcctctcctcttacaatcccaattcttctcanttccactccaagaaaccttctccaagcaacccatgtttcagtacaagaagcgattccacagagtgaaaaatccaaacttgttgatgtagatcttcctataccaagaacctactgcttccaaaagctacgtctgggttaaacccaaaaagcccaagagcttctcaactccgtagaaaatcntacgantcnaggtactcctctcctancaaactaagctgaagtctcctgangccgtgttaacccaaangaaaactnaaattttgcganagtcnctaaagggggttttggggggnaatg

SEQ ID NO: 10628 - DNA, 567 bp, Arabidopsis thaliana
  unsure at all n locations
  Clone ID: LIB24-037-Q1-E2-A4
naactgggtttgctttggccctggcccgtccgggaattccaaggggtcgacccacgccgtccgtgcaagtcnttcatctctatgcacaaaatggcgaaaagagaacaantagtcataaccttgcaagaagcaaaagaagaaaagagactcacttgggattccttggtggtaagtgggactttgcatattgtcctaatgttcntgggatcttgggcaaaccaaacactgtcccaacttcttcctctggaggcttactcaagaatgggatgtgatgaaacatcaacaaccactcgggctcaagactactcaagactcaaacaaatccttcttctgacgatacttcttcctctttgtcttcctcaagaaccagttgagttaagatttcgaaagccatcacaaaactccgaagctgaaagattacgaaatcaaaaccgtaaagtactttgaagccatgtgacatgtccnttgagtggagtnacactccaatgtgaaagatcgagaagaagagggaagaagattggtaaggaacaatgatgaagttcagagagagacaattgtcccttcnaa

SEQ ID NO: 10629 - DNA, 448 bp, Arabidopsis thaliana
  unsure at all n locations
  Clone ID: LIB24-037-Q1-E2-A8
acgcgtccgaacctaaagaaagttctcatctctcaaataaacatgtcttttttcggaaaactcgcagacactgtggtatcttttgcaaacgattctgcgaaatctgttgtagaagaagtggtaaatccaacggtgtcttttgcaaacaattctgcaagaactgttgtagaagaagtggtaaatccgacggtctcttttgcaaacgactctgcgagaactgttgtagaaaaagtgctaaatccaacggtatcgttcatcgatagccagctccagcggccacgggacgtccttgtgcaacaacaaatcctagacaatctccaagaatcgaatggttcgaatttccctggggatgactaccactcgcctgaccggaagaactgggatggcccatctctctgtggataaactaacccttaacaagatctgtggccaaggaactccacgantc

SEQ ID NO: 10630 - DNA, 425 bp, Arabidopsis thaliana
  unsure at all n locations
  Clone ID: LIB24-037-Q1-E2-A9
ctgncccgtaccggtccaaaaattcccgggacaacttctacacagtgacggtttatgaaaagggagctgaggtcgtcaggatgtacaaaactctactaggaactcaggggttccgaaagggaattgatctctattttgaaagacatgatgagcaagcagtgacttgtgaagacttctttgctgctatgcgtgatgcaaataatgcagactttgctaatttcttgcaatggtactctcaagctggaacgcccgttgtcaaagtggtatcctcttacaatgctgacgctcgtactttctctttaaaattcagtcaggagatactccaactcccaggccagccaacaaaagaacctacatttattccanttgggtgttnggccttttggacncaattgggaaaganattaatcccttcccccggttcn

SEQ ID NO: 10631 - DNA, 482 bp, Arabidopsis thaliana
  unsure at all n locations
  Clone ID: LIB24-037-Q1-E2-B10
tacccggncgtacggctccaaaattcccaaggtcgacccacgcgtccgtctgcaggtccctggtctttcatgattttgttgcaaagtgcctcacaaaggaaccacgtcttcgcccaactgcagctgagatgcttaaggtaactataatagtcttctgcatgtacgccagagatcgttagtatgtgtatctcaatactctcttttttccttcttacttttttcttttcagcttaactgtaactctatcttgtcaatactaggatatcttcagctttagttgtcagaattaccatcactttcatagctggcatgcaatttagtgtttatattctctgtgttcttctaatgccatttactctttcgtactaaattcagcacaaatttgttgagagatgtaaaactgggggcttcctgcaatgtcgccaaagantgagaaatccaaacaaatcaagagctacaatggntccgcaagcgcaaagtgt

SEQ ID NO: 10632 - DNA, 430 bp, Arabidopsis thaliana
  Clone ID: LIB24-037-Q1-E2-B12
ctttcaatttgccattccttctgcaatgatgtgttgccttgagtggttagctttcgaggtcattactttgctgtctggtcttctacccaactcaaagctcgaaacatcggttatttcgatttgcctcacgacctcttcattgcattacaatctagtaaatggaattggtgatgcagcaagcaccaatgtggctaatgagctaggagctgggaatccgcgaggggctcgtgattctgctgcggctgcaatcataattgcagctgttgagtcagttattgtgaagctctagtctgttcttgtctcgcagtgtgtggccttatgcatatagcaatgtggaaggaagttattagttatgtgactgatatcactcctaatcttgtatctcaatcctcaagggacagctcctgaacgtcctccccgggaatgtgag

SEQ ID NO: 10633 - DNA, 524 bp, Arabidopsis thaliana
  unsure at all n locations
  Clone ID: LIB24-037-Q1-E2-B2
acgttctgcttgncctgccgtccgaaatcaaagggtcgacccacgcgtccgcggacgcgtgggcggacgcgtgggttgtgtttgggaaatcaaaattcagacaatggcttcaattccgcagattatcctttgtaacttctccatacacgacggtttcaacaaggaacccagtaacagattacacgctaaaagacggagcttggctccttctatgctccaaaccaagttggggttgagaacttgcttgattgagcatagacagagacagcgagtgatgggtctgggaaatattgggatgctaactagtgagaaatctcttaaccgtaaaagacgggtggttaagggttaaggggtttgaaatttaatggtggagataacaacggaaatgggaagaatctcggaaaacttgccttggccaatgggcttgacttanctccccaatnactgggtcaacttggttgggantttggatgcnattgtcccnggtccnggctgaattgttggtaatgtttccaantttgggt

SEQ ID NO: 10634 - DNA, 414 bp, Arabidopsis thaliana
  unsure at all n locations
  Clone ID: LIB24-037-Q1-E1-F10
gaacaaaaaaagacttctataggccaaatgctgaaaaaacttgcgaggaatgcgcgtaaagcttgtccaaatgggaattcacttccacaatgggtccttacatcgagagacagaggtggtcttgcatgcaacctcgagggcattatagaatcaccgattacaaatggctacaggaacaagtgtgagttctcggttggattatctcttcaggggaagccaactgttggattcagtctaggaagtttttgtgcgggtgtgacagcagtcgaggagcctgtggattgccccaacgtctccaaaattgcttctcaatatgcttcaatatttcangaagtttatagaaaattcaaaattccaagtttggaataggtttcaacataagtgggttctggcggcaattgacggttccagagg

SEQ ID NO: 10635 - DNA, 472 bp, Arabidopsis thaliana
  unsure at all n locations
  Clone ID: LIB24-036-Q1-E1-H9
gtttacgccggtcgtacngctccanaaattcccangccccacaccaccattcccncttcaccgtctctcttcgtcggtgattcacattccgatttggtgtcttttttactcttaacaagtcctcaaaaaccctacttttactcgagattttgtctccgccgccgagtaccaagtgcctcccgatctacgccccaatccctaaatggctacggaggctacaaccgtacccaaattccaggaacctgatctccggcaggtttctcagacaccggatttcaaaccggaaatcgctcacgatggtcttaagttctggcaatttatgattgctggttcgattgctggctccgtcgaacacatggcgatgtttcccgtcgataccatcaangacccatatgcaagcgcttcgancangtcccttaaaacccgtcgggatccggggaagctttccgttcgaattatccaaaagggaggg

SEQ ID NO: 10636 - DNA, 453 bp, Arabidopsis thaliana
  unsure at all n locations
  Clone ID: LIB24-037-Q1-E1-A11
natccaaaaggcccgggtcgacccacgcatccgcccacgcgtccgggatttctctgttgttctctttagccttagttctagccatcgggtccgtcttggctcacccacctacccacaagaaattacaaaagaccttgtgtccatctactttgtccaaagttcaagctttcccttaccttgaagtctctagcttcgtcgagaagaaggttcagttcgcaccaaaaaccattgcgttcaagtctttgttctccatctgcaagagctacatcgactttcttgggggcgttaagttttctgcctccagagatgtgtttcacgtcgttcatgtcaaattcactttgatgaccaangcgatggttattgcacaagcncacattggagttgaaggagacctcgctgtnaagttggggcaaaagctagaccgtgagggctgaaangtttgtcaaacctttt

SEQ ID NO: 10637 - DNA, 462 bp, Arabidopsis thaliana
  unsure at all n locations
  Clone ID: LIB24-037-Q1-E1-A9
cganattccaaaaggcccgggacaacttctanacagtgacggtttatgaaaagggagctgaggtcgtcaggatgtacaaaactctactaggaactcaggggttccgaaagggaattgatctctattttgaaagacatgatgagcaagcagtgacttgtgangacttctttgctgcnatgcgtgatgcaaataatgcagactttgctaatttcttgcaatggtactctcaagctggaacgcccgttgtcaaagtggtatcctcttacaatgctgacgctcgtactttctctttaaaattcagtcangagatacctccaactccaggccacgccaacanaagaacctacatttantccagtggttgttggtcttttggactcangtgggaaagacattactctttcctcctgttcatcatgatggtacaagtgcagaccatttcagggcaagcaagcacaatac

SEQ ID NO: 10638 - DNA, 399 bp, Arabidopsis thaliana
  unsure at all n locations
  Clone ID: LIB24-037-Q1-E1-B10
tctttcatgattttgttgcaaagtgcctcacaaaggaaccacgtcttcgcccaactgcagctgagatgcttaaggtaactataatagtcttctgcatgtacgccagagatcgttagtatgtgtatctcaatactctcttttttccttcttacttttttcttttcagcttaactgtaactctatcttgtcaatactaggatatcttcagctttagttgtcagaattaccatcactttcatagctggcatgcaatttagtgtttatattctctgtgttcttctaatgccatttactctttcgtactaaattcagcacaaatttgttgagagatgtaaaactggggcttctgcaatgtcgccaaagattgagaagtccagacaaatcanagctacaaatggg

SEQ ID NO: 10639 - DNA, 394 bp, Arabidopsis thaliana
  unsure at all n locations
  Clone ID: LIB24-037-Q1-E1-B11
acgcntccgcaattatttttcttatcttctccgggatttagatatttgacataaatagtgagccccaacttttcttttgcagaagaatgaagcaggggttgataatgaaggtacaaggttaccaaggctgcagttaagaagggtgcaaagtgaactcgaatcctcaaaactctatccgcagatgaatcaaaaaacaatattagtttctttactttagtttggtatttggtcgcgtgttatagcttcgtttcttctccatcggaactctgttcccggaactgggttcttgatcngaggtggcggagctactttgcacctantttgcttttgaattgttatcaattttgaanctatttggagattcggttatatgatgtgattttccgaggaaaat

SEQ ID NO: 10640 - DNA, 468 bp, Arabidopsis thaliana
  unsure at all n locations
  Clone ID: LIB24-037-Q1-E1-B12
actgtttgcccccgnccggtacaaatccanaaattcccgggtcgacccacgcntccgcatctttcaatttgccattccttctgcaatgatgtgttgccttgagtggttagctttcgaggtcattactttgctgtctggtcttctacccaactcaaagctcgaaacatcggttatttcgatttgcctcacgacctcttcattgcattacaatctagtaaatggaattggtgatgcagcaagcaccaatgtggctaatgagctaggagctgggaatccgcgaggggctcgtgattctgctgcggctgcaatcataattgcaagctgttgagtcagttattgtgagctctagtctgttcttgtctcgcagtgtgtgggccttatgcanagagcaatgtggaggaagtaanntagttangtgacctgatatcactcctanncnttgtatctcaatcctcatnggacagcttc

SEQ ID NO: 10641 - DNA, 377 bp, Arabidopsis thaliana
  unsure at all n locations
  Clone ID: LIB24-037-Q1-E1-C10
atctccctcaaaactcataaanatattgctctcctttgttcatttctgggtttacgcttctttcgactttatgggtttcggagcttagttttactacaatttcgtttggaaaagagctcttanttgatgttcanggcgtctctctccntcacgccaattcttancattccccagatgcantgcanatgttccttgtctgctccagtcgcatggttttgtgaagtttanaggtnaaagatggaatgggaaacanagcttttctatggctgctggtaggagaaagttatcagagtcagcaccncttgaagaanaaggtaatgatggaaacggtgcggttgtgggaaagaaaccatctaaaagtgttaagagaacaacna

SEQ ID NO: 10642 - DNA, 418 bp, Arabidopsis thaliana
  unsure at all n locations
  Clone ID: LIB24-037-Q1-E1-C11
gtgagcaatgtcgaattaagcgaggatcctcaggctgcacagcttcaagctaaatcaagtgagaaacccaatagaaagaagattcagaagggtaaggaaataaaaagctctccagctgatggtaagctgagtgggaagatgaagaagagaaaagagaaagtaggcaatgttgatataagcgaaccgattctggaagctatttcaactgnnnnnnnnnnnnnnnnnnnnnnnnnnnnnnnnnnnnnnnnnnnnnnnnnnnnnnnnnnnnnnnnnnnnnnntcttcagtcgaagatctgaaaagagaaagcaagtttaagaaatcaaataagaagaaaaagatggacatgacctctaagaaagagaacaaaattgaagaggaggaagatgtttatcaaatttcntcaggcgatgaggatt

SEQ ID NO: 10643 - DNA, 394 bp, Arabidopsis thaliana
  unsure at all n locations
  Clone ID: LIB24-037-Q1-E1-C12
acgcgtcttcataatcttcctctttttttctttgtctttgatattcaaagtttttgtttattttttctttgcttaacccggagagacaccctctccataaatttagttttgatccctctgggttccttgaagaaaaaaacaccaattccattcatattcttcttcatacgttcaataattcttacgaggacgagatcttcctaacgtctttgatcttcttcattaggagataagtctaaactggtcgaagatgttgggagatttcatcatcagactccttgtattgatattagggtacacatacccagcattcgaatgctttaaaacggtggagaagaacanagttgatatcgaggaactcagattttggtgccaatactggatacntttggcg

SEQ ID NO: 10644 - DNA, 413 bp, Arabidopsis thaliana
  Clone ID: LIB24-037-Q1-E1-C9
tgaccgaactcctcatccagcactccatgaggttaagcattgttaccaaccaatcaaggtttcattgacggatggcatgataaaggttgcaaacacttactttttcaacacaacagaagaattggagtttagctggacaattcatggggatggtcttgaacttggatctgggactctctctattcctgtgataaagccacaaaatagttttgagatggagtggaagtcaggtccatggttttctttctggaatgactcaaatgctggagaattgtttctgacaataaatgccaagcttttaaatcttactcgttcgcttgaagccggtcatcttttgtcttcaacgcagattcctttaccagcaaagggacaaataataccgcaggcgataaaaaagacagacactagtatca

SEQ ID NO: 10645 - DNA, 469 bp, Arabidopsis thaliana
  unsure at all n locations
  Clone ID: LIB24-037-Q1-E1-D10
acttttacgccgnccgtaccgagtccanaaattcccgggtcnacccacgcgtccgngatcgggtcggatcttttgaagttcttcaatggcgcagatactttcccctgtttgtacggatcttttgaagttccagaactcagctcttagctccagatcaggtgcgtcgccgcggttctcggcgaagaccaccggtgcttcttcatcttggtacttacctcggtacgcaggaaagaggcgaaccgattcaatcggaagattgagagttgcaactgaggatgcttcttctctttccaccggtgatgtcgccgatgattactatgccgttctcggactccttccagatgctacgcaggaggagattaagaaagcttactataactgtatgaaatcgtgccatccagacttgagtggcaatgaccccgaaaaccacaaatttctgcatgttcattaacgatatctatgaaantcc

SEQ ID NO: 10646 - DNA, 413 bp, Arabidopsis thaliana
  Clone ID: LIB24-037-Q1-E1-D9
aaaagagagccatggaaatcgcttcttgttcaattcttaacaatcttcaaatttcttgtacaaagacttctattttcactcagtatttgagcgagcgttcttcacacgacactggaagacgcaatttcttgcctttttcaaatttccctggaaaatctcagattctcggaaaatgcttgcgattgcagagattctcttcgatttgcttatcagctagcagagaagacgtaaacccatctgaagaattcgctgtgatacttgaggttgatagggttatgattgatacatggtcaagtaatcgccaagcgttcaatgtagcttttcaaaagcttgggctagattgtgcaaattggcctgaaccagtttattcagacttgttgagaaaaggtgctgctgatgaagaaaaaatgttg

SEQ ID NO: 10647 - DNA, 413 bp, Arabidopsis thaliana
  unsure at all n locations
  Clone ID: LIB24-037-Q1-E1-E10
actatcgccatcgattttagcagacattgaagaagatgggagtattcacattcgtatgcaagaatggaggcggcgcgtggagcgcgaagcaacacgaaggagaacttgaatcttcagcttcttctacctacgagctccagcgtaagctcgttcaggtatctctctccgctgattcctccggtggcgttcagtcttcgttttctcttgtctcccctacctccgccgtattccaggtaatnnnnnnnnnnnnnnnnnnnnnnnnnnnnnnnnnnnnnnnnnnnnnnnnnnnnnnnnnnnnnnnnnnnnnnnnnncagctgcccctaaggaagatgagaagaaganagaagaatcagaagaggaagaaggagacttcggattcgatctctttggttaaagattgaaatagtatttt

SEQ ID NO: 10648 - DNA, 414 bp, Arabidopsis thaliana
  unsure at all n locations
  Clone ID: LIB24-037-Q1-E1-E11
aaatggcttcgtcttccaaagcactgatcgaatccataggctctcttgacaaagactcatacgtttctctcttatcaaaactcataggcgaatctaaattcgtccagaacaatccgccggagctcatccctcaagaggacctaatcgtcaaacacgtccttgactctctccgtccttatagcacagaaactggtggtggtcctctggtgatcaatcatgtcgcgtatcattcaggtagaggtaatctcatcgttgagtacccaggatctgttcccggaaagatcttgtctttcgtcggaatgcatatggacgtcgtcactgcgaatcctgatgattgggaatttgatcctttctcgctaagcatagatggtganaagcttcgtggtcgtgggacaacagattgtcctggtnacg

SEQ ID NO: 10649 - DNA, 452 bp, Arabidopsis thaliana
  unsure at all n locations
  Clone ID: LIB24-036-Q1-E1-H8
nacccaaaaaaggccccggcccacccacgnatccganatggttggctgtggcaactccctgatgtcagaggatatggtgaaggatgggtatgaggacatcatgaatgttgatatctcttcagtggctattgagatgatgcaaaccaaatatgcatctgttcctcagctcaaatatatgcaaatggatgttagagatatnagttactttgaagacgattcctttgacactattattgataaaggaacccttgattcattgatggctgattaaacctggagggacctactttttgataacctacggtgatccgaaagtgagaatgcctcatttgactcnttctgcgtacaactggaagatctccttatacattataccaagaccaaggatttaaaaagcaagaaagttgcagctcgtcagcaaagtccttgtatgggaagctatacctataanc

SEQ ID NO: 10650 - DNA, 383 bp, Arabidopsis thaliana
  unsure at all n locations
  Clone ID: LIB24-037-Q1-E1-E12
ttctgtgtcgcaatctcttcttcttattaattcattcaaaacagaaaagtacgggaaaaaggaattgagacggtgggtttcgatggggtcaggtgcatcgaagaatactgaggaagatgacgatggttccaatggcggaggtggtcagctctacgtttcactcaaaatggaaaactctaangttgaaggagagctcactccncatgtctatggctctcttcctctcatcggttcctgggatccttccaaagctcttccgatgcaacntgaatctgcgttaatgtcngagctaagcttcgttgttcctcctgatcacgaagactttgggacttcaagtttttgttgaggccaaanancacaaatacgccctgcatactgggngg

SEQ ID NO: 10651 - DNA, 420 bp, Arabidopsis thaliana
  Clone ID: LIB24-035-Q1-E1-A8
aagcttacaaaatagtagaagaagaactttttttgatctccgattcttacctctgcaatcttcagattctagctgattcaaggatcttgtttgtgatagaaattggaggagatgggagcattcatgtcgaggttttggttcatgatgtttcctgcaaaagagtataagattgttgttgttggtttggataatgctggtaaaacgacgacgctttataaacttcatttgggtgaagttgttactactcatcctactgttggtagcaatgttgaagagcttgtctacaagaatattcgctttgaggtatgggatcttggtgggcaagataggctaagaacttcatgggcaacatactatcgtggaacacatgctgtgattgtggttatagatagcacagacagagccagaatccccttcatg

SEQ ID NO: 10652 - DNA, 410 bp, Arabidopsis thaliana
  unsure at all n locations
  Clone ID: LIB24-035-Q1-E1-B10
tgtttgacagcatctgtcagtgaaatcgaggaagtcagatcaaatgtaacgtcagttatcaatatggagcatacaaggctatgtggttttggtggatggttcgatgttcagttctcggggagaaaagaagaccccgcacagcaagaaatcgagttgaccacagctccaagtgagcagcactgcacgcactggggacaacaggttttcattatgtcgaatcctataaatgttgaggaaggtgataatctgaatcttggtttgttaatgagccggtccaaggaaaatcaccgactaatggagattgagcttaactgtgaaataaaagaagcatctggtaaccccaaagaatctttcaagaagacttacttcatagagtgattgattgattataganaagctttcccttgggg

SEQ ID NO: 10653 - DNA, 413 bp, Arabidopsis thaliana
  unsure at all n locations
  Clone ID: LIB24-035-Q1-E1-B12
agatgttcttggaagtggtactctggggcctgttacttctgcagttaatcaagctaaagctgggttggatattgatgccgtagatggtgaagtcgccaagctttcatcggcagttggggaatcacctgcacagcttgtaatttcagactcagataggacactagcttccacagggcttggggaaggcagcccaaaggataaaatatcagatgacatgttcactgatgatatctttggggagtctccagctgatagtcagaaaatgggctatctgcgagggaaaggggaatggcattcctattgtaagggagtggactcgacgataattgggatgatgcagaaggttattacagttatcaattaggggaactacttgatgatagatatgaaatcatgggctactcatggaaaan

SEQ ID NO: 10654 - DNA, 437 bp, Arabidopsis thaliana
  unsure at all n locations
  Clone ID: LIB24-035-Q1-E1-B6
acgcgtccgggaaaatacaaccgccggtttactctcaggattagttgatattattcgattttaaaaatcagtaggaagaagatgaagtacgtgcttgtaacaggaggtgttgtgagtggattagggaaaggagtaacagcaagtagtattggtgttctccttaaagcttgtggtcttcgagttacttctatcaaaatcgatccttatctgaacactgatgctggaactatgtctccatttgaacacggtgaagtttttgtcttggacgatggtggtgaggtggatcttgatcttggaaactacgaaaggtttctagatatcaaattaacaanagacaataacatcactactgggaaaatttatcagcatgttattgctaaagagaggaaaangagattatttggggaanngacggttcanggttgttccctcatgtc

SEQ ID NO: 10655 - DNA, 447 bp, Arabidopsis thaliana
  unsure at all n locations
  Clone ID: LIB24-035-Q1-E1-C10
gtccntaaattcccgggtcnacccacgcgtccganganttcgctctcctcnanctcgcgattgcgaanacatggntcnacgtaaccagcaaaccgtacattatcccagcttcaagcttgtcattgttggtgatggaggcacagggaagactacttttgttaagagacatcttactggggagtttgagaagaagtatgaacctactattggtgtggaggttcatccattacgatttcttcacanactgtggcaagatccgtttttactgctgggacactgctggacaagagaaatttggtggccttagggatggatactacatccatggtcaatgtgctataataatgtttgacgtcacatgcacggctcanatacaataatgttccgacatggcaccgtgatctctgcagggtgtgtgaaaacatcccgattggtctgtgtggggaa

SEQ ID NO: 10656 - DNA, 447 bp, Arabidopsis thaliana
  unsure at all n locations
  Clone ID: LIB24-035-Q1-E1-C11
cgccgnccggtaacggtccaaaaattcccgggtcgacccangcgtccggacaatttttatttttcatcaagtttcttagatcatcagaaatggcgtctaattcttctaacgggacgacgacgacaaagccaccacctatgccgtctcctctgcgtaattccaagttttttcagtcgaatatgaggatcttggtgaccggaggagctggattcattggttcacatctcgttgataaattgatgcaaaacgaaaagaatgaagtaatcgttgcggataattacttcacaggatcaaaagacaatctcaagaaatggattggtcatccaagatttgaagctaattcgtcatgatgtgactgaacctcttttcgtcgaggttgatcaaatctaccatttagcatgtcccgcttctccaattttctacaaatacaaccccgttaagacgatn

SEQ ID NO: 10657 - DNA, 410 bp, Arabidopsis thaliana
  unsure at all n locations
  Clone ID: LIB24-035-Q1-E1-C12
tccttatggtcgtancaanctgtttcntgaacnagatanctagagacattcacgctgcggnaccagaatggnagatanttcttcngangtacttcantccggttggagctcacgagagtggaanaattggagaanatccanagggcataccgaataatctcatgccttatatccaacaagtggcggttggaagattacctgaactcaatgtatttggacatgattatcctaccatggatggtagcgcggttagagactacatccatgtaatggatttagcagatggccatgtggctgcgttaaacaaattgttttcagactcaaagattggctgtactgcttataatcttggcactggtcaaggaacttctgtcttagaaatggtttcctccttttganaaagcttcctg

SEQ ID NO: 10658 - DNA, 486 bp, Arabidopsis thaliana
  unsure at all n locations
  Clone ID: LIB24-035-Q1-E1-C2
actgttacgcctncttgtacgnccccnaaattccaaangtcnacccnggcgtccgcccacgcgnccggtgacggaaatgctctgtatgcggtgcctcaaggtgcaacctgttggtcccatctgcacaacaccttcatgcgacggattcccaatggcaaagcactattgcagtatttgcaaactttttgatgatgaaagggccgtttaccactgtccattctgcaacctttgccgggtcggggaaggactaggaatcgattttttccattgcatgacatgtaactgttgcctagggatgaaattagtaaaccacaagtgcctcgagaagagcctcgagacaaattgccccatctgctgcgaatttcttttcacatcgagtgaancagttagagccttaccatgtggtcactacatgcactcagcttgcttccangtttgcaaaatctcnctttctcccattaaacttaaattaacttttaacgccta

SEQ ID NO: 10659 - DNA, 469 bp, Arabidopsis thaliana
  unsure at all n locations
  Clone ID: LIB24-035-Q1-E1-C5
cgtaccggtccanaaattcccgggtcnacccacgcgtccgaaaaacttccgatttcaaaaaaacaatttgaaatttgtcaaaaggaatattctgacgatcgattcttgattcgttttctcgcgtatagagagaaaaatggcgcttaatttatcgcatcagctaggagtactcgccggaactccgatcaaatccggtgaaatgacagattcatcgttgttatcaatttcancaccatcggcgagaatgatgacacctanagcaangaatcgaaactacaaggctcacggaacagatccatcaccgccgatgaagtccaattttacgtgccgacacgtgcggatctgtccgtggcgtgtaaagctttcgcggtggagaatggaatccgggaccattgaaggaacagngaaacgtttnngagaangagggattgggtggaaagnaaanaaaggangaggaaggtgttccctg

SEQ ID NO: 10660 - DNA, 478 bp, Arabidopsis thaliana
  unsure at all n locations
  Clone ID: LIB24-035-Q1-E1-C8
cgtccacgccgnacgtaacggtccatnaaattcccgggtcnacccacgcgtccgatttaatatatactatttgttgggatgctattttgtggtttactcgtagtcatgttttcaaaattttcattgttgaaactagtctcatttgtggcaattttgttgcagagacgcagatatggattcgacctgaaatcaatggcgtaccgccctgcccgagggacagtcatagctgtacaacagttggtgataacctttttgtgtttggtggtactgatgggaccaaatatctcaacgatgtgcacatccttgatacttattcacacacttggatacgtccggatattagaggggaaggaccaagggttagagaggctcatagtgcagcgcttgttgacaaacgtcttttcatatttggcggctgtgggaaatcttctgattcggatgatgaagtattctataatgacctttacatacttaatac

SEQ ID NO: 10661 - DNA, 470 bp, Arabidopsis thaliana
  unsure at all n locations
  Clone ID: LIB24-035-Q1-E1-D1
tacgnccccgaaaattccaangtcgacccaggcgtccgaattgatcaaacanatgaaagattactcgaagatcggcgataaacttgtgatgcagagacctagacgacgtttggaaggcaccgccatgggcgccaccgtgttcgatctccgtcccggcgtcggcatcggacctttctctatcggnatgccgatttgtgaagcanttgctcaaatagagcagcagcctaacatatatgatgttgttcangttaaatactacgacgaggatcctttgaaactgggatgttgttattagctttccagatcatgggtttcatcttcgatttgatccctggtctcagaggttacggcttggttgaaatatttgatgtcaagcggcttcagatgcgctacgccanttctattantggggggtccatcancnctggcaacgtttggtgngctgttntatgcacctttttgggaccaac

SEQ ID NO: 10662 - DNA, 431 bp, Arabidopsis thaliana
  unsure at all n locations
  Clone ID: LIB24-035-Q1-E1-D7
acgcgtccggttggtcaaggtgatttcccaaaagatggtcagcaggtgacttttcactacattggctacaatgagtctggaaggcgaatagatagtacttacatacaaggttctcctgctagaatccgcatgggaaccaatgcacttgttccaggatttgaaatgggaattcgtgacatgaagcccggtgggcgaagaaggattataatccctccagaattgggacctccggtgggaccttcgaccttcttcagctcgaagcaatttgaagttttcgacgtggagttgctcagtatccagaattgtgangaggaggactataataggtttctactcagatgtcacatgcagttaacttccaaatgatggtcatcactaagcttcaatgaacctgcattcttcaatcttcaatactctaaatctgcacggca

SEQ ID NO: 10663 - DNA, 414 bp, Arabidopsis thaliana
  unsure at all n locations
  Clone ID: LIB24-035-Q1-E1-E1
gtcgacccnggccgtccgcaagacgcgaagggggcatcttcgcaccgcctgaaaatctccggttcgcgtgatgttttcccgtcggcgaaagtggttaacttaaccggagcctctggtcctgagagtatagctttcgatccagcaggtgaaggtccgtacgttggtgtctcagatggtcgtatcttgaaatggcgcggtgaaccgcttggatggtcagatttcgctcacacatcgtctaacaggcaggagtgtgctcgcccatttgcaccagagttggagcatgtgtgtggaaggccattaaggttgcggttcgataagaaaaccggagatctctacatagcggatgcctactttggccttcttgttgttggtcctgctggtgggtttaaccaaacctctggttacataangctg

SEQ ID NO: 10664 - DNA, 408 bp, Arabidopsis thaliana
  unsure at all n locations
  Clone ID: LIB24-035-Q1-E1-E11
attttttttgtntgttctttaccaatatanatacaaataccctttganagctcagctttcanaactggaacananaaantgaaattaagtggaaatgangaagaggaagattcatcatagcgacgacgaagaggacgacactttcgactatcgctattcctccgtcgcggnaccaccaccttcgaaccctaaacaccaaccttcttcctccgccaaatcatcagctcccggcggcggatctggcggcttagctccttcaaaatcaacactcnacgtctccaatctcgatttctccctcancanttccgacatccacactctattctccactttcggcaaggtcgcgaagagtcactgttctcaaagattgccacacncgccaatctcgtgggcgtcgcgttcggtgcn

SEQ ID NO: 10665 - DNA, 414 bp, Arabidopsis thaliana
  unsure at all n locations
  Clone ID: LIB24-035-Q1-E1-A7
acgcgtccgcccacgcgtccgcttcgctagctagtgtactgagttcaatgaagatacatgccatattggtagtagcgttcttggtcctgatgaagaccgccgtttcccaggacaataatccgctggaacattgcagagacgtgttcgtgagtttcatgccctgcatgggcttcgtcgagggaatatttcaacaaccttctccagattgctgcagaggcgtgacccacttgaacaacgtcgtcaagtttacgtctccaggatcgaggaatangcaggatagtggagaaacagagagagtgtgtctgtgcattgagataatgggaaatgcaaatcatcttccttttcttcccgccgctattaataaccttcctctccgttgttcncttactctcagctttccnaatctccgttgat

SEQ ID NO: 10666 - DNA, 487 bp, Arabidopsis thaliana
  unsure at all n locations
  Clone ID: LIB24-034-Q1-E1-C2
cccgtnccggtccaaaattcacgggtccacccacgcgtccgcccacgcgtccgtggtgagctaactacccaacctgtgaagctacccccattctctctcaacgttttcgttttgaaatggcgaggaagaagatcagagagtatgactcaaagaggttggtgaaggaacatttcaaaaggctttctggcaaagagcttcctatcanatccgttcagattaatgaaacaactgatctaaatgagctagttgaaaaggaaccttggctctcgtcctgagaagctggtggtgaaacctgacatgttgtttggaaagcntngcaagantggtttgggntgccctgaaantagntttttgctgaaagttgccacctttgttaaaagaacgttttgggaaaaangangtannagaatgagntgggancaaaaggganccaataacaaacanttcaatagnnnggaanccatttggttcccacaacaaatgacng

SEQ ID NO: 10667 - DNA, 456 bp, Arabidopsis thaliana
  unsure at all n locations
  Clone ID: LIB24-034-Q1-E1-C4
ggtccaaaaattcacgggtcnacccacgcgtccgattagtttctctctctctcttttcctttgtctccagagccgatgataaacgacggcggttttcaccggaactgagggaaattaagctggtaaacatggcgggtgaagatgtttcaagcaatttccgagctttggtggagaacgcagaccggaaattcgcaagagttcgcgatcttccggcgtttggaaagagcacagagtcattacttccaaaaggtgttcaaagcttatatgaaactatggaactatcagcaatctcataggtcaaagctggtcgaagtccggtttaaaccgatgggaaatcggcgagatcgcgagccggattggtcagctttactttagtcaatacatgangactagtgaagctangtttcttcctgaggcttttgttttctatgaancgattttgaaaaggagctacnt

SEQ ID NO: 10668 - DNA, 448 bp, Arabidopsis thaliana
  unsure at all n locations
  Clone ID: LIB24-034-Q1-E1-C5
acaagtccanaaattcccgggtcnacccacgcntccgaaagaactttgttttgggcttcatccatcgttcaaggttcgttgaaaactatgaagaaagttgagttttttatgctccttctctgcttcatcgcagcgtcatctctaagtgtctgctgatccaccaacatgtcctgctgatttgggaggcaagtgtagtgattctgatgactggcaaggtgatttcttccctgaaatccccaagattaagtatgagggaccttcgaagtaagaacccacttgcttacaggtggtataacgctgacngantanattcttgggaagaaaatgaaggattggtttagattcagtgttgccgttttggcatactttccgtgggactgngaggtgattcatttggtgctgctactaaagtattggcctttgngaagaatggtactaaactccngtg

SEQ ID NO: 10669 - DNA, 428 bp, Arabidopsis thaliana
  unsure at all n locations
  Clone ID: LIB24-034-Q1-E1-D1
gggaaaaactacggcggagaaacacggcggaggagaggagaataaatcaccggagaacaaatggcgatttaattctcctctagctcaagtgagcttaatgggattcgtttgtttctgttgtccaggaatgttcaacgctctctccggcatgggaggcggtggtcaagtagatccaaccgctgctaacaacgctaacaccgccgtttacaccgctttcaccgttttcggccttttaggcggcgggttttacaacgtcctcggtccacggctcacgttagccgctggatgttcgacttacgtactctacgccggatctttcctctactacaancatcaccaccaccaagccttcgcgatagtcgccggngcnttaatcnggttgccggcgcgggacttctctgggccggataaaggagctgtgatgacgt

SEQ ID NO: 10670 - DNA, 488 bp, Arabidopsis thaliana
  unsure at all n locations
  Clone ID: LIB24-034-Q1-E1-D3
ccttgccggtgccggtccaaaattaacgggtcnacccacgcgtccgcaacaacacatgagcaaaaagctcaaaacatctacatactctttggaatcctcgattttttgtacgtgtaaagaagtcacacaanaaaatcttgggttgttgtaatcttcatcacactagtatgtcaacgggacaagcgccggagaagtccaatttttctcagagatgtagtctgctcagccggtacttgaangagaanggaanttttgggaatattaatatggggttggctcnaaaatccgatcttgaactcgccggaaaattcgatctcaaaggacaacacantgtgattaagaaggtagaagacctcagaaactagancgttcaagttgnttcannaaagttttctattgggtgagggctctacttctaccgaaaggacaaaagcntatntantgattctcngttgaaaccggcaaaaggtaccacccggncgttcctg

SEQ ID NO: 10671 - DNA, 425 bp, Arabidopsis thaliana
  unsure at all n locations
  Clone ID: LIB24-034-Q1-E1-D7
ctctcaccaaaataaaaaactcaatctctctctctctctctctccatcgagaaacactaaactgctataatcattacctctcttcgatttctcaaaccctatctggctctctacccatatgcttcagatccgcattaaaaaagctaagttttttgttatgtccttctttcttatttgatcagtttgttcttgtttcacgattttaacctgagattttttatatattttctccagatctgctatccgcagtcatctgttcataggaaaagatctggctttacttttagagattatctcagatncagccttttanccaattgaagtgtgcaaangtaagtacccccccacctctgttcctcacggtttttctgcaagaggaccnaccctccttgaacttcaagcggtccaancacaatggcccccag

SEQ ID NO: 10672 - DNA, 465 bp, Arabidopsis thaliana
  unsure at all n locations
  Clone ID: LIB24-034-Q1-E1-D9
atttgccgncccggtccaaacanaccgggtcgggccacgcgtccganctaagaaccaacaatgctccaacctttctcntcctcctctgttttctcgagaatcctctggactttcttggtttaagaagattcgttgttgaatcanagagaaagaaagcatccatttttctatcattgcttgcttgctatggaattgggtaaatctcgattctacttatgttgcaattgcttttctcctgttagattttccgattattctttagctggaagtgattatccagacgccatctccatcactttcaattgtantcctagancttcttctgaaggattcntcgtatttctcgattcgatgtttataaacttcaaattctcttcnaaatcttganacgaatttcncccaaaaatctctgtttcttcacaaggaagannagnnancaatgttggtggtggaatcatcttcgng

SEQ ID NO: 10673 - DNA, 496 bp, Arabidopsis thaliana
  unsure at all n locations
  Clone ID: LIB24-034-Q1-E1-E3
tgtttacgcctgnccgtaccggtccaaaattcncgggtcnacccacgcgtccgcaacccagaaattatcatcatccacagagaaacccaaaagagattgaagaagatgcattacatgggtttgtttagtagagctggaaacatatttaggcagcctagagcgttgcaggcctcaaacgctatgttacagggcaatctttcattaactccatccanaatctttgttggaggtctctcaccatctactgatgtggagctcttgaaagaanntttggcagttttggaaaaaattgttgatgccggtaagtggttttggaccgtgaaaagttggtttatcaagggggctttggtttcggtaacatatgatcgattcgaagtttgctaataacgcaatgcaagctatgcnaaataaggagctttatggggcgaatanttggaagtgcatccaagctgantcaaggaagtggtgggggggttggttggtggtttttgcaaga

SEQ ID NO: 10674 - DNA, 471 bp, Arabidopsis thaliana
  unsure at all n locations
  Clone ID: LIB24-034-Q1-E1-E9
attttgccggcccggtccnaacanaacgggtcggcccacgcgtccgacctagagagaatgtattcccgngaaagaccaggccaacctgaatgccaattctacatgaagacaggagattgcaaatttggaacagtctgcaaatttcatcatcctanagacaggcaaacccctcctcctgattgtgtcttaagctcggttggccttcctttacgcccgggagaaccactgtgcgtgttctattctcggtatgggatctgcaagtttggtccaagctgtnaatttgatcacccgatgcgagtcttcacttacaacaacaatactgcatctccttctccttcatcatctctgcatcaaganactgcaatcaccacagagctcaggaatctccctagtctcntcttctgtggaaagcaagaancccanatcantccctgaaacaacntctgctaaaagacaacatttggttgatgg

SEQ ID NO: 10675 - DNA, 484 bp, Arabidopsis thaliana
  unsure at all n locations
  Clone ID: LIB24-034-Q1-E1-G3
acgcttgcccgtaccggtccanaaattcacgggtcnacccacgcgtccgcaagacgcgtggggcaaatatttattcgtaaatataacttcagaaccctttcaacaaaactctctctgttctttctccgtggagaagttaaagatgacgatgtcggagaactcaangaaacttggnanctggtttgctactgaggaagaaccannaccacatcaacgaatgtcgtatcactgctgttgtacttttcagtactttcgtttctgtttgtggctctttctgcttcngttgtccggcangttantcancaattgctcanacagggatcatacatgatttaagtccctctgttgcacantaatccaangtttggttcaaatcatganntttgggaggaatganttggngccatcttcaancnggaaagntgcagaatctcatgggtcgaanaagggactatgatggtttgcgcaaattttcggnatcttc

SEQ ID NO: 10676 - DNA, 410 bp, Arabidopsis thaliana
  unsure at all n locations
  Clone ID: LIB24-035-Q1-E1-A1
ccgactttttgcttctcccagaggctaatcatggacgctgtggcggcgaatttgtttcaatctccttccttactgcgtcaaacttccgaaaggttgatattttcgacgcccaactgtcctggcttcatgcgaattagctccggacctcaatttcgtctcaagacaaaactcttctcttaaattctcgagaccatttcaaagcggaacaacttgtgttaaatctcggagaagctttgtggttaaagcttcagcttctggtgatgcttcaacagaatcaatcgcgccgcttcagttgaagtctcctgtgggacagtttctgtcacaagatattangtgagccatcctcatcttgttccagcagctgttgaacagcagcttgnaacaagctcnaaattnattcgagacgctga

SEQ ID NO: 10677 - DNA, 421 bp, Arabidopsis thaliana
  unsure at all n locations
  Clone ID: LIB24-035-Q1-E1-A11
angcgtccgnncaaagccacannnnnnnnnnnnnnnnnnnnnnnnnnnnnnnnnnnnnnnnnnnnnnnnnnnnnnnnnnnnnnnnnatcagcattttcttcagtgtctctctactctctctcagatttgcatttgtttttttttggtttggttatggagcgtgcaaggagacttgcttacagagggatcgtgaaacgtctcgtcaacgagacaaaacgccaccgtaacggcgaatcctctcttcttccgacgacgactgttactccctcaaggtatgtctcctccgtctcctcctttctccatcgccgtcgtgatgtctctggatcggcttttaccacctccggtagaaatcaacaccagacacgatcgatctccgtcgatgcgttgaagccaagcgacactttcccgcgccggnacaact

SEQ ID NO: 10678 - DNA, 440 bp, Arabidopsis thaliana
  unsure at all n locations
  Clone ID: LIB24-035-Q1-E1-A3
caggcgtccgantggaaaaaccctaattcctaagtgttgcgaatcacttttcattgcagctttgaacttcagtctgtgaatttccaacagcaatgacaactccagcaaaaaagagactgatgtgggatttcaagagactgcagaaagatcctcctgtgggaataagtggagctccacaagataacaatatcatgcattggaatgctctcatctttggacctgaggacactccatgggatggaggtactttcaagttgactcttcacttcaccgaggattatccgaacaaacccccgattgttcggtttgtttcacggatgtttcatccaaacatttatgctgatggaaagcatttgcttggagatcttgcaaaaccaagtggagccccatctacgacgtngctgcaggttctcacatcaattcagtcgttgcgctgtgac

SEQ ID NO: 10679 - DNA, 426 bp, Arabidopsis thaliana
  unsure at all n locations
  Clone ID: LIB24-035-Q1-E1-A6
cttctcaatctcagaaacctgntaataactcatcagactgaagaagcanaagctangtcnggaccagnncaaccttgcttgtatgtcanagtgagtatggaaggtgctccttacttgaggaaaatcgatctcaagacttacaaaagctaccttgagctctcttcngctcttganaagatgttcagttgcttcaccattggtcagtttggttctcatggagggtgtggcagagatgggttaaacnagagtcncttgactgatctcttgcgtggttctgagtatgttgtaacctatgaagataaaggacagtgactggatgctggtcngnagatgtcccttgggaaatgtttatatgctcctgcaagaagctgagaatcatgaanagctctgagggtagcggcttaagctccaangggtgtgggacaa

SEQ ID NO: 10680 - DNA, 421 bp, Arabidopsis thaliana
  unsure at all n locations
  Clone ID: LIB24-034-Q1-E1-B9
aattcgcnggccacgcatccgcccaaacgtccgccggngtggtggcaattggtgacaacttcgacttggtaccctgattactggatcagtcagcancagcaaggcgcggatggnttctatgacaacngagagaatganaatggtggaggtcatatcgatgtagctgatcttcttccagaatcatttgattttgatgatatggaagatttctttgacactgatgctgctgagtttgatcaaggattcgatggnagaatgtattaccaagcaccttccgaatttggctttggnaagaatggtgatgatggttantgagatcaantggcaaccnngagcnccganatcgattgtggaaccagctaantatgcggaaaagccagcgangatgggggaaaccacgagggtttggcngccgctccga

SEQ ID NO: 10681 - DNA, 405 bp, Arabidopsis thaliana
  unsure at all n locations
  Clone ID: LIB24-033-Q1-E1-F6
acgcgtccgattctcttcgtttaatgctcttcttcttctactctctttgtgggtttctcttgtaataatcacaaaccaaaaaaaaaaatggttaactcatgcgagaacaaaatcttcgttaaacccacttcaacgacgattcttcaagatgaaacaagaagtagaaaattcggacaagagatgaagagggagaagagaagagtgttgcgtgtgattaaccagaatctcgctggtgcaagagtttatccttgtgttgtcaacaagagaggaagcttattgtctaataagcaagaagaagaagaaggatgtcaaaagaagaagtttgattctttgcgtccttcagttacaagatctgggagttgaggaagagactancaagaagctgaagccctcaagttccaagng

SEQ ID NO: 10682 - DNA, 453 bp, Arabidopsis thaliana
  unsure at all n locations
  Clone ID: LIB24-033-Q1-E1-F9
tgtttatcctgnccgcaccggtccaaaaatcccgggtcnacccacgcgtccgtcttgctctccctcttcaagtcggctcctttattgctacagtgaaaaagtttcgagctttagaaacaatggcggctttccccaacctcaactctggctccggattgaagaagctcgatgagcatcttctcactcgcagttacatcactgggtaccaagcttcaaaggatgatatcactgtgtttacangctctttcaaagcccccaacttcaaagtttgtcaatgtatctcgttggttcaaccacatcgatgccctcttgaggatctctggtgtcnctgcngaaggaaagtgngtgtcattgttgaaggggtcatcacctancacagaagaggctgttgctantccccctgcnagntgattctaaangatnactngctgctgaagcaagaagatgangact

SEQ ID NO: 10683 - DNA, 445 bp, Arabidopsis thaliana
  unsure at all n locations
  Clone ID: LIB24-033-Q1-E1-G10
aaatccccgggccanccaanccttcggggnannnccccntcggacttcnanatttncantngtccctngncanatnaatnccanaangcaagggtttgcttttgtatacatggaagatgaaagggatgcggaagatgccatccgagcacttgaccgctttgaatttgggcgtaagggacgcagacttcgtgttgaatggacaaagagtgaacgtggaggtgataaaagatctggtggtggttcaaggagatcctcatccagcatgagaccttccaagactctctttgtgattaactttgatgcggataatactaggacccgggatctagagaaacactttgagccgtatggaaagatcgtaaacgttaggatcaggaggaattttgcatttatccaagtacgaggcacaaagaaggatgccaccaagagcattggatgcttcaaa

SEQ ID NO: 10684 - DNA, 389 bp, Arabidopsis thaliana
  Clone ID: LIB24-033-Q1-E1-G12
caactttgatcaattacactgagaggttggagcaggatctcattgataaccctccgcctactgaggctgatgttgaagctgcgaggctcattgtcattgagagaggtaatgttgtagcggaactgaaagctgccaaagcaagcaaggaagcgatcactgctgctgttgctgaacttaaaatagcaaaggagacttttgctcatattgatgagaggtcgaggcttagacctggactacctaagaaagatggaaacattgattattccaaggatttctttgggtcgtcaagctttcttgacagtttccggtcaattacaagtggagacctatgcttgtgctcctagcaatgttgtatacatttggcccgactttccgggcagagaactcct

SEQ ID NO: 10685 - DNA, 462 bp, Arabidopsis thaliana
  unsure at all n locations
  Clone ID: LIB24-033-Q1-E1-G4
ggtccagaaatnaacgggtcnacccacgcgtccgcagcattcctattggattcccaccttcggcaaacggnatctcagcaagtaagcctgtaagacttcangagcatggccaccattttganaattcagatatggggatccanagcatgccaaatctccatcctcattctttttcggagtacgtcnacaactttgcaaatggtagtccatatacgtcctctgcattttctgaantggtcagtgatggctcaaangcnaatgaaggctttatgatncanaatgttcgtggagtggaaggctttagtggaggcggtatangatctcccatgcatcaaagctctcgccgccctantaatttatggagcanctctaacantcancaacaaaanccgtcaagtggcatgatgtggcctagntcnccatctcagnatcaacagcattcctaagcaacgccnactgtta

SEQ ID NO: 10686 - DNA, 404 bp, Arabidopsis thaliana
  unsure at all n locations
  Clone ID: LIB24-033-Q1-E1-G5
acgcgtccgcccacgcgtccgcccacgcgtccgcccacgcgtccggaaggtttgggtttgagtagaaactcagatgaacgttacttggagctaggtcaattagagaatgaaaacaatagttttgctaagcatctagaatctgcaaatacgatgatctcatttatatggtgggttattggattttattgggtatcttctggtggtcaagagttagcacaaggatccccacagctttattggttgtgtatagtctttcttggtttcgatgtgttctttgttgttttctgcgttgcattggcttgtgttatcggcattgctgtttgctgctgcttgccttgcatcattgcagttctatacgccgtagcagaacangaanggagcttccaaaagaaagncattgacca

SEQ ID NO: 10687 - DNA, 439 bp, Arabidopsis thaliana
  unsure at all n locations
  Clone ID: LIB24-033-Q1-E1-G7
acgcgtccgggtctcgaaccttcctcttcgtttgcatcaggaaagagcgagaatggcgggaggaggaaactttattgcgatgagtgatctcatacgttgcgaacgagttcatagttaatggtttggcaaacagccatgctttccagagatttgctgtgaggacttcaaagagaatagaaaacctctctaaaatggctgcagagaacagggagaaagtcgctcagcaaatggaagaatttgccaagaacattgactccacgaagaaaccctgatcattctagtgtggaatcttaaaacctcagtaaatcacatgggtcagctcaagtagggaggtctgtttatctttgtataaagaatgttaaaaagtaataagcttgtggattaaacaaccaagtgatcttttggggctgtttcccctctcntaaaaccaaatcctttc

SEQ ID NO: 10688 - DNA, 440 bp, Arabidopsis thaliana
  unsure at all n locations
  Clone ID: LIB24-033-Q1-E1-H1
acgcgtccggttgctagacttgacagctggaagattttagtgtcaatgccatctggagaagtcgtagatcctccttattctttaaaacccgctgaagaaaacgaacttgatcagggtttggacgcgggaattgatgcgcctccacttgcaaaggcttatgaaggtgttttctacaattacttaagcataggtatggatgctcaagttgcatatggcttccaccatcttcgcaacactaaaccatatcttgctcaaggccctatttcaaataagattatatattcaagttttggttgcagtcagggttggttttgcacgccttgtgtcaacgatccaaggtttaagggggacttangaacataatgaaaattcacatcaaaaaggttaactgctcccagtgggaaaagatngcagtcccgaaaaaattgagattaatgggc

SEQ ID NO: 10689 - DNA, 428 bp, Arabidopsis thaliana
  unsure at all n locations
  Clone ID: LIB24-033-Q1-E1-H3
tatctttcaactcaaaatctttttcatttctctgtatcctcctcatatttttattcttttgtaatgacaggttgctttagcttgtctgaagcattagaacgaacttacaaatccgggttcaaaagatccggtctacgacccgtaaccatcgacttgaaagatggaaccgtagtcaacttttgggtatccaaaaccaaacccgaatccaaacccaaacctaatctcctcctcatccacggcctcggagctactgccatctggcaatggtacgacgtagctcgccgtctctcacgttatttcaacctctacatccccgacctagtcttcttcggcggatcttccacgaccccgacccgaaagatccgatattttccaaagcccaaacactcaatgcggggcttaaaaagcccaatccgtcaaaaagnttt

SEQ ID NO: 10690 - DNA, 413 bp, Arabidopsis thaliana
  unsure at all n locations
  Clone ID: LIB24-033-Q1-E1-H5
aaattgccttcactgagaacgtggaccagcgatttgaagcccttggatggcatgttatctgggtgaagaatggaaacactgggtatgacgagatccgtgctgccattaaggaagctaaaactgttactgacaagcctactttgatcaaggtcactactaccattggttatgggtctcccaacaaggcgaactcatacagtgtccatggagctgcacttggcgagaaggaagttgaggctaccagaaataaccttggatggccgtatgagccgttccaggtacctgacgatgtaaaaagccactggagtcgtcatacacctgaaggagctactcttgaatctgactggagtgcaaagtttgcaagcatatgaaaaagaantacccagaggaaacttccgagttgaaaacnaatt

SEQ ID NO: 10691 - DNA, 445 bp, Arabidopsis thaliana
  unsure at all n locations
  Clone ID: LIB24-033-Q1-E1-H8
tcgacccacgcgtnngaaggaagtctttactcagagaaccaaaagaaaaataaagagaaaagaacccaaaanaaaaaaagccattgtaaattcagaataaatggaagaacatctaaatccattagcagtgactcatcttcttcaacacacactaagaagcttatgcatccatgagaactctcaatgggtttatgctgttttctggaggatcttgcctagaaactatcctcctcccaaatgggatggtcaaggagcttatgatagatcaagagggaacaggagaaactggatcttggtttgggaagatggtttttgcaactttgcagcttctgccgcggaaatgagctccggagaaggtagtggtggcggtgggtggctcagcggcttatggaaataagtgattttcaacaataccaagggcttcaacctgaattggtcctcaaag

SEQ ID NO: 10692 - DNA, 437 bp, Arabidopsis thaliana
  unsure at all n locations
  Clone ID: LIB24-034-Q1-E1-A11
gggtcangcgtccgatctaaaaacctgtctgatttgctccgtcgcctaaaaagtctaaaaccctaagtgtctccgcctcgtagctttacccgattcaacgaagagtgaattcgcgtgagctcaagcagtatcgaaatctaccaatcatggcgagtcaaacaccgaatctcgagtgtcggatgtacgaggcgaaatacccagaggtggatatggcggtgatgatccaggtgaagaacattgccgatatgggagcttatgtttctctcctcgagtacaacaacatcgaaggcatgatccttttctccgagctctctcgtcgtcggattcgaagtgttagcagtttgattaaggtcggaagaattgagcctgtcatgggttctccgtgttgacaaagagaaaggttacattgatctgagcaaacgttagagtcagcgaag

SEQ ID NO: 10693 - DNA, 487 bp, Arabidopsis thaliana
  unsure at all n locations
  Clone ID: LIB24-034-Q1-E1-A3
gggncccgtccataactatanggnccanggccgcgtccgnactttaangcgatttctatcacttcacgcgcattgagagcgagagagagagagacccaagcaagagctcaaattanggttatttttccgatttgagagatccattaacaatggcgtggtcntcggaaacgccgtcgtattgcggctggaatgagcgacatgtgaagaacacnaaagaaaagatggaggttcattattatctcgagaggaaagatggaattgcagatctanctgttattgggangttgaaagaantctaaaacgcatgtcctttagatacgctttgaaagaanaatcgcnctgtcttgaaaanncttaattctaaaggatgatgttncccctttggctcgattctaatgtttccgggtggagatnaccncatgtagcaagatggtaccaagctacnngttatgactgaaaaaagatgctggaggggttcaantatgaa

SEQ ID NO: 10694 - DNA, 488 bp, Arabidopsis thaliana
  unsure at all n locations
  Clone ID: LIB24-034-Q1-E1-B2
agctgnccgtgccggtccanaaattcacgggtcnacncacgcgtccgantagattagacactaaactaagcaaaaacacagagataagttaaaacagaaacaatgtccattttcatcatcttcctccttcttctctctacttctgtatccgtctccggccaaaaaaagcgaagtgtctaccaggttctcgaaaactacaccttaccacgaggaatattaccagaaggtgtccacgactacgacctaaaccgaagaactggcgttttcaaagtccgtttcaacaccacgtgtcagttctccatagactcgtacaaggtcaaatacanacccgtaatctcncggcatcataacnagagggacgggtcataaggttgataggcgtaaggcgtcaaaggttcntntcttttgggatcaacatctcccgagggtgtctccgtgacggcgacgacgttcnagntcttccgttgggtgctgcttcgggaaggagt

SEQ ID NO: 10695 - DNA, 419 bp, Arabidopsis thaliana
  unsure at all n locations
  Clone ID: LIB24-033-Q1-E1-F5
ggtttcaatgaggttgccacagctgaagggctcgccgaagcattgatgatgttttctcctccttcaggccaagctcaaccaagtaacgatctgaaaagacactgtatcctaatcacagccagcaatcctcacatattgccaacacctgtatatcgtccacgattgcaaaatgtggaacggaatgagaatggtgatgcgcaagctgagagtcnnnnnnnnnnnnnnnnnnnnnnnnnnnnnnnnnnnnnnnnnnnnnnnnnnnnnnnnnnnnnnnnnnnnnnnnnnnnnnnnnnnnnnnnnngagcactatacaatgcgggaaagcccaatcaacaaagtgcggacttgtcaattgacacggctaangaacacattctatccttgtcctgatctcgggagaantttgtggaagcagtgcc

SEQ ID NO: 10696 - DNA, 470 bp, Arabidopsis thaliana
  unsure at all n locations
  Clone ID: LIB24-031-Q1-E1-G1
gtaccaagtccanaaattcccgggtcnacccacgcgtccgctcaacgagagatcgtgatcgtacttatatacacacacgcacacttgcaaagcttgggaggaagaagtgatggacaagtatgaggttgtgaaggatttgggagctggaaattttggtgtggctcgtcttcttagacacaaagagaccaaagagctcgttgctatgaaatacattgagagaggtcgcaagattgatgagaatgtggcaagagagattatcaatcatagatcacttaggcatcctaatatcatcagattcaaggaggtgattctgactccaactcatcttgcaattgtaatggagtatgcttctggaggagagctctttgaaagaatctgtaatgctggtagattcagtgaacctgaggctagatacttctttcagcagctgatttgtggcgtggattactgtcattcactgcaaatatgtc

SEQ ID NO: 10697 - DNA, 489 bp, Arabidopsis thaliana
  unsure at all n locations
  Clone ID: LIB24-031-Q1-E1-G2
ggnccggtccaaaaataaacgggtcnagcncgcgtccgcataaaaagaaacagagagcattatcaattantaacaattacacannnnnnnnnnnnnnnnnnnnnnnnnnnnnnnnnnnnnnnnnnnnnnnnnnnnngctttggccacgacggcaccgttagctccggtcaccagtcagcgaaaagtacggaacgatttggaggaaacattaccaaaaccatacatggcaagagcattagcagctccagatacagagcatccgaatggnacagaaggtcacgatagcaaaggnatgagtgttatgcaacaacatgttgctttcttcgaccaaacacgacgatggaatcgtctatccntggggagactataagggatttcgtgaccttgggttcaacccaanttccctccanctttttggacccttactccataaaacttagcgttcanctacggtnacacttcccnagtttgggtgcccatcaaccatta

SEQ ID NO: 10698 - DNA, 489 bp, Arabidopsis thaliana
  unsure at all n locations
  Clone ID: LIB24-031-Q1-E1-G6
nggccggtaccaaatccaaaattcccgggtcgacccacgcgtccgcccacgcgtccgctttttggattttggtgaaaaagtttaatttgtctctttctctatttatctccggcgtcaatttcacggcggctacacgacggttatcgatgtcattgactgtaccggagttcgatttcagattgacgccacagtttggtttctcacagtcaccgatcggggagcgtaatttcgcggatgttgataatctggagaactgtattaagtatttgaatcagagcttagtcacctctgggattctctgcttcgcttgacctcttcgctaccgattctgtttcgantgctagaacttgcaaattgcgtatacgcnttgantcaacaagangcaacganaatgtgggaattaagagaatccggctaatgatnaagaagacaacgaacttttaaccgataatggcgagactccaagccaaaagttgnaaaggttgaaaa

SEQ ID NO: 10699 - DNA, 452 bp, Arabidopsis thaliana
  unsure at all n locations
  Clone ID: LIB24-031-Q1-E1-H4
cgtccgaaagtcnagtcaaaagcttattttatcaannnnnnnnnnnnnnnnnnnnnnnnnnnnnnnnnnnnnnnnnnnnnnnnnnnnnnnnnnnnnnnnnnnatanatttggtgaccacgaacaacttatctcttgagtggttcaacctctatctctctctctttctgccatgaaaatgcaaaggccaaatgtaatagttagaganggagaaaccaagaactgaaagaccatgacttccaacagaagcaacctcctgttctcattagtcctcttccacnttctttttgtccccacacaactccaagctcttagcnctganggtgttcttccgcttactttcaaaatactcgatcntcactgaccctctcgctggttctacgcaantggggactatgatgatgncagaccaatgcttgtgggacaggtgtcacatgttcaaganccttgggga

SEQ ID NO: 10700 - DNA, 398 bp, Arabidopsis thaliana
  unsure at all n locations
  Clone ID: LIB24-031-Q1-E1-H5
tatataaattatatattttgctttggtttttttttttcaccggatcgatcgagaagagagaaaagttcatcttcttcttgttctgattgtttgacaagttttacgacaatggcggtttacggcgagaagaagcattggtggctccgcaacaagaagatcgttgacaaatacatgaaagaagcaaanagtttaatagcgagtcaagatccaaacgangtgaaatcaagctcnaaatcttctggaatcngcactctcngtatctcctcgttacnaactcgctctcgaactcaaagccagatcccttcntnanctccgtcgagacagagacgtcgccganangcttcaggattacattcntagtccgaanattagccggggggcggngaaagatccggggt

SEQ ID NO: 10701 - DNA, 466 bp, Arabidopsis thaliana
  unsure at all n locations
  Clone ID: LIB24-031-Q1-E1-H7
acgttgccctgccggtacnatccaaaattcccnggtcnacccacgcntccggaaagacttcgccggaaagatagagaagttgtcggaggagctactggatctgctgtgcgagaatctcggtttagagaagggttatttaaaaaaggtgttttacgggtcgaaaagaccgacttttggaaccaaagtcagcaattatccaccttgtcctaatccggacctagtcaagggtctccgagcccacaccgacgccggcggcatcatcctcctcttccaagacgacaaagtcagtggacttcagcttcttaaagacggcgagtgggtcgatgttcctccggttaagcattcaatcgtcgttaatctcggcgatcaacttgacgtgataaccaatgggaagtacaagagtgtggaacatagagtgctatctcatacagacggagaacgnaanaatgtcgatcgcatcattcta

SEQ ID NO: 10702 - DNA, 469 bp, Arabidopsis thaliana
  unsure at all n locations
  Clone ID: LIB24-032-Q1-E1-A3
gtttgccgccgtaccggaaccaanattcgnnggtccacgcntccgcncaancgtccgaccgatctatcaagcaagtggttcctctctctctctacctctcgtttttggccaacgtcgtcgtcttcacgatccacgacgattcaagttcttgagttccggcgattatcggtctctcacttctggttccgttgaacccctcatttctcttctcgcccgtgctctcaaattccgatatttgcccctgtgattcgaaaccctaatttcgcctaancaatctggaaaatcnctcaattcgaagactttagcagcgcaaagatactcnatccgggtaataagatcgaagaaaccatcaatttcttaccaaagtcgtgantcntggatctcgtcnttgtttgatggacacaattagggtttccaagggangttcctgggattctcgaaatcgacgcacagtcgccccanggggtcc

SEQ ID NO: 10703 - DNA, 479 bp, Arabidopsis thaliana
  unsure at all n locations
  Clone ID: LIB24-032-Q1-E1-A4
ctgtttatcctgcccgccacgggtccaaaaatcccgggtcnacccacgcgtccgcagangcgtggggtccttttacntcctttttcaagattctaagcanacaaattgtgtcactaagcangccatcatggctatagtgatcctgtggtttcttgtttcctcgtatctttgtctcatcggtcatatgattgccgaggctgcaagataaggtgcctccangangaaggaagcacactccagtgggattggaagagaaagtaanctcatgangaatgaaaaacactccactgagattggaanagaaagtgcgtccatgaggaatanagcacgctcgagtgagattggaagaganagtaagctcatgangaatganacacactccagtgagattggaaanagtatccganacgtaaccggatttaaaggtgaactcacaactggtggctaccggcngtgtgaggcccggggatatgagtggt

SEQ ID NO: 10704 - DNA, 412 bp, Arabidopsis thaliana
  unsure at all n locations
  Clone ID: LIB24-032-Q1-E1-A7
acgcgtccgatcccaaactcgatgacaatcctcgatgagcttctcccgatatcaatcgaaatggcgaagaggaacttaaccgggatctacaatttcactaacccgggtgttgtgagccacaacgagatcttggagatgtacagagactacattgacccgagttttacttggaagaacttcacattggaggaacangctaaagtgattgtggcgccaaggagtaacaatgagcttgatgcaactaagttgaagactgagttccctgagttgatgtctatcaaagagtctctgatcaaggttcgtgtttgagcccaacaagaagactgaagttaaagcttgaaatgtggttttgtaaggtaaacggttcttaaccccaannaancagatcaaatgaaagacagnaaaagtttgg

SEQ ID NO: 10705 - DNA, 458 bp, Arabidopsis thaliana
  unsure at all n locations
  Clone ID: LIB24-032-Q1-E1-B4
tgtttattctgnccgccacggtccgaaacaatcccgggntnntctctctatcccntgcacatgatcnagattcggttgtgatcggagctgccatgngaacgtatcatcggcggcaagtacaagctcggacggaagattggcggtggttcctttggagagattttcctangctacgcacatcgataccttcganattgtagctgttaagatcgagaacagtanaacaaaacatcctcagcttctctatgaagctaagctatatagaactcttgaaggaggaagtggaattccgcgcataagatggtttggagttganggaacagagaatgctttagtgatggatttgctcggtccaagtctcgaagatcttttcgtctactgtgggagaaaattttcaccaaagacggtcttgatgttggctgatcaaatgctaactagaatagaagtatgtncattcc
